United States Patent Application Publication US 2005/0228172 A9 - sequence listing, part 60

SEQ ID NO: 255575 - DNA, 589 bp, Homo sapiens
tgggcatacatgaaaatacctcatagatgtacacacccactcttggaactttcctctgattatttttccattttctttaaacaagagatatagagcagatgtttcattatcaatgcaaataggatgttgaaaggcatttatcttcttttaataaccatatccccaatctattgaacactctttctattgttcagccctccacagaggttcrtggattaaaacctctttcttattatgcttattgcattgggtcatctggagtcatggattcacaagatagtcttgacctttacctgggtcttagatgttttagacaaggcatgataactttgcatgaactttatttagacactgtgacctacactgaagtgaagaagtacctctaaatggcttcagcaatgccctcattttgtgcctgcgtggatacctgtagtttattgccttcaagcagtctctttgagaaaagaaacaaaactccataattttagccccttttgcagagtgttagcagagaagttctcttccttaataaatttcattctatatgcagatataatcaatatcttatatgctttaaaaatagttgtaa

SEQ ID NO: 255576 - DNA, 589 bp, Homo sapiens
tgggcatacatgaaaatacctcatagatgtacacacccactcttggaactttcctctgattatttttccattttctttaaacaagagatatagagcagatgtttcattatcaatgcaaataggatgttgaaaggcatttatcttcttttaataaccatatccccaatctattgaacactctttctattgttcagccctccacagaggttcgtggattaaaacctctttcttattatgcttattgcattgggtcatctggagtcatggattcacaagatagtcttgacctttacctgggtcttagatgttttagacaaggcatgataactttgcatgaactttatttagacactgtgacctacactgaagtgaagaagtacctctaaatggcttcagcaatgccctcattttgtgcctgcgtggatacctgtagtttattgccttcaagcagtytctttgagaaaagaaacaaaactccataattttagccccttttgcagagtgttagcagagaagttctcttccttaataaatttcattctatatgcagatataatcaatatcttatatgctttaaaaatagttgtaa

SEQ ID NO: 255577 - DNA, 606 bp, Homo sapiens
aatatactatatgaatgcatatccagcctggcctgagagaaggaaagactgaaactgtagaagcagcaggaggtattctttagaagttggagactttggccagccgcggtggctcattcctgtaatcccagcactttgagaggccgaggtgggtggatcatgaggtcaggagatcgagaccatcctggctaacactgtgaaaccctgtctctactaaaaatacaaaaaattagctgggggtggtggcatgtgcctgtaatcccagctacttggaaggctgaggcaggagaatcgcttgaacctgggaggcagaggttttrgtgagctgagatcgcgccactgcactccagcctgggtgacagagcgagactctgtctcaaaaacaaacaaaaacaaacaaagaaagaatttagatacctttatcatccaggggctttaattcctaccattatacttctttgacgctggttacttagggatatatgcatctgtagctgtattggtagctgatgcaaaaggttatctccataaagtttcaggcagaactaaaggatggataaacatgctccatagtgttctactgatatgaagcgctgagcaatggaa

SEQ ID NO: 255578 - DNA, 512 bp, Homo sapiens
gcatcagtagtaccctggtggcatacttcagcagcaaagctgctgattatggcattggtaatagcaagagatattactttggctactgaagcatgaaaygaaaaaacaaataagttttgtaaaattgttaaaagtcccagtcttctgagaatcactccctggggagtcctggaagtgcctagaaaaaaaactgaagaattgtgtgatgagagggcacagaactagaggtgtgtgtgtgtgtgtgtgtgtgtgtgtgtttaaaatgtatgactctatttgtccagtttaactgatgtatcttagaaaccatatattagctgtaggaagagctatcatctgaacattatataaatgtttaggatgacaatattttctctagttgttgtagttatctcttactgtataaatctatttttgcatgcagcagagtgagaggtggagagaagtaataggtaattaaaatggaatacggtaagtgctatggtaggggggaatcagtgtgctacagaaca

SEQ ID NO: 255579 - DNA, 567 bp, Homo sapiens
tgggcttagaaagaaaaaatagtttcttgggctgggcccaggtcctgctgctttgtgcagtctcaggatttggtgccctgcatctcagccatggctaaaaggggccaccatacagctcaggctgttgcttcagaaggtgcaagcctcaaaccttggtgcttacatgtggtgttgggcctgtgggtgcacagacatcaagaattgaggtttgggaacctctgcctagatttcagaggatgtatggaaaggcctggawgtccaggcagaagtttgcttcagtggcagggctctcatggagaacctctgctaggacagtgcagaagggaactgtggggttggagccctcacacagagtccccactggggcactgccttgtggagctgtgaaaagaggccgccatcctacaaaccccggaatggtagatccactgacagcttgcaccatgcacctggaaaagctgtggacattaaatgtcagcccatgaaagcagccaggagtggggccataccctgcaaagccacagaggcagagctacccaaggccatgagagcccaccttttgcatca

SEQ ID NO: 255580 - DNA, 588 bp, Homo sapiens
ttgtgaatcctttagtagaaacatctaattgtgagtgtacaacatgtacatcttgaaacgtgtacgtagctcagcctgaaagagaaactgttctatgcttatttcttccccaagrtcaagagaagatcaaaagttaacatgtcttaggaagccctttgattcattttgatgtccattttcatgatcaacttttagtgacatgcagctgaatgataattaaagactcttagcatctctttagggaggctttcaaatgtcaaatgcccaggcacagagtatgcataaaatgtcttctccaaagatcacagtaaaatgtaaagataataaattgaacatttgctactgagggtcctactgagacttcaggacagctattaaaattagtttccccaataatttacatattaataccatgaaatattcactatattaactttttgattaaattttggtcacctatgataatttgttttaataattttaggaatagcaatcccttaaaatgatcaattgtgaacagcatttaacatttaagtgacagccttctatctcctgaactatttctcagtaatttacttaatttaaaaa

SEQ ID NO: 255581 - DNA, 598 bp, Homo sapiens
ttcaatcctacttgtcaatttttgtttttgttacaaatgcttttgaggacttagtcataaattttttctcaaggcctatgtccagaattgtatttcctaaatgttcttctagattttcatagtttgaggycttacatttaaaactttaatctatcttttttttttttttttgtatatggtgaaaagtagaggtccagttttaatcttctgcatacaggtagccagctgtcccaacaccatttattgaataggcagtcctttccttattgcttttttaaatcaactttgttgaagagcagatggctgtcggtgtgtggctttatttctcaattatcttttctgttccattagtctatgtgtctgtttttatagtggtactatgctgttttaattactgtagtcttacagtatagtttgaaatgaggtattgcaatgctttggctttgttctttttgcttagaattgctttgcttatttgggctcttgtttggttccatatgcattttagaatttttttttctaattttgtgaaaaatgactttggtgttttgataggaatagcattcagtgtccattgctttgggcagtttaggcattt

SEQ ID NO: 255582 - DNA, 598 bp, Homo sapiens
ttcaatcctacttgtcaatttttgtttttgttacaaatgcttttgaggacttagtcataaattttttctcaaggcctatgtccagaattgtatttcctaaatgttcttctagattttcatagtttgaggccttacatttaaaactttaatctatcttttttttttttttttgtatatggkgaaaagtagaggtccagttttaatcttctgcatacaggtagccagctgtcccaacaccatttattgaataggcagtcctttccttattgcttttttaaatcaactttgttgaagagcagatggctgtcggtgtgtggctttatttctcaattatcttttctgttccattagtctatgtgtctgtttttatagtggtactatgctgttttaattactgtagtcttacagtatagtttgaaatgaggtattgcaatgctttggctttgttctttttgcttagaattgctttgcttatttgggctcttgtttggttccatatgcattttagaatttttttttctaattttgtgaaaaatgactttggtgttttgataggaatagcattcagtgtccattgctttgggcagtttaggcattt

SEQ ID NO: 255583 - DNA, 598 bp, Homo sapiens
ttcaatcctacttgtcaatttttgtttttgttacaaatgcttttgaggacttagtcataaattttttctcaaggcctatgtccagaattgtatttcctaaatgttcttctagattttcatagtttgaggccttacatttaaaactttaatctatcttttttttttttttttgtatatggtgaaaagtagaggtccagttttaatcttctgcatacaggtagccagctgtcccaacaccatttattgaataggcagtcctttccttattgcttttttaaatcaactttgttgaagagcagatggctgtcggtgtgtggctttatttctcaattatcttttctgttccattagtctatgtgtctgtttttatagtggtactatgctgttttaattactgtagtcttacagtatagtttgaaatgaggtattgcaatgctttggctttgttctttttgcttaraattgctttgcttatttgggctcttgtttggttccatatgcattttagaatttttttttctaattttgtgaaaaatgactttggtgttttgataggaatagcattcagtgtccattgctttgggcagtttaggcattt

SEQ ID NO: 255584 - DNA, 547 bp, Homo sapiens
tggtgcttatgggttagacctcggtgtggccagcatggcaggagatatatttgatccttgtttactggaagaagctctctgttgcctcaggcagtggcctaatttgtggagtgcacagagatctgctcaatccactcagccctgggagtggggcacagggaaagaatggcaggcccagactgtgaagtctgcctactggtcccctgatggtgggcacaagcaccagtgctgagaaagaatccagtgggcagccactaaatacttagaggtgtgactaggcatggagctgggaaaccttttcagtcccaagttctcaaatggaaggaagggggcagctggaacttccaatccaggagagtaggtgctctagawgcctggagagctgccagagcaaactgtagagggcctcctgcaacaggatctctgcacataaagggtgagcttgctcagtcaggctgcaaattcaggtgagagggggttctgaatacctggagatgtgcctaggcatggggtggagagggccctgcttcactgtagtctctgcaaa

SEQ ID NO: 255585 - DNA, 642 bp, Homo sapiens
acagttaatggaggtgtcactactgctgtgaacagatcagttgccatgggttctttctaatgggttcaaagctcagtgttctttactaatttctcattttcattcccactgtcatagttcaggcccttattacctcctgtctggactaccagctggtctgattgactgtggtgtcacatatctcaaaatcacgtacagaacttaaggctctcaaagtttcctttttatcatatcactttcctgataaaaagtctccagcaggtccccatcacctactgaatgaagaacagactttgtagcctggcatctaacagtctcctgaactggcaataacccatctgtcctgccttatgctctttgataactcacatgaatcctttatccatgcctgctratagctgctagtggcttagttttccttatgccatttccttttcttttgcttttctgtccaatgaaataaacatatactcctcttctatttcttccatcagcattctatgtatgcattcttttatgcccattacaaatccctctgtcttcaataaagctcttggatcagttcaactataagagacttttcatcctctgaactctatgagtggacttacgatatctcttctatatagctataattttgtc

SEQ ID NO: 255586 - DNA, 450 bp, Homo sapiens
aaagtgcaagttaaatgcttgttgtctgtagcttcccttccaatatatattttttaatttttcatgtgctartgaagctccataatgactggtagaagatgccctggatctgctatacagaaacaaagaacaagtatcaaactggatgttaaacagaaattgtatgaccttcatgtttccttccaggtaatgatcatgaaaacagagggtaaaggttggcagacaattaagtgccactgaagtcctttgacattaagcaggacatcataaacatattttcagtttggagggatttgactaacaattctgtatctggaacaaatgatagctatagatatgatacaactccaggagactggaagaaaatgtgaaagctattggcattgtaggatgctgggactgcgactttgtaagaactctgttataatgatccgtaaaggtgcttttcca

SEQ ID NO: 255587 - DNA, 573 bp, Homo sapiens
tgtgactaattctgtttccagagtcagagaagtcttcaggaggaagtgattttgaccagggttctaaagagcaggagtttgctgggcaaagaagaaaaggctcagcccacgcaaaaagacagcagatcgtgaacgggagagtatctggcagaatggtaatgttcacctggcacaatacaaaggatatatgatacggaaaatggtgagagaggaaatgggaaaagtagatttagagttgataatgaagcacacagtttactttggcaagaataaggttctattcmatattcacaccagcaatatttttaataattgtgcaaaatatattggagaatataaataccgagacaaatcacctgatagaagactccaacaatgctcagttgtctccaagcatttttgatgatgaacttttatcactaaaaatcgagcatgcatcctctcttacatgcatattttgtaatatgttttgacatactcataaagtatatgtcataaaagtcacatagaaatttaaaaaacaggaagtaaaatgtaaaagaattacttatttctatgtaataagtaaacaaa

SEQ ID NO: 255588 - DNA, 555 bp, Homo sapiens
ggatagatagcgaaattagataaattcatttagttctgaactttccattataaatgtcttaaagatctagagctcagaagaatgaacttgaaagataaatttgagaatcacaggaatttgttggtaattgagactctggacaggatgagattgtccatggagggagtatagagaaagtaatgagtagtcataagatggtggggggtgttgctatggtttaaatgtttgtgycccttcaaaaatcatgttgaagcttaatccccagtgccatagtatttaaaggtagggcttttaggagatgatgaggtcatgagaactccaccctcatgaatgaaattagagcccttataagagggcttgagaaaaatctataccttttatgccattctgccaagtaaggacactgcaagtaggtgcaatctttggagcaggaaaacaagccttcaagaaacactgaatctgctggcaccttgatcttggacttataagcctctagaactgtaagcaataaaattctgttgttgataaattatctagtcaacaacagataattgt

SEQ ID NO: 255589 - DNA, 555 bp, Homo sapiens
ggatagatagcgaaattagataaattcatttagttctgaactttccattataaatgtcttaaagatctagagctcagaagaatgaacttgaaagataaatttgagaatcacaggaatttgttggtaattgagactctggacaggatgagattgtccatggagggagtatagagaaagtaatgagtagtcataagatggtggggggtgttgctatggtttaaatgtttgtgccccttcaaaaatcatgttgaagcttaatccccagtgccatagtatttaaaggtagggcttttaggagatgatgaggtcatgagaactccaccctcatgaatgaaattagagcccttataagagggcttgagaaaaatctataccttttatgccattctgccaagtaaggacactgcaagtaggtgcaatctttggagcaggaaaacaagccttcaagaaacactgaatctgctggcaccttgatcttggacttayaagcctctagaactgtaagcaataaaattctgttgttgataaattatctagtcaacaacagataattgt

SEQ ID NO: 255590 - DNA, 546 bp, Homo sapiens
atgccagtcatcagctgcagcattgttaatgcattgtttttttgtgtgtgtggttgttttttttttttttctttttttgagacagagtctctccatgtcacccaggctgaagtgcagtggcacaatctcggcccacagcaaactccacctcctgagttcaagtggttctcctgcctcagcctcccaagtagctgggactataggcatgtgttgctacacctggctaatttttgtatttttagtagagatggggtcacgctatgttggycaggctgatctcaaactcctgacctcaagtgacctgactgccttggcctcccaaaatgctgggattacaggcgtgagccacagtgcccagcctgttaatgctggggggaatagaaacacatctgtggttgaaaattttaatagcgcactctcaaattttagtggctgaaaaataatctagacaaaaaataagtaataaatatttggatgattaggataatataattgctatcagagaaagaaatagtaataaatgggaaagtaaaaaatgtaagagac

SEQ ID NO: 255591 - DNA, 546 bp, Homo sapiens
atgccagtcatcagctgcagcattgttaatgcattgtttttttgtgtgtgtggttgttttttttttttttctttttttgagacagagtctctccatgtcacccaggctgaagtgcagtggcacaatctcggcccacagcaaactccacctcctgagttcaagtggttctcctgcctcagcctcccaagtagctgggactataggcatgtgttgctacacctggctaatttttgtatttttagtagagatggggtcacgctatgttggtcaggctgatctcaaactcctgacctcaagtgacctgacygccttggcctcccaaaatgctgggattacaggcgtgagccacagtgcccagcctgttaatgctggggggaatagaaacacatctgtggttgaaaattttaatagcgcactctcaaattttagtggctgaaaaataatctagacaaaaaataagtaataaatatttggatgattaggataatataattgctatcagagaaagaaatagtaataaatgggaaagtaaaaaatgtaagagac

SEQ ID NO: 255592 - DNA, 546 bp, Homo sapiens
atgccagtcatcagctgcagcattgttaatgcattgtttttttgtgtgtgtggttgttttttttttttttctttttttgagacagagtctctccatgtcacccaggctgaagtgcagtggcacaatctcggcccacagcaaactccacctcctgagttcaagtggttctcctgcctcagcctcccaagtagctgggactataggcatgtgttgctacacctggctaatttttgtatttttagtagagatggggtcacgctatgttggtcaggctgatctcaaactcctgacctcaagtgacctgactgccttggcctcccaaaatgctgggattacaggcgtgagccacagtgcccagcctgttaatgctggggggaatagaaacacatctgtggttgaaaattttaatagcgcactctcaaattttagtrgctgaaaaataatctagacaaaaaataagtaataaatatttggatgattaggataatataattgctatcagagaaagaaatagtaataaatgggaaagtaaaaaatgtaagagac

SEQ ID NO: 255593 - DNA, 523 bp, Homo sapiens
ctaaaactcagataatttaagttgcacgatgtgcaaaattgctggaaaacgatggtctgacttcaaagccatgctgtttcaactatacaaatctctctgaaactgtaaaacgtatgctttatattattatcattgtttttgttattgttatttctcttccatgtttggtaaaattttatattttcaaagtctaccctttctcctgactgctgtgattcagactcaagcttttgctaaagataaaaccagatgatgctaatcagtgaagggctttgaaatgaagtttataatttcmtgaacccaaatttggtgaaagaactgactggtagagctcctttaatgttaattgtatttgtatagatgatctaattttccaaaatagatatactgtcttgagtactttatataaatgtctgctttataagtgaataaaaattatgagtgaaactggatgctttttaaagagatctattttacatcttccgtgaagggtaacattactttttaaaattagctagtcatc

SEQ ID NO: 255594 - DNA, 616 bp, Homo sapiens
atatacttcaaagcattatattagacatcatatagtacataataaaaacatgcaatgttatcttttaatttcaaaacttgtatcaaaaattgtagacaatatatttatttcaatatgtttctaccaggctcttttatttacaaaatccttttaattacagcatctcatcccatcctcagaacaatctgggaactgtgtaggctgggtcttatcttcattttacagatgaatatactgagggttgtaaaggtaaaagtgaattgtccaaaatcataccacaaaaacaaaaattgagtaccagagctaaaattgattcttaggttagtgttttttatattgcctccctctgcctaaaaatagaaggctcagggaatagtcattgcagatagaatttcaattagtgaaattaaaaggatttccatgaaatatttcaattatctttttatatacttcataagtgcttataatgttcaagatactgtttaggataactagggaatacagacaaatctcattttcatacacttattctttaatttgattatctatttattcaataagtattttgtaaacatgtgctatgtaacargtgctatgaaaaatacagaaatggctg

SEQ ID NO: 255595 - DNA, 573 bp, Homo sapiens
ttctggctatgcacggagtgataatgaggctttccttgattcatagttgaccgttgttgggtctaggaatagagcaaactattgacaaattccattcttttaagtatccaggttaattaattttgtcaacgtaagagtagtcttgtagaaccaaaattactctgatcctgccctacatcttatttagttccagaaatttggttccttgcaaagtgctccccactgccctcagccacacacacacacacacacacacacacacacacacacccctatctcaagaagaactctcctgacaaacctctatttagcatctgctgtggccaactgattcgcactatcactggccacagggcctagggtccactgccattgccctgaccaagcatttttcccttggcacaatccaaagaaacaaatctctrccaatgccaaatttgtacgttactttcactcataactaaactgaagacagactatgtttcatgcataaaatgagaataatgcctctctttctataccaatcagacctagccctcaggccaacctgaggacctgatattgtaccatcct

SEQ ID NO: 255596 - DNA, 459 bp, Homo sapiens
gttaggttggataatattagggaagtggagtgagaaaattttgatcactctttgtgtgacaggcattctctgggatgctcttccttcctcaaggctggagagcaaagactgggtttaggacctggtgctcagtgaamagagtctaaccatctctgtctttttctagctccaatgctttgaactcatctttttgctagctgtcagagtctagacatttttttcataatccctagaatgttaaatctcaggcttagacaagtgattagagtgaaaagatgagttccacatgttagctaaacttagccttcccagtggccttgactaagattcagtctgaagcttatcagaagtaaaatgtatggcctggcctatttttgactctcaatcatcgtgaagatgatgagcaacagtaacagaatagaatcagttgtttagaattccaggttcttcatattacat

SEQ ID NO: 255597 - DNA, 523 bp, Homo sapiens
ttcctctcttttaatgttttcttccagtttctgctcaagaactttataataatttttgactacttcttaaaatcaagaatttaggagaagatattggttgcaaaaaattgtggctgaggcacacgccaatcactgagttctgttaactggaggtgagttatagtaatgagattaatgtttgcattaggtatactctagcccctttggaaattactcagtgggaacatccatttatattttagaagcagaagtggaaaccagcacacttgaattttcttgtctgcagaaacttttatattagtgggatataccaatataccttacytataaatcctaatctcttttaagagtgtggaagaatatttaaagctgttttccatttggccataattgtctttgcaaacactgttgcttgaggacaaagtgtgtatgcaactgggagtgtgtgcttagtgattaaaaaaatttacatctacaatgcagtttgaataaacactccaatgaatacattaagtgcaaacaa

SEQ ID NO: 255598 - DNA, 618 bp, Homo sapiens
gtgccagcaccagcatggtagtagcagagggactgagaatgtttggattctggatatatttgaaggctgagtcaatggaattttctaatagtttggatgagaaaaaaggaggaagtcaaggatgactcagcagttttgaacttagataactgtgagggtgaaaatgcgatcttactgaggtgtagggtattgggattagagcatatttaagggcagaaaccaagagtgcatgtccataaacttatgttctgctsctttaccttcactgcacaacaccatcactctacatgcatggctttggaacatgtacgtattactattacttcacctggcaaaatggcacctgaaagcctctgcttgtatctgttctccatcccactgctctttttggctcccctgtccttttctcccttctcactgtggcactggttggtgcaccagcaccagacatgcagtggtcctaactacgtacctaggaaaagcacttccagactgccaaagctgttatttaggggtggcaccagatactggtagctgtagcaaaatggagaagagaaaaaaggggaaaagcaattcacttcctgtttcatagtcttaaatatattctcagagacctca

SEQ ID NO: 255599 - DNA, 563 bp, Homo sapiens
atttttctggttaacccacattggaaattaggatccaatgctggtatggtttggttctgtgtccccatccaaatctcatgtcaaatttaattcccagtgttgaaggagggatatggtgggaggtgattggatcatggaaacagatttcctttttgctggtctyatgatagtgagtgagttttcataagatctgattgtttaaaagtgtgtagcacttcctccttcactctctgtctcccatcaccatgtaaagatgtgcttgcttcccctttgccttccaccatgattgtaagtttcctgaggccttctcaaccatgccacctgtacacctgaggaactgtgagtcaattaaacttcttttcttgtaaactacccagtctcaggtacttctttatagcaatgtcagaatggacaaatacaaatgctaaagcaaaaagacaatacatacactgcagttcaaaaaaaagaaaagtaaagtaaatagcagaagccagacattgtttccagggcttattatgaaggagtaaaactgactttctgtcctcaactatcatcccaactaa

SEQ ID NO: 255600 - DNA, 667 bp, Homo sapiens
acatacactgcagttcaaaaaaaagaaaagtaaagtaaatagcagaagccagacattgtttccagggcttattatgaaggagtaaaactgactttctgtcctcaactatcatcccaactaacccacttcccatcccttttggtctgtataaagatacatcacataggatgtgagggagggaaaaagagatgtagagaaagacagggaaacagaaagacaaagagagagaaaatgattgaaagaaaaaraaaaataaccctcatttcctgagatcaacgatcctaagagaattactcataggaaccaggaatgtgtggtggaaacaggcctctcatttttcagttggatatctgcttgtgccgtggattggctgaaccaccagtgccccacctgcaaagccttatggttgaaagaaaattagaaagattagagagaaataatagagcagcctgcacttctacctcatatcagatgagagaatgtgtgagctcccagaagatccacaggattctgcagaagtaacacacactgagctgtcttaagacagttgccccaaagagctgcccactgggctagggtagctcagcagcaagagacaatgggctgtactgacagaggacagaggaggggcatttgaaacacttcgagctaccacttccctcccata

SEQ ID NO: 255601 - DNA, 582 bp, Homo sapiens
tttatgtgtgtgtgtgtatatatatatatatatatatatgaggcagttagcatattatctaggatatcttaagcattcaggaaagtggttgtagctatcattatttctatgcttcctcaaacccatgaagtattggcaatttctttagattaggttcctagaattagtctcactgtagcattgcaacaggggaagctcttctgcaaaatgatggtcyactttaattatctctatccttgatttttcaggatgcattatcctgaagtttcactagctgccctcacccctctaggaatgtttattaaattttctactccttcctgccatttatcgagtttacttctttgtaataagagttttcttattgtgcttttcacatgaaactcttaattcctgaattcattccctaacttctgcctaaattgtattttgaaagtatactatgatgttacctttgtaattaagaaacatttgattattcctagatgactacagaaaaaagtgtaaatttcttagcctgtcattcaagatgctacctcttatccaatctgcttttccagctctatctctcaattttactcc

SEQ ID NO: 255602 - DNA, 535 bp, Homo sapiens
gctgtcaccctggccctgggtccttgcaataaggcagagggtccattgagctgattaacattcaagctgtcttcagatggcaaagctgaaagaggtttgtaatactggggttgyaggcactcactcctacatactaccacagggccgagagcccaaagccctcgcccaggcctctgcacctgcctgcctgcatgctcccgctaggggtttgagctgcccggagatggaacaggcaagccacacccctgctacctgtcccacgaagggaatcagagaactctcccatttcactatgaattaagaatttttttttacattttcaaatggttaacaaaatcaaaaataatttcatgacacatgaacattatataaaatcaaattttagtatctgtaataaagttttattgcaatgcagccacacccattggtttacacaatgtctttcactctacaacaccaaagctttgtagttgtgacagagaccatatggccagtaaagctgaaactattttctatgtggccctttacagaagaa

SEQ ID NO: 255603 - DNA, 563 bp, Homo sapiens
tccatgcaaacattcctttgttgggctacccttctagtccattagacattcccagacctgtctgacccccagcagtggacaaaaccttggctcaagscaggtggttagtgtgagccagagagtttcttaatgctgtgtatcctattctcacatggatagtgggatcagtgtttcttcctgctccctgggaaacctgggaagatataatatttgatatgtcaaataacatatttagttgaggcaaagagtagatctatttgaagtggcggtaggacaagttcttttgctcactgagtatacccgcatgtcaggcattgtgctatgtgttacctaacttaatgatcataaaagtctgctttgtttttatagtttatattattactccaaaacaaagacagaaacaacccctcttgaaactcctgatatccagagttgtaataacttgcccaagtttattaggaatcaattagaaaatggtaggagtttcaaacctttgtcaatcagactccaatgcccattaacttctttcattctaatatattgaaggtatttgtatatccttc

SEQ ID NO: 255604 - DNA, 563 bp, Homo sapiens
tccatgcaaacattcctttgttgggctacccttctagtccattagacattcccagacctgtctgacccccagcagtggacaaaaccttggctcaaggcaggtggttagtgtgagccagagagtttcttaatgctgtgtatcctattctcacatggatagtgggatcagtgtttcttcctgctccctgggaaacctgggaagatataatatttgatatgtcaaataacatatttagttgaggcaaagagtagatctatttgaagtggcggtaggacaagttcttttgctcactgagtataccygcatgtcaggcattgtgctatgtgttacctaacttaatgatcataaaagtctgctttgtttttatagtttatattattactccaaaacaaagacagaaacaacccctcttgaaactcctgatatccagagttgtaataacttgcccaagtttattaggaatcaattagaaaatggtaggagtttcaaacctttgtcaatcagactccaatgcccattaacttctttcattctaatatattgaaggtatttgtatatccttc

SEQ ID NO: 255605 - DNA, 523 bp, Homo sapiens
ttcaattattagtattgcaattttattattttttgattcattgttgagaagtattaaattttcttccttgcacaataagaatatagtccaacttcactttcattttttaaaataagagtgttagagatccttagagagcatataattatgggctacaaattyaaatcaattcaggttccaggcaggtaagctaattggagaaagccattgagttgtacaataacacggagtggtgaagtcaagtcaatagagacttggagaatgtatttctcctacaaacgcattaaaaacagaatacagctctcactgagcaaaacctaactatagggtatttacctaagggggccaatttgcacccctgcagaggtccaatgatttgccatgcagatgatcagaggcagagcagaaggaggccttgcacatttattaacttttaaaaagacactaatttattgaaaacctactctgaacaaaactttgggccagggagggggtattcagcattgaaactaacagaagtgac

SEQ ID NO: 255606 - DNA, 561 bp, Homo sapiens
ttagactacttgctcttctctgaaataatccttcctctatgcctttgtatatcttgttcaactgacgcaaatgcaggttttctgttaatcatcycgatagttaactgaatgtaacttcagtttatgtatttgtggagctcctctaagctactcctggggagcatctcttttccctgtcttttttttcttgtttcctttcttccactctacccataaccactagttcacatcacagctcggtttttcatggggcactcaaatctgctgcctatgttcaagcctctgtgtgttcatgaggaaaaactgaactaacattgaatgcatgttaccatttatcctctacggaactgactacacttttcctgcagtgctcaaaaccctgtggatatgtgtcaagtgttaagtactcatgctattaccaatgccaaaggactgcagaggtggaagttccctgctgcaaactatacaaggggatactggccttaaaataaactgcaacacaatcatcatcactgataataaatctaaagtggtcgttatcttggacatgaatgaactaat

SEQ ID NO: 255607 - DNA, 543 bp, Homo sapiens
acctccaccctcaacattcttgctcatgtccctgcaattttgttgaaattgctcttattttagctcctaaagacctcttcttgctgatttgaaagggcatttgatttttctgaaacattttacatggagtgtcatcttgaatcattttctttctctgtcttcctgacaatatattctctacatattcttttggtttgtctcttacccctttggtcattctttctcagcccccctcaaggtgaccttttctctgccaaattttattaactttaaaacttaaagctctttttctttacccttctccttcatccatacacatcttccctaaatsatcttcatcttcttccgtggcatcattaccatccacatgctgatgactcccaaaagccagcatctctcttgagctcacacttagatgtctgtggtaaatatctaagggattttctgttgaggactcattttctaggaaagaccctccctttccatctgcatgttgaagttgtgctattgtatgacttttccttgtaccacagttaatctgtc

SEQ ID NO: 255608 - DNA, 631 bp, Homo sapiens
aagagaatcctgaaggtatttaggtccccaaattctctggttactgaggtacagatgcatccttatcccattacatttatagtacattktactctttcttaaagctagcttgattaaaatctgtcactttcaacaaaaaagatcctagttaataaaacattcttctacctattggacatttctacttctatgtcatgtacctctaattctctgctcttcttccaccaacactaagctccaggtctggcactccctctgtagctcagtaagtgctctttacttatcaaaaccatggagctggtcattatctttgattcctcctacaatctcatgcactcccttccagtcagtcaaatcctgttacttatccacccatttatttccattgccactctaccatcctagtcctcactacaattgccttatttgatcaccttataactggtctttctgcttctagctttgcattctccattaggttcttactccagaaagatttcttatttcacttcacaataggaccccataatcagagctcttagtgaccaagttcattgttgcctctttaacttcatttcttgccaccacctttgtatcatatgcatgaaccaggctgaaatatgcatagttg

SEQ ID NO: 255609 - DNA, 412 bp, Homo sapiens
ctttcttaaagctagcttgattaaaatctgtcactttcaacaaaaaagatcctagttaataaaacattcttctacctattggacatttctacttctatgtcatgtacctctaattctctgctcttcttccaccaacactaagctccaggtctggcactccctctgtagctcagtaagtgctctttacttatcaaaaccatggagctggtcattatctttgattcctcctacaatctcatgcactcccttcsagtcagtcaaatcctgttacttatccacccatttatttccattgccactctaccatcctagtcctcactacaattgccttatttgatcaccttataactggtctttctgcttctagctttgcattctccattaggttcttactccagaaagatttcttatt

SEQ ID NO: 255610 - DNA, 631 bp, Homo sapiens
aagagaatcctgaaggtatttaggtccccaaattctctggttactgaggtacagatgcatccttatcccattacatttatagtacattgtactctttcttaaagctagcttgattaaaatctgtcactttcaacaaaaaagatcctagttaataaaacattcttctacctattggacatttctacttctatgtcatgtacctctaattctctgctcttcttccaccaacactaagctccaggtctggcactccctctgtagctcagtaagtgctctttacttatcaaaaccatggagctggtcattatctttgattcctcctacaatctcatgcactcccttccagtcagtcaaatcctgttacttatccacccatttatttccattgccactctaccatcctagtcctcactacaattgccttatttgatcaccttataactggtctttctgcttctagctttgcattctccattaggttcttactccagaaagatttcttatttcacttcacaataggaccccataatcagagctcttagtgaccaagttcattgttgcctctttaacttcatttcttgccrccacctttgtatcatatgcatgaaccaggctgaaatatgcatagttg

SEQ ID NO: 255611 - DNA, 470 bp, Homo sapiens
ccttaggctcctttcttggaagatttaaggtacaactacagaaatgcttgtcatgggatacctcttttggcctgtattaacagcagtgatgsgaaagcattccagaattcgatttcttttcaaaaaggaaaaacctactaagatctaagatttaatggggactaccatgtttagcctgaatatttaacacatgctttcatttaatgtgtatattacacaatattctatgaaaataatgtaagcaaaaattacaatttagtcaataattgctaaaaaagaaaagttgaagttatagcattagtagtttggaattaataaatatatattttttgaccaggcattacaatctacttaaataaaacgtattccttgttaactaagagggcacttgtttattattactattattttttaaccttaagtcaaacataatatttattcacccatatcatcttatagtaccattgtat

SEQ ID NO: 255612 - DNA, 572 bp, Homo sapiens
gtcagcatgggccttcaaagagatgcacagtgcttggcctacagtacatcttcggttactggtagctgccattattattagctgtatatttttattagtagtgctatattttattattagctgtgtatttctatacattattagtatatattagcagcattttttttgcttattttttatctgaaatccrtgtccctaatttctagttacttgccttaattctccattattttcccacatctcttgcagagtgacttgtactgtatttaattccttggtgcctcagtttcctcatttgtaatagaagagaggagttgaacaaaataatttttaaatccctttaggcctaactttccatgtgctgaccagtgggatttttggagccaaaaatccctgcttctcaaaggaaagctttcaggcctatattagttgcctccagtgattaattcctttgactgcacaatgaaaaatattggatcaaaaaatcattgtcaggagttttaaaaagtgctggtagtgggggtgggggataaatcactgtttgataaatattgtcaagcaaacagataaca

SEQ ID NO: 255613 - DNA, 572 bp, Homo sapiens
gtcagcatgggccttcaaagagatgcacagtgcttggcctacagtacatcttcggttactggtagctgccattattattagctgtatatttttattagtagtgctatattttattattagctgtgtatttctatacattattagtatatattagcagcattttttttgcttattttttatctgaaatccatgtccctaatttctagttacttgccttaattctccattattttcccacatctcttgcagagtgacttgtactgtatttaattccttggtgcctcagtttcctcatttgtaatagaagagaggagttgaacaaaataatttttaaatccctttaggcctaactttccatgtgctgaccwgtgggatttttggagccaaaaatccctgcttctcaaaggaaagctttcaggcctatattagttgcctccagtgattaattcctttgactgcacaatgaaaaatattggatcaaaaaatcattgtcaggagttttaaaaagtgctggtagtgggggtgggggataaatcactgtttgataaatattgtcaagcaaacagataaca

SEQ ID NO: 255614 - DNA, 572 bp, Homo sapiens
ctcaggacaacatgggaggtacatgttgaagaggtcagagcatctgtctacctgggtcttgaactgttgagctagagtggactcttcccacatgaaccactaccaactggacttgatatgagtgagagataaatgttatggtaaatcgctgacatttgggggtttatctgttaatgcatcctatgttaccttagctaacacatgatatgagaatttttttttattagggagcatagtggttaataatggagatagatgggattacaatcccagctctgccacttactagctttatgactttgagcaagtcactaaattctctctaagcctcagtttcttctgctataaaatgggaataatactattattctgtggtggcattgtaaraaattagtagacacacttctatacataatatctatatgcataattccatacataattatcatattaatactataggtttagttgagaactcagtaactgttagacatttttgttactactcaactaggaggtagattaggtctactttcactgtatgctattttaagtaggtagtgtctcataac

SEQ ID NO: 255615 - DNA, 588 bp, Homo sapiens
tggtgcaccagtaaggactctgtgtgggggttctgacaccatatttcccttctgcactgcattcaccatgagatgctgaccctgcagcaaccttctgcttgggcatccaggcatttccatacatcctctgaaatctaggtggaggttcccaaacccagttattgacttctgtgcacgggtaggctcaacaccacatggaagctggcaaggttgaaggcttgcaccttctgaagccatggcctgagctctacattggcacmtttcatccatggctggagtggctgggacgcagggcaccaagtccctaggctgcacacagcaaggggaccctgggtccagccacgaaaccactttttcctcatagccctctgggcctccttcttggctgccatgaagacctctgacatgccctggagacattttcctcattgtcttggggattaatcttcagctcctcgttacttacgcaaatttctgcagcaggcttgaatttctcctcagaacatgggattttcttttctatcacattatcaggctgcaaattttctgaacttttatgctctgtttccctttcaaaaccgaatgctg

SEQ ID NO: 255616 - DNA, 548 bp, Homo sapiens
tctcatccctccaaactgttccaacctctgtctgttacccagttccaaagttgcttccacatttttggatatctttttagcagtgccccactctgctggtaccaatttgctgtattggtctattttgaagctgctgataaagacctacacgagactgggtaatttacaaaagaaagaggtttattggacttacagttccacttgcctrgggaggccccacaatcatggcagaacgtgaaaggcacatctcacatggtggcagacaagagaagagagagcttgtgtagggaaactcccttttttagtatcatcagatctcatgagacttattcactattatgagaacagcactggaaggacccgcccccatgattcaataatctcccaccaggtccctcccacaacacataggaattgtgggaattacaattcaagatgagatttgggtggggaaacacacaaaccatatcacccccaaatcccagtggggcccagatacttatatagccttatttcagaggctgggggagagatggggaatataggta

SEQ ID NO: 255617 - DNA, 535 bp, Homo sapiens
tgataaagacatacccgagactggacaatttacaaaagaaagaggtaaaattggacttatagttccacgtggctggggaagcctcacattcatggcggacagcaaggagaagcaagtcacatcttacgtggatgatggcaggcaaagagaaaagcttgtgcaggcgacaagctctttttaaagccatcagatttcatgaaacttattcactgtcacaagaacagcatgggaaacactttccctcatgattcagtcacctcccaccaggtccctcccataacatgtgggaattcaagatgagatttgtgtgggcacacagccaaamcctgaatttgggtttcagcccctggcccctcccaaatctcacatcctcacatttcaaaacaaatcatgccttcccaacagtcccccaaagtcttaactcatttcaacattaactcaaaagtccacagtccaaagactcatttgagacaaggcaagtcacttcctcctataagcctgtaaaatcaaaagtaggttagttgcttcctagata

SEQ ID NO: 255618 - DNA, 624 bp, Homo sapiens
tagtgactctcccctccaacccctcatgctcagcccagtactaggaacacagcacatatctgttgtcatatcaaaatagccccagattgtgtaaaatattttattccccttcagacatattttttaaaaagaaatgtaagcttatctcctgcatataacctctcaaaaagagagatgagtacatctaaatcacaaaagaaatcctacagaggccttctgcggaagcatgttcaacattaattagagtaaataccagcctagtgaggcttatgcatttaaatgatggtgatgaaaatcaccagcttagcagttcagaggaaaacaggaaaggtttctactaaggggaatgattaactgaatccttacagagaaactgaaaacaatgaaaatcagaaaggacatcacattgtatatgtttgtaaatttgatcctatacactctgatttttaatccattcccatcaatcaataaattattctcactgaggaaaaatatgtaagcaattgttgaaacagagttcaaaaaggctaggttaaacatgcaatgaaggaatatgagaacaatactttagattgcaaaagaggagctagttggctrgagttctgcatttcagaggcagaatag

SEQ ID NO: 255619 - DNA, 618 bp, Homo sapiens
gatatttatagaaaatatttttgtcatataaaagagcaaagaggtaaaaaaataccttctaggtgccagatacattgggttttccactgccataagcctaacctcttttaaatactatccttctctcaatgttttttttttatttttatttttgagatggagcttcactcttttcacccaggctggaatgcgatggtgcgatctcagctcactgcaacctccacgtcctgcattcaagttattctcctgcttcagcctcccaagaagctgggattacaggtgcacaccaccacctccagttaatttttgtatttttagtagagrcggggtttcgccatgttggccaggctggtctcaaactcctgatctcagggaatccaccagccttggcctcccaaagtgttgggattacaggcgtgagccactgcaccctgcctacccttctctcaattaatatgaaaaagtagaattagaataggttaaagcgctgacacacttaactgaatccggtattttctttcttaatacactgtaattattttgtattaaatataaaaggggcttccttattatagtgtttgagttttgggcacttttttctctatggatgcctgtttt

SEQ ID NO: 255620 - DNA, 618 bp, Homo sapiens
gatatttatagaaaatatttttgtcatataaaagagcaaagaggtaaaaaaataccttctaggtgccagatacattgggttttccactgccataagcctaacctcttttaaatactatccttctctcaatgttttttttttatttttatttttgagatggagcttcactcttttcacccaggctggaatgcgatggtgcgatctcagctcactgcaacctccacgtcctgcattcaagttattctcctgcttcagcctcccaagaagctgggattacaggtgcacaccaccacctccagttaatttttgtatttttagtagaggcggggtttcgccatgttggccaggctggtctcaaactcctgatctcagggaatccaccagccttggcctcccaaagtgttgggattacaggcgtragccactgcaccctgcctacccttctctcaattaatatgaaaaagtagaattagaataggttaaagcgctgacacacttaactgaatccggtattttctttcttaatacactgtaattattttgtattaaatataaaaggggcttccttattatagtgtttgagttttgggcacttttttctctatggatgcctgtttt

SEQ ID NO: 255621 - DNA, 618 bp, Homo sapiens
gatatttatagaaaatatttttgtcatataaaagagcaaagaggtaaaaaaataccttctaggtgccagatacattgggttttccactgccataagcctaacctcttttaaatactatccttctctcaatgttttttttttatttttatttttgagatggagcttcactcttttcacccaggctggaatgcgatggtgcgatctcagctcactgcaacctccacgtcctgcattcaagttattctcctgcttcagcctcccaagaagctgggattacaggtgcacaccaccacctccagttaatttttgtatttttagtagaggcggggtttcgccatgttggccaggctggtctcaaactcctgatctcagggaatccaccagccttggcctcccaaagtgttgggattacaggcgtgagccactgcrccctgcctacccttctctcaattaatatgaaaaagtagaattagaataggttaaagcgctgacacacttaactgaatccggtattttctttcttaatacactgtaattattttgtattaaatataaaaggggcttccttattatagtgtttgagttttgggcacttttttctctatggatgcctgtttt

SEQ ID NO: 255622 - DNA, 618 bp, Homo sapiens
gatatttatagaaaatatttttgtcatataaaagagcaaagaggtaaaaaaataccttctaggtgccagatacattgggttttccactgccataagcctaacctcttttaaatactatccttctctcaatgttttttttttatttttatttttgagatggagcttcactcttttcacccaggctggaatgcgatggtgcgatctcagctcactgcaacctccacgtcctgcattcaagttattctcctgcttcagcctcccaagaagctgggattacaggtgcacaccaccacctccagttaatttttgtatttttagtagaggcggggtttcgccatgttggccaggctggtctcaaactcctgatctcagggaatccaccagccttggcctcccaaagtgttgggattacaggcgtgagccactgcaccctgcctacccttctctcaattaatatgaaaaagtagaattagaataggttaaagcgctgacacacttaactgaatccrgtattttctttcttaatacactgtaattattttgtattaaatataaaaggggcttccttattatagtgtttgagttttgggcacttttttctctatggatgcctgtttt

SEQ ID NO: 255623 - DNA, 609 bp, Homo sapiens
ggagtctggtagacatgagtcagacctctgagtgtgggagcagtaacttcaggggatgcttggaacgtgattcacacaggacacatactttttccaagtatacgcatggccttatgtatactgtgggcttatattcaggaggagtatattttctgcttttctgtgaccagagattctggccttcacattctgggataagttaatatatggcgctcttgtgcagtacacaacccagacacctttactgggggccttaacatagtcacctcaaaacccctgcaccattcccgtctattccattgtcagatggctgccttagyccattttcagcttctataacagaataccatagagtggctgatttctaaacaatagaaatttatttgtctcacagttctggagactgggaagtccaagagcatggcgccagcatctggtgagggccttcatgttgcattatcccatggcagaaagcagaaggtaagtgaacacaggagacagagtggaaactgggcagaattcatcctttttatctggaacccactccctcaataactaacccactcctgagataaaggccttaatctattattaagggcagagccctca

SEQ ID NO: 255624 - DNA, 540 bp, Homo sapiens
tggttggaacgaagattttgttgttgatgttttacttgtctagagcattgcttttcaaatttgaagatggcgcttccaggtgtcacttagtgtcatctgatgtcagttccatcgttactggggttcacatgaaggtagtggattcacagacctcagtttatttccaggtatagtaaccatgtgtccaggatagttatttaagtcccatgggtttaactttctcatctggagtcctactttttggggttggtgatgatatttaaggaaataataggcatgtgattggtgagaatgttagctagtaattatattacttcacttaacttctccctwccaaaactgcctattctaagtgtttgcttcctcctgtcctgtcgtcagccatatttctaacatcccattctcatctgaggcccatatctcctgtgtcactgagaaaaggagtcaccagagaactccctctaaaaaaatgtcttctaacaccaaactttttttttttttttttttgttttgagtgtctcattcattgctcaggttgca

SEQ ID NO: 255625 - DNA, 538 bp, Homo sapiens
tttgtgtgcctggcttctttcactaaacataatgtcctaaaggtacctacatgttgttgtaaatgacagaatttccctctttttaaaaggccagatagtattctattgtgtatatgtaccacattttatttatccattcatctgtcaattgactccgtagtctagccattgtgaataatgctgcaatgaacatgagtgtgcaggtatctctcttcaatttattttttttcctttggatatatttattttcctttggatatatacccagaagtaagatttgctggatcacatggaatttctatttttaatttttggaggaactttatgcagttttctgtaatggctgtgttgtttttgttttttttttttttggtttttggagacagagtcttgctctgttgcccaggatgaagtgcagtggagtgatctcakctcactgcacctctgcataatggctgtaatttatatttccaccaaaagtgtactagggtcctccttttttccacatatctgccagtacttgtcatcttttgtcttt

SEQ ID NO: 255626 - DNA, 614 bp, Homo sapiens
tcattagctccagcctttgtatttccctctcttgcagtgcttatccccatatcttcccatgartaagtgacttgacttaggtcttagttccaaaattcctatcacagagaggccctttctaactgtactatatagaaaaacctccctcacctggccctggaatcactaccctctgaaccagtgttattttcctccaaagcattgtcaccacctggcatgtatatttgtttattaagtgtctccttctgccagaattgctacaatataaactcctacccatgagggtagagatttttgtttgtcttgttcaatataatatcctcaatcccagaatggtgcctggtgaataagagggagtgagtggttgttgaatgaataatctgattgatattctcacctaaaaagctacctgctctctcactgatctggcagagcccaatttcctgttaccagcatgcctcctctgcctggggagcctgagagatttccatactttttttttaggaagtcctattcctactgcttctttttaaggtgagccatgagcactgcatgctcacacatattagctgtgctctatcttcagcatttaatgtgaatatgatttgtggttc

SEQ ID NO: 255627 - DNA, 510 bp, Homo sapiens
aatcacctttttcttcctcccaaatgcaaagaatgtgaggttgactagagaagattcctcggctgataagcaggtggccttaggagctggtatagggtcaaccgtgacctccaatgtgggcaaggagtgggcggctaaaggtgaaccacagaacaaagatgactaagggctcttcctcctcccagcagatgaactaaacagtcaaattaaaaactgtgataccaagaaagacacacamacacactcacacacaccctattcatcaactaagtaagaaagattgagaaatttaacaccgatagattgcattggtaaattaaagaattagaaaggagtaactgactgtcattttgtttgtttgataatatatactttcaacagcaattaatatttattgataacatgggacataccaagcactgttctacatgctttgcagtatttatggacttaaactatgctgtgaggcaggtgccactttcttcttcattttacagatgaggaaactga

SEQ ID NO: 255628 - DNA, 590 bp, Homo sapiens
ctgtctcttctatcattagcaaaccatgtttcacttggatcattaaggaaacctctcaagatgttttctcacctttttagtagctttccagtccttctttctcactatagccaaattgtgattatatcactctcctctataaaaccatgggcaggctccttaccatggtatacaaggcctcttccactgttctggcttaaccccttgacataccatcttgtgtgctttatttttcagctatgctgaagtrcttgtaggtttataattaagacaagatctacctgtacttgggacatttgcagatgtagctcctcctgcctgatagacacaccccacatgcaccttagcctaggtcaaacatcctcattctttacgtcttggctttagccatagttttgcccaggaagttttcttgaccgttgccaggactggactaggtgggtcttgggtgtcttcccatagcacccaataccatctctatcaaaacccttagcacatgggttttaaaatgtgtttggaaaatattggtgaatgaggtgttccttgctcaaatgcctcacaggctcaaaggccacatgtaaaagaaatgt

SEQ ID NO: 255629 - DNA, 590 bp, Homo sapiens
ctgtctcttctatcattagcaaaccatgtttcacttggatcattaaggaaacctctcaagatgttttctcacctttttagtagctttccagtccttctttctcactatagccaaattgtgattatatcactctcctctataaaaccatgggcaggctccttaccatggtatacaaggcctcttccactgttctggcttaaccccttgacataccatcttgtgtgctttatttttcagctatgctgaagtacttgtaggtttataattaagacaagatctacctgtacttgggacatttgcagakgtagctcctcctgcctgatagacacaccccacatgcaccttagcctaggtcaaacatcctcattctttacgtcttggctttagccatagttttgcccaggaagttttcttgaccgttgccaggactggactaggtgggtcttgggtgtcttcccatagcacccaataccatctctatcaaaacccttagcacatgggttttaaaatgtgtttggaaaatattggtgaatgaggtgttccttgctcaaatgcctcacaggctcaaaggccacatgtaaaagaaatgt

SEQ ID NO: 255630 - DNA, 590 bp, Homo sapiens
ctgtctcttctatcattagcaaaccatgtttcacttggatcattaaggaaacctctcaagatgttttctcacctttttagtagctttccagtccttctttctcactatagccaaattgtgattatatcactctcctctataaaaccatgggcaggctccttaccatggtatacaaggcctcttccactgttctggcttaaccccttgacataccatcttgtgtgctttatttttcagctatgctgaagtacttgtaggtttataattaagacaagatctacctgtacttgggacatttgcagatgtagctcctcctgcctgatagacacaccccacatgcaccttagcctaggtcaaacatcctcattctttacgtcttggctttagccatagttttgcccaggaagttttmttgaccgttgccaggactggactaggtgggtcttgggtgtcttcccatagcacccaataccatctctatcaaaacccttagcacatgggttttaaaatgtgtttggaaaatattggtgaatgaggtgttccttgctcaaatgcctcacaggctcaaaggccacatgtaaaagaaatgt

SEQ ID NO: 255631 - DNA, 590 bp, Homo sapiens
ctgtctcttctatcattagcaaaccatgtttcacttggatcattaaggaaacctctcaagatgttttctcacctttttagtagctttccagtccttctttctcactatagccaaattgtgattatatcactctcctctataaaaccatgggcaggctccttaccatggtatacaaggcctcttccactgttctggcttaaccccttgacataccatcttgtgtgctttatttttcagctatgctgaagtacttgtaggtttataattaagacaagatctacctgtacttgggacatttgcagatgtagctcctcctgcctgatagacacaccccacatgcaccttagcctaggtcaaacatcctcattctttacgtcttggctttagccatagttttgcccaggaagttttcttgaccgttgccaggactggactaggtgggtcttgggtgtcttcccatagcacccaataccatctctatcaaaacccttagcacatgggwtttaaaatgtgtttggaaaatattggtgaatgaggtgttccttgctcaaatgcctcacaggctcaaaggccacatgtaaaagaaatgt

SEQ ID NO: 255632 - DNA, 568 bp, Homo sapiens
gttcagctctttcttatggctatgtctggcagtgttttagaccagtggttcctaaaccttgatgcacatcagagtcatgaacaggtctggttaaatgcagaatgctgaactcatctcctggtgtttctttttctttctttcttttttttttttttttgagactgagtcttgctgtgtcacccaggctagagtacaatggcatgatctcggctcactgcaacctccgcctcctgggttcaagcaattcttctgtctcagcctccygagtagctgggactacagtcgcatgccaccatacccagctaatttttgtattttttagtagaggacagggtttcaccatatttgtcaggctggcctcaaactcctgacctcaggtgatccacttgcctcagcctcccaaagtgccgggattacaggtgtgagccaccacgccccgcagcctagagtttctgatacagttggtctgaggtggagcccaaaacattgcatctctaacaagttgcaggttatgttgatatcacttgtctggggggtacacttaaggagaccctggtcttgccaagct

SEQ ID NO: 255633 - DNA, 559 bp, Homo sapiens
acttctattgctctaaggagcccatcctgtctatatttagaactgactctagaaaaaagaaagatacagggctttttcatcaacgtttgatctgatagatgtgtctaaatactggtcagctttccactgaatgttaccatgggcaacagttttcagaactttacatgaataaaaaagaacaggaacaggaaaaaggatcactgtatgaaaacttattcgtgtggccatctccattttattcatggggctgcctagattcagattgtagcattttcttgagttatttctctgagcccttttccattctctctgaaatactgaaatgcataccttctcttctcattcctttttatttcattccagcctttcaatccactgctgccagagtggagttgccaaaatgatgctctgatatggttaggctttgtgtccccacccgaatatcaycttgaattgcaatccctataatctccacatgtcaagggagagaccaggtggaggtaattgaatcatgggtgcggttcccctgtgctgttctcatgatagtgagtgagttctc

SEQ ID NO: 255634 - DNA, 618 bp, Homo sapiens
tcaacatgtttcttcaagtcaatttacagttcttcaacattgrggaccgcgtcaatgtcatctttataccccagtgtttaactcagtactgtgcatacaagagatgtgcaacaaatgtctgttcaatgagcacatacacaaagtaggttttgcctggttgagcctctataacaacatcctgaattagtttttttttttttctattttaaaggtaaagatactaagggtcagaaaagtttaagggacttactggagaagagacaaataaaaagaaaaagaaaacaaagactgatcacccagaggctgaggctgagggaggggagagtttaaggagattaaatgtcagatgaagcaggtgttgaggaggaactgaacattgacaaatggatttggcctgaagatggatttttgataactttaaggagagcagcattgggaggagaggggagataagaaaaaaactggtgatgaaaaaatacaaaggataggtataagataatatttaagaaagaagaagcaacacggcttttaaacttagctgttattacttggaagtggggtacaatttaagcatgtttaatcaaaggtcatattagacctcatggagagggagagagt

SEQ ID NO: 255635 - DNA, 618 bp, Homo sapiens
tcaacatgtttcttcaagtcaatttacagttcttcaacattggggaccgcgtcaatgtcatctttataccccagtgtttaactcagtactgtgcatacaagagatgtgcaacaaatgtctgttcaatgagcacatacacaaagtaggttttgcctggttgagcctctataacaacatcctgaawtagtttttttttttttctattttaaaggtaaagatactaagggtcagaaaagtttaagggacttactggagaagagacaaataaaaagaaaaagaaaacaaagactgatcacccagaggctgaggctgagggaggggagagtttaaggagattaaatgtcagatgaagcaggtgttgaggaggaactgaacattgacaaatggatttggcctgaagatggatttttgataactttaaggagagcagcattgggaggagaggggagataagaaaaaaactggtgatgaaaaaatacaaaggataggtataagataatatttaagaaagaagaagcaacacggcttttaaacttagctgttattacttggaagtggggtacaatttaagcatgtttaatcaaaggtcatattagacctcatggagagggagagagt

SEQ ID NO: 255636 - DNA, 559 bp, Homo sapiens
acttctattgctctaaggagcccatcctgtctatatttagaactgactctagaaaaaagaaagatacagggctttttcatcaacgtttgatctgatagatgtgtctaaatactggtcagctttccactgaatgttaccatgggcaacagttttcagaactttacatgaataaaaaagaacaggaacaggaaaaaggatcactgtatgaaaacttattcgtgtggccatctccattttattcatggggctgcctagattcagattgtagcattttcttgagttatttctctgagcccttttccattctctctgaaatactgaaatgcataccttctcttctcattcctttttatttcattccagcctttcaatccactgctgccagagtggagttgccaaaatgatgctctgatatggttaggctttgtgtccccacccgaatatcatcttgaattgcaatccctataatctccacatgtcaagggagagaccaggtggaggtaattgaatcatgggygcggttcccctgtgctgttctcatgatagtgagtgagttctc

SEQ ID NO: 255637 - DNA, 519 bp, Homo sapiens
gccagcactgtacagttgcaatggtactggtgcaacaaccatgtttgaaactctagaccatgactcttagcacagattgctttgtaaacacctggaaatctatgtctgaatgtatgcatgtatgcatatatatacatttacaatgtcatgcatcaacattttcaatctagttccaaaatattcttatcataccaaagggataatctatactcattaagcagttgttcttcgtttctcacctctcccttacccctggcaaycacaaatctgaattctgtgtctacacacttacctattctggatatttcatataaatggaattgcacaacctgtgaccttttgtgtctttttttcccacttagtgtgatgtttttgaggtccatccatgttgtagcatatcagtaatccatttatttgtttacatctgaataacatcccacatatctagctggtttattcatttatctgcaaatggacatttggctgtttccactacttggctattatgagtagtgctgc

SEQ ID NO: 255638 - DNA, 609 bp, Homo sapiens
tttatatctatataaatatatagatatacatatttcttgtaaatgttcctgggccatatcgtccctctgcatgcatattgggatttatttctagggaacaagaactacacctgtctctcttagttcatgaagtttcctgctcttccattgcaatgttcaaaccctttattgtaccctcctatagagaagagtcctaatgaacaagaactgcatttctggttcacaaaatcacaacaccttgcccagtatctagtcttaaattgttaggcaatgactggtatggatggctaacagaagsaatgagaaatgtacagtaatttgaggtggttttgaaattggacctgtcagcaactgtgtgacctataaacaagttgctcatcttcacagtcttattttatataatgcaaaggttggattaggtactctacaaaacctcttccaactctgaaattcttttatacaataaaataacttcccttgttcatttcattcctattttaatcttaactttgctgatttgagttaagttattaaaatctctacaaccaggatattagcaatataatccttatctcttgagatccttgcaagaactaattaataaataat

SEQ ID NO: 255639 - DNA, 609 bp, Homo sapiens
tttatatctatataaatatatagatatacatatttcttgtaaatgttcctgggccatatcgtccctctgcatgcatattgggatttatttctagggaacaagaactacacctgtctctcttagttcatgaagtttcctgctcttccattgcaatgttcaaaccctttattgtaccctcctatagagaagagtcctaatgaacaagaactgcatttctggttcacaaaatcacaacaccttgcccagtatctagtcttaaattgttaggcaatgactggtatggatggctaacagaagcaatgagaaatgtacagtaatttgaggtggttttgaaattggacctgtcagcaactgtgtgacctataaacaagttgctcatcttcacagtcttattttatataatgcaaaggttggattaggtactctacaaaacctcttccaactctgaaattcttttatacaataaaataacttcccttgttcatttcattcctattttaatcttaactttgctgatttgrgttaagttattaaaatctctacaaccaggatattagcaatataatccttatctcttgagatccttgcaagaactaattaataaataat

SEQ ID NO: 255640 - DNA, 571 bp, Homo sapiens
gagaggcctctattgtagagaagttattactgttcatagaataaatacacctgagagaaatatcagctactggtttgaataaccttgagggaaattataactttattaagaataatatctataaatctgatattgataatgataataacgttagtgataasaaatattgatcactaatatgtgctagatattctgcttggtatattatataaattgatatattcaatcatcataacaacttgttgactggttactgttgtactagttagggttctccagaggaaaaaagcaatacacacacacacacacacacacacacacacacacacagatacacacacatgtgtgagaaagagatgtatttattttgaggaattgcctcatgtaattatagaggctgagaagtttcatgatttgcagtctgcaagctggagtcctaggaaaacccttgatttcattccatttcaagtccaaaggtctgagaaccagaggagccaatggtgtaaatcttagtccattgtcagtgaaagaacaatttcccagctaggaaaggcaggcaagagaaagaaaa

SEQ ID NO: 255641 - DNA, 571 bp, Homo sapiens
gagaggcctctattgtagagaagttattactgttcatagaataaatacacctgagagaaatatcagctactggtttgaataaccttgagggaaattataactttattaagaataatatctataaatctgatattgataatgataataacgttagtgataagaaatattgatcactaatatgtgctagatattctgcttggtatattatataaattgatatattcaatcatcataacaacttgttgactggttactgttgtactagttagggttctccagaggaaaaaagcaatacacacacacacacacacacacacacacacacacacagatacacacacatgtgtgagaaagagatgtatttattttgaggaattgcctcatgtaattatagaggctgagaagtttcatgatttgcagtctgcaagctggagtcctaggaaaacccttgatttcattccatttcaagtccaaaggtctgagaaccagaggagycaatggtgtaaatcttagtccattgtcagtgaaagaacaatttcccagctaggaaaggcaggcaagagaaagaaaa

SEQ ID NO: 255642 - DNA, 622 bp, Homo sapiens
cataagaagacattctttttttttttttttttttttttgagacagaatttcgctctgtcgcccaggmtggagtgcagtggcgcaatctcggctcactgcaagctccgcctcctgggttcacgccattctcctgcctcagcctccagagtagctgggactgcaggcacccaccaccacgcctggctaatttttttgtatttttagtagagacaggttttcaccgtgttagccaggatggtctcaatctctgtcttcatgatccacccgccttggcctcccaaagtgctgggattacaggcgtgagccaccacgcccggccaacataagaagacattcttaatcccatgatatagacgagcatactgcagtttttgcggataaatattccacaccacttttgatagcaaatccaagaaaagaggcctaggactcaagccctggaacttctagctggtacctcaaggccccactcagagctttaaacaaaagaaaactaaaaataatgcccatttcatcttagagaatgacaaattctgcacactaaatttcttcacaatatgaattaacctcccctcccaagctaattcccaatgccactatgattcattagtgtcatttgtca

SEQ ID NO: 255643 - DNA, 590 bp, Homo sapiens
ccaaactctaccatcaacaaaattccatgtcattaaatattctttagcaacaaaacatgtagtgactctgtagtatgccagtatataagcactcaaaataaggatatatattaatttatctaactagttccttattttggcctaatttggttcttattttgcacttttttgtgttataaattacaatgaaatgaacatttttatggataaccatctgactgcatctcattaattttttacagtagactttgwgaagaaaaacttcaacattaaagcaaatgtaaatttttaagaaacaagtgtttcaataatgttctgaggcatggctgcctataaggcatcatatttttgcattgtcttcagaaatgctggggaaggtacttttgagttggctgcactattaggaggtaatttttccatgttctccagttcaatctgccatcagtttccacactgttacatggaagccaggaagccttctctaataaattgtaccctatctaggatttcttaagaaaaatcaacaggactcaaagctcaggacgagaaagcaacatcaacagactaaaggggatgggaaaattgctggt

SEQ ID NO: 255644 - DNA, 585 bp, Homo sapiens
agaaaacttagacctatagagtccactgaatttggatcaaggttaactcagctagtaagtcataaaactggaattcaaactcaggccatcagactccgtatcttattacataattttcatttcctaagcattacaacatcaagggcaatggctaataattttgcaaaggggagaaagtgttaaattaggcatccattaatggttttccacaagcctttcttggacgcattctatgcatgaaatactctcaatcacttacattatttaacaagcataagcatgtgtactgtaatcttctaaacacagtaaaataatattataaaggcaccatgttataaattaaacaaactcttgtaacatgaataaatcagcattaaatttcagtcaaatcaagcrcacactttagttgggatctggggtaaaatttgaaaagaaaatagacagaaatgtttattctcaaactgagagtcgatctgttttgctttgggagacaaatgggatggctggaaatagatggggcagagaagggctggtgattggagaaaggaggaaattcaacataagatgctactgagaaaaagtgag

SEQ ID NO: 255645 - DNA, 569 bp, Homo sapiens
agtcgggcctgtcggaattatcggcttcctcattatcactcttgcacagagagacagccacgcatgaagtcgcggcgcagatcacccgaggacccaggaggtcaccaggaacgtcccgaggaaacatgaggcccggcgcggaggagatggctctgcgccccgggactctgcgcgccgcgccgccgccaccagtggctttgttgggccggccagttgccttggaaacaagagaacccaagsaagggctggactcctgctgcagacagggagcagagcaccgcaccttgaaatacggagaaaaacctgaaaacgctgagaggtggagtgacaacttgcattcagctgtttcagaaacattgttgaccagtaaggaaaatccaaatgtgtattttgtcccaactagctgagtgcagattgcaacgaggcttaagggagtccttcaatattgactttctttcccatgagtcaccttatccgaaagctcagtcactgagcactaatattctggtttgagtagtaactatcatatctttttgaagcatgggaataataaactaataagtattcat

SEQ ID NO: 255646 - DNA, 478 bp, Homo sapiens
ggactgctgggttccattcatagctaggtattttttggacattttccttaacctctctgccttcgtttcatcatacataattcaggataatagcagtaccgaccccataaagttgttgggaagtgtaaatgaattattgtatgaaaagctctgggaatattacctagcacattacaaatgctatattagagttggctattattatttattcatatataaaaacaacactaaattataataatagctcatgtttattgagtgcttactgtgagtcatatattttcccaagcattttatatgcaagtcagtcatcagatcttcatggcaaactattagatagagttattattatccccattttayggataaggaaattggcagcaaaactcaggcctggagctctttattactatcccttcatctctttaatatgaatttccttttccagtcttttcacatagtttccttcttcgtgtag

SEQ ID NO: 255647 - DNA, 478 bp, Homo sapiens
ggactgctgggttccattcatagctaggtattttttggacattttccttaacctctctgccttcgtttcatcatacataattcaggataatagcagtaccgaccccataaagttgttgggaagtgtaaatgaattattgtatgaaaagctctgggaatattacctagcacattacaaatgctatattagagttggctattattatttattcatatataaaaacaacactaaattataataatagctcatgtttattgagtgcttactgtgagtcatatattttcccaagcattttatatgcaagtcagtcatcagatcttcatggcaaactattagatagagttattattatccccattttacggataaggaaattggcagcaaaactcaggcctggagctctttattactatcccttcatctctttaatatgaatttccttttcyagtcttttcacatagtttccttcttcgtgtag

SEQ ID NO: 255648 - DNA, 634 bp, Homo sapiens
tggtgactggtacatataaatattttatacagactcttctctttgtgccattaggatgatgaaatgtatatatgctaatggaattctaaggttctctgatttttcttttagggtcaattgtcaattatctacagcacaattattgtaagttgaagcaattctttcttccacttttctctatcagtatcgtctttgttgagatgaagcattttagtggcaatagacttactcataacatagctagaattgcagtgtctcattttaytgtgtcactgccaaggatgatactggcagattcttaaggtactgctttgttgacaatgtagttgacactatttattgttattcttaattattactgatagtacatcaaaagtggaaaaggacaattgaataaacatatccttatcaatttgacctcttctaagaaatacatgatccccttgacttaacacaattcctggtcaatataagtgtctgccccactacacccccattacctgcctaatcagacctacctactgtatcctctatagcaatttcttcctaattgttgactgttctaatggacagtatgttcggaggaggcaacatggagcaatggagaaattgctgctgagttatctcccacaga

SEQ ID NO: 255649 - DNA, 634 bp, Homo sapiens
tggtgactggtacatataaatattttatacagactcttctctttgtgccattaggatgatgaaatgtatatatgctaatggaattctaaggttctctgatttttcttttagggtcaattgtcaattatctacagcacaattattgtaagttgaagcaattctttcttccacttttctctatcagtatcgtctttgttgagatgaagcattttagtggcaatagacttactcataacatagctagaattgcagtgtctcattttattgtgtcactgccaaggatgatactggcagattcttaaggtactgctttgttgacaatgtagttgacactatttattgttattcttaattattactgatagtacatcaaaagtggaaaaggacaattgaataaacatatccttatcaatttgacctcttctaagaaatacatgatccccttgacttaacacaattcctggtcaatataagtgtctgccccactacacccccattacctgcctaatcagacctacctactgtatcctctatagcaatttcttcctaattgttgactgttctaatggacagtatgttsggaggaggcaacatggagcaatggagaaattgctgctgagttatctcccacaga

SEQ ID NO: 255650 - DNA, 574 bp, Homo sapiens
aatttggtaaatacatctattctcttaaagtacaaatttccaacatctgcagaactcaagagcccaaaacataaatattcaaatatttcatcgagagttttaaatttattaataccaccaagtttactcagctgtttctatacttggatgactgatttttgtctgaagtttagtaaagaggagggtatcttgcttcaaactcactatgaagattgttaatttgattttttttcttcttttaacaaacaattcttttaggaatttcttaaaaattaaatgtgacaatctaggtccatagaatgttaaaatttaaaagaaattgatcctctaatcccatggcactcaaacctaaagccattactcaaatatagctaattctgggccctggtgttaatattcagatcctgttggtcagaattgggtacatttgataggaaccatcattggttctgatatgctgattcatggatctgcatagttatctatagatttctaattcagccttttayctttagagatgaagacgttgagatcctgacagcaaaaataatttctgaaagaccctctggactct

SEQ ID NO: 255651 - DNA, 582 bp, Homo sapiens
gtatgttatttgtttctgttttcttgctgcttttaggatccttcctttatccttgacctttgggagtttgattattaaatgttttgaagtagtgttatttgargtaattctgcttgatgttctataagcttcttgtacttgaataatatctttttctagtttgggaagttctctgttattatccatttgaatcaaatttctacccgtagctctctctctatatctcctcttcaaggccaataactcagatttgcccttttgaggctattttccagatcacgtaggcatcctttgttcttttttaattctttctgatgtttttgtcctatgactgaatattttcaaatagtctgtcttcaagctcactaattctttcttctgcttgatcaattctgctgttaagaaagtctgatgcattctttagtatgtcaattgcatttttcaactcaagaatttctgcttgattctagttaattatttcaatatatttgttaaatttatctaatagatttctgaattccttctctgggttatcttgaattaagttgtgtttcctcaagacagctattttgaaattgtcat

SEQ ID NO: 255652 - DNA, 257 bp, Homo sapiens
ggttggcttgtttgtacctgtccttcagggaaaggatttcaaggtattcaaagagaccttggtgttgtgatctaaatttttggtcackgcagccacatctgcattagagggcatcccaagtccagtaatgctatggctcttgcagattcatggagatactgccttggtggtctcagataatttctggaagaattctctggattaccaggcagaggctcttcttctcttccctcaactttctctgaaacaaacagagt

SEQ ID NO: 255653 - DNA, 600 bp, Homo sapiens
ataataatgaaatgaagaatactgataataaaaataaagataaatgtatatggtgtacataatttcaggtactggaaagcacaccaaatataaataaataaaactatacaggctgggtgcagtggctcatgtctgtaatcccagcactttggaaggccgaggcgggtgggtcacctgaggtcaggagttcgagaccarcctggccaacatggtgaaactctgtctctactaaaaatacaaaattagccaggcatggtggcgggtgcctgtaattccagctactcgggagactgaggcaggagaatcacttgaacccaggaggcggaggttgtgggtagccgagatcctaccattgcactccagcctgggcaacaacagggaaactccgtctaaaaaaataataataataaataaataaataaatttaaaaaaaaaaactatacagggggatggtgaccaaaagctactttggacacaatgagtaataatttagtgagcaatattgcacagttctgtatcatttcaaaatctatataattaaccctgtccttttctctcatgggctatactaagtcacacatatttttaacaacctgctga

SEQ ID NO: 255654 - DNA, 600 bp, Homo sapiens
ataataatgaaatgaagaatactgataataaaaataaagataaatgtatatggtgtacataatttcaggtactggaaagcacaccaaatataaataaataaaactatacaggctgggtgcagtggctcatgtctgtaatcccagcactttggaaggccgaggcgggtgggtcacctgaggtcaggagttcgagaccaacctggccaacatggtgaaactctgtctctactaaaaatacaaaattagccaggcatggtggcgggtgcctgtaattccagctactcgggagactgaggcaggagaatcacttgaacccaggaggcggaggttgtgggtagccgagatcctaccattgcastccagcctgggcaacaacagggaaactccgtctaaaaaaataataataataaataaataaataaatttaaaaaaaaaaactatacagggggatggtgaccaaaagctactttggacacaatgagtaataatttagtgagcaatattgcacagttctgtatcatttcaaaatctatataattaaccctgtccttttctctcatgggctatactaagtcacacatatttttaacaacctgctga

SEQ ID NO: 255655 - DNA, 473 bp, Homo sapiens
gtggggtacccttctggataaaaatacaaagkctttttttttttttttttttttttgagaaggagtctcgcttggtcgcccaggctggagtgcagtggtgcgatcttggctcactgcaaactgcgcctcccgggttcacgccattctcctgcctcagcctcccgagttaaaaatacaaagtcttacaaagggagggattttggttcattctcccttgtttctttttcaaatccagaagcaatgcttagtgataaaggagctatcttgaagccaaggacaaaagctacatatccagaatggtggagcagaaagtggaaggagcatgggtcactagcgataccatagagccggtcttcagcagcccgcctctgacttcctatgatataagaaaaacaagacacttacacgggtggaagaaattgatttaggtattttattacatgtagccaaacgcaatcctaatgctaacaaac

SEQ ID NO: 255656 - DNA, 562 bp, Homo sapiens
tgactcctttgagcttcagtttcatcttatgtaaattggtcactgttgttaagacttayagagatgaatggaaggtagctggctctattaatatatcctatgaatgtaaccattaattattagatacaatgtaagaagccagataagacagacagagtagatgaggcaagggtgaatattatctcctatttattatcatttgttttacatatggttatctatccatgtcctacagatgtcgagtatcaccctaaaactgtttgtcctgatgcttgtcctcctccccgtttaggacagatagaatctttcatagtcatagatattcattcattcatccattcattcattcattgaatttataattactgagctcctgctgggtactcttctaggtgctggggatgctatagggaaaaaaccactgaggtccctgatattgtaaaggagttggctttagttgcagcaaagcctctctgtctctgcattatatgctagggaaagcagagaatataggcttagatattggtgtatccataatgggaagttgagagatattgtgtcc

SEQ ID NO: 255657 - DNA, 562 bp, Homo sapiens
tgactcctttgagcttcagtttcatcttatgtaaattggtcactgttgttaagacttatagagatgaatggaaggtagctggctctattaatatatcctatgaatgtaaccattaattattagatacaatgtaagaagccagataagacagacagagtagatgaggcaagggtgaatattatctcctatttattatcatttrttttacatatggttatctatccatgtcctacagatgtcgagtatcaccctaaaactgtttgtcctgatgcttgtcctcctccccgtttaggacagatagaatctttcatagtcatagatattcattcattcatccattcattcattcattgaatttataattactgagctcctgctgggtactcttctaggtgctggggatgctatagggaaaaaaccactgaggtccctgatattgtaaaggagttggctttagttgcagcaaagcctctctgtctctgcattatatgctagggaaagcagagaatataggcttagatattggtgtatccataatgggaagttgagagatattgtgtcc

SEQ ID NO: 255658 - DNA, 562 bp, Homo sapiens
tgactcctttgagcttcagtttcatcttatgtaaattggtcactgttgttaagacttatagagatgaatggaaggtagctggctctattaatatatcctatgaatgtaaccattaattattagatacaatgtaagaagccagataagacagacagagtagatgaggcaagggtgaatattatctcctatttattatcatttgttttacatatggttatctatccatgtcctacagatgtcgagtatcaccctaaaactgtttgtcctgatgcttgtcctcctccccrtttaggacagatagaatctttcatagtcatagatattcattcattcatccattcattcattcattgaatttataattactgagctcctgctgggtactcttctaggtgctggggatgctatagggaaaaaaccactgaggtccctgatattgtaaaggagttggctttagttgcagcaaagcctctctgtctctgcattatatgctagggaaagcagagaatataggcttagatattggtgtatccataatgggaagttgagagatattgtgtcc

SEQ ID NO: 255659 - DNA, 583 bp, Homo sapiens
cacattttcaaagcagcaatctcttgactagccatatcctgctttttactcacttaaacctctaaatccacagctgcaagcaaccaaaggccacaagtcccaaagaagcaatctaatcaaagaaaacattgaatcaaactggcttctctcccttctcctcaactggcatgaaaaatgctaaaggtggtaataataataatatatttaacatttctcatgttttttgtttctaaaacatatggtttcttgctacatgtagagaattgctaagacattcatttcagctttcagctcttgcaaattaaacatacgttgtgtaaaaactactttaaatgaatgatttttgaaatgaagttttaaaaagtactctttgagagatgaactcccttttttccatatatgtatctggatttctttatgtcttttttgagtagcatcccctcacaagagtagcatcccgaaggaaacttcatagcattaaccatcatggtaatakattaattactaatacaagtatttgtttaaggtctaacttattaactagagggtgagatctctaacagcaggggtcctgcctgttcac

SEQ ID NO: 255660 - DNA, 533 bp, Homo sapiens
aggaaagatgaatgaaacccaaaaaccaaactagaaaggttagcaaacagttatcaaccaacattctaaaccccaatggctttaaaggtaagtctagggatgttgtactttatttgccatctcttaaaaaaggaattaaaaaatacaagaagaaagaaactctaatggccagtagccataaaatctatttacatattcttccacctctcaagtctcatgcaaattaatgtgtaattacatttagatggcgcagctgctctgacactctgctcccagcttttatttctgagtttcaaaggtttcataaggaaaccttgaaagaaaaaagtaaatattttgaaaaggagttacaatttgtcagcagtaatccttccctggataggcaaagaaaggcaaatcttggtagatgagagaawtgtggcttttgaaaataatagcattacactgaaatttaatctgctagcgttattttttccaagcaaaccctctttgcattcaatttgtcatttattacagtaagaagcaacagggtc

SEQ ID NO: 255661 - DNA, 562 bp, Homo sapiens
tatattactgtcatattcatcaataagaatagtaagctttttaaacatagtaagaattctaaaatagtaagattttgacacattctaataaaaagctgaaacttagaagyttcatccccagaagcatagggaactttaagtacattagataagaaaaatcataaaatacctcaaacagtagaaaatattccaaaaaatactcttattcagagttttggaggcagaaaatggagacgtcacagcaaagtaaagggcagaaaaccgaacttgtggtctgggagggacagagtgaggacgaagctgtttgcagatggagcagccctcttgatggacgcacactggggtagggaagtctggaggacaaatgtgtgcaaacccaagacactcctccaccccaaacgatccctgaacaggtcgccaacagctgcagctggctcttgggagggaggaacctgtctgggcacagggagacagcggatcatcctttctgaaccaacctcccccatcctccagctacattcagagactaaaccaggtttaccttcaggtcttctggattaac

SEQ ID NO: 255662 - DNA, 526 bp, Homo sapiens
actttaagtacattagataagaaaaatcataaaatacctcaaacagtagaaaatattccaaaaaatactcttattcagagttttggaggcagaaaatggagacgtcacagcaaagtaaagggcagaaaaccgaacttgtggtctgggagggacagagtgaggacgaagctgtttgcagatggagcagccctcttgatggacgcacactggggtagggaagtctggaggacaaatgtgtgcaaacccaagacrctcctccaccccaaacgatccctgaacaggtcgccaacagctgcagctggctcttgggagggaggaacctgtctgggcacagggagacagcggatcatcctttctgaaccaacctcccccatcctccagctacattcagagactaaaccaggtttaccttcaggtcttctggattaaccttacaagcaggcacagattaatttcagagctctccccaaagtcctcccacctgtttgcttgcttaatgcctgaaattccttcaagatggaccaaa

SEQ ID NO: 255663 - DNA, 526 bp, Homo sapiens
actttaagtacattagataagaaaaatcataaaatacctcaaacagtagaaaatattccaaaaaatactcttattcagagttttggaggcagaaaatggagacgtcacagcaaagtaaagggcagaaaaccgaacttgtggtctgggagggacagagtgaggacgaagctgtttgcagatggagcagccctcttgatggacgcacactggggtagggaagtctggaggacaaatgtgtgcaaacccaagacactcctccaccccaaacratccctgaacaggtcgccaacagctgcagctggctcttgggagggaggaacctgtctgggcacagggagacagcggatcatcctttctgaaccaacctcccccatcctccagctacattcagagactaaaccaggtttaccttcaggtcttctggattaaccttacaagcaggcacagattaatttcagagctctccccaaagtcctcccacctgtttgcttgcttaatgcctgaaattccttcaagatggaccaaa

SEQ ID NO: 255664 - DNA, 532 bp, Homo sapiens
ttataccatgcacagcagtttttacccatgctgttatatataagtatttgaagtgacagaaataagaaaaatattgatcttttagaaaggagggatattgcctgtcttcttcattattgtattcgcagtacttggcacatarttaaatgttaaatggatgacctttttttttaaaggctgaaataacagtaacacttctgtagtatttctgccagttaaaaacaaaacaaaacaaaacaaatggcagagtacaacttttgaaatcagccataaggacctatgtttgaacctgtctcttcaacaaattagctacatgactttggacaaattaacctcttagaacccttgtcttcatctacaaactaacctctcagaaacccttgttttcatctttaaataaagggcttcagaacgtttataatgtagataatatccatctcagacttgttctaagtgtcaagtgagatattttacctgtgaggtactgagcacgtggcagctgtgaagacacagcatctgtgccagtaaaggc

SEQ ID NO: 255665 - DNA, 562 bp, Homo sapiens
acactcatggctcgtctaaggggatgtgattaacacatatttatgtttaagctcagttaatatgctcttataccatgcacagcagtttttacccatgctgttatatataagtatttgaagtgacagaaataagaaaaatattgatcttttagaaaggagggatattgcctgtcttcttcattattgtattcgcagtacttggcacatagttaaatgttaaatggatgacctttttttttaaaggctgaaataacagtaacacttctgtagtatttctgccagttaaaaacaaaacaaaacaaaacaaatggcagagtacaacttttgaaatcagccataaggacctatgtttgaacctgtctcttcaacaaattagctacatgactttggacaaattaacctcttagaacccttgtcttcatctacaaactaacctctcagaaacccttgttttcatcttyaaataaagggcttcagaacgtttataatgtagataatatccatctcagacttgttctaagtgtcaagtgagatattttacctgtgaggtactgagcacgtg

SEQ ID NO: 255666 - DNA, 509 bp, Homo sapiens
gtggcagctgtgaagacacagcatctgtgccagtaaaggcaagtgctacttaggagatatttagttaggggactttgatgaattagataatctgggaagaaagagcaacctctaatccttttcagcctacagtccagccctcacaagcttcccaaagcgacctgtctcttcctacaattcttccatggcccccttgacccccacctcattgccctcttgctatgtcagaccctaacagtatcacatagcgtaatgataatggacatggaccctggcagatgaggtaaatcatagcatctgtttcatttttgtgaacatgttagcagttggtcyatttacatacatgtctggcacagagtaaacattctttagatgttaccaattgtagtgacttttcacatctctgaatgtttctcatttgtctaggaagtccttcgcagatggtaccttccacacgttgggtgctcagtaccaactcagactcaattttcaaaaaaaaaaaaaacaaa

SEQ ID NO: 255667 - DNA, 561 bp, Homo sapiens
aaaacaaaataaaaataaagaacaatgttagccaatacataatacagtgttacactgcaaatggcactgattatgccacagttgctcagagaaaagtgttgagaaaaggttgtcagaaaagtgaaattttaayttaactttaaaaagtcaataaaaggctgggtgctcatgcctataatcccagcactttgggaggccaaggcatgtggatcacctgaggtcaggagtttgagaccagcctgaccaacatgataaaaccccgtctctactaaaaatacaaaaattagctgggcttggtagcatgtgcctgtaatctcagctactcaggaggctgaggcaggagaatcgcttgaacccagaaggcagaagttgcagtaagccaagatcacaccactgcactccagcctgggcaacagagcaagactccaactcaaaaaaaaaaaaaaagtggataaaagagggtaaggaaggataaaaaaatgaggtacagccccagtgcagtggttcacatctgcaatcccagcaccttgggaagcagaggcaggaggatcactgcaaccc

SEQ ID NO: 255668 - DNA, 561 bp, Homo sapiens
aaaacaaaataaaaataaagaacaatgttagccaatacataatacagtgttacactgcaaatggcactgattatgccacagttgctcagagaaaagtgttgagaaaaggttgtcagaaaagtgaaattttaatttaactttaaaaagtcaataaaaggctgggtgctcatgcctataatcccagcactttgggaggccaaggcatgtggatcacctgaggtcaggagtttgagaccagcctgaccaacatgataaaaccccgtctctactaaaaatacaaaaattagctgggcttggtagcatgtgcctgtaatctcagctactcaggaggctgaggcaggagaatcgcttgaacccrgaaggcagaagttgcagtaagccaagatcacaccactgcactccagcctgggcaacagagcaagactccaactcaaaaaaaaaaaaaaagtggataaaagagggtaaggaaggataaaaaaatgaggtacagccccagtgcagtggttcacatctgcaatcccagcaccttgggaagcagaggcaggaggatcactgcaaccc

SEQ ID NO: 255669 - DNA, 432 bp, Homo sapiens
actgttatacacacaatctggcctatttcagaacctctgatactgataatgtgtgtgtgcatgtgtatgtgtgtgtgggggaggggcrcatgtgcatgggtgtttggtggttgtcaggaggggaggcatggtggagggagagaaaccaagaccttggcctcttacctcagaataaatgagcacttcaaacacctttcaaatcctgaatgtaactttggctgctaatcttcctttaaaatcactctaggatttggaaatacctctagaaataacctccatgatgggcatcatgagaatgtacagatccattagaccagagatttccaaaaggacaaaactcatgttcatcctttgagctggctcctccacctggtgtgtatttactcaaaaataataacacaatcgctgcagatcttctttaataagtgcccc

SEQ ID NO: 255670 - DNA, 473 bp, Homo sapiens
aatatcagagctcagtaccctcacctttggggttaggtgcccttcttttgttctccaaagcacccctatgatgttttcatagaattttccaacaataatcataattgtctggttacttctttattccctctaaattacctttatcatgcacagtagctggcacatagtgattgctcagtgaatcgttttgaggttaattcatttattcactcacataatagtttttaagagcccactgaattctcttttgtctacaaaataagacaaaacaaaatgaccactcagtgagcactcaaaacamaataagataaaaatgcatacccctggacttcatatactagtgaatgtagtaagacagtaaacaaataaaatataaaattgtgtcaggtggtaactgctaaagcaaagagggggatatggattgtgagaagtagatggaatagtttaaattgtgtgtgtggtgggggcggggc

SEQ ID NO: 255671 - DNA, 508 bp, Homo sapiens
ctgtgtaggctttgttctttcactctttgcaataaatcttgctgctgctcactctttgggtccacactgcctttatgagctgtaacactcaccacgaaggtctgcagcttcactcctgaggccagcgagaccacaaacccaccaggaggaatgaacaactctgaacrgaaggaatgaacaactccagacgcgccgccttaagagctgttaacactcaccgggaaggtctgcagcttcactcccgaagccagcgagaccacgaacccaaccgaaggaagaaactctaagcacgtctgaacatcagaaggaacaaactccggacacaccatctttaagaactgtaacactcaccgtgagaatccgtggcttcattcttgaagtcagtgagaccaagagcccaccaatttcagacacaaaattacaaacatgtggtcactcttgtgcactcctcccccaccccaccaacccccctcagctttaagcttttggtctttctgatgttttgaac

SEQ ID NO: 255672 - DNA, 508 bp, Homo sapiens
ctgtgtaggctttgttctttcactctttgcaataaatcttgctgctgctcactctttgggtccacactgcctttatgagctgtaacactcaccacgaaggtctgcagcttcactcctgaggccagcgagaccacaaacccaccaggaggaatgaacaactctgaacagaaggaatgaacaactccagacgcgccrccttaagagctgttaacactcaccgggaaggtctgcagcttcactcccgaagccagcgagaccacgaacccaaccgaaggaagaaactctaagcacgtctgaacatcagaaggaacaaactccggacacaccatctttaagaactgtaacactcaccgtgagaatccgtggcttcattcttgaagtcagtgagaccaagagcccaccaatttcagacacaaaattacaaacatgtggtcactcttgtgcactcctcccccaccccaccaacccccctcagctttaagcttttggtctttctgatgttttgaac

SEQ ID NO: 255673 - DNA, 508 bp, Homo sapiens
ctgtgtaggctttgttctttcactctttgcaataaatcttgctgctgctcactctttgggtccacactgcctttatgagctgtaacactcaccacgaaggtctgcagcttcactcctgaggccagcgagaccacaaacccaccaggaggaatgaacaactctgaacagaaggaatgaacaactccagacgcgccgccttaagagctgttaacactcaccgggaaggtctgcagcttcactcccgaagccagcgagaccacgaacccaaccgaaggaagaaactctaagcacgtcygaacatcagaaggaacaaactccggacacaccatctttaagaactgtaacactcaccgtgagaatccgtggcttcattcttgaagtcagtgagaccaagagcccaccaatttcagacacaaaattacaaacatgtggtcactcttgtgcactcctcccccaccccaccaacccccctcagctttaagcttttggtctttctgatgttttgaac

SEQ ID NO: 255674 - DNA, 508 bp, Homo sapiens
ctgtgtaggctttgttctttcactctttgcaataaatcttgctgctgctcactctttgggtccacactgcctttatgagctgtaacactcaccacgaaggtctgcagcttcactcctgaggccagcgagaccacaaacccaccaggaggaatgaacaactctgaacagaaggaatgaacaactccagacgcgccgccttaagagctgttaacactcaccgggaaggtctgcagcttcactcccgaagccagcgagaccacgaacccaaccgaaggaagaaactctaagcacgtctgaacatcagaaggaacaaactccggacacaccatctttaagaactgtaacactcaccrtgagaatccgtggcttcattcttgaagtcagtgagaccaagagcccaccaatttcagacacaaaattacaaacatgtggtcactcttgtgcactcctcccccaccccaccaacccccctcagctttaagcttttggtctttctgatgttttgaac

SEQ ID NO: 255675 - DNA, 604 bp, Homo sapiens
tgaggaaattagtttcactacatgatactttttttatggatggtaaatctgtgtctttccttttcagatgagacaaatgctgctttcccatttaacacactcacagataggcacagaaaagttgtagttttaaagtataatattattttgaaatattgattaggataacagattcacgtacatccttactgtgaccaattttaaataaaaaacttccatctrcaaaaacttgaggaaatattaacattgttcatgcaactctaaaaggtactacctctgtttcaagataattagaaagaaattgcctcaataactcagaaactcatcattaagaaaccccagcttgactactacttttattttagtatactcatattcagatgtttttattctcttgaattgttggattccttgccatctaaaacaatcatttgaaatgattactataatttcattatctttaaaattctcaagttcacacactgagatgtcaagcttatttttttttttcaggtgaaaagaaaagcacctataaaataacacctgtagtaagcatccagataaagctttagaaccacctcaaaaaactctgagcagctgcagg

SEQ ID NO: 255676 - DNA, 604 bp, Homo sapiens
tgaggaaattagtttcactacatgatactttttttatggatggtaaatctgtgtctttccttttcagatgagacaaatgctgctttcccatttaacacactcacagataggcacagaaaagttgtagttttaaagtataatattattttgaaatattgattaggataacagattcacgtacatccttactgtgaccaattttaaataaaaaacttccatctgcaaaaacttgaggaaatattaacattgttcatgcaactctaaaaggtactacctctgtttcaagataattagaaagaaattgcctcaataactcagaaactcatcattaagaaacccmagcttgactactacttttattttagtatactcatattcagatgtttttattctcttgaattgttggattccttgccatctaaaacaatcatttgaaatgattactataatttcattatctttaaaattctcaagttcacacactgagatgtcaagcttatttttttttttcaggtgaaaagaaaagcacctataaaataacacctgtagtaagcatccagataaagctttagaaccacctcaaaaaactctgagcagctgcagg

SEQ ID NO: 255677 - DNA, 535 bp, Homo sapiens
atacaccctggtctcctgcagtaccctcaggcttactaggattgggaaaccccagccctggtaaatttgaggtgwgaccggttctctgctctcgaaccctgttttctgtttatcaagacaatacgtgcactgctgaacatagacccttatcaggagtttctgattttgccctggtcctgtttcctcagaagcatgtgatcttcactctgccttttgccccttgaagcatgtgatctttgtgacctactccctgttcgtacaccccctccccttttgaaatccctaataaaaacttgctggttttacggctcaggtgggcatcacggacctgccgatatgtgatgttgcccctggcggcccagctgtaaaattcctctctttgtgctctttctctttatttctcagactggctgacacttagggaaaatagaaagaacctacactgaaatattgggggcgggttcccccgatatttcacgatccatgatatcaaccatcttaaaggataagatgtgaatcagtgaggcagtgaaat

SEQ ID NO: 255678 - DNA, 535 bp, Homo sapiens
atacaccctggtctcctgcagtaccctcaggcttactaggattgggaaaccccagccctggtaaatttgaggtgtgaccggttctctgctctcgaaccctgttttctgtttatcaagacaatacgtgcactgctgaacatagacccttatcaggagtttctgattttgccctggtcctgtttcctcagaarcatgtgatcttcactctgccttttgccccttgaagcatgtgatctttgtgacctactccctgttcgtacaccccctccccttttgaaatccctaataaaaacttgctggttttacggctcaggtgggcatcacggacctgccgatatgtgatgttgcccctggcggcccagctgtaaaattcctctctttgtgctctttctctttatttctcagactggctgacacttagggaaaatagaaagaacctacactgaaatattgggggcgggttcccccgatatttcacgatccatgatatcaaccatcttaaaggataagatgtgaatcagtgaggcagtgaaat

SEQ ID NO: 255679 - DNA, 535 bp, Homo sapiens
atacaccctggtctcctgcagtaccctcaggcttactaggattgggaaaccccagccctggtaaatttgaggtgtgaccggttctctgctctcgaaccctgttttctgtttatcaagacaatacgtgcactgctgaacatagacccttatcaggagtttctgattttgccctggtcctgtttcctcagaagcatgtgatcttcactctgccttttgccccttgaagcatgtgatctttgtgacctactccctgttcgtacaccccctccccttttgaaatccctaataaaaacttgctggttttacrgctcaggtgggcatcacggacctgccgatatgtgatgttgcccctggcggcccagctgtaaaattcctctctttgtgctctttctctttatttctcagactggctgacacttagggaaaatagaaagaacctacactgaaatattgggggcgggttcccccgatatttcacgatccatgatatcaaccatcttaaaggataagatgtgaatcagtgaggcagtgaaat

SEQ ID NO: 255680 - DNA, 586 bp, Homo sapiens
tagtgctgtaactctatactggtctgtggtattacttccactttggagccatgtacttctaataaaatgtgtcagagaagaatgcaaagtttgagtcattgtatctacccagaattgtatawtataactgttacaataagtcaagatttttagaatgtgtcaaatgtaatggcatgtgccaacagggttgtagtttgagaaactgtcacaacttatatggaatttctttttagggcagggtctgacacctttggttgtagtggggaaaaggaattcaatgtctttattttttcctattactggaatgtgttcactatttggtgcaatcttccttctatattttaaattagtaattcacaaaggagcagattagaggctgcaaactggtaacctgtgaaccagattttggtagtagatacatttcatttttctttcccagattagttgctaatattgggcaatttcatataaatcttatttaaaaatttctcttgagaaatttaaaaagctggcaccattgagtttaccttcctttataaggaaggttggctgaaggtgaatggagtctgtctgctttaggtaggac

SEQ ID NO: 255681 - DNA, 586 bp, Homo sapiens
tagtgctgtaactctatactggtctgtggtattacttccactttggagccatgtacttctaataaaatgtgtcagagaagaatgcaaagtttgagtcattgtatctacccagaattgtatattataactgttacaataagtcaagatttttagaatgtgtcaaatgtaatggcatgtgccaacagggttgtagtttgagaaactgtcacaacttatatggaatttctttttagggcagggtctgacamctttggttgtagtggggaaaaggaattcaatgtctttattttttcctattactggaatgtgttcactatttggtgcaatcttccttctatattttaaattagtaattcacaaaggagcagattagaggctgcaaactggtaacctgtgaaccagattttggtagtagatacatttcatttttctttcccagattagttgctaatattgggcaatttcatataaatcttatttaaaaatttctcttgagaaatttaaaaagctggcaccattgagtttaccttcctttataaggaaggttggctgaaggtgaatggagtctgtctgctttaggtaggac

SEQ ID NO: 255682 - DNA, 591 bp, Homo sapiens
tgtgggattgctaggtcctatggtagtagttctattttaattttttgagaaacctctatacaattctccatgatggttrtactaattgacatccctaccaaccgtgtacgaggattccctttgctctacatccttaccaacacttgttatcttttgtcttttttacaatagccattctgacaggtgtgaggtgataactcactatggtttgattttcatttccttgatgattagtgatgtggagcaccttttcatatccctgttggccctaggtatatcttctttggaaaaatgtcacatctcttgtgatagtacttttaatattatcaataatagtctataaagtgtcagagttctcaaatgttcagacccatcccttccaaggatgactttaaccccacctgcaaatcctgctctggctaatctccacctgcacatctgggtaatctccaggttcaatggagaccttaaacatgaggcatttaaataggcccttttccaacatgcaggtgactcaggatcaatactgttatcctaagaatggtcctagagtcatgccttagttctctgataattgagtttctgctcaga

SEQ ID NO: 255683 - DNA, 525 bp, Homo sapiens
aataagtatgatctgatggcaaaattttgttccctgttgttgtccaaaaaagaattaatacacgtattgtatgtcctgagttgtaaacagaatgtcaattgagggaaattacagtgtggttttcgtaacagtgtctatagttatctccattttgtactaacattttgtaattaagatgttgtaattttgtaagtaagattccagaaatgcttcgtgtagcaaactctttacaccgtgtagacacagatcccattgtacctgccccaggctcagtgacaatgagctctcagtttccctattccatgctttaagaaattattggtttgactgggcatggtggttcacgcctgtratcccagcactttgggaggccgaggcagtcagatcccttgaggtcaggagtttgagaccagcctggccaacatagtgaaacccagtctctactacaaatacaaaaattagctgggcgtggtggtgcacacctgtaatcccagctactgggcaggctgagacagagaatcactt

SEQ ID NO: 255684 - DNA, 586 bp, Homo sapiens
gccattacagtattatacataatagtttcactgtcctaaaatattttatatttttcacttatttaatactttcctcatcctctacgccacagccctggaaacaactgatttttttttttttttttaccatctctatggttttgacttttccaaaatgtcaaataatttttattatagtatacrtagcatttccagattagattctttcacatagtaactagttaagattcatccatgtcttttcatgctttgatagtcacttctttttatcactgaataatactccaacttgtatgtagtttctttatccattcacttttgaaaaccatcttggttgcttctagtctttgttgattaaaaatagagctgctgtaaccatccatgtgtatatttttgcaaggacataattttttgcttcatttaggtaaatatgtaagaccaagagtgctagattgtacagcaagaagagtttagctttcccagaaaatgtcaaactattcttcaaaggagctatgtcgttttggattctcaaaggcaatgattgagagtttccggttgctctgcattcttgctagcaatttgcatt

SEQ ID NO: 255685 - DNA, 559 bp, Homo sapiens
cctaaacgactctcagattccaaagtgtaagatgatatacaagcttcatgcacccaaartctttgattttcacgtttcatttatatatagcattaactcactaattcatctttcccaacaaacagctattaagcacctagtatattttagtcacttgtttagttaatcaacaacaaaaattcactgctttcataaatcttaaagtctattaagaatggcaagcaatgaaaaagaaaatacatacattattggaagttaagtcataaagaggaagaaaacagcagaaaagagaagacaaagagtgctgcgtttagaggtggtatgaaattttcaatagagggtcagacaaggtatcattaagaaggtaacattttttattttgttaaccccaaacacttgtataatactatctgccagtcaccattccaattccttttccaatattaactcattttatcctcatgacaactctatgaagaaggtattattattagctgtatcttacagaaaatgcaacagaaaaacagaaaggttaacaatttgcccaagatccacaaag

SEQ ID NO: 255686 - DNA, 519 bp, Homo sapiens
aaatatttacctagaggaggtaggtaaattaagaagatagtgtagattaatctttaagaaaaggtgggatggaacaagttgctttggggatgtccatgtaatagctgtggttattttccctgtttatttcatatacccttttccgataggtatcattctccaagggtggttcacagattcttgaggatttctgagacatgttcaagtgtttgcaaggtcaaagctgttctcataatagtgctaagatgttgtgtgactttttcatcatgatgatatttgcacwaatgacaaaaagcaatagaggatagaactggtggttccttagcttaaatcaagggaatggcactgaactatgttagtttaaaccattgtattttctactgacatgcactcatggggaaaagaattccactttcacttaaggttgttaaaatagtaaaaagtattaagtttattaaattactaattatattaaatctacaatcttgagtactgtccttttttttgagggaaccaagt

SEQ ID NO: 255687 - DNA, 519 bp, Homo sapiens
aaatatttacctagaggaggtaggtaaattaagaagatagtgtagattaatctttaagaaaaggtgggatggaacaagttgctttggggatgtccatgtaatagctgtggttattttccctgtttatttcatatacccttttccgataggtatcattctccaagggtggttcacagattcttgaggatttctgagacatgttcaagtgtttgcaaggtcaaagctgttctcataatagtgctaagatgttgtgtgactttttcatcatgatgatatttgcacaaatgacaaaaagcaatagaggatagaactggtggttccttagcttraatcaagggaatggcactgaactatgttagtttaaaccattgtattttctactgacatgcactcatggggaaaagaattccactttcacttaaggttgttaaaatagtaaaaagtattaagtttattaaattactaattatattaaatctacaatcttgagtactgtccttttttttgagggaaccaagt

SEQ ID NO: 255688 - DNA, 585 bp, Homo sapiens
tcaagacttaggagaaagctacaattattaagtgatatttgtggaagaatagacaaaaagatcaatggaaaaaaatagagcccagaaatagatccgcataaatatagttaactgatcttttacaaaggagcaaaggcaataaaataaagcaaagacagtcttttcaaaaaattgtcttggaaccaactgaacaatccacctgcaaaaatatgaataaagacacatgctttatattcttccaaaaattaactcataatggctaggcatggtgactcccacctgtaataccagcactttgggaggccaaggcaggaggactgctggagcccaggagtttgagacgagcctgcataatatagtgagaccccatctgtagaaraaatcttaaaaattagccaagcatggtggtgtgaacctgtacttccagctattcaggaggctgaggtgggaggcttgcttgtgcttaggaggcagaggttgcagtgagccaagatggcatcactatactccaacctgggtgacagggtgagaccctctccaaaaaaaaaaaaaaaaaaaaaaaaaaaccaccctcacaatggatca

SEQ ID NO: 255689 - DNA, 552 bp, Homo sapiens
aacgacatgtacattatttggggccttcttacaaatgcagaagcttgggccttgccccagaactactgaatcagaacttacattttaataatcttgggtttgagaaccactgttacaaccagtgtagctttgccaagacagaaagtgctcctttctattccctaggggatttgtgtttctatttgtgctggcacactaactattgattcataattttgtatcagtatatgtgccgcttttttttcatttttaggttatatttctctttccttctaatggcttatgataatttaaaataattcagaagaggcaaatgagttgaaaagttatgtgagtcataagaataaataattctactctaagtatttctcactttagataaagtataagctcaaatattattcaagctctaagattrcaggcagaatcaaccacttaacacttttttgcaaattgttctcttccatttaagaaaaagaacgcattttcaagtttctccataggttacaatttacaagctatttttctgtagaaaatgattttgttcttact

SEQ ID NO: 255690 - DNA, 641 bp, Homo sapiens
ttgaatctcctggaccaatgagctcttctttagccactttactagtatttattcatttcataactattgttcaaacttctatataacacagtaggtataggcacaaatgcwatttgtcttaggtagtttatctgataagcgaaccctgagtcaaaggtctaaggaaaataaactgtggggagcagaaaggaagggaaagaaccaagcaaagctgcaatttcaggtgaagaagcagcctcagcctgtccctactgctggaggctctggagtggtcacttttcagacaagggaacttgtatttcctcccttcttctcccaagaaccacttagtcactggcttctggcctggctacatctggggaaagtagagtcccaggcatttgcaagagaaccatggcaacttcaaacacccaggacattttctgaaggtctcagaaacacacatagacaccgggggatcattcccatagctctgctaaaggaatatctttaggtatcaggagggggcacacatggtgtcagctatatgattctaataagaaacagtacttctcctaagaggattttatagtgggtttaaatttgaggagtaagccaaaacataaaaagctcttttttgtctctttgtttgtttgtagtta

SEQ ID NO: 255691 - DNA, 544 bp, Homo sapiens
gactacaacaatcattgttggttatttttgatactttggcactgataaaattgctcgtctaatcactagcaagtaaggagaaggatacaaataaagtaaatttagctactcctaacgtcagatactcctgacatctgggaaaatctgattatggttcagatatttgaagataatatgatattttaattcatattatattttaatataatgtgatatttgtcatatcagctggtatcacaggtggacattaaagcyaagagtttaggattattaaagaaaagaaaggtttgaggaattccatatcttcccaccctcgatcatttactatgttatttttccaggagcactttggacagaaaactggtccacgataattaaacatttaggaattacagaagtagagtttgaacatcaatctggccactgcctgactcatttaagaagtatttatgctaatcatttaaatagaccatagtgaatattacatgctctgatgaagaattgtttttagtttcttggatgagttatggttaattgaaggcat

SEQ ID NO: 255692 - DNA, 544 bp, Homo sapiens
gactacaacaatcattgttggttatttttgatactttggcactgataaaattgctcgtctaatcactagcaagtaaggagaaggatacaaataaagtaaatttagctactcctaacgtcagatactcctgacatctgggaaaatctgattatggttcagatatttgaagataatatgatattttaattcatattatattttaatataatgtgatatttgtcatatcagctggtatcacaggtggacattaaagccaagagtttaggattattaaagaaaagaaaggtttgaggaattccatatcttcccaccctcgatcatttactatgttatttttccaggagcactttggacagaaaactggtccacrataattaaacatttaggaattacagaagtagagtttgaacatcaatctggccactgcctgactcatttaagaagtatttatgctaatcatttaaatagaccatagtgaatattacatgctctgatgaagaattgtttttagtttcttggatgagttatggttaattgaaggcat

SEQ ID NO: 255693 - DNA, 619 bp, Homo sapiens
ccctcttatttttcttccttaaccctatcaatcattttgttgccttagtayctttcgttgcttttgctaatgcccaaaatgatcgccactgcctctttaaaaggttgttattttaaaatctcagatcgatgtcatctcaacagagcggttttatctacctgattatgaccatttttttgttgtttttgctgttgtttattactaggtgagtattagcaacagaatagatacttttaattcatatccttatttgtcaacaatggaagccctaaaaggcatatcaccactgtaagctcaatgttaagataagtgttttggaaatagaaggtactctgtaactacttattgagtaaattaattaatgtccacatttatttaccagaatatgtaaataatagttattttgctttattattatattggatctcttaattcattgttactatcaaactttcgctttccatcatcaattaaaattgtgattttaaaaaatactacaactcaacaattaagaggtagataacccaatttaaaaattagcaaagtttttacgtatacattttcttccaggaagttatgcaaatgattaatgagcacagaaaaatacgctcaacatcat

SEQ ID NO: 255694 - DNA, 648 bp, Homo sapiens
ttcttctgttttccttataatttaatttttgtctgcattcttttgtgatattttactctttatctttttgtaatatacgcatatgtcatatattttatcgctttttttactagttgcattttaagctataaatttttatttaaatcctgcactcaaatttttatatactgtttattataatttaatttcaaatattttctaacatgcattgtcattttttcattgatttatgaattaatttattttttaatttttattagtaattttcttgagatggggtctcactctgttgcccaggctagagtgtagtggcatgatctctgctcrctgaaatctgcctaccagattcaagtaatcgtcctgcctcagcctcccaaatagctgagaccacaggaacacaccaccaaacccagctattttttttattgtatttttgatagagatgtggtttcaccatgtttccagggtggtctcaaactcctgagctcaagtgatctgcacacttcagcctctcaaaatgttgggattacaggcatgagccgccacacctggttacatatgaattaatttagaaatttatttccaaattccaactatatataaacattttatacttatgtttggttattttattgcatagttttatgc

SEQ ID NO: 255695 - DNA, 648 bp, Homo sapiens
ttcttctgttttccttataatttaatttttgtctgcattcttttgtgatattttactctttatctttttgtaatatacgcatatgtcatatattttatcgctttttttactagttgcattttaagctataaatttttatttaaatcctgcactcaaatttttatatactgtttattataatttaatttcaaatattttctaacatgcattgtcattttttcattgatttatgaattaatttattttttaatttttattagtaattttcttgagatggggtctcactctgttgcccaggctagagtgtagtggcatgatctctgctcgctgaaatctgcctaccagattcaagtaatcstcctgcctcagcctcccaaatagctgagaccacaggaacacaccaccaaacccagctattttttttattgtatttttgatagagatgtggtttcaccatgtttccagggtggtctcaaactcctgagctcaagtgatctgcacacttcagcctctcaaaatgttgggattacaggcatgagccgccacacctggttacatatgaattaatttagaaatttatttccaaattccaactatatataaacattttatacttatgtttggttattttattgcatagttttatgc

SEQ ID NO: 255696 - DNA, 648 bp, Homo sapiens
ttcttctgttttccttataatttaatttttgtctgcattcttttgtgatattttactctttatctttttgtaatatacgcatatgtcatatattttatcgctttttttactagttgcattttaagctataaatttttatttaaatcctgcactcaaatttttatatactgtttattataatttaatttcaaatattttctaacatgcattgtcattttttcattgatttatgaattaatttattttttaatttttattagtaattttcttgagatggggtctcactctgttgcccaggctagagtgtagtggcatgatctctgctcgctgaaatctgcctaccagattcaagtaatcgtcctgcctcagcctcccaaatagctgagaccacaggaacacaccaccaaacccagctattttttttattgtatttttgatagagatgtggtttcaccatgtttccagggtggtctcaaactcctgagctcaagtgatctgcacacttcagcctctcaaartgttgggattacaggcatgagccgccacacctggttacatatgaattaatttagaaatttatttccaaattccaactatatataaacattttatacttatgtttggttattttattgcatagttttatgc

SEQ ID NO: 255697 - DNA, 315 bp, Homo sapiens
atatgaattaatttagaaatttatttccaaattccaactatatataaacattttatacttatgtttggttattttattgcatagttttatgcaagaaaaattaactacttgagtcttgttataagtwattattgctaatttgtcacccatcttttcatctacccatgtatgggaaaatgtgatattttttaggaaataattttatttatctccaaaaaaatcttactataagtgagagacttgaaatttttaatgccaatcatttaataaaaagccaagaggtagcctatgcaagccctcatttatttgggattt

SEQ ID NO: 255698 - DNA, 315 bp, Homo sapiens
atatgaattaatttagaaatttatttccaaattccaactatatataaacattttatacttatgtttggttattttattgcatagttttatgcaagaaaaattaactacttgagtcttgttataagtaattattgctaatttgtcacccatcttttcatctacccatgtatgggaaaatgtgatattttttaggaaataattttatttatctccaaaaaaatcttactataagtgagagacttgaaatttttaawgccaatcatttaataaaaagccaagaggtagcctatgcaagccctcatttatttgggattt

SEQ ID NO: 255699 - DNA, 315 bp, Homo sapiens
atatgaattaatttagaaatttatttccaaattccaactatatataaacattttatacttatgtttggttattttattgcatagttttatgcaagaaaaattaactacttgagtcttgttataagtaattattgctaatttgtcacccatcttttcatctacccatgtatgggaaaatgtgatattttttaggaaataattttatttatctccaaaaaaatcttactataagtgagagacttgaaatttttaatgccaaycatttaataaaaagccaagaggtagcctatgcaagccctcatttatttgggattt

SEQ ID NO: 255700 - DNA, 516 bp, Homo sapiens
tataagtgagagacttgaaatttttaatgccaatcatttaataaaaagccaagaggtagcctatgcaagccctcatttatttgggatttacttttaagcccatctcaaagtagtgattagatcacctgggtcctcaatctcggcagccacagattcttctagttctgaaaggctaacataaggacaacttaagctgtcaggggcacctccaagtttcccagtgatttgctttgctcatacttttaaatactagaatctcatactggttgtttttgtyacattttagcctctgtaactatagtcagtagaaagggatggtctaaatgacataatcaaccatcatataaaaaaaagaaaataaagtcattttaattattctcaatcaggtatgatagccagcagatgacttgcacattttttgctatgaattcacagaatattcaagtaaaatttctctttgcacttttacctcaattttttttgctaactcatgagtagaagctaaaagatgaaatc

SEQ ID NO: 255701 - DNA, 577 bp, Homo sapiens
ctagatttattgtggagaacctgaaactctcaattctgctgataggaatgtaaaatgataaaaaccactttagaacatagtttagcactctcttagagattaaacatataatgaccttataacctagaaatttccctcttaggacaattttttaatgyacttttgtagaaagacatatagaaaaagtataaaagatggtttattgtttaaggatagggagtggtaatcaactggaaaatagcaagaaaagacattttggggatgatggaaatatcttttatgttgattggttttctaagagttacaccagtatatacttgcaaaacttattcaagtctagaatatatatttttttcatttcttttttgtggagtaggcacattaaatctcaatttaaggcatgagaactacgtgatgaatgcacaagcctcagtagctgatttgatcaactggaagaaagggtatcagtgatggaagatcaaatgaataaaatgaagtgagaagagaagtttagaggaaaaagaataaaaagaaatgaacaaagcctccaagaaatatgggactatgtgaagagacc

SEQ ID NO: 255702 - DNA, 577 bp, Homo sapiens
ctagatttattgtggagaacctgaaactctcaattctgctgataggaatgtaaaatgataaaaaccactttagaacatagtttagcactctcttagagattaaacatataatgaccttataacctagaaatttccctcttaggacaattttttaatgcacttttgtagaaagacatatagaaaaagtataaaagatggtttattgtttaaggatagggagtggtaatcaactggaaaatagcaagaaaagacattttggggatgatggaaatatcttttatgttgattggttttctaagagttacaccagtatatacttgcaaaacttattcaagtctagaatatatatttttttcatttcttttttgtggagtaggcacattaaatctcaatttaaggcatgagaactacgtgatgaatgcacaagcctcagtagctgatttgatcaactggaagaaagggtatcagtgatggaagatcaaatgaataaaatgaagtgagaagagaagtttagagsaaaaagaataaaaagaaatgaacaaagcctccaagaaatatgggactatgtgaagagacc

SEQ ID NO: 255703 - DNA, 326 bp, Homo sapiens
agctattgtgaattactaaaatgtaataccttctgcttctttattttctatgatttgattctttattttcagttgtgcttgctatacaaaaatatggttcaaaagaatgatatctggtagctggctccaaatttgakctaggaaaccaatattttgatctacaatttgtattaggctattcttgcattgctataaataaatacttgagaagaggtaatttataagaaaagagattgaattggcccatgattctgcaggctgtgcaggaagcatagcagtgttggcttttgaggaggactcaggaagcttacaatcatggcaggagg

SEQ ID NO: 255704 - DNA, 584 bp, Homo sapiens
ccctccactgaaaaaatgtctatgtgctgcatgattatgtgtgtgtttgtgtgggtgtgttactgtagagggagtagtgctgttaaaattcatgccacatgtaaaataaataaataaataaataactcttccttgacagatctgtcatataaaatggctgycaaataaaaataaagtttaagctgatatttcaatcattcctgatactttgaatttttttaaattaaaaataaagagacagagaagttaataggggagataaaaataagttccagagcaaaatgaatgcaaaacacttagttaacattttatttttttccaagcgttttaccatgttctaagtaacgaaagaaaatgtcttaaaattaccattaattgattgacttctaataccgttatttatatggtttccaatcttagcttggataaagatgcttaatgataacatcaaaatatctcccacacatattagttatctggggaatgtgtgcagctacaaataacacagtgtattctagagacacatgatctttctatctgcatttaagaaagtcagcatcacttctgcttcctttctaagtcca

SEQ ID NO: 255705 - DNA, 584 bp, Homo sapiens
ccctccactgaaaaaatgtctatgtgctgcatgattatgtgtgtgtttgtgtgggtgtgttactgtagagggagtagtgctgttaaaattcatgccacatgtaaaataaataaataaataaataactcttccttgacagatctgtcatataaaatggctgtcaaataaaaataaagtttaagctgatatttcaatcattcctgatactttgaatttttttaaattaaaaataaagagacagagaagttaataggggagataaaaataagttccagagcaaaatgaatgcaaaacacttagttaacattttatttttttccaagcgttttaccatgttctaagtaacgaaagaaaatgtcttaaaattaccattaattgattgacttctaataccgttatttatatggtttccaatcytagcttggataaagatgcttaatgataacatcaaaatatctcccacacatattagttatctggggaatgtgtgcagctacaaataacacagtgtattctagagacacatgatctttctatctgcatttaagaaagtcagcatcacttctgcttcctttctaagtcca

SEQ ID NO: 255706 - DNA, 584 bp, Homo sapiens
ccctccactgaaaaaatgtctatgtgctgcatgattatgtgtgtgtttgtgtgggtgtgttactgtagagggagtagtgctgttaaaattcatgccacatgtaaaataaataaataaataaataactcttccttgacagatctgtcatataaaatggctgtcaaataaaaataaagtttaagctgatatttcaatcattcctgatactttgaatttttttaaattaaaaataaagagacagagaagttaataggggagataaaaataagttccagagcaaaatgaatgcaaaacacttagttaacattttatttttttccaagcgttttaccatgttctaagtaacgaaagaaaatgtcttaaaattaccattaattgattgacttctaataccgttatttatatggtttccaatcttagcttggataaagatgcttaaygataacatcaaaatatctcccacacatattagttatctggggaatgtgtgcagctacaaataacacagtgtattctagagacacatgatctttctatctgcatttaagaaagtcagcatcacttctgcttcctttctaagtcca

SEQ ID NO: 255707 - DNA, 618 bp, Homo sapiens
tatactttccagttgcatctatgcagctctgtgactacatctaaagtggtatcatgtaatttctatygtcagctcatacaaggccatccccccagctgtctttagatattcactcttaaaacccagccaccatgttgtcaggaacccatgaaaatatagaaaatttcacctgaagaggtgatctcatgagatacccagactcctgattgtacttcacagttagcatctaaccaacagcaggcaccagctttcaagccatgtgagtgagccattttcaggataattctttcagtacttagtgaagctgccccaactaatgccacatgcaggtgaaatgaaactttcctgctgagtactgccaaaattgcagatttcagatatgaatacttgttgattgctgtttgttgttgacaattcttcattgttttgaagcattaagttttgaggtagatttttacacagcaatattacgtgaaatatcaccatttaatacccaactcaaatttttttcttctgtgaatatttctttcaaatcctctagacacctaagtcattgctttattgtgtaaaaatccattatcttcacacctatataataatcctgacatgtacaggtct

SEQ ID NO: 255708 - DNA, 618 bp, Homo sapiens
tatactttccagttgcatctatgcagctctgtgactacatctaaagtggtatcatgtaatttctattgtcagctcatacaaggccatccccccagctgtctttagatattcactcttaaaacccagccaccatrttgtcaggaacccatgaaaatatagaaaatttcacctgaagaggtgatctcatgagatacccagactcctgattgtacttcacagttagcatctaaccaacagcaggcaccagctttcaagccatgtgagtgagccattttcaggataattctttcagtacttagtgaagctgccccaactaatgccacatgcaggtgaaatgaaactttcctgctgagtactgccaaaattgcagatttcagatatgaatacttgttgattgctgtttgttgttgacaattcttcattgttttgaagcattaagttttgaggtagatttttacacagcaatattacgtgaaatatcaccatttaatacccaactcaaatttttttcttctgtgaatatttctttcaaatcctctagacacctaagtcattgctttattgtgtaaaaatccattatcttcacacctatataataatcctgacatgtacaggtct

SEQ ID NO: 255709 - DNA, 634 bp, Homo sapiens
gatgatttgtaagaatgcatattaaattaatgaaactataaatacataatgaaagtatatatgattaaagggaataatcaaatggtcatctgattttgaatattttaagatatctaaatgtgaagacataaaaacatttytcttttgttccatttattttgctttcatatttttgtatttccttctttattgtgtggtcttggccactttgtctttatttcctgacttgacattagtgccttagaatttataaataattctaaatggcttttgtcttcatcaaattattttctaattaagaaaaggcatacagagataacaataatgattacttttccaggactatacatttaataagtagaaaactggacccatgacttatttctatgctgatttctattattaagtaatcattattattattatcctacaaagatactgacaaacacagtatccatattgtgttttaaatgtctttgtctgtttatttacatagtgccaagaccagctctgtggtggagacaccaacccagcagtgccagaggaattaaagacacacacacagaaatatagagcgcagagtgggaatcagggggctgacagccttcagagctgagagccacgagctgagttt

SEQ ID NO: 255710 - DNA, 634 bp, Homo sapiens
gatgatttgtaagaatgcatattaaattaatgaaactataaatacataatgaaagtatatatgattaaagggaataatcaaatggtcatctgattttgaatattttaagatatctaaatgtgaagacataaaaacatttctcttttgttccatttattttgctttcatatttttgtatttccttctttattgtgtgktcttggccactttgtctttatttcctgacttgacattagtgccttagaatttataaataattctaaatggcttttgtcttcatcaaattattttctaattaagaaaaggcatacagagataacaataatgattacttttccaggactatacatttaataagtagaaaactggacccatgacttatttctatgctgatttctattattaagtaatcattattattattatcctacaaagatactgacaaacacagtatccatattgtgttttaaatgtctttgtctgtttatttacatagtgccaagaccagctctgtggtggagacaccaacccagcagtgccagaggaattaaagacacacacacagaaatatagagcgcagagtgggaatcagggggctgacagccttcagagctgagagccacgagctgagttt

SEQ ID NO: 255711 - DNA, 634 bp, Homo sapiens
gatgatttgtaagaatgcatattaaattaatgaaactataaatacataatgaaagtatatatgattaaagggaataatcaaatggtcatctgattttgaatattttaagatatctaaatgtgaagacataaaaacatttctcttttgttccatttattttgctttcatatttttgtatttccttctttattgtgtggtcttggccactttgtctttatttcctgacttgacattagtgccttagaatttataaataattctaaatggcttttgtcttcatcaaattattttctaattaagaaaaggcatacagagataacaataatgattacttttccaggactatacatttaataagtagaaaactggacccatgacttatttctatgctgatttctattattaagtaatcattattattattatcctacaaagatactgacaaacacagtatccatattgtgttttaaatgtctttgtctgtttatttacwtagtgccaagaccagctctgtggtggagacaccaacccagcagtgccagaggaattaaagacacacacacagaaatatagagcgcagagtgggaatcagggggctgacagccttcagagctgagagccacgagctgagttt

SEQ ID NO: 255712 - DNA, 250 bp, Homo sapiens
ctgacaaacacagtatccatattgtgttttaaatgtctttgtctgtttatttacatagtgccaagaccagctctgtggtggagacaccaacccagcagtgccagaggaattaaagacacacacacagaaatatagagcgcagagtgggaatcagggggctgacagccttcagagctgagagccacgarctgagttttacacacatatttattgacggcaagccagtgataagcattgcttctacagatta

SEQ ID NO: 255713 - DNA, 586 bp, Homo sapiens
gtttccagataataggaactcttgctgtatttcttaccatttctaccatctgaccattttgttcagaccagctgaacacagtgtggtcgtggcatgcagactgagaggtgcaattcaaactaaacatccccttagaggaccaatcaataatgattccataggaatcattgcacagcacctctgcctgttttgcaatgcaaccttcccaagtaagtatgttcatttttctggccaggtccaattctgtttataaataggttgttgagggcagtatgcctcaatwataggagtagatttattatagtaaatactgagaccagaaagcatgtgtaactgtgtcatagagtgattacatccaggcattattgccagccaagattgctagtgagggggtaggcaactagttgcctttcccaaacagataggcggatgttcaaatcctaaagaaatattcataacagttccttcctcatgtgggtgagatgggcctctatcatctgtaggaccaagcatccaagagctatcattactgtatacctcctttggaggggtctagccaagttacaggctgtagaagtggtggaaa

SEQ ID NO: 255714 - DNA, 586 bp, Homo sapiens
gtttccagataataggaactcttgctgtatttcttaccatttctaccatctgaccattttgttcagaccagctgaacacagtgtggtcgtggcatgcagactgagaggtgcaattcaaactaaacatccccttagaggaccaatcaataatgattccataggaatcattgcacagcacctctgcctgttttgcaatgcaaccttcccaagtaagtatgttcatttttctggccaggtccaattctgtttataaataggttgttgagggcagtatgcctcaataataggagtagatttattatagtaaatactgagaccagaaagcatgtgtaactgtgtcatagagtgattacatccaggcattattgccagccaagattgctagtgagggggtaggcaactagttgcctttcccaaacagataggcrgatgttcaaatcctaaagaaatattcataacagttccttcctcatgtgggtgagatgggcctctatcatctgtaggaccaagcatccaagagctatcattactgtatacctcctttggaggggtctagccaagttacaggctgtagaagtggtggaaa

SEQ ID NO: 255715 - DNA, 548 bp, Homo sapiens
gtttccccccttttgcttttgcaactgctgtttcagggagaggttcattctttctactatggcttgtccttgagaattatatgggatatcaataatgtgtttaatattccatatagagaaaaatgtagctagagcttggctagtatagcctggggcattgtcagttttaatagaagctggaatgcccatcacygcaaaaccctgcaaaaggtgacatttaacacatgaagaagactctcctgatggacatgtagcccagacaaaatgagaaaaggggtccaaacatccatgtacataaactagtctcccaaacaagggaacatgtgtgacatccatttgccaaagagaattaggttccaatcctccaggattaactcctcctgtaaaagatgaggaatgcaccatttggcaagttgggcattgctggataatagctttagcttctttccaggtaatgctgtatctgcgtttgagaccagaggcattaacatgggttaaattgtgaaagtgtctagcattagatattgcagtagcaactaggtgatcag

SEQ ID NO: 255716 - DNA, 548 bp, Homo sapiens
gtttccccccttttgcttttgcaactgctgtttcagggagaggttcattctttctactatggcttgtccttgagaattatatgggatatcaataatgtgtttaatattccatatagagaaaaatgtagctagagcttggctagtatagcctggggcattgtcagttttaatagaagctggaatgcccatcaccgcaaaaccctgcaaaaggtgacatttaacacatgaagaagactctcctgatggacatgtagcccagacaaaatgagaaaaggggtccaaacatccatgtacataarctagtctcccaaacaagggaacatgtgtgacatccatttgccaaagagaattaggttccaatcctccaggattaactcctcctgtaaaagatgaggaatgcaccatttggcaagttgggcattgctggataatagctttagcttctttccaggtaatgctgtatctgcgtttgagaccagaggcattaacatgggttaaattgtgaaagtgtctagcattagatattgcagtagcaactaggtgatcag

SEQ ID NO: 255717 - DNA, 577 bp, Homo sapiens
ctatttatttgagtcttatgcacttgtttctcaattagttgtaactctgcctcagcctcctttgttaattgccaagggctagtgagactaggatctcctctaaggatagaaaacagattactgatggcatargtagaaatgcctagagcaggttgtatccaattaatgtcccctagtaagttttgaaagtcatttaatgttttcaattgatctttaggtatggttactttctgtggcactattgtagtgtcatttactcaggtccctaagtaggaataaggagtagtagtagtctgaattttgtcagaagctataattaaaccagcacgagaaattaaattttgcaagtgatcgtaacattggagtaatatttttcgagtgtgggcagcacaaaatgtatcatccatataatgaataatgtaacactgtgaaaattttttacaagtaggttcaattgcttgccctacataagtctggcacattgttggactgtttaacatgccttgtggcaacactttctaatgaaaatgtttagcaggctgcacgttgtttactacaggaattataaatgcaaatc

SEQ ID NO: 255718 - DNA, 577 bp, Homo sapiens
ctatttatttgagtcttatgcacttgtttctcaattagttgtaactctgcctcagcctcctttgttaattgccaagggctagtgagactaggatctcctctaaggatagaaaacagattactgatggcataagtagaaatgcctagagcaggttgtatccaattaatgtcccctagtaagttttgaaagtcatttaatgttttcaattgatctttaggtatggttactttctgtggcactattgtagtgtcatttactcaggtccctaagtaggaataaggagtagtagtagtctgaattttgtcagaagctataattaaaccagcacgagaaattaaattttgcaagtgatcgtaacattggagtaatatttttcgagtgtgggcagcacaaaatgtatcatccatataatgaataatgtaacactgtgaaaattttttacaagtaggttcaattgcttgccctacataagtctggcacattgttggactgtttaacatgccttgtggcaacactttcyaatgaaaatgtttagcaggctgcacgttgtttactacaggaattataaatgcaaatc

SEQ ID NO: 255719 - DNA, 502 bp, Homo sapiens
cccatctttagcaaacttagagtgacatcgattaatccaatgttttccctttttgaattttggacatattccaggttcagcagtttccttttttcccacaactggcggcctgactcactgatttttttctgcattcttttttagtatgaccatgcttcccacagttaaaacaagctccaggaaacaaagtaattcctttatccacccttagtcctgccatggcttgtgccaacaaagtagctttatgcagattacctttgataccatcacaggctttaatatagtcaactaaatgtgctttccctctaataggctgcagagcagcctggccctttaggattagcattgtygaaagctaataactgcaatgctacatcttgagcagccgaatctgcaatcacctttttaagagattcttgtaactgagctataaaatctgtgtgcggttcttttggtccctgctttacagcactaaaggaagggtattgttctcctcctgaag

SEQ ID NO: 255720 - DNA, 574 bp, Homo sapiens
agcatttaaattgttttatctgataggctcatttagaataactagacacaagttcttataatatagtaaaacattttgggcgtagacctgttcttgtttactgactttaaattttcatcaatttaatcaataacaacatgagggggcctttacaacaattatgaaatacaatggaaaatatatcaatcatattaaattaaaattattttattctttaatcttcaggaaaaaaagtgatttcgtgcatccatttttctctgttaagtactttttttcccccctccgaggccaggcccatctgtgatgttatggtgtttcaatactgccctctcgtggacataagtagaattttttaattttctttttctgaccaaccttgttgaaaaagtaatttctagttaaaaatttgagtttttttttctgttgaatcggtttgaattatatgaaatataaaacayttattctttataattaatttcataccttaaatagtatatatattcaaatacgcatttacctcattgaataaattaatttctataaatgtaagaaaagattgtctgagagttttaat

SEQ ID NO: 255721 - DNA, 441 bp, Homo sapiens
tttaggtaaatggcagttttaacaaagttactaatttctaaatgtcatattccttgatcagtagaatataatgttacccagactaattgaatccttaccatgtgcattaaaaatttttttctagttaattatacaactatcttttcttaaaagtagatagtgtttttataaactgtaataaatttagccaaatagaattwaatattatgctgatctttaataaaataaaaattgagataaatattttatattatttgtaaaacaaaaatgtaactgagacaggtctcaatcaatttagaggtttattttgcccatgacacagcctcagcaagtcctgagaacatgtgtccaaggtgattttatatacgtttcatacattgtacaagggattataaaattgatacattttagggagaaagaagttacaggtcaagatataaa

SEQ ID NO: 255722 - DNA, 548 bp, Homo sapiens
taggtgattttgcaatctgtaaatacagttttacttgttctctctaaatctgtagtttttacattttttctttggtttattgcaatggctagaatctctaatacaatataaaaaatatttacagtaaattttcatgccttgtatctgttagttgaaaaatatttagcttttatcaaatatgttgttaatagtttttttcatagcttgaaaaaatttacttctatttaagtctgctgagggcttttgtggtttttttttgtttgtgctcttttttttttaatcagaaatggatattagatcaactgcattggcaaagatgatcatacagatttttttcaatctgtcaatgtggtatattgcagagggttatttttaaatggtaagccaamcctgcattctgccaggtccgtcccacaggccctggttgagcgacggatgaaaggagtactcagacacaggtatgcagtgtaagagcagcttggggactgcctggcactaatggctgaagagtgagcagtcttgaacagctgaagttgcttgcttttatt

SEQ ID NO: 255723 - DNA, 548 bp, Homo sapiens
taggtgattttgcaatctgtaaatacagttttacttgttctctctaaatctgtagtttttacattttttctttggtttattgcaatggctagaatctctaatacaatataaaaaatatttacagtaaattttcatgccttgtatctgttagttgaaaaatatttagcttttatcaaatatgttgttaatagtttttttcatagcttgaaaaaatttacttctatttaagtctgctgagggcttttgtggtttttttttgtttgtgctcttttttttttaatcagaaatggatattagatcaactgcattggcaaagatgatcatacagatttttttcaatctgtcaatgtggtatattgcagagggttatttttaaatggtaagccaaacytgcattctgccaggtccgtcccacaggccctggttgagcgacggatgaaaggagtactcagacacaggtatgcagtgtaagagcagcttggggactgcctggcactaatggctgaagagtgagcagtcttgaacagctgaagttgcttgcttttatt

SEQ ID NO: 255724 - DNA, 570 bp, Homo sapiens
caaataccatatgattaaaatatgtatgaaataatccacttactttctgttcaaatcaggaaaaaaataaactgaaacaaatatcaaattcttattcctcacaggtgactaagagtaacttcattaagtcagagagagtcctgtacagtgcatgatacacaaataacagacccatgtttcatgtaatggaatgagaaaactgtataaattgattaattatgcaagttcttgtgacttcatgytggtgtagacttatacaagttagtgtaattaaaaattaaccttttgttacatacaagtaaaattatttgaccaattttatagaaaaatatccacaattacatcaaaaaaactatctgaataagtatcaaaattttacactttatttgatattatagaagaagaatggttttgaaacaaaatataagttgaaagtagccttttaaagaaatctattaggggtatttaagttaagttaaagttaaaataactgaagccttgaaatatttcatttctacatattttcactgtagatattcatgctataatgaatgtaaaccaagtttttac

SEQ ID NO: 255725 - DNA, 560 bp, Homo sapiens
tgtgacaatgaagtataggagctggctcacgctgtgtcacaagaactgatcgtgctcatctcttcccaagtccaggttctatgacatcatcttagtaacttaacattaaccataatgagagtatttacaccttgaaagttggcaaatttcaaatctctgagggtaaatttctatcccagttgaatgtattgttaaatattaacagcacactactcagtgtgtttcagttggaatccagccaaaaaatgtggatccctctagatatttcaaacagaaataataaaatacagggaattggatacacagrtaatgaacaggttgaaaattagaactggcaatggtggggcggaccagagattaacaatagcaggaagttcccatcatccttagggttaaggagacacagggaggagaagatactgcctgtgcgtccaaactcagatcatctggtggatactagagttgcaactggggattcttgaaagagctgggtccatcaaagttggatcgctccatcaaacgctgaaaacatgttggaaacacagccactggctactact

SEQ ID NO: 255726 - DNA, 605 bp, Homo sapiens
tggcaatggtggggcggaccagagattaacaatagcaggaagttcccatcatccttagggttaaggagacacagggaggagaagatactgcctgtgcstccaaactcagatcatctggtggatactagagttgcaactggggattcttgaaagagctgggtccatcaaagttggatcgctccatcaaacgctgaaaacatgttggaaacacagccactggctactacttagagtgatgccactgcaagtagaaagaacaagaaataccagacttctccatttctttggctttacatcctcctgccgattccttccatggactgaatacagttggaagccattttacaaagggacttgtaaagcaaattctttcagatttgttttccccctcttccccctctttcagccacaatacagagcagaataagaatagagtaagaaatggatctgaaagccaacaaattgtcttcacagagcccatgaaataaagtttatcatgtaggaatactgactatacacagtgagccatgggagttgaagtggatcagtgattttttttgtaccacagagcagctgatctaccaacatgaaccagagtgtgcatt

SEQ ID NO: 255727 - DNA, 605 bp, Homo sapiens
tggcaatggtggggcggaccagagattaacaatagcaggaagttcccatcatccttagggttaaggagacacagggaggagaagatactgcctgtgcgtccaaactcagatcatctggtggatactagagttgcaactggggattcttgaaagagctgggtccatcaaagttggatcgctccatcaaacgctgaaaacatgttggaaayacagccactggctactacttagagtgatgccactgcaagtagaaagaacaagaaataccagacttctccatttctttggctttacatcctcctgccgattccttccatggactgaatacagttggaagccattttacaaagggacttgtaaagcaaattctttcagatttgttttccccctcttccccctctttcagccacaatacagagcagaataagaatagagtaagaaatggatctgaaagccaacaaattgtcttcacagagcccatgaaataaagtttatcatgtaggaatactgactatacacagtgagccatgggagttgaagtggatcagtgattttttttgtaccacagagcagctgatctaccaacatgaaccagagtgtgcatt

SEQ ID NO: 255728 - DNA, 632 bp, Homo sapiens
ttgaaaattagaactggcaatggtggggcggaccagagattaacaatagcaggaagttcccatcatccttagggttaaggagacacagggaggagaagatactgcctgtgcgtccaaactcagatcatctggtggatactagagttgcaactggggattcttgaaagagctgggtccatcaaagttggatcgctccatcaaacgctgaaaacatgttggaaacacagccactggctactacttagagtgatgccactgcaagtagaaagaacaagaaataccagacttctccatttctttggctttacatcctcctgccgattccttccatggactgaatacagttggaagccattttacaaagggacttgtaaagcaaattctttcagatttgttttccccctcttccccctctttcagccacaatacagagcagaataagaatagagtaagaaatggatctgaaagcmaacaaattgtcttcacagagcccatgaaataaagtttatcatgtaggaatactgactatacacagtgagccatgggagttgaagtggatcagtgattttttttgtaccacagagcagctgatctaccaacatgaaccagagtgtgcattctagcaaaatcag

SEQ ID NO: 255729 - DNA, 492 bp, Homo sapiens
gtttcttaaataacaaactaatgttgatactgcttaggttttgaactttaatagtcctaaaaataatttatatattttaaatttcatagcataaataactgctatgatatgcacacasagacatatacaaatacacgtacatgtaagacaaaatggttctctttagctgtctctgaagctgttaatacattttataagattagctaatataggcttataaataatctcacataaactcaagagtatatctcattactgtatgtacattatgccagcggatatataatatttttatatgatataaattttttaattatttttatccttaaaaggtaatcaaagaggaagtttgggttgttatttttttaggtaataagagccagatggttggtatcaaacatttactcttgggtgttcaatgtgatatcaaggaataggaaagcaaagggccatgtctttcaaagaaaaagcaaggttcagtacatccacaaa

SEQ ID NO: 255730 - DNA, 463 bp, Homo sapiens
ttgtttatttattttctacatattttggattgaatttgccttcctttttctatttccttaagttggaagcttaggctattgattttagatctttcatgttttctttttctttttttaaaaaaaaaattyccaagctttattttttgagctttttaattgtataagatacataacataaaattacccttttaaccatttgaagtctataactcagtggcattaggtatatttacaatgttgcacaatcatctcccctatctgttttcagaactttttcatcatccctaataagaactctgtacccattaaccaataacacctcatttctccattccccagcctctggtatcctctcctgtactttctgtctgtatgaatttgcctattctaagtatctcatataagaggaattatacaatatttgtctttctgtgtctggctagtttaacttaacataatgtct

SEQ ID NO: 255731 - DNA, 463 bp, Homo sapiens
ttgtttatttattttctacatattttggattgaatttgccttcctttttctatttccttaagttggaagcttaggctattgattttagatctttcatgttttctttttctttttttaaaaaaaaaattcccaagctttattttttgagctttttaattgtataagatacataacataaaattacccttttaaccatttgaagtctataactcagtggcattaggtatatttacaatgttgcacaatcatctcccctatctgttttcagaactttttcatcatccctaataagaactctgtacccattaaccaataacacctcatttctccattccccagcctctggtatcctctcctgtactttctgtctstatgaatttgcctattctaagtatctcatataagaggaattatacaatatttgtctttctgtgtctggctagtttaacttaacataatgtct

SEQ ID NO: 255732 - DNA, 613 bp, Homo sapiens
tggttttgttttagatattaagtggatatttactttgcacttaagtatttcmcatggacataaagggaaggtggctgctcttgctattttagtatggcgaatatgaaaatatactttttagctttaaaaaccagctgtaagactaaaaaccatgtaaaaatgtagaaacccaaattataatggcttagatttttaagtggctgtagagaatatttagttggggtcttttattgaacaggaagatagattgtcagcaactttaagtgatgcttctcatatctacacaaagagacgtttgcagaaaggggactgtaaccaacctctcatggttctctgagttcagagctatttcttcactactgtgctgctttccaatcttgtgagaaataaatatcaatttagtgtctctggcttcgagttgtatttgattcagtcttatgcaaattggatttcagaaaaaatgtggcaatgattgtgggtaacattttatatttttaggtgttttgtaatttatcataaaggaagacagcactgaattagataatttggaataacataaaaaacagacattttaagctcaggtatcaagttggaatgaaatggacaaatgaag

SEQ ID NO: 255733 - DNA, 599 bp, Homo sapiens
ctcccagtttctatactgaaaaaatgtgagctagaggcagacattggcttctttaccatcctggatctctctgtgaaagactcgctcctgattgggccctcagggaacaccacaaatactggcagtgctgaaccacatragaccagctaggaataacgaggatggtagggttagtggtattcagcccaaagaagttggaaatagatctccatttctaccagaggtgtcccaccaaatagtctgtataggggcaccatgtcacaagacgcgtggtttatagttctcaatgacatgagtgcacagttggctctcccacaactggagacagccagttcattgttctcaatggttcatagttctcaatgacttgagaagtgggaggctctctgtggatcagctgcagaatcataacaactcatgtctcacctgggctaaggtaaccctctagtagtaaaaaggaatacaacagtcagtcgcctcagaatttctaaaaaagcccaccaaaacagaatggtaaccgaaagtcccagaccacaaagactggaataaataactaattcatcaatcaagagacataaagtggttaaacagataaaaag

SEQ ID NO: 255734 - DNA, 599 bp, Homo sapiens
ctcccagtttctatactgaaaaaatgtgagctagaggcagacattggcttctttaccatcctggatctctctgtgaaagactcgctcctgattgggccctcagggaacaccacaaatactggcagtgctgaaccacatgagaccagctaggaataacgaggatggtagggttagtggtattcagcccaaagaagttggaaatagatctccatttctaccagaggtgtcccaccaaatagtctgtataggggcaccatgtcacaagacgcgtggtttatagttctcaatgacatgagtgcacagttggctctcccacaactggagacagccagttcrttgttctcaatggttcatagttctcaatgacttgagaagtgggaggctctctgtggatcagctgcagaatcataacaactcatgtctcacctgggctaaggtaaccctctagtagtaaaaaggaatacaacagtcagtcgcctcagaatttctaaaaaagcccaccaaaacagaatggtaaccgaaagtcccagaccacaaagactggaataaataactaattcatcaatcaagagacataaagtggttaaacagataaaaag

SEQ ID NO: 255735 - DNA, 599 bp, Homo sapiens
ctcccagtttctatactgaaaaaatgtgagctagaggcagacattggcttctttaccatcctggatctctctgtgaaagactcgctcctgattgggccctcagggaacaccacaaatactggcagtgctgaaccacatgagaccagctaggaataacgaggatggtagggttagtggtattcagcccaaagaagttggaaatagatctccatttctaccagaggtgtcccaccaaatagtctgtataggggcaccatgtcacaagacgcgtggtttatagttctcaatgacatgagtgcacagttggctctcccacaactggagacagccagttcattgttctcaatggttcawagttctcaatgacttgagaagtgggaggctctctgtggatcagctgcagaatcataacaactcatgtctcacctgggctaaggtaaccctctagtagtaaaaaggaatacaacagtcagtcgcctcagaatttctaaaaaagcccaccaaaacagaatggtaaccgaaagtcccagaccacaaagactggaataaataactaattcatcaatcaagagacataaagtggttaaacagataaaaag

SEQ ID NO: 255736 - DNA, 446 bp, Homo sapiens
taaataaatttctacacatatgcaacctactaagactgactcaatgagaaatagaaaaatctgtgggaaccaacaatgagtactgagattgaggcagtaattaaaattttcttatcaagacaagtccaggacctgatgacttcactgctgaagtctaaaaaacttttaargaactattactaatactttgtaaactattccaaaaactaaaaaggtggaaagtcttccacatttattctataatgccagcattaccttcacaccaaaaccagacaaagacacaacaacaacaaagaatagtgcatacacatcaatttccataataaatacagatgcaaaatcctcaacaaaatactagcaattcaaattcaacagcatgttaaaaagatcattcactgtgattaagtagaatttgtaacagagatgcaagtaaggtttaacataca

SEQ ID NO: 255737 - DNA, 611 bp, Homo sapiens
actatttcaattttaataatcaagtagcatgattataatagttgagtttcactggctatatattccctctcacaacaaccacgtgttcactgcacagttgcctatcaatatagataaaagctacaatagaagagaatgcagccaacagatagaaagaaacaatcaagtgatagaaagaatcatggtggctttcaagtctctgaacttggggaccatttccttttttccaatttagttatgtaagtcaataaatcccaaccacacaaaccagtatttgtgtatgtatatggcttgaactagtgttgagtttctgttgcttatgataaagaagtgttctagcaaatcagctctgcttctgagatacaaatcastaaaaatgactgaataaaagaatatttatgaatgaaaagaaaactctcctttatagttttccacctgctttatcttttttaaaagcattgaatagtatatctgatcatcttgcctaatatttattcagtttaatttaagtcaaagtagggcctggaatatctgtagtgtttgtaatgggtgacaatatctgaggaagaagaaataactatcagagatacatcaagcaaattgtaaaatag

SEQ ID NO: 255738 - DNA, 611 bp, Homo sapiens
actatttcaattttaataatcaagtagcatgattataatagttgagtttcactggctatatattccctctcacaacaaccacgtgttcactgcacagttgcctatcaatatagataaaagctacaatagaagagaatgcagccaacagatagaaagaaacaatcaagtgatagaaagaatcatggtggctttcaagtctctgaacttggggaccatttccttttttccaatttagttatgtaagtcaataaatcccaaccacacaaaccagtatttgtgtatgtatatggcttgaactagtgttgagtttctgttgcttatgataaagaagtgttctagcaaatcagctctgcttctgagatacaaatcactaaaaatgactgaataaaagaatatttatgaatgaaaagaaaactctcctttatagttttccacctgctttatcttttttaaaagcattgaatagtatatctgatcatcttgcctaatatttaytcagtttaatttaagtcaaagtagggcctggaatatctgtagtgtttgtaatgggtgacaatatctgaggaagaagaaataactatcagagatacatcaagcaaattgtaaaatag

SEQ ID NO: 255739 - DNA, 631 bp, Homo sapiens
atttgatcggcttccaagagggtgaaaatgaaaactgcaaggtcttttaaggcctgtcctggaaatcacacagcattactctcaacacactctcttggtcaaagtaaatcataagaccagctgaatttaagggcaggtgaacagacgtcacctcctgatggggagagcagcatgcacgcaccgggttgggaggactgttggtgggcatccttgcacagaatctccttagccagccacagacaccaaggttgctcgctctttcttcctgtccacatggcactttgcctctgcttttctctacaggtctattcattctttccctgcattctctttttctctgagcatccagcttaaacatagctgccctagaaaggrcaaacaaaccaaatatcttagactaggtagcttataaacacaagtttattgctcacagttctggaggctgggaagtctgagatcaagacactggcaaattcggtgtctgttgaggacctgtttcctggttcatagaaggccattttctcgtagagtcctcacatggcagaagggaccagggatctctctggggcctcttttataagagcattaatctcatttataagggctccaccctcatgatctaataacctcc

SEQ ID NO: 255740 - DNA, 557 bp, Homo sapiens
gttataatattaaacaatcctttgataaagttccagtgcaatgaagaaaattcttcccttgatttacacagtggtgacattctttggaaattcagtgtatgttaaagtaaacaaaccaaaataaaaccccaaaacaaacagaccaaaatgtttgttaaggttctagatgattaaaaacaggtttttcacctaggtattgtccagagggataaacaaagttgtgtgggactcaggcaattcttgatcatggggactgccctgggcagtggcctactaaatgccagtagtcacttaatcattgtgatgaccagaaaactgctctcccaaattttcaaatgcctctttgggcacagtaccaaccccactgagaaccccattattccagcaagagctcccctatcagatcactccattgagcaacctgcccacttaaaaaaatatagagccagaggactggagttaagattcyggaggacaacaggaagctactatggttttgaaactgtaatccacccacaagggtcagcataatggaaatttgctcagcacgcattttg

SEQ ID NO: 255741 - DNA, 294 bp, Homo sapiens
cacattagaatcacctggaccctttttaaaaataccaatgcccaggcccccttccccaatattctgatttacaaggtctggggtggggctccagcataggtattttttaaagtccccagatgattctaatgtgcagccacagttgagaactactgacctggccagttgsaaccaactagctgggaaattgttgttgactttgaccctcagtttcctcatctgttctgggggatgttgccgaggtgatgtcgtgggtctccaggacctcccttctgtcctcttctctttgaaggc

SEQ ID NO: 255742 - DNA, 294 bp, Homo sapiens
cacattagaatcacctggaccctttttaaaaataccaatgcccaggcccccttccccaatattctgatttacaaggtctggggtggggctccagcataggtattttttaaagtccccagatgattctaatgtgcagccacagttgagaactactgacctggccagttgcaaccaactagctggraaattgttgttgactttgaccctcagtttcctcatctgttctgggggatgttgccgaggtgatgtcgtgggtctccaggacctcccttctgtcctcttctctttgaaggc

SEQ ID NO: 255743 - DNA, 517 bp, Homo sapiens
tgggggagtggtggggacatggggcttagtatatagcattatgtctagttttgcagatgaggacattggggcttaaaaaatgcaaatgcctgaggctgtgatctaccaaacagcagaggcagaatgcagacctagcctcttgaagtcatgttcagtgtccttctttacctgccacctcctctgcasatgcgctcagctctgaccttcaacttgcccttttggcctctaccttgctttgcccttcgatgtatcgatctggctcccaatagcctgcttgtctcatcctccagtgtccacccacacccctgcctctgcttacagtactgcttgggaaaagcagttgctggtttccctgtttctaaactcctgacaatctgcctggtttcagacctcaacttcagtccaggtctgaccatgttgggttttggctgtttctgtgctttatggtcatgtttgctagaggactgcccatgaagctgggccctgtttggtgggagctatgccagacagcaggcaa

SEQ ID NO: 255744 - DNA, 586 bp, Homo sapiens
gtgactttctattctctcctttgacttgtcttcctgtgtagtgatcaaagtcctcccatttctggggggaacgtcacagtttacacagcactttcttcacgacaatagcatgaagaaaataatacctgccctttatctccacatgagacacagacaggtcaaggacgtgtgcaagttcaaagagcaagagtggaatccagcccgaaccagcaccccatgatggaaggggaatgaccgtggctggcccagtcacttacagctctttgaccaggggcagctcacgaaaagctcaggttcttcacctgctaaaagatggcagtgatagtgyttactgcacagggctgttttagaaataaaatagatttctaaaagtgctcagcaaaatgactagcatgtaataaacgtgcaataaatgctaccaacattaatggtcttttcaaagcattgtgtttacaaaagctttagggcttataataagaacggtagtaggtgactcttttgtaatataataataataatgataataataaaataataggtggcttacaggcaccatttgaattcccctatgtgcattaaccctttc

SEQ ID NO: 255745 - DNA, 586 bp, Homo sapiens
gtgactttctattctctcctttgacttgtcttcctgtgtagtgatcaaagtcctcccatttctggggggaacgtcacagtttacacagcactttcttcacgacaatagcatgaagaaaataatacctgccctttatctccacatgagacacagacaggtcaaggacgtgtgcaagttcaaagagcaagagtggaatccagcccgaaccagcaccccatgatggaaggggaatgaccgtggctggcccagtcacttacagctctttgaccaggggcagctcacgaaaagctcaggttcttcacctgctaaaagatggcagtgatagtgcttactgcacagggctgttttagaaataaaatagatttctaaaagtgctcagcaaaatgactagcatgtaataaacgtgcaataaatgctaccaacattaatggtcttttcaaagcattgtgtttacaaaagctttagggcttataataagaacggtagtaggtgactcttttgtaayataataataataatgataataataaaataataggtggcttacaggcaccatttgaattcccctatgtgcattaaccctttc

SEQ ID NO: 255746 - DNA, 573 bp, Homo sapiens
gagcagagggagataaggctgaatgccctttcagaaagacgaattattgcagcccatagccaggtaagcaagacattcaccctcacaagcagcccaattactgataccactccctttcccgaggctttctccaagtacgctaaactaagtgacctgagaaaagcccttttaggggtcctgttgctgttaacaaacaaaggaagaggaaattttatttaaaacatgtttttttctggttgaaatatggtcaccctattttccagctgggacctccagcaccgaaagtcccagttgattgagagtagcattagagtttttaaatattmcttgtcaagcaatggcaatgggcaatcactagagaagggcagggctgtgccccacaggctgctggcagtgtcccatggaggctgcgtgttgagattttccttcctaacccagtgactgtagctttgtaatagccaagaattggggttggatttatacaatctcaagccttttctccttattttatgcagctttttgctatgtacctttgctctctctgaaaatattttcttctcacctatgtgagta

SEQ ID NO: 255747 - DNA, 573 bp, Homo sapiens
gagcagagggagataaggctgaatgccctttcagaaagacgaattattgcagcccatagccaggtaagcaagacattcaccctcacaagcagcccaattactgataccactccctttcccgaggctttctccaagtacgctaaactaagtgacctgagaaaagcccttttaggggtcctgttgctgttaacaaacaaaggaagaggaaattttatttaaaacatgtttttttctggttgaaatatggtcaccctattttccagctgggacctccagcaccgaaagtcccagttgattgagagtagcattagagtttttaaatattacttgtcaagcaatggcaatgggcaatcactagagaagggcagggctgtgccccacaggctgctggcagkgtcccatggaggctgcgtgttgagattttccttcctaacccagtgactgtagctttgtaatagccaagaattggggttggatttatacaatctcaagccttttctccttattttatgcagctttttgctatgtacctttgctctctctgaaaatattttcttctcacctatgtgagta

SEQ ID NO: 255748 - DNA, 619 bp, Homo sapiens
agggggtgttgtaaggacatccagaagctgggaaatgaaggctgactagatgcagccaggtgaaacagctgtcagtgaggcaccaagacgactggagtacttctaacagatcttcagagggaaggcactgagagtggatgaagggaagacacagaagctgggctgaaggggaagaaagctgggaagcctacctggggctactggacacctgaactcattcctggcccccaatggctctggggaaacggatgagttgaactgacaagcagtaaccttctcttgctatgggcctctggaatactggcaggagactgcccaaccaccttggatactcaaggtggcrgggagagctacttagagaagtggtaggagcagcaaactagttgatgtggagcccagagggtttggtgtggaagcatctgtagtggagcatgactagggatggccatctccctaggctctacttgctcccacaggagactttagccctagaggaactattggtcctgaactctgcagggcagtctagcccatcagatgggccagtctgacctaaacaccacttgttctgctgtctctcttggggccccagctgggccacacctgcccataggtggaa

SEQ ID NO: 255749 - DNA, 597 bp, Homo sapiens
tcaaatccctgactatatttcttgggccacttcagcaaactaaagtttgagaatcacctttaccaaaagtttttcttcatagcaaccctttattagaatacttaatattcaacaccttccaaaaaatacatggtttcttatgtttcttttttaaaatcatcattcaagaacactacaattaaggaggatgaaattaaatcaagatgagcaagaattaaccaaaagtttttcayaaacccagaattaaacataaatcttttaaaagctgtgggttttgaggtgtttttattttttggcaaaaacatagaaaacaataaaagaaatctgacctcatcacaagatgataatgaattttctgattttttcaacattattaacaattaataagggcttactacgtcccagacactattctaagtgatttgtaggtattaaattaatcttaaccacagtcttataagattgttaatattattagtaccaatttacagatttaaaaaccagagcttaccaaaattaaactgtggcttattgaagtagaataataaactgagggtacaataggagatataggccaaaaaatcaagtaagaaaata

SEQ ID NO: 255750 - DNA, 564 bp, Homo sapiens
gtccaaacaagcagagtacaaagaagtagccatagagaaagtatatgtcactctcaccatatcctctggaggaacagaatcacacatgaagtaaaactggggggtctaggccaggagcggcggctcacgcctgtaatcccagcactttgggaggccgacgtaggtggatcacttgaggtcaggagttcgagaccagcctggccaacatggtgaaaccccatctctaccaaaaatatcaaaaattagccaggcgtggtggttcgcgcctgtaatcccagctactcagaaggccgaggcaggagaatcgcttgaacccaggaggtggaggttgcagtgagtcaaaatcatgccactgcactccagcctgggtgacagagtgagactctgtctcaaaacaaaaaaacaaaacaaaaaaaaacctcaggggtctaatatgtatgagcacctgtccccaaacagtcatgaattcagtratgcaatttagacagtttctcttatgagaaggcatacatttttaaaaccaagggactcatatgacaacagtattttaaaacataataccag

SEQ ID NO: 255751 - DNA, 542 bp, Homo sapiens
taaaatgtcatatcattttgatatctcactgtggttttatttacattttcctgttgacttgatcttgagcaatatttgaacattcatacatctgttaaaaagttactgytcaagtcttttggacatttttaactgaattttctctttattattattttataaataccaattccaagtccattgtaaaatatatttattgacagtcagtctgtcacttgacctcattttcttatgatgttttttgatgaacagaaatttttaatgttgttatacttattatattttcttttttggttactgctttgtagaactctaaaaatctggtgtgggtactaatactgaagatattctccagtgtgtttttctataaagtttataattttaacttttatatttctgtctatgatccatattgaataaatgcttatgcctgatataaggtaaagttctgttttatttttccccgtatgcttttagcgttactttaatttttaaaaacatattctctaattgtttacaactataaacaattgttgttgata

SEQ ID NO: 255752 - DNA, 542 bp, Homo sapiens
taaaatgtcatatcattttgatatctcactgtggttttatttacattttcctgttgacttgatcttgagcaatatttgaacattcatacatctgttaaaaagttactgctcaagtcttttggacatttttaactgaattttctctttattattattttataaataccaattccaagtccattgtaaaatatatttattgacagtcagtctgtcacttgacctcrttttcttatgatgttttttgatgaacagaaatttttaatgttgttatacttattatattttcttttttggttactgctttgtagaactctaaaaatctggtgtgggtactaatactgaagatattctccagtgtgtttttctataaagtttataattttaacttttatatttctgtctatgatccatattgaataaatgcttatgcctgatataaggtaaagttctgttttatttttccccgtatgcttttagcgttactttaatttttaaaaacatattctctaattgtttacaactataaacaattgttgttgata

SEQ ID NO: 255753 - DNA, 711 bp, Homo sapiens
atttggtgttgttttaaattgtgtctattctacaggaaataaaatgtcatatcattttgatatctcactgtggttttatttacattttcctgttgacttgatcttgagcaatatttgaacattcatacatctgttaaaaagttactgctcaagtcttttggacatttttaactgaattttctctttattattattttataaataccaattccaagtccattgtaaaatatatttattgacagtcagtctgtcacttgacctcattttcttatgatgttttttgatgaacagaaatttttaatgttgttatacttattatattttcttttttggttactgctttgtagaactctaaaaatctkgtgtgggtactaatactgaagatattctccagtgtgtttttctataaagtttataattttaacttttatatttctgtctatgatccatattgaataaatgcttatgcctgatataaggtaaagttctgttttatttttccccgtatgcttttagcgttactttaatttttaaaaacatattctctaattgtttacaactataaacaattgttgttgatatttttaatatctgccaatcctgataagtttacttttcagtactagtagtgattttgtaggtgtcttagaatttctgtgtaaaaacttgctgcctgtaagcagacagttttatttcttcctttcttatttg

SEQ ID NO: 255754 - DNA, 711 bp, Homo sapiens
atttggtgttgttttaaattgtgtctattctacaggaaataaaatgtcatatcattttgatatctcactgtggttttatttacattttcctgttgacttgatcttgagcaatatttgaacattcatacatctgttaaaaagttactgctcaagtcttttggacatttttaactgaattttctctttattattattttataaataccaattccaagtccattgtaaaatatatttattgacagtcagtctgtcacttgacctcattttcttatgatgttttttgatgaacagaaatttttaatgttgttatacttattatattttcttttttggttactgctttgtagaactctaaaaatctggtgtgggtactaatactgaagatattctccagtgtgtttttctataaagtttataattttaacttttatatttctgtctatgatccatattgaataaatgcttatgcctgatataaggtaaagttctgttttatttttccccgtatgyttttagcgttactttaatttttaaaaacatattctctaattgtttacaactataaacaattgttgttgatatttttaatatctgccaatcctgataagtttacttttcagtactagtagtgattttgtaggtgtcttagaatttctgtgtaaaaacttgctgcctgtaagcagacagttttatttcttcctttcttatttg

SEQ ID NO: 255755 - DNA, 456 bp, Homo sapiens
ttagtcttttctaaatctttggggagaagctttcaaaatgtaagtatgatgttaagtaagatatttcctaaaggcttgtcacaaattgagcaagttccctcctattctaagttcgtgagaaattttatcataatagggtgttgaatttcaattttttcaatatctcaattcctaaaataggtatgggctacttagcttttctatttctctttctcaactcagtttggtacttattatttttcaaggaatttgtccatttcaccttagttcttgaattgacaagcataaattatttcaaatatccttttactcttctttcactatctacaaaatctgcatttatataycctcttttaattctgatactggtaatttatgtatttgttctttcttaatcagtcttgctgggggtttgtattagtttctcactgctattataaccaaatgccacaatca

SEQ ID NO: 255756 - DNA, 456 bp, Homo sapiens
ttagtcttttctaaatctttggggagaagctttcaaaatgtaagtatgatgttaagtaagatatttcctaaaggcttgtcacaaattgagcaagttccctcctattctaagttcgtgagaaattttatcataatagggtgttgaatttcaattttttcaatatctcaattcctaaaataggtatgggctacttagcttttctatttctctttctcaactcagtttggtacttattatttttcaaggaatttgtccatttcaccttagttcttgaattgacaagcataaattatttcaaatatccttttactcttctttcactatctacaaaatctgcatttatatacyctcttttaattctgatactggtaatttatgtatttgttctttcttaatcagtcttgctgggggtttgtattagtttctcactgctattataaccaaatgccacaatca

SEQ ID NO: 255757 - DNA, 541 bp, Homo sapiens
cctcgtcttcttatttcaacatttaagtcaagtccatctatttctgtaatctgccttttcccatgactacaggtagtatattcctgtttgttcacatgtataaacatttttattgcatatgwtagtgagaataatacatttaagagacacttgattctgttatatactctgaagggtgttgatttttgttctagcatgcagtttaattactggttgatcaacttgattttgaagaggctttttaaaatagaacttccatagatgtggggagtttgttagtgcgtgtctttttaaatttagccctcttactagggaaaattctctagtcttagaactttgtctttacttccaaagtgtggccctcttggggtttcagtagaaagcccaaggcaccaaggcacatatcaagcccttccaaataagcaggactctaaactacctcctctttggtgggagtctgttcaaatgtctcttcagctcctttagcctttccactgttgctttctactggaatccttgaagcctcctctgtgcatatgaa

SEQ ID NO: 255758 - DNA, 607 bp, Homo sapiens
ctgcctgtctttcaaggataaattcctttcagtttctgcttgctttgggtaactctccagtgtcttcaaataataatggtttgtttcctttcatatattttgcagaatctatgattgttatctctagaagagttagtctgacacgaactactctgccatcgcagggacaggaacttaactccactgttacttaaaacaccaaaaaagtaattataaatgaatttgcattataaaaagtgaaaataaaggatgatccaaggaaaaggaaatttcctatctgccatctacaaaatgggtgaaacaacscaatataacctactttgcaggagacaggattaacagtctaactaaaactatattatttatttcattataaataaatgtggaaacaaaaacagtgagaaggtaaaattgttaacactgggactagctaaatctcacttggaattctgcatccttatttaagtcaggttttctaccttgactctgtgaatctttccttaatagttataaacaaaactggaattatactgtgtgtgtgcacgcgcacgcgtgtgtgtgtgtgtgtgtgtgtgtgtattctcatgcaaaattgtgaaaagaacac

SEQ ID NO: 255759 - DNA, 520 bp, Homo sapiens
atcattacccttgacaaaattctaatcaatgatgaaaactgttatgcaaagttaaagagaaaccttgtcacctttagtgttcataaaatcctgggaaagaaacataaggcatattcaggttactgtcctagacttcaaaaaagtggatattttaatgttttttttttaattttaaaacatacatgattctacaacctggtaccctgagaaacaaaggtgggtcaagagggttaggagtggtcaaaatggcccyggtgcctgaaggcagtaagttcaagctataatggggccgaacagtctgtgggaaacaagacctaactcaatcttagaggatgacaaagtaaaattttcaaaaagctaaaccaagattctcatataatcatgtgaattggtgtcaaagtcttatttagctcattaatgagggaaccagtaagagataaagctggctccaaggtcatttgaagaattgggaattcatggacatctctaaaagatgaattcagaataggattattagtta

SEQ ID NO: 255760 - DNA, 600 bp, Homo sapiens
ctctgggaatatttttttaagaaataatatatgtttaatctgacagtctgaatgattttagggggaaggacactcccctgctgtgttttcaataagaagtatgtctccatgcttcattttccagcctttcatttccaagaaaggaattctttgctctgaatcattacaatccattttccattccaaatatatggtcaaattaaaataataacactgtccgaattgttcctctgcttctctcttatcatagctccttaatggactttctaaaaaacattcaagtattaacccctaaaaaattaacccctcttaatytcccaggtatgatgctaatttagcatttggcttaagcttaaatgccattcatttatacaactatttcttgaatatctaccatgtgcagagcactatggtcagggctacagttatcatgaagaataagaactagttcctaacctcaagtagcttatagtttattagagaacatagcataaagtaggacaggacaggacaggataggataggagatacccatggtagaatgggagcccctggaagggcagctaacccatccctggagaaagacttcccaagtggaat

SEQ ID NO: 255761 - DNA, 536 bp, Homo sapiens
cctgcataaccccagaccttctatttcacttcaggtcaaaagagtggcagagcaactggatgcctcctcagccaccacctcagcyggcatcttcctgaggtgtcctttcaagaagtttctgatgagtctttagttctcttccaggcattaagttttatattgagttttcttttctccagtgtgctttctggattctgttttccccaggctcctcttcctgttttctgtttatagtccacacttgctctggaggtactgcagcccttccactgtggattatctctatcaggttctttcatgcctatcctctccaaatgtcatgtacacaccctgttatcttcccacaattctgtcctctgaactctggacctggaggtttccatctctgatacacaacctctgacttacatcccagataatccttcccctgcaaagttccagtagctatctgatgacaaaagggggtggttttctctcccaaagaccatgcccctgacctttcccctttcttccttctggccattcatcatacccag

SEQ ID NO: 255762 - DNA, 536 bp, Homo sapiens
cctgcataaccccagaccttctatttcacttcaggtcaaaagagtggcagagcaactggatgcctcctcagccaccacctcagctggcatcttcckgaggtgtcctttcaagaagtttctgatgagtctttagttctcttccaggcattaagttttatattgagttttcttttctccagtgtgctttctggattctgttttccccaggctcctcttcctgttttctgtttatagtccacacttgctctggaggtactgcagcccttccactgtggattatctctatcaggttctttcatgcctatcctctccaaatgtcatgtacacaccctgttatcttcccacaattctgtcctctgaactctggacctggaggtttccatctctgatacacaacctctgacttacatcccagataatccttcccctgcaaagttccagtagctatctgatgacaaaagggggtggttttctctcccaaagaccatgcccctgacctttcccctttcttccttctggccattcatcatacccag

SEQ ID NO: 255763 - DNA, 645 bp, Homo sapiens
tttgcagtctgatgatgcaatcaaaaaaaaaaaacattttctggggagaaattcaagcctgttgcagaaatgtgcataagtaacaagcagctgaatgttaagacaatggagaaaatgtctccagggcatgtcagggaccttcatggcagyccctcccatcacaggcccagaggcctaggagaaaaaaatggtttcatgggccaggcccagggcccccctgctgtgtgcagcctagggacttgatgccttgcatcctggctgcttcagtaccagctgtggctaaaaggggtcaaggtatagctcaggctgtggcttcagaaggtgcaagccccaagccttggcagcttccacatggtgttgagcctgcaggtgcacagaagtcaagaattgaggtttgggaatcccacctagattccagaagatgtatggaaacacctggatgtccagacagaagtttgctgcagggatagagccctcatggagaacctctgctagagcagtgtggaaagaaaatgtgaggttggagcccccacatacagtccccactgggccactgcctagtggagctgtgacaagagagacactgtcctccagaccccagactggtagatccaccaacagcttacagcatgtacctggaaaagc

SEQ ID NO: 255764 - DNA, 602 bp, Homo sapiens
attcaactcagccaagagagtttgggaaatttctcagaagtattgacatacaggatgagtcttcatgttaaacaggtgagagatgagaaagagaaagragagcattttagaaaaaggaaacagcatggccatgggcgggcaaaactccactctctctctcagatttactgtcattttgctttccaacattaacctcatttcattattcttcttggttccatgcatagacactcataatcacctcatagatgctttgctttgaagtgcttttgggcatcactgagtgatactgaacactttttttccacttggatgtgttttattacttgctttctggctccaagcacctgctgccaatcccagcattgggctcaagtgatctgcccatctcggcctcccaaagtgctgggattacaggcgtgagccaccacacctggcctgaagttttttttttaatgagtaaatgcaagctaagaatttgtctttgagagacaccaaacctacaaagctgtttggaatcttcttcatgtatgtaggttcttagaattgcttcccgaacttgtaagtaaagacacaggatgattgatcgctaccagggtaat

SEQ ID NO: 255765 - DNA, 605 bp, Homo sapiens
tatttgaattcaagatttttgcagtaccagttttctgtcattgttaygcactaaattgtgtcaccacctcaaaccatatgttgaaaccctaacccccaatatgactgtatttggaggcaggactgttcaagaggtaattaaggttaaatgaggtcataaatgtagggccctaatccaatagtactggtgttcttgtatgaagaggaagagatgccagagctttctctacctttgtatgtgcacagtggaaaagccacttgagttcattgtgagaaggtgactgtatataagcctggagagacctcaccagaaaccaaccctactggcaccttgatcttggacttccagcctccataactggagaaatggatggcttaaactgtatttctgttgtggcttaaactacatttcagttgtttaagccacccagtctgtagtatttttatggtatttattatagtattaaagtattatgatattaaattattatggtatttatttgatggtatttactatggcagctccagtagactaatacagtcacagtttgaaaagaatgagcatgggatatacaaatggatagtaagacaagagaaagaaatagg

SEQ ID NO: 255766 - DNA, 605 bp, Homo sapiens
tatttgaattcaagatttttgcagtaccagttttctgtcattgttacgcactaaattgtgtcaccacctcaaaccatatgttgaaaccctaacccccaatatgactgtatttggaggcaggactgttcaagaggtaattaaggttaaatgaggtcataaatgtagggccctaatccaatagtactggtgttcttgtatgaagaggaagagatgccagagctttctctacctttgtatgtgcacagtggaaaagccacttgagttcattgtgagaaggtgactgtatataagcctggagagacctcaccagaaaccaaccctactggcaccttgatcttggacttccagcctccataactggagaaatggatggcttaaactgtatttctgttgtggcttaaactacayttcagttgtttaagccacccagtctgtagtatttttatggtatttattatagtattaaagtattatgatattaaattattatggtatttatttgatggtatttactatggcagctccagtagactaatacagtcacagtttgaaaagaatgagcatgggatatacaaatggatagtaagacaagagaaagaaatagg

SEQ ID NO: 255767 - DNA, 442 bp, Homo sapiens
gtgccaggtgctgtactatgagttaccagattaaatggtatacaagcaacaggaattctaataatgtagaaagtgaaagagaccaagaagttaagtctgaggttgggggcaaaatttcattgtcagtcaagaattttggagacatatgtcaccaacatgctccaaaactggatgcctattttagtgtattttacaaggaagatttggatatatgatatctgggtgttaaaatgtgttctaccttgctatatttgtttagctgacaccaactccagaactcagacatatattacttttgagagtgactgaccattgtggtatctacaaaagtggtaagaaaagtggaggaatctttgtagtttcagtctggrgatgcttccttcatccaggaatgctttctagcattcttgagttctggctaatgaggtgctaatggggtgtt

SEQ ID NO: 255768 - DNA, 536 bp, Homo sapiens
aaacttaagatattcaaatctccatccctcataaggctacaatcatcctatattttgtgtgtagtgaatggcacagcatttaccagagtctccagctagaaacctaagagtcattcttgcttattcattcattcattcatttactaaacagctctatctttgcatctccccartccctgcactgtacaacgtacttgggatagaatagtaaagaaagcaacaaagtccctacccttacagagtttacagattagtgacagaacagagattaaataaactacaagctcacactcaccagcccccttctaaagtaggccacaactcagttccctgggattcccaaccaatggacccaaggcttggccctcctgagaaatagtcaagaaggatatatttgcagagtgagaatggagtttgaagcacaggttagtaagttcaccgacatggtgtgatgcctatcatggtgtggaacagagttgggattggaagagaagaaggagaacaagaataggctatgggccaggggccagatgtcc

SEQ ID NO: 255769 - DNA, 560 bp, Homo sapiens
ggactccataatggaaaagtgggggatacaaggtttgaaaaactacctatcaggtattatgttcactatttgggtgacaggatcattagaagcccaaacctaagcttcacgcgaaatacccatgtaataaatctgcacatgtaccccctgaacctaaaataaaaaaataaaatattttaaaaaggaaatagccctctttaaaaaacagttatgctgagcacaataaaggtagagctgtttaaggcagaagaaaataaggtgattgaagcttactaactatgagttacacattagcaattcaaattgattcatccagaagttagctgagaaaatttatgacaacatcytgctccccacacaaagatatatgggaaaagtagagaaaagaactcaggttgattgtatcttagactaaaataaacattcaacagaaagatagctggaaaatctcaaaatacttggagattaaacaacacatttctaaataatacacagagcaaaaataaatctcaggaaaatttttaaaatattttgaactcaataaagatgaaaacacaaca

SEQ ID NO: 255770 - DNA, 560 bp, Homo sapiens
ggactccataatggaaaagtgggggatacaaggtttgaaaaactacctatcaggtattatgttcactatttgggtgacaggatcattagaagcccaaacctaagcttcacgcgaaatacccatgtaataaatctgcacatgtaccccctgaacctaaaataaaaaaataaaatattttaaaaaggaaatagccctctttaaaaaacagttatgctgagcacaataaaggtagagctgtttaaggcagaagaaaataaggtgattgaagcttactaactatgagttacacattagcaattcaaattgattcatccagaagttagctgagaaaatttatgacaacatcttgctccccacacaaagatatatgggaaaagtagagaaaakaactcaggttgattgtatcttagactaaaataaacattcaacagaaagatagctggaaaatctcaaaatacttggagattaaacaacacatttctaaataatacacagagcaaaaataaatctcaggaaaatttttaaaatattttgaactcaataaagatgaaaacacaaca

SEQ ID NO: 255771 - DNA, 468 bp, Homo sapiens
tttcataaagttctctcctgcagggcctagtaaagtgatttgcataatagagatgtttagaaagtgttgggtgaataaataacttaataatgacgatggcccaataaaggcagtgcagagggaaacataatgacctcaggagtaattcagagatattcttacttgaaaaggtttaagtaggttatttggtttaaaygttgtatcatctgaaaactcaatttcctatagcaactagtaccagattgagaggacattttgtgctgttcagcaatgtgagggaagctgccgctggaaaggggaaaggaaccagtgtttggagggaggctgtggaacaagatagaaaatcctcaaaggcagctagctgtccatttgcactcctagaaagagtcagagaatggagggagggcaaggctactattgcaaagccactcatagagccagccacagtgtttgtgtagggagggtaat

SEQ ID NO: 255772 - DNA, 511 bp, Homo sapiens
cccacataatgaatctacacatgtgtgccctgaatctaaaataaaagttgaaattataaaaataaaataaaatcctatattccatctaaaaacaaaacaaaatgaaaaagaagtgattttattgcttcagtgttacttggtgcttaggcactcaatctaggtgggaacatagattcctacagaagattgttgggccaggccttatgcccccactctatatgagacttcattccttggcagccatatgctgaaacctaacatccttgagtccaagtggaaaacagtgatgatagtctaacatgtcagaagtttggacacacagttgtacatgtaatcagctttatatattttaaaacataggtyagttctatttgttcaaatacactataaaaataaactttttctcatatagaagctaaaactaaagaaaactatgagttccttgtttttgagagctctgccagcatcatgtcagattgtgttaatgaggatctgtactttttaatagact

SEQ ID NO: 255773 - DNA, 533 bp, Homo sapiens
acaaaacctcaattaaaaaaaaaaattagctgggtgtggtatctcatgcctgtaatcccaggctgaggcaggcatatcacttgaacccaggagttctagaccagcctgggcaacatagtgagaccctgtctctacaaaaaaatacaaaaaattacccaggcatggtggcatttgcctgtaatcctagttacctgggagaytgagatgggaagatcacttgagcctgggaggttgaggcagcagtgagccatgattgcactgccaatgggagaccctatctcaaaaaaactgaaaaggatttagacgtgtgtgaagttcattctacaattcagtgtgacacttttataaccaaatgagtaccaatacccttatgaacacacatatataaaggaaagaaaataaagagagaaagaaaaagaagaaaaagaaatgtggttagaactccttgtttcattttactctgacttgattatttcccaggcccaaatctagaactggaaggtggtagcttattgtatcagaggttaagcttg

SEQ ID NO: 255774 - DNA, 533 bp, Homo sapiens
acaaaacctcaattaaaaaaaaaaattagctgggtgtggtatctcatgcctgtaatcccaggctgaggcaggcatatcacttgaacccaggagttctagaccagcctgggcaacatagtgagaccctgtctctacaaaaaaatacaaaaaattacccaggcatggtggcatttgcctgtaatcctagttacctgggagattgagatgggargatcacttgagcctgggaggttgaggcagcagtgagccatgattgcactgccaatgggagaccctatctcaaaaaaactgaaaaggatttagacgtgtgtgaagttcattctacaattcagtgtgacacttttataaccaaatgagtaccaatacccttatgaacacacatatataaaggaaagaaaataaagagagaaagaaaaagaagaaaaagaaatgtggttagaactccttgtttcattttactctgacttgattatttcccaggcccaaatctagaactggaaggtggtagcttattgtatcagaggttaagcttg

SEQ ID NO: 255775 - DNA, 648 bp, Homo sapiens
gctcatttcccagaggttttgctggccagggtgtttgaagatagraagtggctagagtgtggtttcagatctggggcttgtctctctcatgagagaaaatgggataaaatttaaaggtcattcctatgtttgaaaaaatgattgaccaggcttatacatgagattatttctgcaacaccatttggagggtgtgtatgccaatcatgtggctctgtaaggtggaaggaggcatgatgttcagttatggttgtttttatctcaagttctttgacattcagggcatgagacaaaagtatatagttttggtttggcattctgtgacaatccagctgagtttgttttcttcctcttcttttatgaggtattttaaggtttagatgttctttttaccgtgaaatctaatttaattgtggttattttatttttctgtatatgtgcccagagatttttggtttattggtaaactttaaaaaataccacagtgcgtgtaaacatatataatttaagaaccagtcatgattgaggcctatgatatcctttggaacattcttacttggaagcaattctaattaacaagatattttctggtttccttcttgtatgctttattagtaataatgctgttagttagctacaaatctttagtcc

SEQ ID NO: 255776 - DNA, 648 bp, Homo sapiens
gctcatttcccagaggttttgctggccagggtgtttgaagatagaaagtggctagagtgtggtttcagatctggggcttgtctctctcatgagagaaaatgggataaaatttaaaggtcattcctatgtttgaaaaaatgattgaccaggcttatacatgagattatttctgcaacaccatttggagggtgtgtatgccaatcatgtggctctgtaaggtggaaggaggcatgatgttcagttatggttgtttttatctcaagttctttgacattcagggcatgagacaaaagtatatagttttggtttggcattctgtgacaatccagctgagtttgttttcttcctcttcttttatgaggtattttaaggtttagatgttctttttacygtgaaatctaatttaattgtggttattttatttttctgtatatgtgcccagagatttttggtttattggtaaactttaaaaaataccacagtgcgtgtaaacatatataatttaagaaccagtcatgattgaggcctatgatatcctttggaacattcttacttggaagcaattctaattaacaagatattttctggtttccttcttgtatgctttattagtaataatgctgttagttagctacaaatctttagtcc

SEQ ID NO: 255777 - DNA, 634 bp, Homo sapiens
agtttatggcttgacgtgcaacaaggatgagagaggtgttatggaaaatcaagatactttgaaagaaataggcaaagggggagaatctcccctattgttcaggagctagacagagtatcaagtttggaaaatgagtcatttttgttgctgtcagagccattctaggagcctgagaaactggtgtctggtagcaggtaccctttacctttcatgcatttaatcagacttctsaagaagtaggttggagagctggcagccatggggagagggcgccagtgggcattccctttgatctgactccacgacgctatcctcctcttggccacccatggatgagaaggtaaaggggtaaatgatgggatctcttttggggactgactcaatctggagataaccctgcttatgactcaacatttctcctgcctctgggcagtgggagagaatttacgtcttcgactcctctgttgatctttaaaaaaaagacatggctgtgacctggattggcggtatctaatctccccaaatagacatcacaacttgagaccaaataaatcaacatagaaatggtatatgaaatgaaattaaaatgtaaaccgagggagctgagcaagatgacaactaataatttgtgtaa

SEQ ID NO: 255778 - DNA, 563 bp, Homo sapiens
tttccacatgcctgtttttgagctcctgaaaaaatggaaaataggatttgaggctatgatayaactatcaggaatccaaaaatcactttgtatctatgcagcgcaatccttggaagtattcagtcagatagtctggtcgaggttataagacgctacaaacactcagcacaaccatctgagagttatgtgctgttgtgtggtcttaattacatcacaaccataataagttgcatgtaggtcttttgtgtttgtttgtttgtttttttctacctctgctctaacttttcatttagagccaaataagaacatcaaattaaaacattaactcaagagacagagcagcaggaaattccgaggttaagtttctcattgcaattttaactttcccatgatagacattttctgtgctggttagcatcttacatgtatagctttgtataaagagtcagattctaacttcagttacacccattttatttttactgaaaatgtaagggggagcaatgaagaatcaaagtagtgccagaggtgagcaggttggaaagcaaatgctgaagcagaca

SEQ ID NO: 255779 - DNA, 514 bp, Homo sapiens
gaggctaatccagggaaaccagatctgttttgatttgctttgtttttatttgaggcctggtaatgacattcagtaaagttttcctgaaagatttctctctccctgagaataacttttcctaatatttacatgtacatggcccatgtgcctttgatttcttttgcacgcattgcayattgatatttaaactatgttggaataaaagaagtaatgaaatttaaaataaacatgaacttcacaaagagaaacagaaaggaaaggagtttgccaagtctcagccaccaagggagagttcaggcagagatgcttctgtctcctaaagagtgaggactaaaattgtccctgaaactgctctagaagaaagtacaaagccctcaggagaacagaaaggcaaaagcacatgtcatatccatgcagtcttcagtgaggtaattagcccttgatttgctttttttagattattcaggtctcaaagcacattgtctccctattcttttgtgcatggatgaaaatc

SEQ ID NO: 255780 - DNA, 487 bp, Homo sapiens
tacagagcagtaatagtgaaaggagaaatgaagtttgtttgtataaattgtggcaatagataccctaacttgcaaagggatttctaatgacatttgagtatctgagtcagacagaagaacctaaaagggatagacctggagacttggaaaaggacttttttgagggctgttgaaaagtcaaaacccaaatatggtctactagttttaatgaattagttgttattttgtaccatgtgtcgagaattsacacaacattcacaaatcatccctgtccgtctaaccagacagacagctgcttttctgtctcagttaatgtgactgatgtatatttttaacatggacctcattattaattgactctttaagtactatattccatgaactcctgtccccaaggacagatggcatttttcccctgccagagaagcagcactgggagacatttagtgtaaagcacatgagaaatagtaagggaatcaattggtaa

SEQ ID NO: 255781 - DNA, 555 bp, Homo sapiens
ttactagccacatttcatgtggccaccatatggcagtgcatatgtgcatatataagacatatatatatacacacacatatataatgaagatgtgtatatatatatttcttcatatgtattcatatatacgtatatgatatatatgttatatgtatatctcacacacacacacacatatatatatataaaagtttctcacatgtagccccatatgaaccaactgaagcatattagttctacatctcattttcattgccttgtgtttgggattctatccatttaaattccagaatatttaatgaaagtggcaaaattgaatttgtaagcagtcatcaaagaatctatatgataataataaaggataycattcattgagtgctgactgaatgattagtgccaggctcagcggctttaaaagtaatacacattaatccatttaatcctcactgtgaccgtaagagaaaggtacattccatttagtttagaaaaacaatgaataaagaaattaagtaagtttcccattttgggtaagcagtggcacttcactactatgtg

SEQ ID NO: 255782 - DNA, 574 bp, Homo sapiens
gtgttttctattataagacccttgcttaaaaaagtactcaaagatatttagaaagaaaaaaggtgaaagctgaaaaaaaatgaaaaatgagaaggaatggggaagaaattggtaaatttgagtttacatagaaataaatttatttaagacaggtataataataacacttacttggaagatacataaaaagtagaccaagaaaaaatagcataggagaaagaggactagagttaaagcattctaaatttcttctaagaataggatgtttattagcattatacttaagggtcagatatgtaagttaaaattttaagggtcaaatgaaacattgaaaaaactttttatctttaaagcatgaagataggaaagaggggtactacagactgaatgttkgtgtcctctaaaaatttttatgttgaaacctgaatttccaatgtgatgatatttggacgtagggcctttcaacaatgattaggtcacaagagtggagccgtcatgaactggattagcgtcctcctaagaaaagagagagtttgcttcctctctatctgccatatgagtacacaaaaagaaa

SEQ ID NO: 255783 - DNA, 622 bp, Homo sapiens
ggcatgatctcggctcactgcaacctctgcctcccagattcaagcaatttttagaggcctcagcctcccaagtagctgggactacaggtatgcgccatcatgccttgctaatttttgtctttttagtagagacagagtttcgccatattggccaggctcgtcttgaactcctgacctcaastgatccacctgccttggcctccccaagtgctgggataacaggcctgagtcaccatgcccagacttacactttttagtagtcagatttcactaatatattcctctatggcttccagttttgatactctttagaactatttagaaactattttccacccaagattatagaaatactcatctaaaatagcttctcaaaaccttacagctttactttttacatttaaatcttgagcaatcttcgatttaataacaatatttattgaattcttacaatgtgataagcagaaagaaggaagattaggatgcaattttttcccctaaattatcagatatatttgggtcaattttgcactttttgctcttgttgtgaggttgacctatcttttgctgaacctgtaacaggctgttttagttgtatagcttttaacatatttactatctg

SEQ ID NO: 255784 - DNA, 622 bp, Homo sapiens
ggcatgatctcggctcactgcaacctctgcctcccagattcaagcaatttttagaggcctcagcctcccaagtagctgggactacaggtatgcgccatcatgccttgctaatttttgtctttttagtagagacagagtttcgccatattggccaggctcgtcttgaactcctgacctcaactgatccacctgccttggcctccccaagtgctgggataacaggcctgagtcaccatgcccagacttacaytttttagtagtcagatttcactaatatattcctctatggcttccagttttgatactctttagaactatttagaaactattttccacccaagattatagaaatactcatctaaaatagcttctcaaaaccttacagctttactttttacatttaaatcttgagcaatcttcgatttaataacaatatttattgaattcttacaatgtgataagcagaaagaaggaagattaggatgcaattttttcccctaaattatcagatatatttgggtcaattttgcactttttgctcttgttgtgaggttgacctatcttttgctgaacctgtaacaggctgttttagttgtatagcttttaacatatttactatctg

SEQ ID NO: 255785 - DNA, 574 bp, Homo sapiens
gtgttttctattataagacccttgcttaaaaaagtactcaaagatatttagaaagaaaaaaggtgaaagctgaaaaaaaatgaaaaatgagaaggaatggggaagaaattggtaaatttgagtttacatagaaataaatttatttaagacaggtataataataacacttacttggaagatacataaaaagtagaccaagaaaaaatagcataggagaaagaggactagagttaaagcattctaaatttcttctaagaataggatgtttattagcattatacttaagggtcagatatgtaagttaaaattttaagggtcaaatgaaacattgaaaaaactttttatctttaaagcatgaagataggaaagaggggtactacagactgaatgtttgtgtcctctaaaaatttttatgttgaaacctgaatttccaatgtgatgatatttggacgtagggcctttcaacaatgattaggtcacragagtggagccgtcatgaactggattagcgtcctcctaagaaaagagagagtttgcttcctctctatctgccatatgagtacacaaaaagaaa

SEQ ID NO: 255786 - DNA, 622 bp, Homo sapiens
ggcatgatctcggctcactgcaacctctgcctcccagattcaagcaatttttagaggcctcagcctcccaagtagctgggactacaggtatgcgccatcatgccttgctaatttttgtctttttagtagagacagagtttcgccatattggccaggctcgtcttgaactcctgacctcaactgatccacctgccttggcctccccaagtgctgggataacaggcctgagtcaccatgcccagacttacactttttagtagtcagatttcactaatatattcctctatggcttccagttttgatactctttagaactatttagaaactattttccacccaagattatagaaatactcatctaaaatagcttctcaaaaccttacagctttactttttacatttaaatcttgagcaatcttcgatttaataacaatatttattgaattcttacaatgtgataagcagaaagaaggaagattaggatgcaattttttcccctaaattatcagatatatttgggtcaattttgcactttttgctcttgttgtgaggttgacctatcttttgctgaacctgtaacaggctgttttagytgtatagcttttaacatatttactatctg

SEQ ID NO: 255787 - DNA, 616 bp, Homo sapiens
gtattcataatacatttctagagttcatcatggtaaaaacagatgagattttgggagattactctggtgtgctttagtctattgtgcatggtgaaaagtgatactagggatatgtatttatcctaatagaaacagtcactaagaatttaggtatctagggtgtccaaaaaaagatataaaacaaagtggatttggatgaattatcttattctgatgaatgcacaaaatccagggcaaaatgctcctccaggatctatattgttcaactgaggcatgtgcactgatatgagtatcaaattccctgatctttgcttcattttggaatctgcagctacagtttcagggagaagccagcaggttctcccaagtatactaggatatgctttgcttctgtgggtgkgtgtgaggcagggaaggagaaaaaggggtggggctagggggagtggtgcaagcccagcacagtgatctgagagttcaatgctgccttaagtagctactacgcatctatgacattccaaggctcagggaaaagaagttaacaaatagcatatttggtatgggaaaacccacaaggaggtccggctatttgggcaattctatttactgtgacacagag

SEQ ID NO: 255788 - DNA, 591 bp, Homo sapiens
ttcaggagttcgagaccagcctggacaacacggcgaaaccctgcctctacaaaaaatacgaaaattagctgggtgtggtggcatgctcctgtagttccagctacttgggagcctgaggtgggaggatgacttgagcctggtaggtcgaggagcccgcaatgagccatgattgtgccactgtgctccaggctgagtgacagagcaagaccttgtctcagaaaaacaaatacataaaatacagtatttgcaggatttgaaacctagctatacgaaaggcaactttttggggattctgcagagctgaccgtgggaggtgagtttgtgcagattttgagtttgtgcaggtatctgcargtggtcctggaaccaatccccagggaagatggaggcaagactgtattgtatttttcacactaaatatttcccattgtgtgtgtatgtgttttataaaacaacttctagttcctgctgcatagaatcttcccttaatatttgtggtccatttttaaaccattctttctcaggtggtatctactcatttggtactatctttaataatggtgggattcctctgttgttttgataacttcc

SEQ ID NO: 255789 - DNA, 544 bp, Homo sapiens
cttggatttacaaccttgtcccatctctccttgccaccatctgccaacctcctgttatctcctctttccctcagttaactcctagctcacaatattcatcctcctcaaatcagaatctcagtgtttgcgaggatgacccagccagtactcgagcctgtccattgcttgctcctttcctccctgttgacctttgcctccattgctccctagacacacrttcccactgttgtatcctggaccttgtcagcactagaaagtgcaccacctctggaatgctgacttcaaagacgtcattttccagtgccacttcctcttcttccagatctctttgctcagtcatgcccaccctattactcccctctactttctatccatcaaccctctcctggcctcccttctctccctaccagcccacattccatgatccaccattataaactcttcttaaaatacccttagctcccctgcacttctatttctccatggaacctgccctacaaaatttgctttttctatgcttccacctcttcatgtgaacattgct

SEQ ID NO: 255790 - DNA, 545 bp, Homo sapiens
gaccatgaagcccaaactgggcaagttgccatttctgcaacgttaaaaggtaaactttccacctgttttggtcaatgaacggaaactcgaaggctgatgaatgcaaaatcaatcttcaaagtaaaaaatgaataactgggttagcaattaatggttcaattcatattactctcttaaggtagtgaaaaataaaaattgtgtaatttttagtctgaaactcacataataaaagaaaacatgcaattgtgttttattttgctttgaactactgggaaaaatcacaatgaatccccttaaggctatttcattttttttcttttttttgacggagtctcgctttgtcacccaggctgaagtgcagtggcatgatcttgggtcaccgcaamttctgcctcctgggttcaagtgattctcctgtcttagccttctggggtgctgggactacaggcttgtgccaccatgcccagctaatttttgtatttttagggaagatggggtttcactatgttggccatgctggtctcgaattcctgacctcgggtgat

SEQ ID NO: 255791 - DNA, 580 bp, Homo sapiens
tggcttgactctcatcctgatgtcctggtgtgtgctccttgggaagcctatggagcgaggaggaagaactgtcttctaagcatccttgcacactcagaattatcmaaacaaagtgaagagtgtcctaactgataaccacaattgtgtcctggagagatgtggggaggagaatctggctaaatcacttcagctgcaatatattttcttttctccagaagttttccctgaaaatttttccccaaagtgggggaaaaacttgcagtgaggaccaccacagaagaagctggtgagtgagttagatatttctgtattttaaaaggtatcctagtaggttctctctctcactttctctctctctctctctctctctctctctctgtgtgtgtgtgtgtgtgtgtgtgtgtgtgtcccatttgctgcaaacctggagattagtttggtgcaaaagaaatggcagtttctgccatgatggcaatttattttgcaccaacctaatagcagtggatatttccaaaatttttcttccaaattgtcccctgaggttcaacttataaacacaaaaagatcatcaagacctaga

SEQ ID NO: 255792 - DNA, 580 bp, Homo sapiens
tggcttgactctcatcctgatgtcctggtgtgtgctccttgggaagcctatggagcgaggaggaagaactgtcttctaagcatccttgcacactcagaattatccaaacaaagtgaagagtgtcctaactgataaccacaattgtgtcctggagagatgtggggaggagaatctggctaaatcacttmagctgcaatatattttcttttctccagaagttttccctgaaaatttttccccaaagtgggggaaaaacttgcagtgaggaccaccacagaagaagctggtgagtgagttagatatttctgtattttaaaaggtatcctagtaggttctctctctcactttctctctctctctctctctctctctctctctgtgtgtgtgtgtgtgtgtgtgtgtgtgtgtcccatttgctgcaaacctggagattagtttggtgcaaaagaaatggcagtttctgccatgatggcaatttattttgcaccaacctaatagcagtggatatttccaaaatttttcttccaaattgtcccctgaggttcaacttataaacacaaaaagatcatcaagacctaga

SEQ ID NO: 255793 - DNA, 580 bp, Homo sapiens
tggcttgactctcatcctgatgtcctggtgtgtgctccttgggaagcctatggagcgaggaggaagaactgtcttctaagcatccttgcacactcagaattatccaaacaaagtgaagagtgtcctaactgataaccacaattgtgtcctggagagatgtggggaggagaatctggctaaatcacttcagctgcaatatattttcttttctccagaagttttccctgaaaatttttccccaaagtgggggaaaaacttgcagtgaggaccaccacagaagaagctggtgagtgagttagatatttctgtattttaaaaggtatcctagtaggttctctctctcactttctctctctctctctctctctctctctctctstgtgtgtgtgtgtgtgtgtgtgtgtgtgtcccatttgctgcaaacctggagattagtttggtgcaaaagaaatggcagtttctgccatgatggcaatttattttgcaccaacctaatagcagtggatatttccaaaatttttcttccaaattgtcccctgaggttcaacttataaacacaaaaagatcatcaagacctaga

SEQ ID NO: 255794 - DNA, 580 bp, Homo sapiens
tggcttgactctcatcctgatgtcctggtgtgtgctccttgggaagcctatggagcgaggaggaagaactgtcttctaagcatccttgcacactcagaattatccaaacaaagtgaagagtgtcctaactgataaccacaattgtgtcctggagagatgtggggaggagaatctggctaaatcacttcagctgcaatatattttcttttctccagaagttttccctgaaaatttttccccaaagtgggggaaaaacttgcagtgaggaccaccacagaagaagctggtgagtgagttagatatttctgtattttaaaaggtatcctagtaggttctctctctcactttctctctctctctctctctctctctctctctgtgtgtgtgtgtgtgtgtgtgtgtgtstgtcccatttgctgcaaacctggagattagtttggtgcaaaagaaatggcagtttctgccatgatggcaatttattttgcaccaacctaatagcagtggatatttccaaaatttttcttccaaattgtcccctgaggttcaacttataaacacaaaaagatcatcaagacctaga

SEQ ID NO: 255795 - DNA, 568 bp, Homo sapiens
tgcccttgaaaagaaaatcattttatatttctctctcccaaattcattctatcaactgttcctttaacttctaaaaactgtaattctaggatcaggcaatcagcattctcaaatacttgagtgaaatgacagccaggtgtcttctgcctcccagytcccatgactgtggtttcctctctgcaaccctctggtacacgggttctcagggctgagttgagaggtgtccaggctacacggtgtagaagtccacacactggtggcatcgatgggctattttcttaaagtactcatccaggggcatgatcagggctggtgaggagagagaggtctgtcatggtattcaaaagtcatcatgacatgtgttaaatggacagtaaaatattttttgtaatcattatagggcctttctttctttgacaagtgggttgtggtttgcaacttctctttccatgccatcagggcttctaccagtgccctgctattttaacaggtgaagagtctgatataaaaggtttccttcacctgaaaaccattccctcagcttcctctcccaacctggcctgccttg

SEQ ID NO: 255796 - DNA, 557 bp, Homo sapiens
ttgacagcttcccttgaagaacatagcaatgggagctctctgctttgcaaggcactctgtgttggccagcagtgttggcgtctattattattgggcaaaatcttatgctttgcaagttttactcttttrtctcagttctgctggtttgaagtaaaaatgaatatatttctatctcttccacaaacagcttttcaaattactttcagttgttctgtctctacacaaactcaaaattattttctaaaaggtggtggtggaggaatattgtcttaagcaggattaagaacagctgttaatttcttttgctctgaacctcagctttgtcttgaaggatgataattacatggtttacactcccaaagtaggcagaacatgatggtcaggattaggggaggagaactctggattgataatgattgaattaatatcacaatgactgttgttttccaagttcatcagaacagaaaacctacaactcacggactcctagggaacacaaagcaagacatgcaaagtgctgggctgttgtcctagtgttgtgctcttagctgtataat

SEQ ID NO: 255797 - DNA, 564 bp, Homo sapiens
ccagcagtgttggcgtctattattattgggcaaaatcttatgctttgcaagttttactcttttatctcagttctgctggtttgaagtaaaaatgaatatatttctatctcttccacaaacagcttttcaaattactttcagttgttctgtctctacacaaactcaaaattattttctaaaaggtggtggtggaggaatrttgtcttaagcaggattaagaacagctgttaatttcttttgctctgaacctcagctttgtcttgaaggatgataattacatggtttacactcccaaagtaggcagaacatgatggtcaggattaggggaggagaactctggattgataatgattgaattaatatcacaatgactgttgttttccaagttcatcagaacagaaaacctacaactcacggactcctagggaacacaaagcaagacatgcaaagtgctgggctgttgtcctagtgttgtgctcttagctgtataatgccagtctcctgagctccacacctgtgtcctaacagtcagctgaagagctctaccattccataaacacatca

SEQ ID NO: 255798 - DNA, 557 bp, Homo sapiens
ttgacagcttcccttgaagaacatagcaatgggagctctctgctttgcaaggcactctgtgttggccagcagtgttggcgtctattattattgggcaaaatcttatgctttgcaagttttactcttttatctcagttctgctggtttgaagtaaaaatgaatatatttctatctcttccacaaacagcttttcaaattactttcagttgttctgtctctacacaaactcaaaattattttctaaaaggtggtggtggaggaatattgtcttaagcaggattaagaacagctgttaatttcttttgctctgaacytcagctttgtcttgaaggatgataattacatggtttacactcccaaagtaggcagaacatgatggtcaggattaggggaggagaactctggattgataatgattgaattaatatcacaatgactgttgttttccaagttcatcagaacagaaaacctacaactcacggactcctagggaacacaaagcaagacatgcaaagtgctgggctgttgtcctagtgttgtgctcttagctgtataat

SEQ ID NO: 255799 - DNA, 557 bp, Homo sapiens
ttgacagcttcccttgaagaacatagcaatgggagctctctgctttgcaaggcactctgtgttggccagcagtgttggcgtctattattattgggcaaaatcttatgctttgcaagttttactcttttatctcagttctgctggtttgaagtaaaaatgaatatatttctatctcttccacaaacagcttttcaaattactttcagttgttctgtctctacacaaactcaaaattattttctaaaaggtggtggtggaggaatattgtcttaagcaggattaagaacagctgttaatttcttttgctctgaacctcagctttgtcttgaaggatgataattacatggtttacactcccaaagtaggcagaacatgatggtcaggattaggggaggagaactctggattgataatgattgaattaakatcacaatgactgttgttttccaagttcatcagaacagaaaacctacaactcacggactcctagggaacacaaagcaagacatgcaaagtgctgggctgttgtcctagtgttgtgctcttagctgtataat

SEQ ID NO: 255800 - DNA, 564 bp, Homo sapiens
ccagcagtgttggcgtctattattattgggcaaaatcttatgctttgcaagttttactcttttatctcagttctgctggtttgaagtaaaaatgaatatatttctatctcttccacaaacagcttttcaaattactttcagttgttctgtctctacacaaactcaaaattattttctaaaaggtggtggtggaggaatattgtcttaagcaggattaagaacagctgttaatttcttttgctctgaacctcagctttgtcttgaaggatgataattacatggtttacactcccaaagtaggcagaacatgatggtcaggattaggggaggagaactctggattgataatgattgaattaatatcacaatgactgttgttttccaagttcatcagaacagaaaacctacaactcacggactcctagggaacacaaagcaagacatgcaaagtgctgggctgttgtcctagtgttstgctcttagctgtataatgccagtctcctgagctccacacctgtgtcctaacagtcagctgaagagctctaccattccataaacacatca

SEQ ID NO: 255801 - DNA, 547 bp, Homo sapiens
ccctctccccaagtgagctcatcctgtcctgacaattttagtgtcatctgtattctgatgatcccccacattggtacccccattcctgtcttctttcctgagctccagacatacacatcaaaatacctacctggcatctctgcttcaatatctaaaaggcttctaaatttaacatygtcaaatccaaattcttgatactctagccctttggttctcttctttttccatctttcctgttccagtaaatgccatgagagttgacctaaatgtgtccttgattcctttctttctctcacacatatggtaaccatagaactcaccatccaaactggaacaattctgacagtaaattggggagttattaataattaggctgtgtgatactgtgatatataataaggactatctatattttggtcttcattccagctcccagctagaactcctaaaatgcttgtaatttcctaagtgatgggagtgataaaggtaaatgggtagtttttataattcataagaaacacttttcaaccatacctgagtttatgtt

SEQ ID NO: 255802 - DNA, 577 bp, Homo sapiens
agagagcttttccctgactcttgagtaaagatggaagattccattttgtttcaaagtgtgtcaatagagctaaaaaggccatatgtagactaaactatatgtaaggtatgtaagaattgagatatttactatttgcgcaggtgtggggggaaggtggggaatatattttccaagaattgctttatccactaaacgtgacccatttaacaaccctctaataatatgtcacgcatattttctcattcaaccctcacatcaagcctacggggctggctttacatgtggggaagcctgggcatagaaaggtgaagtaacttgtgcaaagtcccacccctaggaattatcaaagcaaagatttgaatcgagacccatctgactccaaagttggtatctttagctattaccctmtaccagatttaacttggttaaatctttaggaaacatggcacaccagccaaatcttctctccatttttagttgtagcccttattctccatgttaccatctaaaagaccctgctgggaggcttataatgtgaagaacatttagcaaatattacttcatgggaaactgaatt

SEQ ID NO: 255803 - DNA, 513 bp, Homo sapiens
ctttctaaatatgaagtatattctatatgaaattttacaacaataatttatatgtgaataatattaactaaaggatacatttagagagcagagaaaagcctggctgatttttcccagtgtaatgatagaacaattatataaaatgtgaaaagactggaatcatgttaatactcttaccttcagatagtccaaatcttaacaaggtcactcaataattcttaaaataatacaaaatgtcttctgaaaagacatgcaatctagtaaatctggtttatttctaaaaggatgagactttactaataatatctgaaaaattcaagttctcacattccttatcaaaaaagaatatggagtaacatactaacctgagttgtctttatataaaactttagtatacttgggtttatttttatataycttgtccttagccttcagaatttctatctgagtacacaggaatttcaagacaaacttgttagggataattagataaagagttaattggggagccag

SEQ ID NO: 255804 - DNA, 554 bp, Homo sapiens
cagtaaaaacccaagagctctaccagatactggtgacttagaaagctgagctcagtttttgtactgttcacatttctgtctataactgagtctttcaggggagggggaaatgtgtgtatgtgtgtctatggtctccaaaatctttagaatcctgacagttctcacaatgagacagagacagttgcatcctttgatgtgttcctattgttcagggtatttttagagatattaagtgccaatcccactgctctctggtcaggacaatgaaacttaacaagcatccatcgttcaattttgtactaaagagtatttgactccagattttttcaatggaggtataacttctgcagaagctacttgtaaataagttgcaaatattgctgttaattatttttagaagaattattgggtggtcttttctcttatttccaagaygaataacattttaacttttagcatttgggcattctggccatggtttgatgcctaacaagtcggataggattttactttgcacaatgaactgtcagaaaaataaacatcagtagcatctt

SEQ ID NO: 255805 - DNA, 554 bp, Homo sapiens
cagtaaaaacccaagagctctaccagatactggtgacttagaaagctgagctcagtttttgtactgttcacatttctgtctataactgagtctttcaggggagggggaaatgtgtgtatgtgtgtctatggtctccaaaatctttagaatcctgacagttctcacaatgagacagagacagttgcatcctttgatgtgttcctattgttcagggtatttttagagatattaagtgccaatcccactgctctctggtcaggacaatgaaacttaacaagcatccatcgttcaattttgtactaaagagtatttgactccagattttttcaatggaggtataacttctgcagaagctacttgtaaataagttgcaaatattgctgttaattatttttagaagaattattgggtggtcttttctcttatttccaagatgaataacattttaacttttagcatttgggcattctggccatggtttgatgcctaacaagtcggataggattttacttwgcacaatgaactgtcagaaaaataaacatcagtagcatctt

SEQ ID NO: 255806 - DNA, 577 bp, Homo sapiens
cacaaccaggtgcactgctcaaagttctgtcaactgggaagattttccttcacctgctgtccttcagggatgtcctggaaagagtctgtagtgctacagctgtttactcttgggtggtgcctgcatctcatgcagaaccatctataaaccaggttctagtcttctcttcctttgtcaactgattatagggaactccccatgaggtcatcagtgcaggcttggagaaagaagggagggtggcaggaatggagaccatgggcatttgagccacttcccttgtratttacttgtgcctttaggatctgcttgagcccaatcacatatataccacttccatttaatgatggaatgctgctgtgcatgacccacttcatggctagataggtcagaaaacacccagtttatgataggcagttcaggtcgcctggtgacttgatggcccatagtcaaatgtttacttgctcccaaagcccagtgacaagccaagagctatttctcaaaagaagggtcgttaactgttgaagatggcagggccttgctccaaaattctagaggccttctctgtgattcacctatg

SEQ ID NO: 255807 - DNA, 671 bp, Homo sapiens
ggttatttacaatatttttcactattataacaatttttccctgtacatgtgttgtgtgctaaatgtttctgttcccccaaattcatatgktgaaagcttaaaccccaatataatgatattagaaggtgggggtttggggaggtaattaggtttagatgtggttatgaggttggggtgcccatgataggattagtgttcttataagaaaaagactggagttcactctctcatctcaccactgaggacacagagagacagcagccatcttcaagccaggaagaggtatctcactagaagtcaaccatgcagccatcctgatcttggacttcccagactcccgaactgtgagaaataaatgtctgttctttaagccaccaggtctatgttatttgatgatagcagcctgatagactaatacaatgtatcttttagcaagttctccaaaaatgttagtttccttttccctgccttcttttcagagctaagaatacaaaatcacttgcttctcctaggaagggaccttttgaggagtttaatgcagcttccagatgctaccacttgttttggctttccagaaaataagtgtcaaattaataagagaaatgaagaggtgtaaagtaccattttaaatcactgatctcactaaaggttaactataatgatagctagtc

SEQ ID NO: 255808 - DNA, 671 bp, Homo sapiens
ggttatttacaatatttttcactattataacaatttttccctgtacatgtgttgtgtgctaaatgtttctgttcccccaaattcatatgttgaaagcttaaaccccaatataatgatattagaaggtgggggtttggggaggtaattaggtttagatgtggttatgaggttggggtgcccatgataggattagtgttcttataagaaaaagactggagttcactctctcatctcaccactgaggacacagagagacagcagccatcttcaagccaggaagaggtatctcactagaagtcaaccatgcagccatcctgatcttggacttcccagactcccgaactgtgagaaataaatgtctgttctttaagccaccaggtctatgttatttgatgatagcagcctgatagactaatacaatgtatcttttagcaagttctccaaaaatgttagtttccttttccctgccttsttttcagagctaagaatacaaaatcacttgcttctcctaggaagggaccttttgaggagtttaatgcagcttccagatgctaccacttgttttggctttccagaaaataagtgtcaaattaataagagaaatgaagaggtgtaaagtaccattttaaatcactgatctcactaaaggttaactataatgatagctagtc

SEQ ID NO: 255809 - DNA, 558 bp, Homo sapiens
tgaattatctgcatctgacacatagaagagattcaaaaaatattttcagaaagaaaaattttaaaataagacaaaaagaacgtggagaaggatggaagtgagggaggaaacgagggaaggagggtggaaggaaggaaaaagagagaaaaagtaaggaaggtgaatgtataaataaattttagatgatgcatcaagacaatgccaatgtctaactctcctgtaaatggccatattggtacttataatagttatctactgctgtataacaaattgccccatactaatcaactgctggaaataaacatttattatctcaaacagtttctgaaggtcmggaatgttgggtcaacttaactgggtgtttctagcctaagaactctcatgaggtagcagtcaagctgtcagtggagactgcagtcatctagagaattgactggagcttaatgaactgctcccaagcttactaacatggttgttgataaaagggttcagctcctgaccacatggacttatcatagggctgctcataatatgacaaatggattccccaaaaattgt

SEQ ID NO: 255810 - DNA, 514 bp, Homo sapiens
  misc_feature (1)...(514): n = A,T,C or G
ttcttaaatctcacaatgctctctgtgacacatatgacagtgtcctgcttgtgattaggtaaaagaagcttaatttaacgaatraggagacatttttggataaaccatgaaatataccatatgttaaccaaatttttcctatttcttttatattcaccacaacactttatttaaacatgctcttggcttggaaagtatacatttctagttagttgccaatgttgtgctttgttagagtgaaagtttttgcaacgtgatgtgtgtcatggaaaattgacacaaaccaagtgcataaacatggatgaatgaccattgatctataaattggttttctgtcttcattaaaaaccagaaaaatgaaaaattattaaacattntatttattctgatatatcangatttctaggatggtagaattatgtaatccgatataaacaatacaagttttttgattaactaaaaaatggtcgtggagttctctgacaagtagagaaagccatttttcaaagtgaag

SEQ ID NO: 255811 - DNA, 541 bp, Homo sapiens
ttcctcttgtgttccttctgagttactaattgacacaaagaaacattcgcctgacttttatcaacatggattagtgtatttttgaactgtaaataaaccaaattatgtattatgtcatattttatgtctgatttcaattggttaacattaccttgtaaaagtcatatagatcattgaaggtagcaataatttttttctcatttctgtataatatttattgtttaccaacaatatagcatatgtacttattttactttgagtggctatttcatttgtatccatattkagggtaatataactaatccaattataaacattctacaacatttgttttggtgcacacatacatgcattttagttgtataaatttaacattgaaattactatgtcatgggaaatgcacatgtctagtttaatagaaaaagacaaatgatttttaaagtggtttgtatgaattttaacttccacctgaagtatatgaatgttccagttattcaacactgttacaaaacagtggcaaaaccttccttttaaagttgta

SEQ ID NO: 255812 - DNA, 541 bp, Homo sapiens
ttcctcttgtgttccttctgagttactaattgacacaaagaaacattcgcctgacttttatcaacatggattagtgtatttttgaactgtaaataaaccaaattatgtattatgtcatattttatgtctgatttcaattggttaacattaccttgtaaaagtcatatagatcattgaaggtagcaataatttttttctcatttctgtataatatttattgtttaccaacaatatagcatatgtacttattttactttgagtggctatttcatttgtatccatatttagggtaatataactaatccaattataaacattctacaacatttgttttggtgcacacatacatgcattttagttgtatamatttaacattgaaattactatgtcatgggaaatgcacatgtctagtttaatagaaaaagacaaatgatttttaaagtggtttgtatgaattttaacttccacctgaagtatatgaatgttccagttattcaacactgttacaaaacagtggcaaaaccttccttttaaagttgta

SEQ ID NO: 255813 - DNA, 593 bp, Homo sapiens
agcttttaactacttactgaatcacagtggtatataaatacttctttcccttgagtcatgttttttgaagcatttccctatttctccattgaattaagcttcaattacctactgtagaagactgctcaaaaatctactctttattgagttccttccctgtatccctttccctcttttctaccrttgttcccttcaaaacccactacttgccctccattctttagtccttgcctctgctattggcattgcaaactaaggaaagtgtaaatttttttcagttctttaccaggttaaagaatttccttttcatttgtactttttaaagatttttcccatgaataaatattaaaacaaatggttttctcctttgttctgtgaatatgggaaattacgttgattgattttaaataatcaagtaaatttgtgtttctggaataagttcaagctggccatcagatagtatttacttaatagatctctggtttgctactattttctttagcatttttgcacatatgtttacaagagatcagtctgtaattttcctttctaatcacatgtgtgatatgttttgcaattgtcaaagaaaaaat

SEQ ID NO: 255814 - DNA, 593 bp, Homo sapiens
agcttttaactacttactgaatcacagtggtatataaatacttctttcccttgagtcatgttttttgaagcatttccctatttctccattgaattaagcttcaattacctactgtagaagactgctcaaaaatctactctttattgagttccttccctgtatccctttccctcttttctaccgttgttcccttcaaaacccactacttgccctccattctttagtccttgcctctgctattggcattgcaaactaaggaaagtgtaaatttttttcagttctttaccaggttaaagaatttccttttcatttgtactttttaaagatttttcccatgaatamatattaaaacaaatggttttctcctttgttctgtgaatatgggaaattacgttgattgattttaaataatcaagtaaatttgtgtttctggaataagttcaagctggccatcagatagtatttacttaatagatctctggtttgctactattttctttagcatttttgcacatatgtttacaagagatcagtctgtaattttcctttctaatcacatgtgtgatatgttttgcaattgtcaaagaaaaaat

SEQ ID NO: 255815 - DNA, 546 bp, Homo sapiens
agaagtttattttgctcattgttctgcatgctgggaagttgaagagtatgatgctcacatctggtgagcatcatcccatggcagaaagcatcatatggcaagggagattaggaaacagagagctaaattcatccttttatcaggagcctactccgatgataactaacctactcacatgataaaggtatgaatttgttcaygacagtggagatcacatgacctaatgatgtttgtttgtttgtattgtttgtttgtttgtttgacagagtcttgctctgtcacccaggctggacaagctagagtgcaatggtgtgatctcggctctctgcaacctctgcctcccaggttcaagggattctcctgcctcagcctcctgagtatctgggattacaggcatgcaccaccacacccaactaatttttgtatttttagtagaaacaaggtttcaccatgttgaccaggctggtcttgaactcctgacctcaggtgatccaccagcctcagcctcccaaagttctgggattataggcatgtgccgccgtgccc

SEQ ID NO: 255816 - DNA, 546 bp, Homo sapiens
agaagtttattttgctcattgttctgcatgctgggaagttgaagagtatgatgctcacatctggtgagcatcatcccatggcagaaagcatcatatggcaagggagattaggaaacagagagctaaattcatccttttatcaggagcctactccgatgataactaacctactcacatgataaaggtatgaatttgttcacgacagtggagatcacatgacctaatgatgtttgtttgtttgtattgtttgtttgtttgtttgacagagtcttgctctgtcacccaggctggacaagctagagtgcaatggtgtgatctcggctctctgcaacctctgcctcccaggttcaagggattctcytgcctcagcctcctgagtatctgggattacaggcatgcaccaccacacccaactaatttttgtatttttagtagaaacaaggtttcaccatgttgaccaggctggtcttgaactcctgacctcaggtgatccaccagcctcagcctcccaaagttctgggattataggcatgtgccgccgtgccc

SEQ ID NO: 255817 - DNA, 629 bp, Homo sapiens
ataagaggatcctaaggatttttagaggcaggttaacaagggagtcatcagtgagttttgcagaagtcataagaaagaatagaagtgaggctcatctgagtcaatgaggaaaagtgagttgggttttgtatctgtacaaaggtggttctttttgattagccttttctcagaacgcaaaaggactgagatttctcaaccttaagtactrtttggaaacattggagttagataaagtttaacattgtcatctctagctatgttttagtttacttcatggactctcatgataaatcatgaattttacttattttgttttttattcctactttatctatttgatcttttagtagatacaacttccctaaggagatactacattttgtcacttgttttcttgaacattttaactacagtaatttcaaagtgtctctataatatccaatattcatatccgtgttatctatatctatttcttttttttctcatgatgtgtttctttcctttctcagtatgtttggtgacttttaatccattttaggaaaatatatcatcttcatgaacatcttcatgatgttctcattcctagaaacgattccctatcctctatcaagaggctagcagagtgataa

SEQ ID NO: 255818 - DNA, 558 bp, Homo sapiens
tttcaaagtgtctctataatatccaatattcatatccgtgttatctatatctatttcttttttttctcatgatgygtttctttcctttctcagtatgtttggtgacttttaatccattttaggaaaatatatcatcttcatgaacatcttcatgatgttctcattcctagaaacgattccctatcctctatcaagaggctagcagagtgataatcatttctatactgtcagccactgttagattcaagctggatctgtaatctttataagtctcagtgtagctctattttgctttatttcccttaagtgttacaactgaagcataccgtttttcctatggcctgtcttccttgacttcttaatctacttttgtttcttcagaatcataaggcttaaaagaacttctctcttgaatttatgtattccttaggttattaaccagctgtctttcacatattttttatttctttcttgagcttccctttttgcaagtatcttgcgcctcatatgctagcttcattgtcacatttgaaccaagccttttttctaaattgattt

SEQ ID NO: 255819 - DNA, 558 bp, Homo sapiens
tttcaaagtgtctctataatatccaatattcatatccgtgttatctatatctatttcttttttttctcatgatgtgtttctttcctttctcagtatgtttggtgacttttaatccattttaggaaaatatatcatcttcatgaacatcttcatgatgttctcattcctagaaacgattccctatcctctatcaagaggctagcagagygataatcatttctatactgtcagccactgttagattcaagctggatctgtaatctttataagtctcagtgtagctctattttgctttatttcccttaagtgttacaactgaagcataccgtttttcctatggcctgtcttccttgacttcttaatctacttttgtttcttcagaatcataaggcttaaaagaacttctctcttgaatttatgtattccttaggttattaaccagctgtctttcacatattttttatttctttcttgagcttccctttttgcaagtatcttgcgcctcatatgctagcttcattgtcacatttgaaccaagccttttttctaaattgattt

SEQ ID NO: 255820 - DNA, 578 bp, Homo sapiens
atgctttaataaaataaaatgggaggataaaatagaaattggttggggtggatcaagtgaggtggggcattttaaatttggtgattgatgatgtatcagtgttggaaatgtaatatgataccagaatgttagaaaatacttagcaaagcaaaaatcagggaattagtatcccaaatgcaataggaatttcaaagactaagatagaacaacactagcttgtttgaaaaatctagtgtggtttaccattgagagctgctayggtttgtatgtttttcccttctcaaactcatgttgaaatttatttgccattatgagagtagtaggacataagacctttaagaggcattttggccgtgagggctctattttcgtggatgaattaatgccattattttatgattaggttcattatccaagatagcagatttttattgaaggacaagtttggtctccttttatctctgtcttgccctttctctgcccttctgtcttgtaccatctgacaaggaacaatatagcaagaaggtcctcacaagattcttgtcccttaatcttgaacttctctgcctcttgaactg

SEQ ID NO: 255821 - DNA, 597 bp, Homo sapiens
taattattcctcaataaaatgtaaattaattccacaatgagataccactactcacttaatgactaaaaatgagttagactgatgataccaagtgttggttaacatgtgaaacaactgaactcaaatatatattactatttcagtgttaatgatattaagaygttggaacacagtttggtattatttgcttaatttaattaaatggttaccctatcactaacaattttattcttaagtttataatcaagtaaaaatggtgcatatgtttactaaaagacatgaatacaaaatatttattgctcattaacacgagacaaaaactggaaacagctcaaatttttgtcaataagacagtggataaattactatatttttataaaatgaattctacctataaataaaataagattaacctattaatagatactatagcattgatgaatcccacagacattatttggaacgaaaggagccagacaatagtcaatatgattatatgtatttgaaatcaaagaacagaatactaacttaagatagtagaattcagaataatcattacctttgagaatatactgatgattggcagagggtaaagag

SEQ ID NO: 255822 - DNA, 648 bp, Homo sapiens
gaatagaaatttttccaaagttctctcaagtatgctaatacaaaaatcactttatttttttctcctttctattaacaacttataaaattctctagaagggcttastgccctcattatagttcctttttgttccttaatgtacatacgtcacacattttttgaatttctatgttttttttaattgaaatacatcagatttggtgaaccttgtgttcaacttttactattgtttgatttaaataatatctatacaatgctgcatctgtcctcagggaattttaaatcaaataataaatgaattaggtaacaataatttgattaacaattaacatcctctaatttgaatagtttttatcttaaaaatgttttatagggttctaagtgtttttaagttgtatcttgaaagctaggacaaatcactggttacaatatataaaccaactgaataaaaatagaactcattttatcttagtgagattatcctcatattttattttaataactattttgcatataatatgttctgaattttacacacaaatatttttaaagaggtttatttttatatagaagaaaaatatcttctatgcattcatccatcatgtacacatttatacttttatttatagttattgagcatcagcaaag

SEQ ID NO: 255823 - DNA, 621 bp, Homo sapiens
caacttggattggggacatgtgggaggaccctgttgaagctggggacactgagtttgtaaactctggtgaacttttcttgctagaaaaaaatagcttcccatccccagtagtgccaatatctcctcgccatcctatgctgccctcagtcttttccgctttgtctgagaagatgaaccctgctctgcctgaggcaaaattgatggcctcccctgaggcagttgccaagaaaataatgttgattcttctcaggagccaccactaatactcctgtttttttttctagacctatatctagactaaagtcctggtgggcccctagaggtaaggttgagagtgtgacccatgaggaggtgcgctacactcaaaaaaactgcttgagttttctaatttatataagcagaaatctggagaacaggcatgggaatggatattaagggtgtgggataatggtgaaagaaacacagagttgaatcagactgaatttattgatttgggmccctaaacagggagcctttatttaatattgagctcagggagttaaaaaaggttctaatagtttatttgcttggttagctgaaatacagattaaaagatggcccactgtgagtgggctagaaatg

SEQ ID NO: 255824 - DNA, 533 bp, Homo sapiens
actgctttcactgtatccatatgttttggtatgttttgttttcattatcatttgttttaagaaatattctgattttctcaatttcttcattgatccactggtcatttaggagcatattgtttaatttgtatgtgtttgtgtagtttctaaaatgtctccttatttatttctagttttattccattgtgtcagagaagatatgtaacattattttaatttttgaacattttaagacttgttttgtgacctaacatatggtctacctttgaaaataattcatgtgctgggaagaagaatgtatattcctaagccattggatgaaaagttctgtaaatatctattagatccatttgttctttagtgcagataagttagatatttctttgttgattttcagactgggagactgtctattgctgaaagtgaagtgttaaagactctagctattattggattgaggtctatgtctctccttagctctaatatatgctttatgtattttggtgaygttgggtgcatacgtatttactact

SEQ ID NO: 255825 - DNA, 570 bp, Homo sapiens
tcagttgttagctcttaagattcaatgagttttgcttttgcagtgtcaaatctgtaaatttttaatttctgattttttcttctttatatatcatagttatttaattatgctcacttttgcctttatatccttgaacatattaggcattacattaactaatttaatgtcattgttactaattatttaacttttattatttcttgttctgtatcacctgcaacttttargctataagttacattttcctgcttattcttatgtctagtaatttctgacggattctatattgtaaattttgcattgttatgtgttagtttatgttgtagtaatgtaaagagtattggactttttcttctggttggatgttaaataacttgtagatcaggttgaccttttcatgacttgtatttaaactattttaagtcgggcctagagaaatctgtactctagggctaatttgtccccaatttttagttaaaattttctggttttgccactgaaggccctacgtgttaagcagagtctctctttaatgagtgggaacttaattggtctttagcactctgtgat

SEQ ID NO: 255826 - DNA, 411 bp, Homo sapiens
tttagattcaggggtatatgtgcaggttctttatgtagataagttcatgtcacagggattgttgtacaaattatttaatcacccaggtactaagcctggtagccaatagttttttttttttttttctcatcttctccctcctcccacactccactctcaggtaggctccagggttttgttgttcccgtttttgtgtccatgtgttctcattatacagctcccactatatgtgagagtatgcactatttggttttctgttcctgccttagtttgttaaaaattatggcctccagctccatctgygttccttcaaaggacatgatcttgttcttttttatggctgcatagtattccatggtgtatattactacattttcttgatccaatctgtcattgatggcatttaggttg

SEQ ID NO: 255827 - DNA, 599 bp, Homo sapiens
atggcataaactttcaatataattttctgtatacatatcattgttcacacttcaggttatgtcattaaaatctttctttaatagctatattgayataatttacatcatacaattcacccatttaaaacatataatttaatgttttcttccagagacttgttcacacattactacaacataattttagaacatttgttaaacctccaaaaggagcccaaaaagaaaccaatgcctatttgcaatcatttcagcctcagacaattaatctttaggtctctctatatttgcctattctgaacatttgtgacttgcttctttcacttagaataacattttcaaggtacattcatattgcagcatgtttcactacttcatttatgtttattgaaaactaatatttcatcatatagctatgtcatatttcctttgcttatctatcagttagtgaacacttttttccacccactttttcgatgttagtgctgttagaatacttgtgtatatgtttttatgcagatgtgtgaattcatgtgtccagagaaatttctgtcttatgatgactctatcactaacattttaagtaccaaacttttcagaga

SEQ ID NO: 255828 - DNA, 621 bp, Homo sapiens
tacttctgctcacttccacttaatgaaatcactggataaactaagacaakagagaagttaaagtaaaggataaagtaaatgttgtgagtaaattagtatttaaaagatgagagaaaaggaaaatgcagtgaggaaataactgaggtcttatttacagaatattttcccagaccaatgtcctgaagcatttctactatattttcttgtagcagatttattatttcaggtattacatttaggccttggatctattttgagttgatttttgtatagggtaaaaagtgggggtctagtttaattctcctgcatatagatattttattttcccagtatcatttcttaaagagactgtgatttcctcaatgagtattcttggtatctttgtcaaaaatcagttggctatagatatgtggattaatttattggttctctattctgttcttttggtctgtgtatctgtttttatgacagtacaatgctgtttgggatacaacagctttgtagtatattttgaggtttggtattgggatacctccagctatattcttcttgctcaggattgccttggctatttggggtctattgtagttccatacaaatttcaagattttatttttattt

SEQ ID NO: 255829 - DNA, 621 bp, Homo sapiens
tacttctgctcacttccacttaatgaaatcactggataaactaagacaagagagaagttaaagtaaaggataaagtaaatgttgtgagtaaattagtatttaaaagatgagagaaaaggaaaatgcagtgaggaaataactgaggtcttatttacagaatattttcccagaccaatgtcctgaagcatttctactatattttcttgtagcagatttattatttcaggtattacatttaggccttggatctattttgagttgatttttgtatagggtaaaaagtgggggtctagtttaattctcctgcatatagatattttattttcccagtatcatttcttaaagagactgtgatttcctcaatgagtattcttggtatctttgtcaaaaatcagttggctmtagatatgtggattaatttattggttctctattctgttcttttggtctgtgtatctgtttttatgacagtacaatgctgtttgggatacaacagctttgtagtatattttgaggtttggtattgggatacctccagctatattcttcttgctcaggattgccttggctatttggggtctattgtagttccatacaaatttcaagattttatttttattt

SEQ ID NO: 255830 - DNA, 621 bp, Homo sapiens
tacttctgctcacttccacttaatgaaatcactggataaactaagacaagagagaagttaaagtaaaggataaagtaaatgttgtgagtaaattagtatttaaaagatgagagaaaaggaaaatgcagtgaggaaataactgaggtcttatttacagaatattttcccagaccaatgtcctgaagcatttctactatattttcttgtagcagatttattatttcaggtattacatttaggccttggatctattttgagttgatttttgtatagggtaaaaagtgggggtctagtttaattctcctgcatatagatattttattttcccagtatcatttcttaaagagactgtgatttcctcaatgagtattcttggtatctttgtcaaaaatcagttggctatagataygtggattaatttattggttctctattctgttcttttggtctgtgtatctgtttttatgacagtacaatgctgtttgggatacaacagctttgtagtatattttgaggtttggtattgggatacctccagctatattcttcttgctcaggattgccttggctatttggggtctattgtagttccatacaaatttcaagattttatttttattt

SEQ ID NO: 255831 - DNA, 521 bp, Homo sapiens
tatcttgcatagctttttgtatatggtaataggtaggtgaccagtttccttattctgcatatgaacagccagttatcccaacactatttattgaataaagagtcttttctccattgtttatttttgttgagtttgacaaggacaagatggttgtgagtgtggtgtgtacctttatacctgagatctctattccgtwccattggtctacatatcttttgtagaagtacaaagtggtttcagctactgtagccttgtagtaaagtttgaaactgagtaatgtgatgcctccagctttgatttgttgttgttgtttgcctaggattattgtggttatttgggctattttttggtttcttaagaatgttggaatagtttcttttttttttttttttttgtaattctgggaaaaaagggcattggtagtttgataggaatagcattaaatctataacttatttggtctgtacagacattttggcgatatcaattcttcaaatccatgagtgtgggatatttttata

SEQ ID NO: 255832 - DNA, 600 bp, Homo sapiens
agtatcagcttgagcattatcggtgtataaaaattccactgatttttgtacattgatttcatatcctgacaatttattgaagttgtttatcacttctaggagccttttggtgcagtatttagagttttctaggtaaagaatcatatttccaacaaagaaagattgtttgatttcttcttttcctatttgaatgtcttttacttatttctcttgcctgawtgctctgactagaacttcctgtcctatgttaaataggcatagtgagactggccatccttatattgttccagatgacaggggaatgcttccgggttttgcctgttcagtatgatgttggctgtagggttgtcatagatgattcattattttgatgtatgttcctttgatgcctagtttgttgatggtttttattatgaagtgatgttggattttatcaatagcttttcttgaatctatggaaatgatcatatgggtttagtttttaattctgtttatgtggtgaatcacatttattgacatgcgtatgttgaaccaatcttgcatctgaggaataaaaactactcaatcatggaaaattaactttttcatgtgctgctggat

SEQ ID NO: 255833 - DNA, 600 bp, Homo sapiens
ttgttgagatttcatgtaattatgtggttttgaaataacttcttgtattgatttctgtttatatttctctatgatccaataacaggcatggtatgattttgatttttttcaatgtatgtgatttgctttatggttgagcatgtggttgatcttagagtatgttgtattagggttctgtagagggacagsactaataggatacatgtatatttgaaagggagtttattaaggagtgttgactcacacaatcataaggtgaagtctcctaataggccgtctgcaagctgaggagcaaggaagtctgtctgagtctcaaaacttcaaaagcaggaaagccaacagtgcaaacttcagtctgtggctgaaggcccaaaaacccctggcaatccaattggtgtaggtccaagagtccaaaagctgaagaactttgagtccaatgtttgagggcagaaagcatccagtacaggagaaagattgacaccagaagacttagccaggctagtctttccaccttcctctgcctcgttttatcctagctgtgctggcttctgattagctggtgcccacccagattgaaggtgggtctgcctctcccagtcc

SEQ ID NO: 255834 - DNA, 508 bp, Homo sapiens
ggcatgtgtttttattatgttgaatcttcgtattcataaacatcgttgtggtaggcattctaattcccagaatctgtgtaattttcagttgtaaaacttccgttaggtttctgctttatgttatctattcatttatraagtttctatattttgctgggactatttttctcatttgtttcaagcatgtttgtagttgcttgttgaagcatttttgtaatggttgctttaaaatttctatcagataattataacatctctgtcatctcagtgttagtatcttgattgtcttttttcatttattttgagattttcctcgttctttgtgtgtatgacatgtaactttaaattgtacctggatattttgagtgttatgttataacactttgaatcttatttaaaccttctgttttagctggtatcctctgacaacactttggcagaggaatggggtttttttctctttattatcagacggaggtagaagtccaagtgctccacttggctattg

SEQ ID NO: 255835 - DNA, 508 bp, Homo sapiens
ggcatgtgtttttattatgttgaatcttcgtattcataaacatcgttgtggtaggcattctaattcccagaatctgtgtaattttcagttgtaaaacttccgttaggtttctgctttatgttatctattcatttataaagtttctatattttgctgggactatttttctcatttgtttcaagcatgtttgtagttgcttgttgaagcatttttgtaatggttgctttaaaatttctatcagataattataacatctctgtcatctcwgtgttagtatcttgattgtcttttttcatttattttgagattttcctcgttctttgtgtgtatgacatgtaactttaaattgtacctggatattttgagtgttatgttataacactttgaatcttatttaaaccttctgttttagctggtatcctctgacaacactttggcagaggaatggggtttttttctctttattatcagacggaggtagaagtccaagtgctccacttggctattg

SEQ ID NO: 255836 - DNA, 508 bp, Homo sapiens
ggcatgtgtttttattatgttgaatcttcgtattcataaacatcgttgtggtaggcattctaattcccagaatctgtgtaattttcagttgtaaaacttccgttaggtttctgctttatgttatctattcatttataaagtttctatattttgctgggactatttttctcatttgtttcaagcatgtttgtagttgcttgttgaagcatttttgtaatggttgctttaaaatttctatcagataattataacatctctgtcatctcagtgttagtatcttgattgtcttttttcatttattttgagattttcctcgttctttgtgtgtatgacatgtaactttaaattgtacctggatattttgagtgttatgttataacactttgaatcttatttaaacyttctgttttagctggtatcctctgacaacactttggcagaggaatggggtttttttctctttattatcagacggaggtagaagtccaagtgctccacttggctattg

SEQ ID NO: 255837 - DNA, 618 bp, Homo sapiens
ttgctacattgctactgatgccactgattgcaaaatgtgttctatcctaagacccatmatgattttagaactgttcaagtgagaagatgtgcatgttggaatcaatctcacaaggtagttgaggaagaagctattaatgtacttttggctactgtaatgtagctaaacagagggaaatttgagcagttttttcaaaaagaggaaggaaaaataaagtaatggaaaggaactattaccaccaccactgccacccattaaaaaagtccaaaacactttattacttctctaatatgtcaaatatgtacctaggctttttatctcaggacttctgtatttctgaaacagcttttttatggttctaatttgatctcaaaagcaaaaataaacaatatttttgaaataatggatccactaagaggatgtccatatttattaaaaccttattataattggcttttatatcttttaattttttgaattttttggcatcccttctttccctattagaaaaatatttcttgaacttcatttcaaaaaatgaaaataactttggttttctgacccaaaaacaattgattttcatatttaaaacttttaacggaaagttttgaaggagaa

SEQ ID NO: 255838 - DNA, 618 bp, Homo sapiens
ttgctacattgctactgatgccactgattgcaaaatgtgttctatcctaagacccataatgattttagaactgttcaagtgagaagatgtgcatgttggaatcaatctcacaaggtagttgaggaagaagctattaatgtacttttggctactgtaatgtagctaaacagagggaaatttgagcagttttttcaaaaagaggaaggaaaaataaagtaatggaaaggaactattaccaccaccactgccacccattaaaaaagtccaaaacactttattacttctctaatatgtcaaatatgtacctaggctttttatctcaggacttctgtatttctgaaacagcttttttatggttctaatttgatctcaaaagcaaaaataaacaatatttttgaaataatggatccactaagaggatgtccatatttattaaaaccttattataattggcttttatatcttttaattttttgaattttttggcatcccttctttccctattagaaaaatatttcttgaacttcatttcaaaaaatgaaaataactttgkttttctgacccaaaaacaattgattttcatatttaaaacttttaacggaaagttttgaaggagaa

SEQ ID NO: 255839 - DNA, 618 bp, Homo sapiens
ttgctacattgctactgatgccactgattgcaaaatgtgttctatcctaagacccataatgattttagaactgttcaagtgagaagatgtgcatgttggaatcaatctcacaaggtagttgaggaagaagctattaatgtacttttggctactgtaatgtagctaaacagagggaaatttgagcagttttttcaaaaagaggaaggaaaaataaagtaatggaaaggaactattaccaccaccactgccacccattaaaaaagtccaaaacactttattacttctctaatatgtcaaatatgtacctaggctttttatctcaggacttctgtatttctgaaacagcttttttatggttctaatttgatctcaaaagcaaaaataaacaatatttttgaaataatggatccactaagaggatgtccatatttattaaaaccttattataattggcttttatatcttttaattttttgaattttttggcatcccttctttccctattagaaaaatatttcttgaacttcatttcaaaaaatgaaaataactttggttttctgacccaaaaacaattgattttcrtatttaaaacttttaacggaaagttttgaaggagaa

SEQ ID NO: 255840 - DNA, 575 bp, Homo sapiens
gctacattgacttcttatatttcrcagtaactgagttggattctggggcatattatatcaaacctcacctcttttgataaagataatagagataaaaaatagaaatattagagttattagtatattgagatatcagcttgggtcttcgatgacatgacatcacctctgcacattcatattgagttgttcttcattaaatttacactcaataacaaaaaattaaaataaaagttatccataaacttggaatatttgtagctacagtaggtaaaagtggtgtttatactttattgaattcttgatgaacaatccataaagtttttcaatgctacactcaactttaaaaagtaaagaaacagtgaaaaagtcagagggtaagaaattgatatgccatatgttaacaatggatctggcagaagtttttctatattctactgaccaggaagttacattcagttttgtgaatcagaaatagacagataaacaagttgtcattggagaattttgcccaagattcatagtatgtccttgctaaccatgaatctcacaagagcttcaacatatccacagcaata

SEQ ID NO: 255841 - DNA, 555 bp, Homo sapiens
gaatatcagaatgctttttaggcatctatagaaaaataattatgtagatatacatttaatatgattgcattaaatatgtttcctactgcttaagaaacacaaagctgcttttccagggatatattttatttatgggctacatctatctgacctaatatgaaggatttagaaattttgtctaaattacaaaaagaaaaagaaatttatacacattgctttttgtttgtttttgttttgctaatcctacttaattataaaarcatctataaataaatcttgccttatgaataagttaatattccatgtgcggtagaaaaaaattgtttatcttttattagaagatatttttcttatttttgtatttttttcaattttattttatttttaattgccataaaatgattgtatatatttatggagtatagtgtgatgttttgatacatttatacactgtggaatcattaaatcagtctaattaatgtcagctgaaaaagtcaagcttttaaagaactaaaattagtttcagtcacaagttttactgaggattatatcttg

SEQ ID NO: 255842 - DNA, 555 bp, Homo sapiens
gaatatcagaatgctttttaggcatctatagaaaaataattatgtagatatacatttaatatgattgcattaaatatgtttcctactgcttaagaaacacaaagctgcttttccagggatatattttatttatgggctacatctatctgacctaatatgaaggatttagaaattttgtctaaattacaaaaagaaaaagaaatttatacacattgctttttgtttgtttttgttttgctaatcctacttaattataaaagcatctataaataaatcttgccttatgaataagttaatattccatgtgyggtagaaaaaaattgtttatcttttattagaagatatttttcttatttttgtatttttttcaattttattttatttttaattgccataaaatgattgtatatatttatggagtatagtgtgatgttttgatacatttatacactgtggaatcattaaatcagtctaattaatgtcagctgaaaaagtcaagcttttaaagaactaaaattagtttcagtcacaagttttactgaggattatatcttg

SEQ ID NO: 255843 - DNA, 518 bp, Homo sapiens
attacctttcttttttctacctatttttcttcatgttgaaaataacatttactctatcataccyattattcaggaatttatttgtgtgggtttttttctcacttgaatatcttgctatttctcttgacctcttttatgatcttcactttctactcccaaagtcctttcagttaacctctctttaacatttttgagctccattagctatgtatctggctcagatatcacctgatgtcaaaattcttttactccaactttgcacaaacttttcaaatgccacatttgaaaaatataatttatctttccaactctaaaactcctttcatatttcctatcttcatgaattatttaaaatgacatgaagttattatgatgcatataaatatccagagattgttttcataatcaaaaaatgttttacatttttattatccttatcagcatcccatctaaagaaatatatatttctttactgctgggaaaagtcaacaaagcttgaatattatgtgtagtgatga

SEQ ID NO: 255844 - DNA, 511 bp, Homo sapiens
gttctttattactgattgaatttcagaagtttatatggtctcttcagggtttcagtctcttcctgattcaaacttgggagattgtgtaagccagaaacttatacttctcccctagatttaaaaatttctgtgcatagaattgttcatagttgtctctgagaatcttttgtattctataagtttcaatattgcctttgtcatttctgattgtgcttatttggaaaattctctttctttttctttgttaatctagctagaggatgtctatcagttgtacytattctttcaaaaaccaacttttggtttcaagattttttgtatggatttttttctcgttttttgtatggatttttgtgtctcaatttaattctgttcttttctaattttagttatttactttattctgctagctttgatgttggttggttctgttttatttccagtttctttaggtgcaaacttagattgttaatttgaaatctttctaacttcttaatgaaggcatttcgtg

SEQ ID NO: 255845 - DNA, 427 bp, Homo sapiens
aactcttgtaaaggtggtctagtttaaacaaattcccttagcatttgcttgtctgagatagatttttttttctccttcatgtatgaagctcaatttaatgcagtatgaaatttttggttgaaatttattttctggaatgatgctgaaaataggccaccaatctcttctggcttgtaaagtttctgctgataagtctgctgccagcatgatggaartcactctgtatatgatctgacctttttagctgcctttgagtcttttttcttttgtttaatgttggtgaatctgatgacgatctgcctttggagtggtcatcttgtgtactgtctagctgggtttctctatatttcttgaatttgcatgtaaaactccccaggaagattaggaaatttttcataaactatatcatcaaatatatttttcaaat

SEQ ID NO: 255846 - DNA, 580 bp, Homo sapiens
actataacaaaattctatcaacttgatagcttataaacaagaaaagcttatttctgaaggataggaagctcaagatcaaggcagattcagtgttgggaagggcttatttcaaggtccatagatggtgacttctcattctgtcttcacagggcagaatgccaaatgagctccctttggcctcttttataagggtactaatttcattcatgagggcattgccctcatgacctaatagccttccartagcttggggttagaatttcaatatatgaatttggtggaggggaggcaaacattcagaccatagcatcaagtactggacaaagtatggacaaatggaaacctttatgcattgctattaacataatatgtcctagaaattccactttgtaatacatagcccagataacattttgtactgattcaagaggtgataggtcagagaatgttcagtgaaggattctttgtttcagcagtgagtaggagccagcctccatgctcatttctgaacaactgagtaaggaaaacacagtaaacgtcattatagaattttatatgacagaagcaacaagctagatgt

SEQ ID NO: 255847 - DNA, 580 bp, Homo sapiens
actataacaaaattctatcaacttgatagcttataaacaagaaaagcttatttctgaaggataggaagctcaagatcaaggcagattcagtgttgggaagggcttatttcaaggtccatagatggtgacttctcattctgtcttcacagggcagaatgccaaatgagctccctttggcctcttttataagggtactaatttcattcatgagggcattgccctcatgacctaatagccttccaatagcttggggttagaatttcaatatatgaatttggtggaggggaggcaaacattcagaccatagcatcaagtactggacaaagtatggacaaatggaaacctttatgcattgctattaacataatatgtcctagaaattccactttgtaatacatagcccagataacattttgtactgattcaagagrtgataggtcagagaatgttcagtgaaggattctttgtttcagcagtgagtaggagccagcctccatgctcatttctgaacaactgagtaaggaaaacacagtaaacgtcattatagaattttatatgacagaagcaacaagctagatgt

SEQ ID NO: 255848 - DNA, 552 bp, Homo sapiens
tttatcagcagcatgaaaatggacaaatacaactgtatacacataaatgtaaaataatgcaatattgtatatgcataaagtcaattcacgttgaaatctaatttgttcattatcagttttcatatttatttcgactaattgtccaaattgatttcctcaaatatgcttgatcacagtaacatttttattgttgtaagaacactgaacatgatatacattctcttaacaaaattttaagtgtataatatagtattgttaactataggaaaaatgttatgtggcagatctttacaatttaatcatctggcataactgaaacttatccatgaaagagtatacaaattggtccatagaaaataatagggagcctggcatcattatatcccaccatgtttctgagatttgtgatcaatcacatattatatcactaatcttattctttgttttttattgtgtatagtagacrtttccatataatgataatcagatggaatatacatttatacatctgttttatgttttattcattcacagaagtatgccatataaaac

SEQ ID NO: 255849 - DNA, 474 bp, Homo sapiens
aaagtgaaatataataacactgaagtagtttaatttacaaaaaaaagtgtttttttcctcccatgtaattttggttttcattcttttaatcaaatccctgagagtccctttccaaagggtaaaataataggcctcattaatttccaattgcactttataactgtgtacatagtaagtatatacaaaaatktattagaatgaatataatcatttagcaagatacaatgtgttataagttattgtacagcatttaaatatatattccattagtacaaaataattcaatatatgaaaatataaaattaatagcatatctaaatatcagaaacaaacaggcaaaataatccaagattaaaaaaacactgcttataattgcatcaaaatgtcaaataacaataagaacaactacaaatagtgagaaaaactttataaattctaaaacatcacagaataaactaaaggagacctacatag

SEQ ID NO: 255850 - DNA, 561 bp, Homo sapiens
gtcaaaatctgtataagtggatgtgtttgcatttayaagtatctatgtatatgtgaaactagacaaactaaatctaaaattatgggaaagactgacataatggaataactataatgaaaaacaattcttatatcatatctgtagtaaattaccattagataatctgaccaatgatcttgcatagagagcgcaaaatctggccagtggaaacatggatacttaatttatgggaaaagatggcattgcagagaagtaaagaaagaacagtgttaccaataaataactttagtccaattcactactattagaaaaaaaacgtgtacttttcttattctcaaactattttaaaaataatttctcttgaaagagaaaattaaaagtaacttcaaaaccaataaaactctagaggataacatgagttatattgctttcaagtaagtttagacttctagaaccaagcaactggtaaagctgactatattaaaactaagaattttatcaaacaacacaattaagtgaatgaaaagttaatacacagtacaggaaattatttgcagctgc

SEQ ID NO: 255851 - DNA, 561 bp, Homo sapiens
gtcaaaatctgtataagtggatgtgtttgcatttataagtatctatgtatatgtgaaactagacaaactaaatctaaaattatgggaaagactgacataatggaataactataatgaaaaacaattcttatatcatatctgtagtaaattaccattagataatctgaccaatgatcttgcatagagagcgcaaaatctggccagtggaaacatggatacttaatttatgggaaaagatggcattgcagagaagtaaagaaagaacagtgttaccaataaataactttagtccaattcactactattagaaaaaaaacgtgtacttttcttattctcaaactattttaaaaataatttctcttgaaagagaaaattaaaagtaacttcaaaaccaataaaactctagaggataacatgagttatattgctttcaagtaagtttagacttctagaaccaagcaactggtaaagctgactatattaaaactaagaattttatcaaacaacacaattaagtgaatgaaaagttaatayacagtacaggaaattatttgcagctgc

SEQ ID NO: 255852 - DNA, 576 bp, Homo sapiens
ttcccaggatgacgaacacggaataaagttaatgagtttaccacaaagtatcagttctttctttttcaatttgtttggttttaactaccccctatcattaaaacaatgaccaggaaatgaagaaattaaggttgatcagagaaagtaattatttaaagaaaaatagcatcatgtaatgttactttatcactgactggtaaggaagttgacttgtactaaaaaaaaaaaaagaaaatgaaggaagcaaaagaggtttgataaatggatactatcaacaaaagataaatgaccacagtgataagacttgatcacttaccagcttctgagaaacatttattctcaatgaagcytactgagtttttcactattttgagtcaaatcttcatatagttttattattttctcaaacacaactaggaaaagtgaacaataatacaaagttacccatttaataaagttttcagaaacacacacattcatgaacacatagtggtaaacattttccttcctcctcactttaattcaggtaggttatcattgtattattttctataattgtatttattacttattatt

SEQ ID NO: 255853 - DNA, 566 bp, Homo sapiens
ggtttggacacagtattagtccattttcacgctgctaatgaagacatacctgaaactgggcaatttacaaaagaaagaggtttaactggaggactcacagttccatgtggctggggaggccttacaatcatggtgggaggcaaagaggagcaagtcacctcttacrtggatggtggcaggcaaagagagagcttgtgcagaaaaactcctgttttaaaaaccatcagatgtgatatttattccctatgatgagaaccacacaagaaaggcttgccccatgattcagttacctcccactgagtccctcccacaacacgtgggaattgaagatgagattcggatggggccacagccaaaccatatcacacagtaaagtatgaggaaaaacttcagaaaatgtctcctttttagggatgatgtagatggagacattatttaaaataaatatctaagtaggaaaagacttgatcaacaaattaaaattgcaagtaaatcactaactgtaggctcattattgtggtaaataggggcttgcagataagctctagttttacctatcaattttg

SEQ ID NO: 255854 - DNA, 568 bp, Homo sapiens
aaagatcctaaacagccaaagcaatgatgagcaaaaaggacaaagctcaagccatcatatgactcaatttcaaatttactgtaaacctacagtaatcaaaacagcataatagtagcataaaaatgggcatatagaccaatggaacagaatacagagctagaaatagacccatgcatttacagtcaattcatcttcacaaagatgccacaaacaaacaataaggaaaggacattatcttcaataaatgatgttgaggaaagtggatatgcatgtgtgcaagaatgagattggacccttatgtcacaccatatataaaaaatcaaatctaaatagacaaaagacacatgtaagacatgaagctgtaaagctacaacaagaaagtatagttaaaagcttaattacatttgtttgggcaagatgttttgggatatgactccaaaagcacaggctacaaaagcaaaaagagacaaacgggagtkcatccaactaaaaagtttctgcacaacaagaaagggaaaaaaatgaatgaggattcaacatagaatggaaaaatacttttgcaaacaat

SEQ ID NO: 255855 - DNA, 547 bp, Homo sapiens
cttgtgttattcccatatttttcgtgaatatatcttccatcaaagtttcttctccttccataaaataaatttccatttattcaatagtgtaagtttttcaacacacagcaattttgatagcattgtatgaaaataaaatgataaatccrtagaaaattagttgtagttaaagctgaattcccatgatgtatgaagtctgcaggatatctaggaggaagatctataaggtaactgctgcaggatacaattttgtcacttttttaatacttaaaaatatagtaatctcatacaatttatcagcaagatgtgtttcagtgttttcatgatatctgagcactgaactcagcattcttttcttgtttcatcagaaggtcgatgcacttgttccctattttcaaaatatgggatgttatgtcttcagaaaatcagtggtttagatgccatgacatagtatatttgaataaagtacatttattagaaatgtatattaaaatatgttccagagataattttttttaattactttcttttactcttggtacttgct

SEQ ID NO: 255856 - DNA, 585 bp, Homo sapiens
cacaatcttagtagctgaaaacacatgaatttattatcattcagtcttgaaggtcaaatatctgacataggtcccactgggttaaaaacaaggtactagccaggctgcacagcccctggaggttatacaggagaatccatttcagtgccttttccagcttctagagtcgccttcgttccaacgcccatggccacttttcaccttcaaagctagcaatggctggttaggtctttctcacatagcatcactgttgacactgactccttctgccacctgcttctttatttaaagatccttgtaattatattgggtccacctggataatccagggtamtctctctattttaaagacaacagattagccacctcattttcacatgcaacctgattcccttctgtcatatatgtaacatacattcacaggcttcagggacctgcaggtgcacatctttgggttataattattctgccaacgagactttcctaattttgcaatattaagtaaattatttaaccacattgtactacttatcatatttgtaaaatgtagatctgcaaaatgttgaatacctatttcattaattt

SEQ ID NO: 255857 - DNA, 549 bp, Homo sapiens
ggtatgattttacatgctaaataatatagtatcaacaatatctaggggagggaagaatttagaaagtagagaaagttgtctttgaaattactagtgtagaatttatttttwaaatgacactaattcattttaacgtaatgcaacacaaaattatagcctgttcaaatcatccacagacttgttcaagaataggtaaagggttaaaggattctctttccactattcaaagaatgtagttctcaatttattactgaaaacatttcccaatttattttgtctgactgttagtagactatctgaacgtagtgtgcatctgtcatagattgagctccatggaaacagactctgagatgaagagggtcacgcagaaagtttattggggaatggtctcagggaaatacccattaaaaagtcaggattgggcagagggaaagactgagttatcctgcagtgttaaccaagacctctgacaattccaccaggagctctagatctttaatggtccttccgacatcccactgaggtaagggggccaggctttacacccac

SEQ ID NO: 255858 - DNA, 453 bp, Homo sapiens
agataagggtctcactatattgcccaggctggtttcaaactcctgggctcaagtgatactcccacctcggccgcccaacatgctggggttacagatgtgaaccaccactctctaygtatatttattttattttatcttttcgagacagggtcttgctctgtagcccaggctggagtgcagtggtatgatcttggctcactgcaatctctgcctcctggcttcaagcgattccggttcctcagcctctggcgtagccgggattacaggtgtgcaccaccatggcctggctaattttttgtatttttagtagagacggggtttctctatgttggccaggctggtcttgagctcccggcctcaactgatccccctgccttggctcccaaagtgctgggattataggcttgagccaccgtgcctggctgccaatgtggatatacttttaaggtagat

SEQ ID NO: 255859 - DNA, 518 bp, Homo sapiens
tatttacatacttatagagaatagttcgtatttaagaaaagcaggaaagtattcagtaaatattacaactctttttgacattttaaaataaaggttaatgtgacagttataaatgcagattggtatgggcatgtgtcaaataggcgattcagttccaccaatggcattgccatctgactttcctaaatagtaaataactcctgataacatttttgaaaagttaatttatcctgctctttctgtggtacatgcagtcctggaatattcaatacatgttacctctttcaaaaatactttgtacttacatatgtgtatgtatgtggactamggttctaggctcagataaccacaatctgagttttcatcaatgcaaatgtccagtggagctttccaaagacaagcacaaaaataaaaacaatgtgaaagcatttatttgttttagggtcacactctgcattacaagacaggcagaatctctagaacttttccattaaatgttagcaacatcttattattgt

SEQ ID NO: 255860 - DNA, 584 bp, Homo sapiens
tgttatactatgaacataagtaacataagaacttgaaaaaacagtaagatatagagtatttgggaagtgacaaactttgagtttgtcttgtctctttttatataatttatttaattacaaatatatataatatgatttttcccaatagctgtgttaataactatcctgtaaaatttctgaaaatttgccactggatgcttgtaagcaggttcaagtcagctccagcacaccactggatgttgtgtttatagaatacacacatgcctaaatctttagcctaatgtatagatgaagaaagagaggatcagtaaaattaactagttatttcaaggtcatttcagaactaagtgatgaagctaagatttaatcccaatctgcctgatttccaaagacttttgggggtcaggraattcatagcgttttctccaattgagtaatttttttcccaggtttctaggcactgaggatcaccccaaagatatgctttttctgcaccatgatatgacccagattgttttgatttctgtaactaactttaaagtacatctgcatggagtaatataagtaaggggcaatcagctgtt

SEQ ID NO: 255861 - DNA, 514 bp, Homo sapiens
aataattctgtaatgaagtcattttaattttgtgaaatatttgtaaattcgtatactgttaattatggtagaaaaaagataaggagcgtttaatcataatcaataaaattgcccaccatattcttttgctacaaaatgttgttgtctaaccatttaggaatttgytgcctcattgtggtaaaagtcaactgttcatttgtcagcattaattgaactccctacatgtaggctccaatgtcttcttagatacaccatctttatcaaagaagatttttattaccagaaagaaaagagtgatgtctaatgtaacacaataatgcaaagttcctaatattgatattaatagtgaattctattgatggcagctgcaacgtgtctggagtagccattgccatgacgcccactacagtgggggaggtgcagtggaggctgtgtgctccaaggagcctttgggagctgcgaatggccaggagcctcaccctctcaggcgcagctgcaactgcccaagctgccg

SEQ ID NO: 255862 - DNA, 603 bp, Homo sapiens
accaataagcacagacttcctcccctctgaagctcataaaaattctggactcatccagactggaggagatgacagaatgacctacctggagagaggagctacacactccagggtctcctctctgctgagagccgaacacccagtgggatgaccagctgtggagaggagatgcccattccagggtctcctgtctgctgagagttgaacactgttgaaacaccctgcctgcgaagrggagttacccagtgcaggtcttctctcagctgttctgttgctcaataacgttcctcttagcctttcaccctccacttgtccgagtatgtcattgttcctggacgcaagacaagatcaggacccaccaaatggtggggctaaaagagcggtaacagaaacagggctgaaacatgccccttgctctccacataggggatgagaagaaggagagaaaagagaaggagagaaaagctgcagacctttgaggggcccagacctaggagctccccaagtcagggctgtgacactctcttcggggctctgcggttactgggtctccaagcttttggttgccactgagttccctggtgccaactgtggaagctactt

SEQ ID NO: 255863 - DNA, 531 bp, Homo sapiens
tagctgtcagccttctcccacccaaaagtggcctctggtgaagtaagacttgcctacttctgggagaagcccacattcagtgcgggagaatatcagcctgacatctaagtcaccccagtttagaactattctgaagggtcawctcacttccagagctccccacagagttggctgagggctttgttgagactgcatcacagctttgccatctccccctgctcagttgtgcttcctttcctcccccagtcagtgctgatcctcataacacaccctcataaactttctgccttgccagtagatactccagtctgcactccgggagaccagatccaccatactaattacgtctaaaccatttagtaaatgaagaaatttgctattaacattacccagtctggaaaaagtttgtaatgtcattttcaaaaagattacaaagaaggaaatagttttgatgagaaaatcaggctcatttattataaaccatctaattaatagacagtgctgcaggtttggcaagtttaagaaactgcc

SEQ ID NO: 255864 - DNA, 531 bp, Homo sapiens
tagctgtcagccttctcccacccaaaagtggcctctggtgaagtaagacttgcctacttctgggagaagcccacattcagtgcgggagaatatcagcctgacatctaagtcaccccagtttagaactattctgaagggtcaactcacttccagagctccccacagagttggctgagggctttgttgagactgcatcacagctttgccatctccccctgctcagttgtgcttcctttcctcccccagtcagtgctgatcctcataacacaccctcataaactttctgccttgccagtagatactccagtctgcactccgggaraccagatccaccatactaattacgtctaaaccatttagtaaatgaagaaatttgctattaacattacccagtctggaaaaagtttgtaatgtcattttcaaaaagattacaaagaaggaaatagttttgatgagaaaatcaggctcatttattataaaccatctaattaatagacagtgctgcaggtttggcaagtttaagaaactgcc

SEQ ID NO: 255865 - DNA, 531 bp, Homo sapiens
tagctgtcagccttctcccacccaaaagtggcctctggtgaagtaagacttgcctacttctgggagaagcccacattcagtgcgggagaatatcagcctgacatctaagtcaccccagtttagaactattctgaagggtcaactcacttccagagctccccacagagttggctgagggctttgttgagactgcatcacagctttgccatctccccctgctcagttgtgcttcctttcctcccccagtcagtgctgatcctcataacacaccctcataaactttctgccttgccagtagatactccagtctgcactccgggagaccagatcyaccatactaattacgtctaaaccatttagtaaatgaagaaatttgctattaacattacccagtctggaaaaagtttgtaatgtcattttcaaaaagattacaaagaaggaaatagttttgatgagaaaatcaggctcatttattataaaccatctaattaatagacagtgctgcaggtttggcaagtttaagaaactgcc

SEQ ID NO: 255866 - DNA, 565 bp, Homo sapiens
ctaacacggtgaaaccccatctctactaaaaatacgaaaagattagctaggagtggtggcggctgcctgtagtcccagctacttgggaggctgaggcaggagaatggcatgaacctgggaggcagagcttacagtgagcagagatcgcgccactgcactccaccctgtgcgacagagcgacaatcagtctaaaaaaaaaaaagaaaaaaaaaagaaaaacttcagacaattaaatttaacagagcttaattgagcaaaaaaatacttgtgaattaaggagcacactcacccctcgcccacaccccacttcaaccagaataggttcagagcaactccagcactgtcaggtgatctgacagaatttaaagacagaaaaaggaaagtgatacgcaaaaaacagaagtgaggtacagmaacagctggattggtcacagctctgcatttgaacatggtttaaagttccagggatgtcaaatcttttggcttccctgtcccacactggaagaagaagaactttcttgggccacacattaaatacaataaacaccaacgatagctgatgagc

SEQ ID NO: 255867 - DNA, 602 bp, Homo sapiens
gtaaaaataaataaataaacaaataaataaataactgctaatgttggcaagttaaaaaaaagtaatcgtattctgatcaaactatagtttagagcaactgaatctccaagcatatctgatgaaaacacagataattgagtatcaccccagaccaagaaaatgaggatctctgactaatctggtaacaagcatttttaatatgctcttgagagatttttataacacatttgagaaaaaatttatactgaatagctcctggactttttgtttgattgcttattgatttttttctttaatctaagggttatgacatccctctgctctccacattcccatcttccttctcaaaatctttccaaaccactcaacatgacactcacatactgcatttttataggtatttttttcctccaaaacgagataagttatcagagaccaagggagatattatatacatctttgaatcttctcaacaaatatctgataattaagggatttagggtattgaatgggtaggaatattgaagaaaaactatttaatttataattttaacttgcaccatayttatttctagaaaacaactccttccatcaggtttaga

SEQ ID NO: 255868 - DNA, 573 bp, Homo sapiens
tattctaccattaatttttatcgtcacacacaataactattaagacatctatggaatttaaagttattaatgaaataattttttacacacacacacacacacacacacacacacacacacacacacaccccgttgtcacttcattccatatttcctttcaactggtttgggaatgcatagtgaggatagaaaaagaataatgcattaaatcaggtcgtctgctttaacaacttgatatttttcttattttctgacacaacaccatttgcagaatatgggattcacagcaaaggttggttggctgatatatgctaacatagcccaaacatcaagaagagaatgaagagagaaaacaatgatgaaaaatgtatctgtgggccatagccaaatgaaaagaggatgataaaactaagcaatattgacacataaaagtgaaatcacaaaacacagtcatccttaaattcaraaatctacacatgcccaggtgactgctctggagacatggtaatccttataatacactctcaggtattaatttccaatgtgcacaattggccacgtcagtatttaaag

SEQ ID NO: 255869 - DNA, 626 bp, Homo sapiens
tggattattccatagacaaccgtgccatgtacagcacagttgagaacttagggtttgagaatwttttttgtattgtaattactaaaagggcactgaagcaaaacatcatatttgaagaagatcttgatttagcaaacattttcagagtgcctgttctaggataagctgaagatgttgtgagttgagtaggacctgtgcctccttgaggttgttgttcacaatctactgagagaagaaatcaaataccatggttgcaggtgcctataaggcacaagtgattactaacatctagtgtgtaacacccactttacataatactttattttcataatctaattctcagtagagatcctctgatctctgatctatacatgagcaatgtgataaatcaaaagagattaataaatggccaaaaatcatgtagttactgccaggactgagagttgactccaaagcccctgcaaaacaacacaaggtaactgttgtttaaggcaatctatgaagcatacacacaacatttgagctagatctagaaaaagtataggttttgcagtaaaagaaaaggcaaagacatttaaggcagaagaaaaatagcactctataaacatactgagctgagacaaggc

SEQ ID NO: 255870 - DNA, 537 bp, Homo sapiens
caatacagtcaatacttactgtacttctcagaaattagggtcatgtgctatttatgtgtgtgtgtgtgtgtgtgtgtgtttagtaaaatacacaggacgatctatgagtaagtgattataaagtggttagtcctcacatggtaaccactcaccgactggcaactgaggactgctaccyttatgatctcttctggctgtcaagattttataagtaaacaaaaaataaatattaaaaaagggaaaatatatttcgttcaaagatgggaaacaatggattaaacacagttaaacaggctatttactaagacttagtagtctttactatactaatgaaagttgtaaactgccaactacttactacgttgcatattccatatatctagttggcctctatatggataggacaaaaccaggaaaaggtaaggaagtaagacagaacacataggctcattttgtttctttgttttccacatagttggaggcagggcagaactgcaggtgtcaaagcacaggaaaagggtgcttgcctgaagagca

SEQ ID NO: 255871 - DNA, 566 bp, Homo sapiens
aagccaacagttataatgtcaaaaggagaatataaaaatgtacacaatgaaacaaataaactgacttatcgataaagtgaagataaggccactcttcttttcaggtttatctcttccaaaccatgaatgtagttctcttcttctaaatggcagaaattttaataagaaatatgaaaaatccagtctgtcctatcagcaygacacaagtttaattcatagcaacatagttcctttttaaaaaccaggtttgtagtacatagaatgttctggtttacatatgtgaatatgagcaaaaaaaaaaaaaaaaatccagattttatacgattttaggcccaggacatggagctttagagttaagcaaggcaacggaatcaggtgctcacttgcacagtttttttcctgtactgacattaccctaagccgtatcgaaagaactgaaatacagaacccagctagtggaatacgtacatggtaactctgaaactagctggtgatctatttaatacaacatttaattttctttccacgattgaagaccttttctcctgtcctttaggcctcctctc

SEQ ID NO: 255872 - DNA, 566 bp, Homo sapiens
aagccaacagttataatgtcaaaaggagaatataaaaatgtacacaatgaaacaaataaactgacttatcgataaagtgaagataaggccactcttcttttcaggtttatctcttccaaaccatgaatgtagttctcttcttctaaatggcagaaattttaataagaaatatgaaaaatccagtctgtcctatcagcacgacacaagtttaattcatagcaacatagttcctttttaaaaaccaggtttgtagtacatagaatgttctggtttacatatgtgaatatgagcaaaaaaaaaaaaaaaaatccagattttatacgattttaggcccaggacatggagctttagagttaagcaaggcaacggaatcagktgctcacttgcacagtttttttcctgtactgacattaccctaagccgtatcgaaagaactgaaatacagaacccagctagtggaatacgtacatggtaactctgaaactagctggtgatctatttaatacaacatttaattttctttccacgattgaagaccttttctcctgtcctttaggcctcctctc

SEQ ID NO: 255873 - DNA, 564 bp, Homo sapiens
ccatagtttctttctctccccagtcagagtctgcaggggatcagtcctgtgcacaagcctgcttcaaagactgcaatgcacaagcagattgctgactgggtcaaaggccataaatccaccccactcaggctggactatgggaggttatctaatccaaatctgtatttgtgttggtggatgctggggtacacagattcatcccctcaggacggagacagtaaagctgctgggagtcttggtggctgagatcttgcgtgtgagtcctttccctggattgtccttagttgaagagagccaccctttccaagattacaccctctgtcatggaatgaccaggtgatataggaaggttaaggctcagcttcctgctttcaactcagaactgggaagggcattccagctttagagctctccggggttggctgaggctttcattgtaactgcatyggaacatgactctcctgctgtccaatcctgctcctttctctcctctagaggtgttgatcctgagaacacatgccaataaaccacttttatataaaattctgtctcaccatttgcttc

SEQ ID NO: 255874 - DNA, 442 bp, Homo sapiens
tgaccaggtgatataggaaggttaaggctcagcttcctgctttcaactcagaactgggaagggcattccagctttagagctctccggggttggctgaggctttcattgtaactgcattggaacatgactctcctgctgtccaatcctgctcctttctctcctctagaggtgttgatcctgagaacacatgccaataaaccacttttatataaaattctgtctcaccatttgcttcctgcaagccaatcggtaacatcaaatgactccactcccttctgtgcctggcttttatatagaatcttgactcatcaggatttttgtcttgagaattaaaacaagaaacaaagcaagaaaygaggaattgataattggcaatggaatggagagtttatataaatagagaaagccatagcgacacctacataggaccatggttaatata

SEQ ID NO: 255875 - DNA, 442 bp, Homo sapiens
tgaccaggtgatataggaaggttaaggctcagcttcctgctttcaactcagaactgggaagggcattccagctttagagctctccggggttggctgaggctttcattgtaactgcattggaacatgactctcctgctgtccaatcctgctcctttctctcctctagaggtgttgatcctgagaacacatgccaataaaccacttttatataaaattctgtctcaccatttgcttcctgcaagccaatcggtaacatcaaatgactccactcccttctgtgcctggcttttatatagaatcttgactcatcaggatttttgtcttgagaattaaaacaagaaacaaagcaagaaacgaggaattgataattggcaatggaatggagagtttatawaaatagagaaagccatagcgacacctacataggaccatggttaatata

SEQ ID NO: 255876 - DNA, 608 bp, Homo sapiens
caattttggatgaaggccagatttagcctgatttcaaagggagttctgaaaaggaaaacagaccttagagtctattccaccctagggtaaagaggtgggctttttaaaaaaacctttatagcagtcagtcactggctacagattgttggtatgtgtgtgtgtgcatgcatgtgtgtgtctgtgcgtgcatgtgtgtgtctgtgtgtgtgtgtgtttggggcatggaaagcttcatccagtattctggctctttagatacgtgaggctctgcagtggccaagagcaagcctctaaatttggcaagcgccagcctttagcagcaaagcagaagctggatggcaggtgcagaaacaaacaaacaaacaaacaaaaacrtgaagggcatctgaagggatctgggtagaccagtaagactggaattaggttttctgctgaaactaagtatcagaaaagattctcagaactgaattgatcattatagtggttaaaacaaaatatgtctacaatttgtgttattccttctgtcaggatgtggaaccaaattcctctcttctgagtacaggctggaataagtgactctattctgacaaattcaatatggcagaagt

SEQ ID NO: 255877 - DNA, 573 bp, Homo sapiens
cttctagttcatagcaaacaaagcttcattatgacttagcgaccagtaaagagatgccattgtgtaatattaagaacagagccaacaaaacagttgaaagctataaataggaaactttatacagacaaaaaaggccacacgttttaaccttagtaaaaaaaaaaaaatagacatggagaacacaggagagaagaataaaatgcaagatgatgaatgctttgattaaaaaacaagtataattcttaaaaggattttaggctcatacaattagtgaagaacaatttattgaaatgtgtcaacagctctttctataatctctatggcaataaccatcataaaatataaaaaaagcatgaagagaaygcacatttgaagacagctgtgtagaccatgagtgaaaaaaaatgacatactttataagagcagaagttgttggaaggcaatgcttcaaatgcattgaatgatttcccatcttggaaattcagactaactaaactaaactccttcagatacctatccttcccctgctaatgggtggaagaaatgtttaatttatctaatttataaccccag

SEQ ID NO: 255878 - DNA, 579 bp, Homo sapiens
ccgttctatgcattctacctgcaccagaacagtgatcccacatttcttgattttctccgcttcatactgtctcttaggtatcttcaattaattttattgactaactcccttctctttacttcatttgaccccctccacttgtcagataaatgtattcattgatttccactgtcttctacaactgccttattatttctctagttcttctcattgccagtttattgaataaatattccaaaatgttatctccaatttctcatcaaacaatttaaacaagttacaaattggctttcaagaataacaacaaawgacactaagattccttgctggttattcctgcaccccagccattcctcttcttaatccacctttcctacatgcctgttatcaggaacaaagatgtttggcatttctttcattatcattttccccttttattccctttgttatcattagacttgatggactcaaaaccgattttgccatattaatttttagtggatgctccgcctctggtcttatactttcccgatatatagaataacagctctgcagaatgtaatctaaaatgacactttc

SEQ ID NO: 255879 - DNA, 634 bp, Homo sapiens
catgaccctcattgtccaagtgctaacaccatgcaaattataccaaggccagcttactctcggaatgattagagtttaatttttgaaatacttcattttataggttccttttgtgaggctaatttagatagaattagaataataaataagcacaatagacagcaattgaagaataataaaaaaaggtccktgtgttcaaagaattgcaatagatccaagaacatcgcttctcaaaatgaattaaactgcatcatagggcagaaactttgaggaggctttagataaagaattaggaggtattttcttgactgttagatctctgggatgaaatgaagctaaactgcttataaatcactattaagagaatgcttgggagcttaaaatagagtcaaacattaccacaatagagatgaaataaaggaaaccaccaaatattttttcagtcaaatacatgaaaattaactattacacagcagtggaaccattgttttctttaattaaatgatctatattaattctgcaagtgataacaaatataataactatttcatgatgaaataattctgataaattgccattatatttattttttaaaaaagtattctggacttctgcttctgaaaagtagatatgt

SEQ ID NO: 255880 - DNA, 634 bp, Homo sapiens
catgaccctcattgtccaagtgctaacaccatgcaaattataccaaggccagcttactctcggaatgattagagtttaatttttgaaatacttcattttataggttccttttgtgaggctaatttagatagaattagaataataaataagcacaatagacagcaattgaagaataataaaaaaaggtccgtgtgttcaaagaattgcaatagatccaagaacatcgcttctcaaaatgaattaaactgcatcatagggcagaaactttraggaggctttagataaagaattaggaggtattttcttgactgttagatctctgggatgaaatgaagctaaactgcttataaatcactattaagagaatgcttgggagcttaaaatagagtcaaacattaccacaatagagatgaaataaaggaaaccaccaaatattttttcagtcaaatacatgaaaattaactattacacagcagtggaaccattgttttctttaattaaatgatctatattaattctgcaagtgataacaaatataataactatttcatgatgaaataattctgataaattgccattatatttattttttaaaaaagtattctggacttctgcttctgaaaagtagatatgt

SEQ ID NO: 255881 - DNA, 634 bp, Homo sapiens
catgaccctcattgtccaagtgctaacaccatgcaaattataccaaggccagcttactctcggaatgattagagtttaatttttgaaatacttcattttataggttccttttgtgaggctaatttagatagaattagaataataaataagcacaatagacagcaattgaagaataataaaaaaaggtccgtgtgttcaaagaattgcaatagatccaagaacatcgcttctcaaaatgaattaaactgcatcatagggcagaaactttgaggaggctttagataaagaattaggaggtattttcttgactgttagatctctgggatgaaatgaagctaaactgcttataaatcactattaagagaatgcttgggagcttaaaatagagtcaaacattaccacaatagagatgaaataaaggaaaccaccaaatattttttcagtcaaatacatgaaaattaactattacacagcagtggaaccattgttttctttaattaaatgatctatattaattctgcaagtgataacaaatataayaactatttcatgatgaaataattctgataaattgccattatatttattttttaaaaaagtattctggacttctgcttctgaaaagtagatatgt

SEQ ID NO: 255882 - DNA, 496 bp, Homo sapiens
ataaagagaataaactgaagaacattcaaaattgaacactgatgaaactacaaaataattcttccattttctcagtttagtaaacccattgaattttaattcaatgaaatatatctcttatcaaaggcaaagtcaaagttttaatattgcttgttgccatggtctgtgagttgatttcaacacaacacactttcagagaatggacattacacaaataatccaaaaaacaccaatgttaattgtttaagagtgatatgataaaaataaaactactctattttatagtcaccttaatcactttgcccaaatgaatacaaacatctttatmtctctctctttttttttttttggtcacccaggctgagtgtagtctctgctcactgcaacctctgctgcctgggttcaagcaattctcctgcctcaacctctgtagtagctgggattacaggcacctgccaccgcgcctggccaatttttgtagttttagtagagacgg

SEQ ID NO: 255883 - DNA, 527 bp, Homo sapiens
tatatttatactttcactgatataattattctttagcacttgaaattactttttctattttaaagaattctactcacatttactgaatagtaacacatttaagaaagaaaatgtccttatcaacttgttgaaattatcaaatttttctttgtaaacagactatgaaaaattrtcattcataatcgcttctcggccttttggctaagatcaagtggaaaattatcattcatcttctaagaaaaaacaggataattgcattgtagacaacccacagaaaatgtcctccatgtaatgcttaaatataatattaaaaaacaaaatggaatcccctaagtaatctcgtctattaaaaagtaagaacacttctgaaaaggaattcatttttagataccaggatttgataggagcaaaatgaaagtaaattttattttctgtttattcttttttcttaataaattttatttaagatatatgacatgatgtcatgaaatacaaatatatggtaaaaaggttactatagtaactca

SEQ ID NO: 255884 - DNA, 611 bp, Homo sapiens
tttgaccagattctttgatgtgagtatatatcaaatgctattgacaaaacacaaagctcttcatatatacataaatagggmtgcaccacatgcattgtgcttttggtttatgtgacaatcataccagtaataataattacaatgaaagttccaggatattttattctaggatgtactgttctgagaacactatatagataagctcacttaacattcagaaaatcaaggagttagacacacagtcattactcccatattaccagtgaggaaactgaggatcatagaggttatatttctcattcaatgtcaaacaatttagaagggatgaagtcagaatttgattttttaaatggcttcagtgttgatgctgttactcaccatactgtatagcttctctgaaaatacgttaaaatccacaaagcaaaatttgactaccataaatttaaaactgtaaattaacattaaacatttcaatataaaacaacttatatatttctatattagctaattgagaaaactaagttttccttatacaaagacaagaaatttatctttatttgtaatatagatatatttatctgtaagaaattttattgttttttaaagaacaa

SEQ ID NO: 255885 - DNA, 611 bp, Homo sapiens
tttgaccagattctttgatgtgagtatatatcaaatgctattgacaaaacacaaagctcttcatatatacataaatagggatgcmccacatgcattgtgcttttggtttatgtgacaatcataccagtaataataattacaatgaaagttccaggatattttattctaggatgtactgttctgagaacactatatagataagctcacttaacattcagaaaatcaaggagttagacacacagtcattactcccatattaccagtgaggaaactgaggatcatagaggttatatttctcattcaatgtcaaacaatttagaagggatgaagtcagaatttgattttttaaatggcttcagtgttgatgctgttactcaccatactgtatagcttctctgaaaatacgttaaaatccacaaagcaaaatttgactaccataaatttaaaactgtaaattaacattaaacatttcaatataaaacaacttatatatttctatattagctaattgagaaaactaagttttccttatacaaagacaagaaatttatctttatttgtaatatagatatatttatctgtaagaaattttattgttttttaaagaacaa

SEQ ID NO: 255886 - DNA, 611 bp, Homo sapiens
tttgaccagattctttgatgtgagtatatatcaaatgctattgacaaaacacaaagctcttcatatatacataaatagggatgcaccacatgcattgtgcttttggtttatgtgacaatcataccagtaataataattacaatgaaagttccaggatattttattctaggatgtactgttctgagaacactatatagataagctcacttaacattcagaaaatcaaggagttagacacacagtcattactcccatattaccagtgaggaaactgaggatcatagaggttatatttctcattcaatgtcaaacaatttagaagggatgaagtcagaatttgattttttaaatggcttcagtgttgatgctgttactcaccatactgtatagcttctctgaaaatacgttaaaatccacaaagcaaaatttgactaccataaatttaaaaytgtaaattaacattaaacatttcaatataaaacaacttatatatttctatattagctaattgagaaaactaagttttccttatacaaagacaagaaatttatctttatttgtaatatagatatatttatctgtaagaaattttattgttttttaaagaacaa

SEQ ID NO: 255887 - DNA, 611 bp, Homo sapiens
tttgaccagattctttgatgtgagtatatatcaaatgctattgacaaaacacaaagctcttcatatatacataaatagggatgcaccacatgcattgtgcttttggtttatgtgacaatcataccagtaataataattacaatgaaagttccaggatattttattctaggatgtactgttctgagaacactatatagataagctcacttaacattcagaaaatcaaggagttagacacacagtcattactcccatattaccagtgaggaaactgaggatcatagaggttatatttctcattcaatgtcaaacaatttagaagggatgaagtcagaatttgattttttaaatggcttcagtgttgatgctgttactcaccatactgtatagcttctctgaaaatacgttaaaatccacaaagcaaaatttgactaccataaatttaaaactgtaaattaacattaaacatttcmatataaaacaacttatatatttctatattagctaattgagaaaactaagttttccttatacaaagacaagaaatttatctttatttgtaatatagatatatttatctgtaagaaattttattgttttttaaagaacaa

SEQ ID NO: 255888 - DNA, 544 bp, Homo sapiens
aaactgtttaggtaattgcatgtgctaactgtgtaaagctctcaatagtgctcggtacctagtaactgatacctataagcttactaatttcatgttaattataattatttttattaatgctgaytttatgtcatgatattatgtttaagaaatttttattggataacagtgcgatgttttatactaaatttcaaacttttaaatgaagactggaataaattttctcaaataattgtttccagaatatcacaaaagctgtcattttcctttcctgtggatgtgagaacaaaacagttgggaacaggacaaaatacaaaccatctgtttatatcacaatttagttttctagaagtagagagagagtcataaatgaaatgatctaattcaggaacaaaaacaagtgcaatatttccacttttatcttttagtaatattgaatttttattaataaaaattatgcatacaaaatatcttttaatccacaatatactttaattaaaaaacagacaatgtagagatgccaacctagacactaacatgtggg

SEQ ID NO: 255889 - DNA, 544 bp, Homo sapiens
aaactgtttaggtaattgcatgtgctaactgtgtaaagctctcaatagtgctcggtacctagtaactgatacctataagcttactaatttcatgttaattataattatttttattaatgctgattttatgtcatgatattatgtttaagaaatttttattggatarcagtgcgatgttttatactaaatttcaaacttttaaatgaagactggaataaattttctcaaataattgtttccagaatatcacaaaagctgtcattttcctttcctgtggatgtgagaacaaaacagttgggaacaggacaaaatacaaaccatctgtttatatcacaatttagttttctagaagtagagagagagtcataaatgaaatgatctaattcaggaacaaaaacaagtgcaatatttccacttttatcttttagtaatattgaatttttattaataaaaattatgcatacaaaatatcttttaatccacaatatactttaattaaaaaacagacaatgtagagatgccaacctagacactaacatgtggg

SEQ ID NO: 255890 - DNA, 526 bp, Homo sapiens
tacatttatatcagtggttattattctagttttcatgtgaagatttcatcctgcttgatactttacaccttccttctgtagtgcctttcccctataatttatgtatgctacagtgttcacaaggaaaatacatatattaaaatcagtttgtgccatgagacttctctatttgatgaaagtcgaatctggctcaggtataataaaaaatatcaaataaaatatagcaactcaaatatctatatgtaggtactaacagtatgatctccaaaaataatgtttctgaagcacagtctatgtggtttatggtgaatatgtttggttaaatagctaaatatctgtcccaggttcttttccagtgtgccttctttttcttcaaaggctggaaagtttakaaactactcttcctggattcttttgtacctaaagtttctaatgaaacaattttattaattgcaattttactctttatatggccctttcatgtttaattggttaacgttattatatttttatttctttaaatgaa

SEQ ID NO: 255891 - DNA, 660 bp, Homo sapiens
tctttttatttatttcttttttttcagaaggagtttcgctcttgttgcccttgctggagtgcaacgacatgaccttggctcactgcakcctccgcctcccgggttcaaggctatcaatctctttctatgcatccatctatatatatagaaactttcacacatacatgcagaaggaaattattgtgttttaaaaatcttaggtggatcatggaaaagaaaatgagcagataaatatatgtccccaaattttatatatgtttgaacatgaaaacaaacaaaattatttacttccatttatatatggaagaattcatataaaagtgaattttgctacatgttatagacagcttctagagatggtttatggattctcctggaatcctaaaattcagtgactgattgattcgccttttcaaaaaaatcaataactgattgatttgcctttttaaaaaacagacaatacataatcattcagatttgaataatcaaaatatagataagttaaaagaaagaaactactatccttaataaatctaccaattgttaataatctagacatgctattgaaaaaatatgctgaatccacactactaaaaattcaatacacattgccattaaaatgtgaattattatccaaatattttttgacatttataacta

SEQ ID NO: 255892 - DNA, 660 bp, Homo sapiens
tctttttatttatttcttttttttcagaaggagtttcgctcttgttgcccttgctggagtgcaacgacatgaccttggctcactgcagcctccgcctcccgggttcaaggctatcaatctctttctatgcatccatctatatatatagaaactttcacacatacatgcagaaggaaattattgtgttttaaaaatcttaggtggatcatggaaaagaaaatgagcagataaatatatgtcyccaaattttatatatgtttgaacatgaaaacaaacaaaattatttacttccatttatatatggaagaattcatataaaagtgaattttgctacatgttatagacagcttctagagatggtttatggattctcctggaatcctaaaattcagtgactgattgattcgccttttcaaaaaaatcaataactgattgatttgcctttttaaaaaacagacaatacataatcattcagatttgaataatcaaaatatagataagttaaaagaaagaaactactatccttaataaatctaccaattgttaataatctagacatgctattgaaaaaatatgctgaatccacactactaaaaattcaatacacattgccattaaaatgtgaattattatccaaatattttttgacatttataacta

SEQ ID NO: 255893 - DNA, 660 bp, Homo sapiens
tctttttatttatttcttttttttcagaaggagtttcgctcttgttgcccttgctggagtgcaacgacatgaccttggctcactgcagcctccgcctcccgggttcaaggctatcaatctctttctatgcatccatctatatatatagaaactttcacacatacatgcagaaggaaattattgtgttttaaaaatcttaggtggatcatggaaaagaaaatgagcagataaatatatgtccccaaattttatatatgtttgaacatgaaaacaaacaaaattatttacttccatttatatatggaagaattcatataaaagtgaattttgctacatgttatagacagcttctagagatggtttatggattctcctggaatcctaaaattcagtgactgattgattcgccttttcaaaaaaatcaataactgattgatttgcctttttaaaaaacagacaatacataatcattcagatttgaataatcaaaatatagataagttaaaagaaagaaactactatccttaataaatctaccaattgttaataatctagacatgctattgaaaaaatatgctgaatccacactaytaaaaattcaatacacattgccattaaaatgtgaattattatccaaatattttttgacatttataacta

SEQ ID NO: 255894 - DNA, 631 bp, Homo sapiens
ttatatgaagaaactaacatgaaaatgattaatagtccaagaataaacctaataagaccatcaatccccaaagtttttggcaccaggggctggtttcatgaaagacaagttttccatggaaggtgwtggggtaggggatgatttcggaatgaaactattcaacctcagatcatcaggcattggattctcacaagaagcacacaaactagatacctcacatgtgcagttcacaatagggttcccactcctatgagaatctaatgccaccgctcatctcaaaggaagaagagctcaggtggtaatgcttgcttgcccgccactcatctgctgtgccgcctagatcctagcaggccacaggctggtaccggtccatggactgggggttggggacccttgtaatacgtgactgagtcaatattctaacattgcttttttagattctaaagccaaattttaatcttaatttcgaaaatatatgagactcaagttctacatctactaaatgaggagtttgaaacagttgatcttttaagtctgatccctctctcaaaacctatgatctagtactgagtaaattttaaagcatatatattttttctgttaccaggaattttacagtgtacataaatat

SEQ ID NO: 255895 - DNA, 631 bp, Homo sapiens
ttatatgaagaaactaacatgaaaatgattaatagtccaagaataaacctaataagaccatcaatccccaaagtttttggcaccaggggctggtttcatgaaagacaagttttccatggaaggtgttggggtaggggatgatttcggaatgaaactattcaacctcagatcatcaggcattggattctcacaagaagcacacaaactagatacctcacatgtgcagttcacaatagggttcccactcctatgagaatctaatgccaccgctcatctcaaaggaagaagagctcaggtggtaatgcttgcttgcccgccactcatctgctgtgccgcctagatcctagcaggccacaggctggtaccggtccatggactgggggttggggacccttgtaatacgtgactgagtcaatattctaacattgcttttttagattctaaagccaaattttaatcttaatttcgaaaatatatgagactcaakttctacatctactaaatgaggagtttgaaacagttgatcttttaagtctgatccctctctcaaaacctatgatctagtactgagtaaattttaaagcatatatattttttctgttaccaggaattttacagtgtacataaatat

SEQ ID NO: 255896 - DNA, 536 bp, Homo sapiens
cttataaaatgagttttaatatttcttcatgtgtttaaatatttgccacttattgttcatattattcattgttccagtaaattgcaaatgtattccttctttcacttgttacttattgaataactatcatgagtcaggtcctattgtaggtactgaggatatatcagtaaataaaacagatataaaagctcctgtacttatagtgcttatgtttatctattgcattgttagcatttttaattttaacttgtcagatatttattatgttatattttttcaatttgtcatagccatcacatacactgataatcaccaaaatgtggacataattaggtaacatatgttatttacaatagcaaaacaagataaatatctggtaataaaactttgaaaattcttcatgtttataaaatggtctatgaaatctttaaaatgctagtgagggataaaaaaattgatttaaggctgggtgtggtggttcgtgcctgtaatcccagcacttcagraggccgagatgggcggatcacgaggtcagg

SEQ ID NO: 255897 - DNA, 724 bp, Homo sapiens
cagtctggccccagttaaaactgaaaaccatatggactctagtggataactgtggactactataagctcaaccaagtaataacatagtacctctaattacatttgctattccagatatggtatctttgctacagaagatcaatatagcttgagatatatggtatgtggccattgatttcgtaaagtctcctttattttttctttctaatcaaaaaaggagatgggaaaccatgtgcatttaagtgccatggaaagaaatatacacttaccattttgttgcagagttttgttaactctgttgtccaaagtcataacacagtctgttgatatcatatctctgtgagatatgacaatgatcttctatattaatgacattatatttatcaggttgaatgaataagaagtggttaaataagaggcctttgtaagacatctgagttccagaggatgggaaattaactatagcacattttcaggggctgatcatatctataaaatgttagggatctattggtcaggggcatgtgaggacatctcctcagagtaaaagacaaatgcttccatcttgcaagtcgtgaacaaacaaaygaagcacgaagcctggcaggccagtttggtttctgaaagcagcattacttcacaacaaggattactgttgtgactcagaagccagatgatgtgacagcagatacctttgagaggagctcagagtagaaaagtgctc

SEQ ID NO: 255898 - DNA, 593 bp, Homo sapiens
agaaaaattgatcatctaatttttaacagttgctagaatatgagtaaatcttcaatatttaatgatttgtacaaaaagttataaaactgcaaatgtttgaaattaaaatggcaaatactatttaaattctccaatacattttacaaatctaagaattttaaaggattctactggccatttcatatttgcaagaacatattttactgttaataagtaacatattaaataaattttattcggttactctttctataatttcaagatggtttcacattaagataaaatattttyaacattgtaatattctttaccattatttataggtatttatattcacattttgtttcattaaattactaaaatctctaccagccagaatggagagatactccaagaaaagtgaaaatatatgcccacataaagacttgtactcaaatgtttataatagctttttgtctaagagccacaagagaaataactaaatacccatcaacgagtattgagacatattactcagtcataaaaatgaacaaattaattacacactatatcatagatataagttaaagtctattctgagtgaaagaaggcaa

SEQ ID NO: 255899 - DNA, 593 bp, Homo sapiens
agaaaaattgatcatctaatttttaacagttgctagaatatgagtaaatcttcaatatttaatgatttgtacaaaaagttataaaactgcaaatgtttgaaattaaaatggcaaatactatttaaattctccaatacattttacaaatctaagaattttaaaggattctactggccatttcatatttgcaagaacatattttactgttaataagtaacatattaaataaattttattcggttactctttctataatttcaagatggtttcacattaagataaaatatttttaacattgtaatattctttaccattatttataggtatttatattcacattttgtttcattaaattactaaaatctctaccagccagaatggagagatactccaagaaaagtgaaaatatatgcccacataaagacttgtactcaaatgtttataatagctttttgtctaagagccacaagagaaataactaaatacccatcaacgagtattgagacatattactcagtcataaaaatgaacaaattaattacacactatatcatagayataagttaaagtctattctgagtgaaagaaggcaa

SEQ ID NO: 255900 - DNA, 585 bp, Homo sapiens
gtcaaaggtcagtcttctgtaactgcttcctgctgacagaggggatgtgatggttgttctatgggtcttggcctcttgctaactgtgagagtagggtggctccatgcattggagaaagtggtatttagacagctctaaaggagaaaagggaaggatttgcctctgttgtgtctgactaatgggcagcataggggtcccctgtagaaaagtgaatattgagaggatagtatctctcactgaggatcatctggagattgatggcctgaaggcaagaggagataaattgtgttattagatttagaagacatcraccaaaaaggaaaagtagagatgccaaaacaaaatagcagggtgaagacagtttcaaaaatttctaagactgctgacatacccaggtagctggtggctatagttatgcctgctaaaacttgagttcatggggttgccagccaatttcaatatgtgcccagaattaaaatattgattcaaattttctacattacactgcattactctcttgtttcttttgaggtgcagtcaaagatcactgcttggttcaaagaaataatcaagattagtctaaat

SEQ ID NO: 255901 - DNA, 577 bp, Homo sapiens
tcaacctaaaatattcaaaaggatcagaattcagttttttaaaatgtggtcaaacaaaaagctggaattaggcatttggagaaaagactccagagaaatggagccagtgctcctaagttcttgcttatataggcagaaaacaatgaaatttaataggcttacaacattgtgtgtacatggctkgtttatgagttacaaaaatataatgagtttggcttgttttcttttctttatatctagtttttatttcctttccaagttagaagaatgtacttaatattccattataagacaatgtgacagccatgaattttttgagaaaagtaggagggcagttaatctaccatgaaggtgaacaatgaagaaggaagggatcttctatggtgccctttagccatttacaacattttacaaaacaatgtaaggaaggaagaagactaatctataatcaggaagacaaaggttatagctgcctaggttacagctagctacctgtcatacgactcaggctccataatcacaatcctttaaggctcaaagtaatttaaaatttcaacaacttacatttcaaattatt

SEQ ID NO: 255902 - DNA, 577 bp, Homo sapiens
tcaacctaaaatattcaaaaggatcagaattcagttttttaaaatgtggtcaaacaaaaagctggaattaggcatttggagaaaagactccagagaaatggagccagtgctcctaagttcttgcttatataggcagaaaacaatgaaatttaataggcttacaacattgtgtgtacatggcttgtttatgagttacaaaaatataatgagtttggcttgttttcttttctttatatctagtttttatttcctttccaagttagaagaatgtacttaatattccattataagacaatgtgacagccatgaaktttttgagaaaagtaggagggcagttaatctaccatgaaggtgaacaatgaagaaggaagggatcttctatggtgccctttagccatttacaacattttacaaaacaatgtaaggaaggaagaagactaatctataatcaggaagacaaaggttatagctgcctaggttacagctagctacctgtcatacgactcaggctccataatcacaatcctttaaggctcaaagtaatttaaaatttcaacaacttacatttcaaattatt

SEQ ID NO: 255903 - DNA, 577 bp, Homo sapiens
tcaacctaaaatattcaaaaggatcagaattcagttttttaaaatgtggtcaaacaaaaagctggaattaggcatttggagaaaagactccagagaaatggagccagtgctcctaagttcttgcttatataggcagaaaacaatgaaatttaataggcttacaacattgtgtgtacatggcttgtttatgagttacaaaaatataatgagtttggcttgttttcttttctttatatctagtttttatttcctttccaagttagaagaatgtacttaatattccattataagacaatgtgacagccatgaattytttgagaaaagtaggagggcagttaatctaccatgaaggtgaacaatgaagaaggaagggatcttctatggtgccctttagccatttacaacattttacaaaacaatgtaaggaaggaagaagactaatctataatcaggaagacaaaggttatagctgcctaggttacagctagctacctgtcatacgactcaggctccataatcacaatcctttaaggctcaaagtaatttaaaatttcaacaacttacatttcaaattatt

SEQ ID NO: 255904 - DNA, 564 bp, Homo sapiens
tttccaaatatttaaaatagtgccaagcattcagctgttagaacygataagcagaataatgcataggactgccaattatagaaatttagtcacacctctatgatctagaaagtgtcatagatcacaaaaatataataaaaaatacaggacagtcaaggaaaatacatgaaaatagaaaaaccacatagcataaaacaggaaaaaatgtggttactttttgtcttattcagttagggatactgtaatgatatggttaggctctgtgcccccacccaaatctcattttaaattgtaatcctcataatccccacatgtcaagggcaggacatggtgggaggtgattggatcatgggtgctggttcccccatgctgttcttgtgataatgagttctcacaagatctaacggttttataagtgtttaacagttcctcctatagactcattctctttcttgcctgttgccctgtaaaaaaagctactttcccttctgccatgattgtaagtttcctaaggcctttcccaccatgcagaactgtgagtcaattaaacctttttcctttata

SEQ ID NO: 255905 - DNA, 564 bp, Homo sapiens
tttccaaatatttaaaatagtgccaagcattcagctgttagaaccgataagcagaataatgcataggactgccaattatagaaatttagtcacacctctatgatctagaaagtgtcatagatcacaaaaatataataaaaaatacaggacagtcaaggaaaatacatgaaaatagaaaaaccacatagcataaaacaggaaaaaatgtggttactttttgtcttaktcagttagggatactgtaatgatatggttaggctctgtgcccccacccaaatctcattttaaattgtaatcctcataatccccacatgtcaagggcaggacatggtgggaggtgattggatcatgggtgctggttcccccatgctgttcttgtgataatgagttctcacaagatctaacggttttataagtgtttaacagttcctcctatagactcattctctttcttgcctgttgccctgtaaaaaaagctactttcccttctgccatgattgtaagtttcctaaggcctttcccaccatgcagaactgtgagtcaattaaacctttttcctttata

SEQ ID NO: 255906 - DNA, 556 bp, Homo sapiens
aggggaagagagaggcaaaagggggatgaacttacacctttataaggaagccactccttttataatagcattaatamacttatgagggcagagccctcatggcctatcatctcttaaagatcccatttcttagtactgtttgaatggtaattaaattcagcatgaatttggaaggagacaaacattcaaaccatagcaatagtatacaatttaatacttctcagcaataaaaagtaacgaactgctggtgcatgcaacagcacaaatgaaatccaaaaacatgttgagtgaaagaagaactcagattcaaaattaatcgataatgacagacattaaaaaattgtcttctctggaagaggcagtagatttcactaaaaaagaatatgaggaaactttttagttggataaaaatattctatatcctgttacggttgcacaggaatatttaattattaaataatctactgaaaacttaagttcactgcaggttattgtgaatatatacatataaaaagactaggagaaaaaattaacacagtggttttctggttaatca

SEQ ID NO: 255907 - DNA, 556 bp, Homo sapiens
aggggaagagagaggcaaaagggggatgaacttacacctttataaggaagccactccttttataatagcattaataaacttatgagggcagagccctcatggcctatcatctcttaaagatcccatttcttagtactgtttgaatggtaattaaattcagcatgaatttggaaggagacaaacattcaaaccatagcaatagtatacaatttaatacttctcagcaataaaaagtaacgaactgctggtgcatgcaacagcacaaatgaaatccaaaaacatgttgagtgaaagaagaactcagattcaaaattaatygataatgacagacattaaaaaattgtcttctctggaagaggcagtagatttcactaaaaaagaatatgaggaaactttttagttggataaaaatattctatatcctgttacggttgcacaggaatatttaattattaaataatctactgaaaacttaagttcactgcaggttattgtgaatatatacatataaaaagactaggagaaaaaattaacacagtggttttctggttaatca

SEQ ID NO: 255908 - DNA, 603 bp, Homo sapiens
taaacacacacacactatttcactttatagaagaaaacattggggttaaatagttaaagatcaatcacaccaataatagttacagattgaaaaccagatgttctggccacaaacaaatatatttttattgtgcttttttcacttcttgcatatatttaaagtaagaaagatgatttaccactatgttagacagaaagacatggtcgtcacattgtttgggatgctagcagtccacatcctatggaactattagcagagacttcctaaagacagcatcccttcaggacaaaagctgatttgattttgtcataacaagtatcaataactaatattgagattatcttaaacagatgatatttaaagagaattaaagtctcaaatagtttgaattaactagctcatgtaatcctcaaagaagtaaaaacagtaagtaggtgccacaattattactcttttatgaataaagaaactgaggtgtagagaaatcttyacatagctgtaagtcagatttaaatccaggcaattggcaataagtagaaaattaacatctttccagaggaagatgttaggtactagcaaatgtctgcaagggttctggttggc

SEQ ID NO: 255909 - DNA, 579 bp, Homo sapiens
gatacttacaaatattattcttatatttcttagagtcctttttattcgttaatctgatccccttttatagatacagttcttgtattagacttgctgtgttcaaattaatgcatggttcctatgttctgattagaaactcattgatacaataatcaaaaacattcttccctgttataggaaaataaggcattatttgtcagaaagtgaataaatcatctcattatataaaaactatttgagaaaaactagcaaattttatgtgtctgatacaacatttaaatttctgctaatctttaaataatctttcttgcttttacttaattaatacacatgaagcaattgcttagaatagtatctgaaatttattccaggattatggagttgattattaaagaataaaatatgaagtagtttttccttcttggactgcaaattaatcttgatgtccagagccattgctctttgacacttgtttttttcaataaccaatttcatatgaagctcatttccttctcacattagaaatactataaagcaataaagcccattttgtcaaaycaataactagattgtcatctc

SEQ ID NO: 255910 - DNA, 631 bp, Homo sapiens
ttggtttttaaggtttgaatttttctggtttctgttctgtttttctaaaactcctctcagcttttttttagtactatattcccttacttggcccttcaatgcccagatttctcagagcagagtcagaagctcttgtttcctcaccctgtagtttcttccaataaacaatattaaccactgctttcattttcacctctacacagaagactccacattcccactctcttttgaaacctagacttatgtatccaacttgatgtctctatttatatgtctgaaaagttaggtcaagtgcaataaatctaaaactaagttcaagatgctggctccatcttcaccttccacaaagcagcttgtagaaaagattgctttctatgcccyttcatatccccttggctttatgattttgtgattaccccacatgacaagccaaagggctagagaattgttgcctgctagtcaactcatagttgacaggagaggagctgtggaataaataccccagttctcttttccttcagatgggatatgctgagacatagtccatgctggcttctagggttccccaacaggcatgagctactgtactccacagtggtaaataccttgataatgtaacttgtattgctgt

SEQ ID NO: 255911 - DNA, 581 bp, Homo sapiens
cctggaactgatatatatccccttctgtctcagctcattaactagaagtagacacagagtcccacccatctgttagaacgctgcgaagcccaacttctccatgcagccaaaagtggagaactgtaggtcaggaatgctaaaaatgtctggtgcacaatgatttcagtcgacacaactctggaatttttgcaactgtgtcagttaaaggattaatgcactctcagttgttatagtgcttctcagttttagttggtggtaaacaaagtgatttgcaataaatgtgataaaaaggaatgaatatggactaatagggtcataaaatggcagtgcattcatcaaaagctgagagaacctaagatgtcagagagtggtggtgctgttgcaagtttttttcactgttatgcttttgtttatctttgtggcttgagaattattcaaatttaattcttaataygtaccttgtatttaatgaatcaagattcattaaaaaatgaaacttgagattcatttgagactcacttgaaattcatttaaaaaatgagaggcaaaatggggcacttacctctcatttttacatgtaa

SEQ ID NO: 255912 - DNA, 547 bp, Homo sapiens
gcctggtatatagaaagcactcagtaaatatctgcaaattaaataaatcagcgaataaatgaataaattgcttttttggtttgtaccagggttactaaaataagtttgtgaatatttcgccatttttttccattcttcagttgcatattgctgctccatagacagccaatgctaaagattcrtttcttggattgtcagtagtaggtctcattacttttatcttctctttccaaagccgtttgtgtctttgaagattgcttgtcacactgctctgctgttgaattcaattaggtctataaagctctgtatcactggcatgtaaaactatgaaattctgctcaacagctaaagtgcaaggatatgattttacctcaagtttcctgagaagtgctgagcattggcacatttgtgtcacccacagaaagaacctgagaacaaggtgcacctgcagagagagctgtggggtatctacattcctgaatgcttctccagtaagaagtgagaagttacactgacactggtgtagtggtctcttaaggatactgaa

SEQ ID NO: 255913 - DNA, 567 bp, Homo sapiens
gagaagttacactgacactggtgtagtrgtctcttaaggatactgaagagttggtgggaagttggaaagacaccaaatacaaccacaacattgcttctaacaaccacaacactatattttgaaaaaagcacaaatcagtgagaaatttgcatgttattatttatagaaaatgactttaattctcagtttgtagtaggattggaatggatagagagaaatgaataaggatttagtgatccgagatttttcagaaaacggaattttttatctgggtgagaatgctcccagataaaagataataagttaatgatgtcttattaactctttgattagatccttacactctcagtacccctctttaattgtacaatgtgagaaaaacaataattatcttccatgtttatgagtaccataattgagattcagtaagtattcaatgaatagctaacaagcattaaataggtactcaatagatgtgaatacatatacatatatatgcttttatatattatatataaatatacagatgtataaatacataaatatatatccttctctccccacaat

SEQ ID NO: 255914 - DNA, 592 bp, Homo sapiens
ctgtgaataaccacttcactccagcctgggcaacatagggaaatctcatgtctcggggtggggggcgggggcgggaaagaaggaaagaaatgttcctgggacaagtaaatgtctacatgacacaatagtagatggaataaaattctcaatttgaaaaataaaactgaaaattttagaagaaaacataagatactgaaatacaaactttaaaaattgataaacataaaaacctttaaaaatgcaacaaaagaaatggtaaataaaatcaaaggtaaatcataaagaaaaaaagttggcaatattgtcattgttttacatatatgcatattgaatccagtagaggagaaataacttgcccaaagcacacagccagtcaagtgacagggcaagattctaatccactgttgtgatayagatattaggatgaagaatgttttagttaattcaccactctgtgcttttaaattatttctcaataccaaacaaattaacttgtattttgtggactctatttatacaaatacaatttctcagttaaagcagatgaactaattctatatgcattatcatagatataccacataaatgtaaa

SEQ ID NO: 255915 - DNA, 592 bp, Homo sapiens
ctgtgaataaccacttcactccagcctgggcaacatagggaaatctcatgtctcggggtggggggcgggggcgggaaagaaggaaagaaatgttcctgggacaagtaaatgtctacatgacacaatagtagatggaataaaattctcaatttgaaaaataaaactgaaaattttagaagaaaacataagatactgaaatacaaactttaaaaattgataaacataaaaacctttaaaaatgcaacaaaagaaatggtaaataaaatcaaaggtaaatcataaagaaaaaaagttggcaatattgtcattgttttacatatatgcatattgaatccagtagaggagaaataacttgcccaaagcacacagccagtcaagtgacagggcaagattctaatccactgttgtgatacagatattaggatgaagaatgttttagttaattcaccactctgtgyttttaaattatttctcaataccaaacaaattaacttgtattttgtggactctatttatacaaatacaatttctcagttaaagcagatgaactaattctatatgcattatcatagatataccacataaatgtaaa

SEQ ID NO: 255916 - DNA, 539 bp, Homo sapiens
aaatcagaaccttcttcatttgaacattaagacagaataataataaacaggaactcctacaagttccrggggtaagatagtccttgaattgcagtcctggtcctgacagttactatttgggaaaatctgggcaaggaatttattttctccaatgtcacttatatctctgtgttttgagagttggataagattatgtaaatcctctagtccaatacttagtccatcataattgtagcttttactacataacagtggctgtggagcctaggcaggaaaagatgttgctcgtttgagggtaactgagatgacagtaactttggaggtcaaaacaaaaagcagaaaataaaacacttcaatctgcgtattgtgaagcctgcagggatatgagcatggtccctgacttgttacaaactaagccttctactttattgatttccacaaagaactggccagggcaagcatgctgctttagctgatagcagagaggccatgtgctaaggattgtggtggttttaaaacctgcacagtctttaaaactt

SEQ ID NO: 255917 - DNA, 637 bp, Homo sapiens
  misc_feature (1)...(637): n = A,T,C or G
atgacagtggatatgactacttgtcctgtgggcttgcatagctttgaaaatgcctcagacaagagatttgctgtcctggatgatcccacagagagagtttgtgtgggctgtcccaccagaarcaatatctaaaaggggaggtgtaggtgttaagccaagagaacatcaactgtgctaggaatgtgtggtagtagatttccaataggcacttctctgaataaatcataaaagcactccataaagaagaaagagcatcttccaaaaagtgagcctttgacagccaagatagaatcataggcagtattaaataactanaaaacaaaacaaagatcttgttttctaacatcattcttgagtgaaaggaaccaagaacaactgaatttagctggagtctagggctaagacagtgaatgcacaaaataggccttaagcatctcctacttccagaaagtgagaaagtaataacactaccaatatcacacaacaacaacagcaatcccatcccttcattcctcccccaccaccacacacacagtgctaggggtgtgtcaaaggggtccaggagccaactgaaagaattttcagtggtcaaagctggaagaattttagcaacaaaatgaagtaattggcttataac

SEQ ID NO: 255918 - DNA, 637 bp, Homo sapiens
  misc_feature (1)...(637): n = A,T,C or G
atgacagtggatatgactacttgtcctgtgggcttgcatagctttgaaaatgcctcagacaagagatttgctgtcctggatgatcccacagagagagtttgtgtgggctgtcccaccagaaacaatatctaaaaggggaggtgtaggtgttaagccaagagaacatcaactgtgctaggaatgtgtggtagtagatttccaataggcacttctctgaataaatcataaaagcactccataaagaagaaagagcatcttccaaaaagtgagcctttgacagccaagatagaatcataggcagtattaaataactanaaaacaaaacaaagatcttgttttctaacatcattcttgagtgaaaggaaccaagaacaactgaatttagctggagtctagggctaagacagtgaatgcacaaaataggccttaagcatctcctactyccagaaagtgagaaagtaataacactaccaatatcacacaacaacaacagcaatcccatcccttcattcctcccccaccaccacacacacagtgctaggggtgtgtcaaaggggtccaggagccaactgaaagaattttcagtggtcaaagctggaagaattttagcaacaaaatgaagtaattggcttataac

SEQ ID NO: 255919 - DNA, 637 bp, Homo sapiens
  misc_feature (1)...(637): n = A,T,C or G
atgacagtggatatgactacttgtcctgtgggcttgcatagctttgaaaatgcctcagacaagagatttgctgtcctggatgatcccacagagagagtttgtgtgggctgtcccaccagaaacaatatctaaaaggggaggtgtaggtgttaagccaagagaacatcaactgtgctaggaatgtgtggtagtagatttccaataggcacttctctgaataaatcataaaagcactccataaagaagaaagagcatcttccaaaaagtgagcctttgacagccaagatagaatcataggcagtattaaataactanaaaacaaaacaaagatcttgttttctaacatcattcttgagtgaaaggaaccaagaacaactgaatttagctggagtctagggctaagacagtgaatgcacaaaataggccttaagcatctcctacttccagaaagtgagaaagtaataacactaccaatatcacacaacaacaacagcaatccyatcccttcattcctcccccaccaccacacacacagtgctaggggtgtgtcaaaggggtccaggagccaactgaaagaattttcagtggtcaaagctggaagaattttagcaacaaaatgaagtaattggcttataac

SEQ ID NO: 255920 - DNA, 637 bp, Homo sapiens
  misc_feature (1)...(637): n = A,T,C or G
atgacagtggatatgactacttgtcctgtgggcttgcatagctttgaaaatgcctcagacaagagatttgctgtcctggatgatcccacagagagagtttgtgtgggctgtcccaccagaaacaatatctaaaaggggaggtgtaggtgttaagccaagagaacatcaactgtgctaggaatgtgtggtagtagatttccaataggcacttctctgaataaatcataaaagcactccataaagaagaaagagcatcttccaaaaagtgagcctttgacagccaagatagaatcataggcagtattaaataactanaaaacaaaacaaagatcttgttttctaacatcattcttgagtgaaaggaaccaagaacaactgaatttagctggagtctagggctaagacagtgaatgcacaaaataggccttaagcatctcctacttccagaaagtgagaaagtaataacactaccaatatcacacaacaacaacagcaatcccatcccttcattcctcccccaccaccacacacacagtgctaggggtgtgtcaaaggggtccaggagccaactgaaagaaytttcagtggtcaaagctggaagaattttagcaacaaaatgaagtaattggcttataac

SEQ ID NO: 255921 - DNA, 575 bp, Homo sapiens
aaaaagcttttaaaacaacagtcatcaccatttttattgataaaaattatattcacatatgtaattatattcacacacataattttgcatacttgcacagttttctttttttttttttttaatagacagagtctctctctgtcacccaggctggagttcagtgacacaatcatggctcactgcaacctcgaattcctgggctcaagggatcctcttgcctcagcaccttgagtagctgggactacaggcataccactatacccagctaatttaaaaaagaattatttttgtagacattgggtctcactatgttgtccagactggtctcaaataaaactcgcacctcagactcctgagtatcagttttttaatacagtatttttcctatttcttcttggcctgatttctccctgtcctccatcttcaacacaaatctccataccaatcacatcacatcacgtcacgtcatgcaagcaaggtaayacttgcttgtgttgtcctaatgttcattcttccatgtttctcttcatttcatatactattaataatataaatatgtttatgtgatttgtaat

SEQ ID NO: 255922 - DNA, 500 bp, Homo sapiens
aaatcacttacttacttctcagagctagctaggtgcctggaacttcccttgaaggaagtggagattttccttgacttccatgctcacgggtggaggtggagggggacttcgtggggagcacaaaggcttctaaaagggattcctactccatttcatggtccggtattmttttttcttaggtaactttttctttgtgtttttaagctcatacagtattttctttgttttccaacttctggacttttaattgcacaggcccaggaatatatatattatttttatcatgaagtctggaacttagtgaaccacttcaattgcttatttagatttttttcttcacctcaagaaaattctctctattatttaattgtcactttgccttcattagttcttttttctcttcttaaaattcctcttatttggatattagatacattgtatttatttttcaaatcttttatttttttcctcatgttttcatctcaattgctttttgttct

SEQ ID NO: 255923 - DNA, 502 bp, Homo sapiens
taagtgaagttcctcagaattttgccaagctcttccctctagagagaaaagttcattagcctccctagcttgtgatagtcctagccattagtttgactcagaattggccaaatgtttagagcttgttgtggaggaaaagggagctcctggatttattttggtgtayttttagaatcctctctatttctcttacatttctaaggctgggaccaggcaggggatttggcctcaggctgtcattagtgttttcagcgacggttgtattacggagtgatagtgatagggttttgatcagattgcaaggtgggttaggaacaaagaagtaaaggtagggagtttatagattactctttgtagatgtaagaggttttaaataatttcttaacaatctgggaggtctgatattttctactggttaaagggaaggatacttggaggattattgaattagtaattggtatctttcagcaataatgactcctgtgggttgatggatgacaac

SEQ ID NO: 255924 - DNA, 502 bp, Homo sapiens
taagtgaagttcctcagaattttgccaagctcttccctctagagagaaaagttcattagcctccctagcttgtgatagtcctagccattagtttgactcagaattggccaaatgtttagagcttgttgtggaggaaaagggagctcctggatttattttggtgtacttttagaatcctctctatttctcttacatttctaaggctgggaccaggcaggggatttggcctcaggctgtcattagtgttttcagcgacggttgtattacggagtgatagtgwtagggttttgatcagattgcaaggtgggttaggaacaaagaagtaaaggtagggagtttatagattactctttgtagatgtaagaggttttaaataatttcttaacaatctgggaggtctgatattttctactggttaaagggaaggatacttggaggattattgaattagtaattggtatctttcagcaataatgactcctgtgggttgatggatgacaac

SEQ ID NO: 255925 - DNA, 502 bp, Homo sapiens
taagtgaagttcctcagaattttgccaagctcttccctctagagagaaaagttcattagcctccctagcttgtgatagtcctagccattagtttgactcagaattggccaaatgtttagagcttgttgtggaggaaaagggagctcctggatttattttggtgtacttttagaatcctctctatttctcttacatttctaaggctgggaccaggcaggggatttggcctcaggctgtcattagtgttttcagcgacggttgtattacggagtgatagtgatagggttttgatcagattgcaaggtgggttaggaacaaagaagtaaaggtagggagtttatagattactctttgtagaygtaagaggttttaaataatttcttaacaatctgggaggtctgatattttctactggttaaagggaaggatacttggaggattattgaattagtaattggtatctttcagcaataatgactcctgtgggttgatggatgacaac

SEQ ID NO: 255926 - DNA, 597 bp, Homo sapiens
ttttaaataatttcttaacaatctgggaggtctgatattttctactggttaaagggaaggatacttggaggattattgaattagtaattggtatctttcagcaataatgactcctgtgggttgatggatgacaacatcctcagaattactctagtttcatgttatgtctgaacagtcacatattcagtttcttgataaaacaattcttatttctgttcagtatgtcttagacaaaaaaatagtttgtaaatgtaatcacaagaaaatgcaaaattatctcataatttgagtaacacattaaaatcttaatcgcctcaatgagtctgtccaataaggcatactgtagtttatatatacaaacacaattttaacctattctaaattgtgttttgaattattttgtgacttcgtgagtttcttgttaaaatcccttctaatcaaatgggatatgctaacaataactccttgttttcagatatttggttattatcattttrcatgattgaggccttaattacatattttttttctctgagtgctgtattatttgcttcttgataagtcaaatgaacaacaagagcagttccccagtggcat

SEQ ID NO: 255927 - DNA, 632 bp, Homo sapiens
acattgttttaagttctctgacttggagcaaaagaagagatattaagcagagagtggagatctaattgaggaggtagagcaaagactgaatttgggacggaggtgtcctatgcaaagatagaatgagatttwtgtgggactaacaataaaatttttaaaagatgaagaaaaaatattgagagcagctagggaaaaatgcatattacctagaggacaattattgtccaaagataataacagccaggaaacaatagaaccatatctttaaagttttggaaagaaaacaaaagctatcaatcagagttctatatttaatgaatgtatgcaagaaaactgagagtaaaatagaaacattttccaatttgagggaattctttgtctgcagaattgcacacaaggaaagctaaagtaggttctgctagctgaagagaataatagttgtattgatgggaaagaatgaagaacacaagaaatcataaatctctcttggtaaatttaaaagcctgtattttatggttttattatttttcaactgaaaactgtttagaataaaaataatattatctatagtgtttataacatatggcaagaacagcacattaataacaattagaagtagacaattctaaatt

SEQ ID NO: 255928 - DNA, 571 bp, Homo sapiens
acaattagaagtagacaattctaaattaagggtgcaaattgcaatcttcagagtcatgtattagtctgttttcatgctgctaataaagatatgagagactgggcaatttataaatgaaagaagtttaattgactcacagttcagcatgactggggaggcctcaggaaacttacaatcatggtggaaggggaagcaaacatgttcttcttcaaatggcagcagtaagaagaagttctgagcaaaggcagaaaagctccatataaaaccatcagaccttgtgaaaactcactgtcccaagaasagcatggaagtaaccacccctatgattcgattatctctcaccagttccctcccatgacacatggggattgtgggaactataattcaggataagatttgtgtgggaacacagccaaaccatatcattccaaccccctggtccctcccagttctcatttccttacatttcaaaacacaatcatgacttaccaacagtcccccaaagtcttagctcattcaagcattaacccaaaggtacaagtccaaagtctcatctgagacaaagtaagtc

SEQ ID NO: 255929 - DNA, 562 bp, Homo sapiens
attaaactttaaagttccaaaatgatctcctttgattctgtgtctcacatcaaggtcacactgatgcaagagatgggctcccacagccttgggcagctctgcccctgtaggtacagctcccctactggctgctttcacaggctagtattgagtgtctgtggcttttctaggtgcatagtgcaaggtggygatggatctaccattctggggtctggaggataatggcccatttctcacagctccaccaagcagtgctgcagtggggactgtatgtgtgggctccaaccccacatttcccttccacaggggttctccatgccctagcagaggttctccatgagggttccacccctgcagcagacttctacctggacattcaggcatttccatacaccctctgaaatctaggtagaggttcccaaatctcaattcttgacttctgtgcacccacaggtccaacaccctatgtaagccaccaagtcttggggcttgcatcctctgaagcaatgccctgagctgtacattggcatcttttagccacagctgaagctgaagcagctgg

SEQ ID NO: 255930 - DNA, 562 bp, Homo sapiens
attaaactttaaagttccaaaatgatctcctttgattctgtgtctcacatcaaggtcacactgatgcaagagatgggctcccacagccttgggcagctctgcccctgtaggtacagctcccctactggctgctttcacaggctagtattgagtgtctgtggcttttctaggtgcatagtgcaaggtggtgatggatctaccattctggggtctggaggataatggcccatttctcacagctccaccaagcagtgctgcagtggggactgtatgtgtgggctccaaccccacatttcccttccacaggggttctccatgccctagcagaggttctccatgagggttccacccctgcagcagacttctrcctggacattcaggcatttccatacaccctctgaaatctaggtagaggttcccaaatctcaattcttgacttctgtgcacccacaggtccaacaccctatgtaagccaccaagtcttggggcttgcatcctctgaagcaatgccctgagctgtacattggcatcttttagccacagctgaagctgaagcagctgg

SEQ ID NO: 255931 - DNA, 452 bp, Homo sapiens
tctcaagttccctgtggctccaagattctttgttttagttaacagaaattctgggatgatgagaacattcttaaaaagtatttcattagaatttctggaattgattttatagatgtcagtgaatattgatggtagaaaagaggacagtaaaacaaattcctgtacgcatggattaaatgcattcatagtggtttggtctgaataagagaataacaaatcaaaaattcctttaaaaacacaagtagtaggaggrggacaagttgttcttagataattaggatattgaagtctagcctcttgtgtgtttctcatttaaataaatttatttttttcaaaaacaaacttttaggcttctaagcaaagatatgaaggcctccctgatggcttccacttgaagagtcctttccatcctcccactttctgttggccttcacacctctcccatggcccat

SEQ ID NO: 255932 - DNA, 400 bp, Homo sapiens
gaggaatgtgaggggtttttttggtgaaaaagacatattcttgttagttcttcastctatgaataaactacattattttcaagtatttcatttttagcatctgaaatatcctttcaaccatgtcaccaaatcttctggtattttgaaccaaacactttgagtaacctgaagaaaagtgatgtagaaacataaacttagctccttttccaactcttaatatttttatcttggttcctggttagattcttgcccaaagtgcctaaaatccaaggaaataccaccggccccctcccccaacattctgcttaaatgtgtttgccattgaccaatttgtgtatggttgagcccactcagggcagttgctcccctttcttccccttgtttatatgtgtgctgctga

SEQ ID NO: 255933 - DNA, 400 bp, Homo sapiens
gaggaatgtgaggggtttttttggtgaaaaagacatattcttgttagttcttcagtctatgaataaactacattattttcaagtatttcatttttagcatctgaaatatcctttcaaccatgtcaccaaatcttctggtattttgaaccaaacactttgagtaacytgaagaaaagtgatgtagaaacataaacttagctccttttccaactcttaatatttttatcttggttcctggttagattcttgcccaaagtgcctaaaatccaaggaaataccaccggccccctcccccaacattctgcttaaatgtgtttgccattgaccaatttgtgtatggttgagcccactcagggcagttgctcccctttcttccccttgtttatatgtgtgctgctga

SEQ ID NO: 255934 - DNA, 626 bp, Homo sapiens
attgaacattttaagtccactgttgagacctactgctcagagaaagagattcctttcaaaatattactgtgcattgacaatgcacctgttcacccaagagctctgatggaggtgcacaaggagattaatgttgttttcatggctaataacacaatatccattctgcagcccatggatcaaggggtaattttgattttcaagtcttattatttgaaaaacacattttgtaagactatagttgccatagatatagagaacaattcctttaatggaaattaaaaacctcctggaaaggattcatcattctaaatgacattaagaatattcataaytcatgggaggaggtcaaaatagcaaccttaacaggagtgtggaagaaatggattccaaccccttactttgaagggttcaatgtaaagtcactagctgcattattttctagcaacttgagttaaggaagtaactgcagatgtgatagaaatagcaagagaactagaattaaaagtgggttctgaagacgtgattgaattgctgcaatctcatggtaaaacttgaactgatgaacagttgtttcttatgcatgaaaatagaaaacggtttcacgaggtggactccactcttgctga

SEQ ID NO: 255935 - DNA, 563 bp, Homo sapiens
tttaaactggagaaaataacatcttggtgatttgatggtaactctctctctcatttatctacctaaagacccactacaaggatctttcactgccttggtcaggatctatcaaagatccaccttttcttcacattcagataaaagcatatcacacctgaaaaatttggcccagacatggtttggccatcatctcttcaagaaaacatttgtcaaactttctaaccaggccctcctttggkcaccctagtccctgatacatacctctgacttagataatatagtgatattgaaatgatccgatatgtttactatctctgtattcccagtctgtattagtttgttctcatgctgctataaggacatacccaagactgggtaatttataaaggaaagagctttaattgactcacagttctacagggctagggaggcctcaggcaacttataaccatggtggaaggggaagcaaacgtgaccttcttcacatggtggcagcaaggagaagtgcagagcgaggctggggaaaagccccttataaaccatcagatcttgcagatcttgtg

SEQ ID NO: 255936 - DNA, 603 bp, Homo sapiens
gttttctgcacttctgagtgtggctaataatgttacatcatctcaagctttgccttttttcttcatatttatcacattcccagagcaacaacccatctacaacaaacgccataacttgaactggcttctgttaaaaactgatccaggttggccttgagtttctgtcttaaaatgcttggttgttagaacatcaattatggtccscttagaccaattaaagctagtgctgttttaattagtttcaacaagattgattaagagttaacaacagaagctttgatgaagtgaactcgtgggcagtatgttggctgtctttctaaaatggttcgtgaatttgagtataaacctacatttgttcaaaagttctatcaccttttgttgtacacctataaacagtggcatttaataaaatcaatgtggttaaaaattacacattaaatactaaataggtgtgtgcatatgattagtataaaaactttattcattaaaaaaaaattttaagcaaataaaaaggtaaaatggcataccctgaagtaataactatgctatttcttgttcttggaaagataattatgtttcatgacaatttttttaagtacaaaa

SEQ ID NO: 255937 - DNA, 603 bp, Homo sapiens
gttttctgcacttctgagtgtggctaataatgttacatcatctcaagctttgccttttttcttcatatttatcacattcccagagcaacaacccatctacaacaaacgccataacttgaactggcttctgttaaaaactgatccaggttggccttgagtttctgtcttaaaatgcttggttgttagaacatcaattatggtccccttagaccaattaaagctagtgctgttttaattagtttcaacaagattgattaagagttaacaacagaagctttgatgaagtgaactcrtgggcagtatgttggctgtctttctaaaatggttcgtgaatttgagtataaacctacatttgttcaaaagttctatcaccttttgttgtacacctataaacagtggcatttaataaaatcaatgtggttaaaaattacacattaaatactaaataggtgtgtgcatatgattagtataaaaactttattcattaaaaaaaaattttaagcaaataaaaaggtaaaatggcataccctgaagtaataactatgctatttcttgttcttggaaagataattatgtttcatgacaatttttttaagtacaaaa

SEQ ID NO: 255938 - DNA, 603 bp, Homo sapiens
gttttctgcacttctgagtgtggctaataatgttacatcatctcaagctttgccttttttcttcatatttatcacattcccagagcaacaacccatctacaacaaacgccataacttgaactggcttctgttaaaaactgatccaggttggccttgagtttctgtcttaaaatgcttggttgttagaacatcaattatggtccccttagaccaattaaagctagtgctgttttaattagtttcaacaagattgattaagagttaacaacagaagctttgatgaagtgaactcgtgggcagtatgttggctgtstttctaaaatggttcgtgaatttgagtataaacctacatttgttcaaaagttctatcaccttttgttgtacacctataaacagtggcatttaataaaatcaatgtggttaaaaattacacattaaatactaaataggtgtgtgcatatgattagtataaaaactttattcattaaaaaaaaattttaagcaaataaaaaggtaaaatggcataccctgaagtaataactatgctatttcttgttcttggaaagataattatgtttcatgacaatttttttaagtacaaaa

SEQ ID NO: 255939 - DNA, 469 bp, Homo sapiens
taaaaaaaatatcccatgcccatggattagaagaattaatatcgtaaaaaggataatactacccaaagcaatgtaaagattgagtgctatctctattaaaatactaatgtcatttttcacagaattagaaacaactattctaaaattcatatggaaccataaaagaacccgattagccaaaggaatcctaagcaaaaagaacaaagccagaggtatcacgttagctgatgtcaaattatactagaaagctgtaataacccaaacagcatggtactgatataaaaatagacatagaacaatggaagaatagcaaaccccaaaataartccacctatctacagcaaactgatctttgacaaaattgacaagaacataaactgaggaaaggaaagtttctttaataaatggtggtgctgggaaaattggattgccatatacagaagaataaaattgaactgccatccttcat

SEQ ID NO: 255940 - DNA, 623 bp, Homo sapiens
ataaaattgaactgccatccttcatcatatatgaaaatcatctcaagatggattaaagacttaaaygtaagacctgaaactataaaattactgggagaaaacctagggaaagaactcttctggacattgggctaggcaaataattcatggctaagacctcaaaagcacaagtaacaaaaacaaaaatagacaaatgggacttaattaaactaaaaagctcctgtacagcaaaggaaataacagagcgaacagacagcctgcagaatgggagaagatatttgcaaactatgcccctggcaagggtctaatatccagaatatacaaataattcaaagaactcaacaaaataaccccaaataacaccattaaaaagtgggcaaaatatatgaatagacagttttcaaaagaagacatacaaatgactaacagttatatgaaaaaaattgcttaacatcactaatcctctgaggcaaattaaaaccacattgagtatcatcccagtgagaatggctattataaaaacataaataacagatgttggcgaggatgcagagataagggtactcatacactgttggtgagaatgtaaattagtccaacttctgtggaacacagtatggaga

SEQ ID NO: 255941 - DNA, 497 bp, Homo sapiens
acagataaatatttcctattccttcctctcaactcacaatcattttccataaatcttctttaaagatagtgtttaatcagaacagggcaagatttggactagatacaagctgaacacttccgctcccaccatatcccttggtatcagaagctgcaaaaggaaactaaaatacaaacaaagcaagttttttaaaatttgtatattcctctaaataagtattagcacaactacagaaaatcagtagcttatcatccacaagaaagaaaaaaattaagatttaattcttaaagacaaacctactcaactcattgtcatttatagctacaaccaaataactgcaatcttcatctcaggcaacaggaaagaaacaatacaatgtgacactttcttctcttcctctgtcctacaaatgtcttgwccacatgactacaaaagaaagaggaaaacactatcagcaatcaaagccaaagggcattttttttttaccttacatcaaa

SEQ ID NO: 255942 - DNA, 570 bp, Homo sapiens
gggaaacagtgttatctaaaatattaatttttgtttgtaattgagtataataagtgattaaaatggctgttagggaatacatatttttataaatacattttatgttcattatttttagtagcacaatcatttaatgacaaggagtcattcctatgtttatctttgttagaaaatatttgtattacwcataatctaccttgttttggtctacaggaagtttaatatgttaacagaattgagataactgattgtagtttttaggcaatcaagaatatttccatgcttatatgtcatcagtctgatcattagaaatttcattctaatatttgatacccttgacccaggatattatactatatactcaggaggccaggtaggctgaattcctaggagtggaattgctgggttaaaggttaagacggtctctatggattttttatagtatatcatctgtataattccaataacatctaaaagtgagatattaaatatctctcagcctttgtttttctacaaaaggaggatggtaatgaaagcacgcatatcttcatcacaagactttggaaaatc

SEQ ID NO: 255943 - DNA, 586 bp, Homo sapiens
attgtagtttttaggcaatcaagaatatttccatgcttatatgtcatcagtctgatcattagaaatttcattctaatatttgatacccttgacccaggatattatactatatactcaggaggccaggtaggctgaattcctaggagtggaattgctgggttaaaggttaagacggtctctatggattttttatagtatatcatctgtataattccaataacatctaaaagtgagatattaaatatctctcagcctttgtttttctacaaaaggaggatggtaatgaaagcacgcatatcttcatcacaagactttggaaaatcaaataattgacatcaatgattttgtaaagcattacccaatataggagtgttaattattgttcgaaaagttatttacagttaggtcttccattctttgggtctttgtgaccwttgaatgaatctttactacaacatgtatgacactactatagctgaatggtcttttttgtgaatttatctgcctattagattcagaactgtttgaaacaagtatttctctttttctgtattcatctttgcattctctgaaacttgtactgaat

SEQ ID NO: 255944 - DNA, 635 bp, Homo sapiens
cacgcatatcttcatcacaagactttggaaaatcaaataattgacatcaatgattttgtaaagcattacccaatataggagtgttaattattgttcgaaaagttatttacagttaggtcttccattctttgggtctttgtgaccattgaatgaatctttactacaacatgtatgacactactatagctgaatggtcttttttgtgaatttatctgcctattagattcagaactgtttgaaacaagtatttctctttttctgtattcatctttgcaktctctgaaacttgtactgaatgcctagctccataaatgtttgaataaattaatgttaaagtagaggatggaggatgtctggtgcaacattcttgtttctgccatggcactgagataatgttgttcatttattcattcattcttttacattctccatgctccaaaaaggagttatgtaagatgagctactattttcaccttagtgacagaaaagaagttcataatcagggagtggtaagtgtgctttaggaaattaataggaagatgctaagaaggaagaaaatattctaagaagtattagtaccattcttcttgtccaagattgcatggaaactgagtatttatttcccagtgaaacta

SEQ ID NO: 255945 - DNA, 607 bp, Homo sapiens
ttacagttaggtcttccattctttgggtctttgtgaccattgaatgaatctttactacaacatgtatgacactactatagctgaatggtcttttttgtgaatttatctgcctattagattcagaactgtttgaaacaagtatttctctttttctgtattcatctttgcattctctgaaacttgtactgaatgcctagctccataaatgtttgaataaattaatgttaaagtagaggatggaggatgtctggtgcaacattcttgtttctgccatggcactgagataatgttgttcwtttattcattcattcttttacattctccatgctccaaaaaggagttatgtaagatgagctactattttcaccttagtgacagaaaagaagttcataatcagggagtggtaagtgtgctttaggaaattaataggaagatgctaagaaggaagaaaatattctaagaagtattagtaccattcttcttgtccaagattgcatggaaactgagtatttatttcccagtgaaactagggcattcatatttgacagtgcattgtgaatttattattactgacttcataaattcagaaattattgaaaggagtcat

SEQ ID NO: 255946 - DNA, 457 bp, Homo sapiens
gtcatttctagagaggctcctctctgccaggcggtttctaccttgaaaggcaaaggaagaatcatccagcstgtgagcataggaataccatataaatccagctccttacatcgggagtgaagagtacagggtcctgatggcatgttgctgatctctggtacatgtcagttaggtgaatattgggttttgctcagagttatcaaaggagcataattcataaagcttgagagaagtttgctaactttccagttctgtttagttgagtttataagacagagtgtttctttctgtaccccaggctgtgctctgtggcttctgcctttgtttctgtccactgaggggcagggtggagagtgagtgttctgtaacagtcatcagatgaaaaattggcttgcacttagttcaaggacgtctcaggtgcactcgtgagtcgtcagtggacagcatttgagacagg

SEQ ID NO: 255947 - DNA, 514 bp, Homo sapiens
caaataacagtattgtttcctccactcttattcttttacctttttttccttttttcttcccttattacactgatcataacctccagtgtagtatttaatacaagtagcattagtgggtattactataacattcctgatgtttcaaggaaaacttttaacattttctatcaagtataattttgctgtaggtttctgtgtgtgcatgctttcttctttgacaaatgaagaaatctacttttgttctcagctttctattagttatttttaaaactagtgtgaatgagtrtttaattttattaaatgctttttattagttgagatgatcatggtttttctcctttattctgttaatgaggtgtgaattacagtgactgttttcaaaccttgaaccattctttttcctagaataagcccaaactcttcatgatatgttaatctttttatatatagctgaattcgacattaaaatatttttcacctatgattattatatcagcctatggtttcctttaat

SEQ ID NO: 255948 - DNA, 487 bp, Homo sapiens
ggcagtctggccttttgggttttcagcatttaatcattgattctttctcagcttcatgagtttgtctagttttgatctttgaggctgctgctttggatgggctttttgtggggacttttttttgttgatgctgttatgctttgtttttctttcaagggtcaggtctctgttctgtaggactgctatggtttgctgggggttcacttcaggccctgttcatctggttcgctactgtgcctggagatgtcactcaaggaagctggagaacagcaaagatgggtgcctcctycttctgggatctctgacctcaagtaacaccaacctgatgccagtaggatcattcctctataggctgtctgacaacccttgtcagtcggtctcacccagctgggtggcatggggaacaggacccatttaatgaagcacttgactgtctcttggtggagggggtgtgcttcactggtgtgaaacctacttgtctggagct

SEQ ID NO: 255949 - DNA, 527 bp, Homo sapiens
ttcaaccattgtagaagcagtgtggtgattcctcaaagagcaacaaacaggactaccattagacccatcgatccaaccattactgggtatatacccaaaggaagataaatcattctgccgtaaagacacatgcatatgtacattcattgcagcactattcacaatagcaaagatatggaatcaacctaaatgcccatcactggcggattggataaagaaaatgtaktacatatacaccatggaatgctatgcagccataaaaaaagaatgagaacatgtcctttgcagggttgtggatgcagctggaggccattatcctcagcaaactaatgcaggaacagaaaaccaaatgccatgtgttcttataagtggaagctaatgattagaacacatggattcaacgaggggaacaacagacactggggcctattggagggtggtggataggaggagggaaaggattaggaaaaaatagctattgggtacagagcatagtacctcggtgatgaaataattggtacaacaaa

SEQ ID NO: 255950 - DNA, 527 bp, Homo sapiens
ttcaaccattgtagaagcagtgtggtgattcctcaaagagcaacaaacaggactaccattagacccatcgatccaaccattactgggtatatacccaaaggaagataaatcattctgccgtaaagacacatgcatatgtacattcattgcagcactattcacaatagcaaagatatggaatcaacctaaatgcccatcactggcggattggataaagaaaatgtattacatatacaccatggaatgctatgcagccataaaaaaagaatgagaacatgtcctttgcagggttgtggatgcagctggaggccaktatcctcagcaaactaatgcaggaacagaaaaccaaatgccatgtgttcttataagtggaagctaatgattagaacacatggattcaacgaggggaacaacagacactggggcctattggagggtggtggataggaggagggaaaggattaggaaaaaatagctattgggtacagagcatagtacctcggtgatgaaataattggtacaacaaa

SEQ ID NO: 255951 - DNA, 404 bp, Homo sapiens
gtagttaacttaaaatctatgtcttatgagtctattatgaaggtctcttatgggtttatttctatcgtatgttgtttttcttggctttataaaatgttctcctcagtagctggtaattttttaaattgggttcagggtacagtatatgaaagacttagagatgacgtgagcataaaattttgttttctgtcttatcctttgcagaagattcatttttatttctcacagtcatcagatcatcttacccarttaggattggaattgatatgcctgggctttaggctcgtaaacagggttgatttctagtccacccctttttgcaaggtggttgatttcagggttgatttctagtccaccccttttggtaagtctccctcttcttcctttgttgctctgaaatcaca

SEQ ID NO: 255952 - DNA, 496 bp, Homo sapiens
tgatgataattccttgtctcccattactggaactggaactctgtgtttaataggatattgctggaaaggacagtgatctgagcatgacatggaagaagtcaagtttggatatgttggcaggacatggatgactaacttgtctaaaataggtcactcagtatggggataacaggaaaaattaatgtccattgagatcagatggttsgttggccttatgttcacagacagaagcttagactttattcttttggtgagtggtaaagtacttgggattttggagcagggaatgaaattatttaagaggcatttttaaaagatgaatctaacagaatactgccctgcatgcactgatgtcatagcatattatatctgaggtcaagaagagaatatagtctcacagaaagaatatatcattcttggttctggtgtcttttcttgcccaagttttattttatagaaactctaaaacagggtagatttctagtctccctttttg

SEQ ID NO: 255953 - DNA, 593 bp, Homo sapiens
tagtctccctttttggaaaggtgtctccctctctctgttgcatgccttgctccaaactcaaattcataattctcttttgctgtgaatgtcaaaagcttggctcaactgttcatgcctaggaacagctaatttattgtacacttggatatcagaagtaattttgggtgatgggatattctgaatatttagattatgttaaaagccagtagtcaatggggagaaagaccattttcttccttaagaactgaaaatctaggtggccctcaaaattggtrtgtgtctaagctgtagatctgatgcttagattcctgcagatatctgcaaagagtttatttaagtcatttttaaatcattaaatctgatgcttcatgcctccccctcatggcagattgtaaagtcatgatttacattacacatattcctttcttcattggaggaactccagtgctttggaactgagaatatcagagccataaggagcattagaaatcattttagctcaaattcctaaatttacaggtctagaactaaagcccagattacttatgggacgtattgaaagtcatacaggtggctagtagcagaactggcaa

SEQ ID NO: 255954 - DNA, 593 bp, Homo sapiens
tagtctccctttttggaaaggtgtctccctctctctgttgcatgccttgctccaaactcaaattcataattctcttttgctgtgaatgtcaaaagcttggctcaactgttcatgcctaggaacagctaatttattgtacacttggatatcagaagtaattttgggtgatgggatattctgaatatttagattatgttaaaagccagtagtcaatggggagaaagaccattttcttccttaagaactgaaaatctaggtggccctcaaaattggtatrtgtctaagctgtagatctgatgcttagattcctgcagatatctgcaaagagtttatttaagtcatttttaaatcattaaatctgatgcttcatgcctccccctcatggcagattgtaaagtcatgatttacattacacatattcctttcttcattggaggaactccagtgctttggaactgagaatatcagagccataaggagcattagaaatcattttagctcaaattcctaaatttacaggtctagaactaaagcccagattacttatgggacgtattgaaagtcatacaggtggctagtagcagaactggcaa

SEQ ID NO: 255955 - DNA, 593 bp, Homo sapiens
tagtctccctttttggaaaggtgtctccctctctctgttgcatgccttgctccaaactcaaattcataattctcttttgctgtgaatgtcaaaagcttggctcaactgttcatgcctaggaacagctaatttattgtacacttggatatcagaagtaattttgggtgatgggatattctgaatatttagattatgttaaaagccagtagtcaatggggagaaagaccattttcttccttaagaactgaaaatctaggtggccctcaaaattggtatgtgtctaagctgtagatctgatgcttagattcctgcagatatctgcaaagagtttatttaagtcatttttaaatcattaaatctgatgcttcatgcctccccctcatggcagattgtaaagtcatkatttacattacacatattcctttcttcattggaggaactccagtgctttggaactgagaatatcagagccataaggagcattagaaatcattttagctcaaattcctaaatttacaggtctagaactaaagcccagattacttatgggacgtattgaaagtcatacaggtggctagtagcagaactggcaa

SEQ ID NO: 255956 - DNA, 594 bp, Homo sapiens
agtctccctttttggaaaggtgtctccctctctctgttgcatgccttgctccaaactcaaattcataattctcttttgctgtgaatgtcaaaagcttggctcaactgttcatgcctaggaacagctaatttattgtacacttggatatcagaagtaattttgggtgatgggatattctgaatatttagattatgttaaaagccagtagtcaatggggagaaagaccattttcttccttaagaactgaaaatctaggtggccctcaaaattggtatgtgtctaagctgtagatctgatgcttagattcctgcagatatctgcaaagagtttatttaagtcatttttaaatcattaaatctgatgcttcatgcctccccctcatggcagattgtaaagtcatgatttacattacacatattcctttcttcatyggaggaactccagtgctttggaactgagaatatcagagccataaggagcattagaaatcattttagctcaaattcctaaatttacaggtctagaactaaagcccagattacttatgggacgtattgaaagtcatacaggtggctagtagcagaactggcaatg

SEQ ID NO: 255957 - DNA, 613 bp, Homo sapiens
caacctgacctttcctatataaccctcttgcatcttactggaagagtagcatgaagagaacaagagaagttctaaagtctcaaacccctcacagtcatctatgagggttagaataaacttcttccaaactcctgttaaggctgctattttggcctcctcccatgaatgatgaatgttcttaatggcatctagaatggtgaatcctttccagaaggtttcaatttactttgttcagatgtatcagaagaatcattatttatagtagctatggcattagaaaatgtatatctttaatattaaaacttgaacataaaagttactccttgatccatgggctatagaaagaatgtgatgttagcaggcatgaaaacaacattaatatccttgaacacatccatcagcgttcttgggttaacaggtgcattgtcaatgaacagtaatattttgaaaagaatcttttttcctgagaagtaggtctcaacagtaggcttaaaatatttactaaaccatgctgtaaacatatgtgctgtcctccaggctttgttgtcycatttatagagcagagttcgtgttgatttagcattattcttaatggtgctaaggctttcagaat

SEQ ID NO: 255958 - DNA, 577 bp, Homo sapiens
tgttagttctgagacaggaaaataccaaattttaaaatttctgtataaaattctaagcatatagatcaaagatggaattcagggtaccccctaaaataacctgtataatactatgttctgtgcatttgtctctggtaaagatacggttttcttccagttctcaaaggagtccatgaattagaaaagattaagaactacaatatataactttttagattagaattaaaatctagcagtcattgattcagcaatgttagtttaatgctatctgcttgccagaaacttygttaaaggctgtgcatatagaaataaatgatgcagtttccgccatgaaggaccttacattctagctttggagataggtatgtgatgtgacaagtaagtgatacaaactactatttggattatctcattcccagttcagttatttgtatatcagatcaatatcattgtgatagcctgaatagaaaattggagtaattatagaattaatctaattttaagatttctatacagacttcaactgatgtgggtatatccaacattatccaaacatattttacctaaacgctgcaga

SEQ ID NO: 255959 - DNA, 592 bp, Homo sapiens
tgcttgtggtgatatacatcccaattattcggatttgatttttacatattgcatgcttgtatcaaaatatcacatacaccccataaatttgcacagctaatatgtatctataataactaaaaayataaaaataaaaaaatatcccttcaaactggatgaaatataaaacaccagcctgttacttgcaaatgcttttgccatgtaaggtaaaactaatacaaagtttagcaattttgttgcaatttgttccaaagcatgcagtctgacaaatctatagggctgcttggagctaggaaagatttccttagtcgtggctcataatcacttctattcaaaatgttgacccttcttgaccccatcctgataaacagcatgagttagttaacaagtctggttaacttgtcttttgagaagtgcctgtcatttagtgatctgcttgtgaatgacacattattcattttaaccaaaagatagcatttcagacacatcaaaactgaaaagagaagccaagaagtgcaaaagctcaaataccttgtcacctcatagtctgttatgaagataactaatggcctgttgagaagttgtagaggag

SEQ ID NO: 255960 - DNA, 620 bp, Homo sapiens
tatctagttaattattatgtatggcattagggaagggtcagttttactttttaaatatagatattgttcagccccagtttttgagaaattattcttttcttatttatcatggtgcatgttcatggatgtacatgtacacatatacagtataaatgttctcactgagtatttatatattttattgatatatatttgtaagctatgttctgttctttgtttaatatataattatgccaatatcccaattacaattaatccttgaaatcaggtagtttgattcctctagctctgttctttgttttcaagrtcattttggttatactaggtcctttgcatttccattcacattttttaatcaacgggtcaatttctatagaaatatttgctgggattttaataggatggcattacatctatagtacaatttagaaagagttaatatctcaacacaatattgactcttccaaggcatgaacatagtatattggcaaagttagggactcaaaaagattgaatgccctgagcagtcacacagttgatggcagagatggaggaagtcagacacagataacaatgaacacactgctgaatactttagaccactatccttaaatgtatac

SEQ ID NO: 255961 - DNA, 620 bp, Homo sapiens
tatctagttaattattatgtatggcattagggaagggtcagttttactttttaaatatagatattgttcagccccagtttttgagaaattattcttttcttatttatcatggtgcatgttcatggatgtacatgtacacatatacagtataaatgttctcactgagtatttatatattttattgatatatatttgtaagctatgttctgttctttgtttaatatataattatgccaatatcccaattacaattaatccttgaaatcaggtagtttgattcctctagctctgttctttgttttcaagatcattttggttatactaggtcctttgcatttccattcacattttttaatcaacgggtcaatttctatagaaatatttgctgggattttaataggatrgcattacatctatagtacaatttagaaagagttaatatctcaacacaatattgactcttccaaggcatgaacatagtatattggcaaagttagggactcaaaaagattgaatgccctgagcagtcacacagttgatggcagagatggaggaagtcagacacagataacaatgaacacactgctgaatactttagaccactatccttaaatgtatac

SEQ ID NO: 255962 - DNA, 535 bp, Homo sapiens
attattcattcctctacactcacccaggcctttgcgcttatcattacttatgtttgcaacactctgccctagaaagacatamggctcacttcctcacttcattcaggtctctgctctagtgtttctttctcagggaggagacagatgatcttcctaaagaaacaccaccctgtcagtctccatcacctgccaggttattttctttatagcacttttcactacctgtcaaatttgtttgtcttccattccccatccaatcccaacacaaaaatataaattccatgaaagcagggattttttttcgtttactgagatatctttagggcctataacagagcctggcacataccagttgcccagtaattactgactggatgattcttccacctcctggtgcactaccaacatttccagaagactcatttctgttcttctttaacatttcttccacgatgcttctcttgaccttttcaatttttgctgaagttgctttaacattagctcattcagattcatgtattatgagataagaccc

SEQ ID NO: 255963 - DNA, 535 bp, Homo sapiens
attattcattcctctacactcacccaggcctttgcgcttatcattacttatgtttgcaacactctgccctagaaagacatacggctcacttcctcacttcattcaggtctctgctctagtgtttctttctcagggaggagacagatgatcttcctaaagaaacaccaccctgtcagtctccatcacctgccaggttattttctttatagcacttttcactacctgtcaaatttgtttgtcttccattccccatccaatyccaacacaaaaatataaattccatgaaagcagggattttttttcgtttactgagatatctttagggcctataacagagcctggcacataccagttgcccagtaattactgactggatgattcttccacctcctggtgcactaccaacatttccagaagactcatttctgttcttctttaacatttcttccacgatgcttctcttgaccttttcaatttttgctgaagttgctttaacattagctcattcagattcatgtattatgagataagaccc

SEQ ID NO: 255964 - DNA, 535 bp, Homo sapiens
attattcattcctctacactcacccaggcctttgcgcttatcattacttatgtttgcaacactctgccctagaaagacatacggctcacttcctcacttcattcaggtctctgctctagtgtttctttctcagggaggagacagatgatcttcctaaagaaacaccaccctgtcagtctccatcacctgccaggttattttctttatagcacttttcactacctgtcaaatttgtttgtcttccattccccatccaatcccaacacmaaaatataaattccatgaaagcagggattttttttcgtttactgagatatctttagggcctataacagagcctggcacataccagttgcccagtaattactgactggatgattcttccacctcctggtgcactaccaacatttccagaagactcatttctgttcttctttaacatttcttccacgatgcttctcttgaccttttcaatttttgctgaagttgctttaacattagctcattcagattcatgtattatgagataagaccc

SEQ ID NO: 255965 - DNA, 535 bp, Homo sapiens
attattcattcctctacactcacccaggcctttgcgcttatcattacttatgtttgcaacactctgccctagaaagacatacggctcacttcctcacttcattcaggtctctgctctagtgtttctttctcagggaggagacagatgatcttcctaaagaaacaccaccctgtcagtctccatcacctgccaggttattttctttatagcacttttcactacctgtcaaatttgtttgtcttccattccccatccaatcccaacacaaaaatataaattccatgaaagcagggattttttttcgtttactgagatatctttagggcctataacagagcctggcacataccagttgcccwgtaattactgactggatgattcttccacctcctggtgcactaccaacatttccagaagactcatttctgttcttctttaacatttcttccacgatgcttctcttgaccttttcaatttttgctgaagttgctttaacattagctcattcagattcatgtattatgagataagaccc

SEQ ID NO: 255966 - DNA, 559 bp, Homo sapiens
ccaggtgcaatggctcatgtctacaatcctagcagttttgggaggytgaggcaggaggattgcttgagcccaggagttcgagaccagcctgggaaacatagtgagacccctgcctctacaaaaaaataatttaaaaataatcagccaggcatggtgacacgtacctgtggtctcagctatttgggaggctgagaggggaggattgcttgagctacagagtctgaggctgcagtgagctgtgatcatgccattgaaatccagcctatatgacagagcgagaccttgtcttaaaaaaaaaggaaagaaaagaaagggaagagaagaaagaagcactgtgaaagccaaataaaatgtgtctgaggaccaccaatttccacacctgctctagtctacctgccacttgcaccgatgtagaaatttacatgaagagaggaaatgtgactggtcaggatcaaggaaccagatagaatccaggtggttttatttctatggctctcttcttcttagtacatcttcatagcctcgctagtcatataaccataatctcatccacacaagc

SEQ ID NO: 255967 - DNA, 522 bp, Homo sapiens
ctgaggctgcagtgagctgtgatcatgccattgaaatccagcctatatgacagagcgagaccttgtcttaaaaaaaaaggaaagaaaagaaagggaagagaagaaagaagcactgtgaaagccaaataaaatgtgtctgaggaccaccaatttccacacctgctctagtctacctgccacttgcaccgatgtagaaatttacatgaagagaggaaatgtgactggtcaggatcaaggaaccagatagaatccaggtggttttatttctatggctctcttcttcttagtacatcttcatagcctcgctagtcatataaccayaatctcatccacacaagcattttcttatggctctttaaaatctgtctcctggaaacgtagtgcactgacagagtagcaacactctcattgcttaggaaaagaagagcacgagggagcacacacttctcttccccacaaagtactcagtgagcctttgccttctaggaggcccacttcctgaatcctttacaacatggccca

SEQ ID NO: 255968 - DNA, 588 bp, Homo sapiens
atagtatgttcaaggcttttaacggtaggtgagccaatgataggcattttctcttaatgccttatgcccatgtaatattctcaacatttctcagcatgtaaaccacacaaaactccagagagaggtattaccttgttcgttttgcagaaaggagactctgagaggttaaaatggcttgctcatgattgatcagcccaatgagtcaaaattctaatgtagagcttctgagtcttaagcccattgctttttccactagatgagacctaccttggtctttccatatggtcgatttgttaccgtgtccccttgtattcatccctgacatccttgctgctcttcccccttttaactgagccyagaacaaggagagaaaaccagtttatagtgagcctgtcacagattggatgtggaacctcacgttaatgtgcatacatatgaaagctgtccagttggttctgtcttgaccataagaatgacacagggggtcttgtactctcaacagtggcatacatatggggtggtgaaatatttttagctactttatttctaatacatgaagccacttttgaaatggaggtaagcagtagg

SEQ ID NO: 255969 - DNA, 488 bp, Homo sapiens
atagtgtgtatagataacaatactgtataaatgttaatgttttgagttgtcatcactatactatggttatgtaaatgaaagtctttgtttttaggaaataaacactgatatacatatgtgaatttatataagtatatataaatgtatatgtaaagtgacaataattgtatatattcatgggatacatagtaatgttttgatatatgtcatgtatagtgatccagtcaggattagcatatccatcatgtcaaacaatgatcatttcttagtcttgggaacattcaataccctccttctggctatttgaaataatatattagtgtgaattatagtcaccttataatgcaagagaacactagaacttactcctcccatctagctgtaattttgtatcctttaacaaatctgtccctatcctctccctcccctatcctttacagattctagtatcctgtrttctattttttacttctatgagatcaacttag

SEQ ID NO: 255970 - DNA, 592 bp, Homo sapiens
ccatttttctatggctaaatagtattccttggtatagatatattatccttttatctgytgttgcacacctagattggttccatatcttggctactgtgaatagtgctgcaataaacatgggggtgcagatttctcttcaacataatgatttactttcctttggataaattctcagtagtgagattgctggatcatatggcagttctatttttaattttttgagtaacctccatactgttttctattatggctgtcctactctacattcctaccaacagtggacaagcattcctctttctctacgtcctcaccagaatttattttctgtctttttaacaacaagcatcctaactagggtgagatgatactacatggcggttttgatttgtatttctctgataattagtgatgttagcatttttcatataccttttggccatttgtatgtattttttactcatttctattcaggtcttttatttttaaattggatttgttttcttgctgttgagttccttatatattctagctattaaccacttgtcacatgaacaggatgcaaacattttctccctttctgtaggttgtctct

SEQ ID NO: 255971 - DNA, 493 bp, Homo sapiens
caatacgataatttaaaagtctgacactttaaagatttggcaaaatgtgtccttgaaactatctgaagctgtatattttcagggggttaaaaagtttaccatctttttcacttattttatggttgtgggttgtatgattcacaagtagtacaatattcagtgattcactagtaggactcagcatgtagttgttttcagagctacggcttattacagcaaaaggatatcagcagggaaaatggcatsgttggagtctggaaaaattcatacgcagacttccttatgctctcttcttcctgtgaaggcactcatgggaattgagcacgttcctttctcagcaatgaaaaatgcagtaacaaatgtgcaatgtttctgcccagtgaagcccattagagactcaacacccaaagttttaactggggtcttgtcacattgacaacctttcccttgcccaaaatttcagattccatgaaggaaagcaagtgttcagcat

SEQ ID NO: 255972 - DNA, 562 bp, Homo sapiens
tagagcttggtctccaaagatgactggctgattaatgaaactaatatgatgggtcccattgtgaaactcacattgaaaatttagaaataataccaagatatgtttgaagagaaaatagaagaacatttttgtcagcctctgtaaataattgtccctctgaatctaggaagtagaagccaatgaaacctatccaggatttgttgttgttgatgttgttgttgttgttgttatrcaaggaacttaactatggctcctcatccttccccactgggtctgaaacatggttttgttagagaataaagatttgtttgtcttaccaaattaaaatgaaaatttcaagactaaatggatacagagttaaataatttccaattatggctagattgcacattctccaaattcagaaggaaggcacagggccctgctggtacactaggcacagataggccctcacatacacttagcttccacctttccctctctcaactcatctggggaatatgttttctcaaccaagatattgagacactaaatgactgagagttaactgaattagatgttc

SEQ ID NO: 255973 - DNA, 562 bp, Homo sapiens
tagagcttggtctccaaagatgactggctgattaatgaaactaatatgatgggtcccattgtgaaactcacattgaaaatttagaaataataccaagatatgtttgaagagaaaatagaagaacatttttgtcagcctctgtaaataattgtccctctgaatctaggaagtagaagccaatgaaacctatccaggatttgttgttgttgatgttgttgttgttgttgttatacaaggaacttaactatggctcctcatccttccccactgggtctgaaacatggttttgttagagaataargatttgtttgtcttaccaaattaaaatgaaaatttcaagactaaatggatacagagttaaataatttccaattatggctagattgcacattctccaaattcagaaggaaggcacagggccctgctggtacactaggcacagataggccctcacatacacttagcttccacctttccctctctcaactcatctggggaatatgttttctcaaccaagatattgagacactaaatgactgagagttaactgaattagatgttc

SEQ ID NO: 255974 - DNA, 576 bp, Homo sapiens
atttatcctttttaaaaagatgatatggagaatatagctagtagcatgctaagtcaatgctgtatcaagggtcatacaaaagatgctccacggtgccacagaaatgcattgacaagattaagaaaaccaaacaaataaaaaacctaggatgctgtgtattctcaaaacatcttcacattatgggtacttcctataaaactaggacttgtggtctgcagaattagttggccagccttgaaattaaccaagttatctaactttctcatcttacttkggcatgtgggtgttgagctaagaagattttgtattagcttcagaggtgatagggcttgaatctataaacacaatttttttatgtccttgttctttgtttatttatagcatcatttctaggcaatgagatccatctaggtctcatagttcagtggttcacaaaccataatactacccctacatggtttgtcattcatcaaagagcacatagaaaacccagctcctctctgctttttcttgatgtctgttagattagctgttagaccttgaaattgttacttttaattgatagcattttttttt

SEQ ID NO: 255975 - DNA, 456 bp, Homo sapiens
aatattagaattacttctacgcccaaatagctctccttcccattgccctacaggatcagaaaattctctgttaaatccacattctcaagcctggtrtattgtattttcaatgtaaatgcctatgggagaagacaaggtatttagccatagtatcatagtacaaaggattttatgttactatctgcctctgttggtggaatcacagaaaattagaaaactttagttttctaggtaaggaagactaggagcaaaaaaaaaaaaaaaaaaactctgaaaatgtttaaaatttgctaggaaccagaccatgttacattcacatgtgatctttggtagtctttgtcatattacaattctagttaataccagtagcactgtcaaatgggaagaaatgaagagctctagtttgaatcaggttatatgactgtccaacattttcataggtgcctcctggaaatc

SEQ ID NO: 255976 - DNA, 456 bp, Homo sapiens
aatattagaattacttctacgcccaaatagctctccttcccattgccctacaggatcagaaaattctctgttaaatccacattctcaagcctggtatattgtattttcaatgtaaatgcctatgggagaagacaaggtatttagccatagtatcatagtacaaaggattttatgttactatctgcctctgttggtggaatcacagaaaattagaaaacwttagttttctaggtaaggaagactaggagcaaaaaaaaaaaaaaaaaaactctgaaaatgtttaaaatttgctaggaaccagaccatgttacattcacatgtgatctttggtagtctttgtcatattacaattctagttaataccagtagcactgtcaaatgggaagaaatgaagagctctagtttgaatcaggttatatgactgtccaacattttcataggtgcctcctggaaatc

SEQ ID NO: 255977 - DNA, 637 bp, Homo sapiens
ctagttaataccagtagcactgtcaaatgggaagaaatgaagagctctagtttgaatcaggttatatgactgtccaacattttcataggtgcctcctggaaatcatgaccacagttagtctttaggctcttatattacagtcctgtttgttaaaaagaaaagaagcagtctgctctctgttccttggtgcttccacccggcactcagaacactacaggggctcactctggaagtatcagcacctgctcccctgggtttcagagagtgtaaagttggagatatcaagaactgctagcctccttccatgaactcagcaattctttatcagagcagtaagttttgtcccaggggacctatccwgtgttctagggctgggtcctgggtgcccctaaagcctccaagtcacagtgtttcctacatctcctgcttgttcttattactgtcttcactatcatttcaatcctaattcctacatgagtgaaattatattaaaacagaaaaaaatatggagacgaattcatcctgatggtggcatcctaaatgcactgaccgttcattcctgcctgacagttccatggagttgatctggtttctgtcctttgtaggagcttttcttcatttctgcaaactattctgt

SEQ ID NO: 255978 - DNA, 614 bp, Homo sapiens
aattcctacatgagtgaaattatattaaaacagaaaaaaatatggagacgaattcatcctgatggtggcatcctaaatgcactgaccgttcattcctgcctgacagttccatggagttgatctggtttctgtcctttgtaggagcttttcttcatttctgcaaactattctgtaacctctgagtaaactccctttttgatcaagatggtctcttgcctggagtccgggtagcttctctggtttgtgacagcccttctccctaggggctggattcagcttctttccatttcccgcttttcccaacaacacagctattcatctgactttgtactttttatatgaacttcacacataytcttttttgccaagtggaaagcctccctccccatcccctgcattgttctttcctacctgaaccacagctaagcatatctgctagaccccataactggaatgcacagggcttctctgcacgtgctctctgcctctgaggtgataaatccatatttactctgccccttgtcctttggcccttcctgcctcccagtctctcatccttttatcaccaagtctcacctatctcacatgagagagagagatggggaaaatatggt

SEQ ID NO: 255979 - DNA, 614 bp, Homo sapiens
aattcctacatgagtgaaattatattaaaacagaaaaaaatatggagacgaattcatcctgatggtggcatcctaaatgcactgaccgttcattcctgcctgacagttccatggagttgatctggtttctgtcctttgtaggagcttttcttcatttctgcaaactattctgtaacctctgagtaaactccctttttgatcaagatggtctcttgcctggagtccgggtagcttctctggtttgtgacagcccttctccctaggggctggattcagcttctttccatttcccgcttttcccaacaacacagctattcatctgactttgtactttttatatgaacttcacacatactcttttttgccaagtggaaagcctccctccccatcccctgcattgttctttcctacctgaaccacagctaagcatatctgctagaccccataactggaatgcacagggcttstctgcacgtgctctctgcctctgaggtgataaatccatatttactctgccccttgtcctttggcccttcctgcctcccagtctctcatccttttatcaccaagtctcacctatctcacatgagagagagagatggggaaaatatggt

SEQ ID NO: 255980 - DNA, 585 bp, Homo sapiens
agctttcacttcctctgagataacaatcccacctaatgctgatgccgactaaggccacctctgtgcttttacacaaatggcattccctctcatagggtttcatttagagaggtttttgtgaggtttyctatagtaaaatctcgaattatttcctttgtatagtatatatactttattgatttattcatcatacttctattaagagcctagtgtgagagagaatgaattctgtgctaagcatcgggatatgttaggaaacaaagacaagtaaggttaccactgccagagagcttatattctattaagattcatgagaaataagcaaattaataaacaaaataattttagatgcttgtaagacataaaagaaaataatacagagcagtgtctctgaggagataacattcacactgagacatgaatgaaaagcaggagatgacagaacaaatctgggacaagagactttggggtagagggggctgcaagtacagagccccattgagtgctaagtacttcctaagttcttgtttcaaaagagctcctgagcacaggggaatgcagcatgagatgaagccacagaagcaa

SEQ ID NO: 255981 - DNA, 585 bp, Homo sapiens
agctttcacttcctctgagataacaatcccacctaatgctgatgccgactaaggccacctctgtgcttttacacaaatggcattccctctcatagggtttcatttagagaggtttttgtgaggtttcctatagtaaaatctcgaattatttcctttgtatagtatatatactttattgatttattcatcatacttctattaagagcctagtgtgagagagaatgaattctgtgctaagcatcgggatatgttaggaaacaaagacaagtaaggttaccactgccagagagcttatattctattaagattcatgagaaataagcaaattaataaacaaaataattttagatgcttgtaagacataaaagaaaataatacagarcagtgtctctgaggagataacattcacactgagacatgaatgaaaagcaggagatgacagaacaaatctgggacaagagactttggggtagagggggctgcaagtacagagccccattgagtgctaagtacttcctaagttcttgtttcaaaagagctcctgagcacaggggaatgcagcatgagatgaagccacagaagcaa

SEQ ID NO: 255982 - DNA, 596 bp, Homo sapiens
ggcttttaaaatttattctaatgcactgaaaatctgtcaggaaggttcagggaagtgggccattggcttgttagaaagtgaaggcacatattcttcagagacacctgggtattggctctgctttctccccttaagtgtgagttttacgttgctaatacagtttggttcaaaaactaggcaagcttgatatctgtctatatgaccttaaatagaaacctgtggacaggccatgaggtasactgaaaaagaacaccctaaaaatgtcaggtcctactccatggaatctgtaaatgttaccttatttggaaaaggattttgcagatgtgattaagctaagaatattaaaatggggagattttcctagattatctgtatgaggactgaaagctgttgcaaatgtccttttgagtgagaggcagagggagacggagattgaaaacatacagagaaaaaggccatgtgaagatggagcagagagagacttgaagatactagacttgaagatcaaataattatcagagatataggttcaactgaataaaccaggtccttgggatttgctataacagtgtgagggacaatgagcaaatagctcc

SEQ ID NO: 255983 - DNA, 596 bp, Homo sapiens
ggcttttaaaatttattctaatgcactgaaaatctgtcaggaaggttcagggaagtgggccattggcttgttagaaagtgaaggcacatattcttcagagacacctgggtattggctctgctttctccccttaagtgtgagttttacgttgctaatacagtttggttcaaaaactaggcaagcttgatatctgtctatatgaccttaaatagaaacctgtggacaggccatgaggtacactgaaaaagaacaccctaaaaatgtcaggtcctactccatggaatctgtaaatgttaccttatttggaaaaggattttgcagatgtgattaagctaagaatattaaaatggggagattttcctagattatctgtatgaggactgaawgctgttgcaaatgtccttttgagtgagaggcagagggagacggagattgaaaacatacagagaaaaaggccatgtgaagatggagcagagagagacttgaagatactagacttgaagatcaaataattatcagagatataggttcaactgaataaaccaggtccttgggatttgctataacagtgtgagggacaatgagcaaatagctcc

SEQ ID NO: 255984 - DNA, 596 bp, Homo sapiens
ggcttttaaaatttattctaatgcactgaaaatctgtcaggaaggttcagggaagtgggccattggcttgttagaaagtgaaggcacatattcttcagagacacctgggtattggctctgctttctccccttaagtgtgagttttacgttgctaatacagtttggttcaaaaactaggcaagcttgatatctgtctatatgaccttaaatagaaacctgtggacaggccatgaggtacactgaaaaagaacaccctaaaaatgtcaggtcctactccatggaatctgtaaatgttaccttatttggaaaaggattttgcagatgtgattaagctaagaatattaaaatggggagattttcctagattatctgtatgaggactgaaagctgttgcaaatgtccttttgagtgagaggcagagggagacggagattgaaaacrtacagagaaaaaggccatgtgaagatggagcagagagagacttgaagatactagacttgaagatcaaataattatcagagatataggttcaactgaataaaccaggtccttgggatttgctataacagtgtgagggacaatgagcaaatagctcc

SEQ ID NO: 255985 - DNA, 596 bp, Homo sapiens
ggcttttaaaatttattctaatgcactgaaaatctgtcaggaaggttcagggaagtgggccattggcttgttagaaagtgaaggcacatattcttcagagacacctgggtattggctctgctttctccccttaagtgtgagttttacgttgctaatacagtttggttcaaaaactaggcaagcttgatatctgtctatatgaccttaaatagaaacctgtggacaggccatgaggtacactgaaaaagaacaccctaaaaatgtcaggtcctactccatggaatctgtaaatgttaccttatttggaaaaggattttgcagatgtgattaagctaagaatattaaaatggggagattttcctagattatctgtatgaggactgaaagctgttgcaaatgtccttttgagtgagaggcagagggagacggagattgaaaacatacagagaaaaaggccatgtgaagatggagcagagagagacttgaagatactagacttgaagatcaaataattatcagagatataggttcaactgaataaaccaggtccttgggatttgctataayagtgtgagggacaatgagcaaatagctcc

SEQ ID NO: 255986 - DNA, 577 bp, Homo sapiens
gatttaaacatatttcacgggttttaaccccatcccctttaatatccttaatgaaattcaaatttacctatatttgaccagtaggaactttttcaagttggttcctgagtcttttgacatggctcaaattgtctttgagagctttgtgactatctgataaggcaagatgttacaggatcgtcttgttcctttcctgccctaagcctggagtcagcaattctccaagatgctctggttttttagaaactaggatatcaatactaatatgtgcactactagagatgttcaatgctactgagttggtcatttttttctaggcttttccagtggtcagaactacagtgtatttgtatctgtgtctacctgtataaaatagctcatgaaatcrtgctgatccttctaactcaaattttagactacaggatttttatctattcttttctatgttacagatgtatctcttaaaaatattccagaaatgctcagttgttttatttcatattacatacacaatagtctcagaataacaatacaaatgttacaacaatcaatatgattaataaaaacatatgcatat

SEQ ID NO: 255987 - DNA, 583 bp, Homo sapiens
cccaagagtgtacaagaaagcttatggtggtagggataatgcgtcttaaaaataaggcttcgtttggacagctctgaaagcaatctgcttgtatcagcctaaacctaaaaatactccattttcagggcaatctgtttcagaagcttttgtccccccgccctccacttcatttgataccataccctttggtgtcagccttacaacattgcaagttgctagtataatatgtttttccttctttagcacaaactggagtgatatatttgatccaccctacatagtccaatggataaaataacattcataacattcttcataattaattaaaaaaccaaacagttcctttcaatatcaaggatataaaactgattgctttagattgcatgagaaccacttgccatttactatctatccaaaatggctgaaactraagcccattcatgtggcttatatatgcctgtgttggatagaatgaggcctggaatttttttttttttttttttttttttttgataataagtggaagaaaaacagaacactggttatagaaacatactgccaggttaaatgaacatcaagatcc

SEQ ID NO: 255988 - DNA, 583 bp, Homo sapiens
cccaagagtgtacaagaaagcttatggtggtagggataatgcgtcttaaaaataaggcttcgtttggacagctctgaaagcaatctgcttgtatcagcctaaacctaaaaatactccattttcagggcaatctgtttcagaagcttttgtccccccgccctccacttcatttgataccataccctttggtgtcagccttacaacattgcaagttgctagtataatatgtttttccttctttagcacaaactggagtgatatatttgatccaccctacatagtccaatggataaaataacattcataacattcttcataattaattaaaaaaccaaacagttcctttcaatatcaaggatataaaactgattgctttagattgcatgagaaccacttgccatttactatctatccaaaatggctgaaactaaagcccattcatgtggcttatatatgcctgtgttggatagaatgaggcctggaattttttttttttttttttwttttttttgataataagtggaagaaaaacagaacactggttatagaaacatactgccaggttaaatgaacatcaagatcc

SEQ ID NO: 255989 - DNA, 529 bp, Homo sapiens
tttcgctggccaaatctggaacagtttgggcatcaaaaaatagtaatattaatagtttgttatccactgaataaaataagaatccatacttccatgtttaaataaaaaaggaaaactcttcttacagtgggtgaaagattayagggaagaggatagatatttacatcatcttgaaagatctcacaatacatttttcactaattgtacagggttaatggtaattttactgttaagaaaaataaaagaaaaacctagtgagaactaccttaaccaaagaaatgaagtaatactgccaataatggtaccagccaatatcatatgcctcctgatacaatgcaacaaggaggctcatcactgaggtgatattcctgccaaaaagcataatatgaatctaataatgagaaaatattggacaatccgattgatagagcaaaacaagtaaactgattgaaaaataaactagcctatgttctttaaaaaggttagaaaagaaagccttaagaaatagtctacattacaggagacaaag

SEQ ID NO: 255990 - DNA, 568 bp, Homo sapiens
ttctgttaattatctattcatttctttgcccattttgtccctactgggtggcattttatttactaattttttaggctttcttcacatgttatgaaacattatttgtataaatttggttatgatattgtaaatatttattgataattttaatttgytaatagtttatttaggagttttgctttggtgttcatacatgacaatggcctaaaattttaatttgttatattgtactagcatcataaaagtacctattgagtgctacagtggtcctttttatcataatttaggattttctctttctagatttacaaaattggaattaactatcacttgagagtttgcttgaacttgtctggaaaatcacctggcctatagttttccatggaaagctatttaaccactcactcactcactgatttaaaacaattatgagtttattgaagaggtcactttgctgagtcacttaaaatcttttattttctaagaacaattctattctgttttcagttctattggagtaaagttactcaggttatcttttattatagttttaaaaacctactacacc

SEQ ID NO: 255991 - DNA, 551 bp, Homo sapiens
ttttctgggcattgctcaaaaattcaaagcatattgaattatacatgttatatgcccattagtatttattaattgaacagaaatttattggccttgaagttagtatcctagcaaggatcgttggtcccaattagaagaaaaatctcattgtctcctgtcagtctctcgagttcttagtgttctcctgatggcatcttgagcagttagttgatcctcacttagaaagcttgatccggagctcctgctgcttggagcctaccagcagcctgaaccacactgcggctgagctccagagatatttgctttcaaacayttaacatttgctttgtgttacccttttattaggaagattaaaattgaaagggaagcaagtgaggcagggttttcttcttttctttctgcaagaacagcttgtttccatgacatttatacagtgagctttttctaaatgacaagcagattgttagatgttattttctatttctttgctttgggtcttcactttgtgggtgtaatgtaagagagacagcctcactaggagggtgactgtc

SEQ ID NO: 255992 - DNA, 560 bp, Homo sapiens
taccatctcacccaatttagaatggctgttgtcgaaaaggcaaagaagtgacaaaagttagcaaggatgccrgaaaatgagaacactcatacactgttggtggaaatgtaaatgagtatagcccttaaagaaaacagtatggaggtttctcaaaaaaagtgaaaatacaactaccatatgattcagtaatcccactgccgggtatttatccaaaagaaaggaaatcattatgtcatacagatatctgcagtcccgtgtttattttaacactattcacagtcaacctaagtatctgtcaatagatgaatggatgaagtatttgtagtagtctttgtggtgtagggttttgtgtgtttgctggggcatatcttcaacattaagacagcctgcaagttggccttagcctttatttcctgcttgcgcaggccctcagggtcagccaaaagagagagctgagcaatctctcaggtgttttctggtcatgtgcatggctctgcacatttgtgtggtcttcaagatccttaggaatatgtcagagcttctcaaaaccatctgtggac

SEQ ID NO: 255993 - DNA, 604 bp, Homo sapiens
agatttcctcagtatgacaaaggttactctttttttttttttttttttttgagatggagtctcgctctggctctgtcgcccaggctggagtgcagtggtgtgatctcggctcactgcaagctccacctcccgggttcatgtcgttctcctgcctcagcttcccgagtagctgggactacaggcgcccaccaccacgcccggctaatttttgtatttttagtagagacgggktttcaccgtgttagccaggatgttctcgatctcctgacctcatgatccacccgcttcggcctcccaaagtgctgggattacaggcgtgagccactgagcctactttcttacccaggcttccaaaaaggctggagtttccacagagatttattactatatgcatctcatcaaagggctaagatacttcttgactgtgtatatcagtaccatgtggctgttttggttcatttgtacatttttggtttgcagtgacatgtcatcaagggcctaagaacagaaattcattctgtctatgttttatgagtttaggggcctggaaaattgcaagcaacacccatgcttcagggaggccccaggactcaggaaagggggc

SEQ ID NO: 255994 - DNA, 625 bp, Homo sapiens
ccagtttctccacatcctcaccaacgtttgttatttgtgtatctttttttggagacatgtctgtgggttagtctgtttcatgttgctacaaaggactacctggggctgggtaatttataaaaaaacgaggcttctttgggtcagggttctaggctgtacaagaagcatgaccttggcatctgcctctgttaaggcctcaggatgggaggcaaagggcattacatggcaagagagggaggaagagagaatggtgcaggcgacaggctgttttgaataatcagctctcaccggagctaatggagtgagagcttactcattaccacgagaacgacaccaagccattcttgagggatcctgccccatgacccaaacaccgtccaccagaccccacctgcaacactagcgatcamattttaacacgagattttgaggggacaaacacctgaactattccagtctactcaggcctgttgcacatttcaagagggtccatagtgtatgttgctgggtttggtcagcgcttttgtagttgcatggcttttgcggtttctgtgggactaggtttggttgtgtgtgtgtgtatgtgtatgcatgcatgcgtgcagatgcttaaaaagatctactt

SEQ ID NO: 255995 - DNA, 593 bp, Homo sapiens
tgagaaagggagcagacagaggggatgtgaatcctgaccaggattaaccgggccaggttatggtgcagcaaagcaggagttgagccagggcaggagtggggcatcgggggtccaggagaggcttcgggcgaagagtgttcagggcctgcaggatctctgtgtttattttacatagagaactccacaccccttttcttcatttgagatccttggatttttaatataccttagatttaaatattcctacttctaatcatttcaaaaattgtgacccagtttagtgaagatccttctctcctgggcctgttctgcaccctggatggaggtgtttcgggaggtgctggctccgttttactgtgccattgactgtactgtctgtccagagtgacggtgtcagtgagatgattggcactgatggctctgaaatgacagggtttcttttgaagtggggtgaggggagtaacacagtgtttggaatagtctctcctagcctccatcggtggaatatrtgatgccattatagaagtggtcagtgcaggatacagggtaagaatggagagagtagaaggctgggcatggtggctcatgcctgt

SEQ ID NO: 255996 - DNA, 519 bp, Homo sapiens
ctattttaaataaattaacaaaacagcaacggaaggttgccctgagtcacgtggcctggttatcaaagggtttaaggtagctcaggtctcctcccccttccttcttcccaacacagactcagggcttcttcctgcatctcggtcccgaatgccattcctgctgccctccccttgcttctgtagcgtaactagacttcccaaggcccatcaagtggaagaaaattcaggacttggaaatgcaccatttaagttccagagatgatactccattgccaataaggccatgaaaaacagaatcatgtttaaaatccttctgagaaagcctgtattgtttctaagtgatacttgccagcaacgcaggwaaacaagctagtctcaggatgcctggggttgacatggggaaggaaaacaaaggcattggggcagctcctggacccaagcctcagaccttgtcgtcacttagaggaagtgccagggacgcatgcttctggttggtatttgtgtgagctgataggcttt

SEQ ID NO: 255997 - DNA, 468 bp, Homo sapiens
gtgtatgtgaggtctatttctgagaccagagccacaaaacagaatcctgcaccttagccattttcttaccacacgcgttttcttggatacttccatttttccagtctatataattcaatacttctgtgacagagaggtgttggagttttttgttttgyttttgttttttcgcaactctttacatacaaacagctatggtctcccaggaaggaacttcctctgttgagtacagaagtctgggaaaagactggtgaaattgcatgcgaggaagaaacaggtctaactaaatgtgaatctatacttttaaagcaagggaccacaaagggtaggtcccaaggaagttgcattgcttgctgcacttgtcacacgggctgtactttcttctctcatttatttccatttacagcgttgaaaactgaggccttaggctttggttgaaaaccgaggccaagggtgaccagccagtga

SEQ ID NO: 255998 - DNA, 691 bp, Homo sapiens
aacacgcaacccacatatcaggaaaattaccatttatcagaggggaccaatcctaaaagttctgttagaacaccagaaatgatattgatatgcaagcaacgcgacatatcgagggttctgtgagtgtatattcctttggatctttcaggaaacctttcagctatacttatggtgataaggtatatactatagtatacagtatatatatatagtatggtgataaggtgtatcctttcagttttacttatggtgacaggttatacttatggtggagttgagtcagtgtctttatggagctttgctggaacctaacatctctcttgttgtccaaagcaacaacctcaggagataacaaaagaatcctggtgagcagaacatcagcagtgaagaytgcactttttgtctcatgtatcagttgaaaataaatgaatggcacctctgacctggaaccaactaactctgcactttaagtggcagcttggggcaaactgaaggatttgatgtcaattactgtgttttatgggctatatatgctgaaaagattttcattctgttttgaaacaaaataaaaggacctggcacaaaagtgactatgccctgacactctgtacaaaccaaacttgtgtgttaacattgtttcagatttttaacatcccaacttcacaggctagactgaaatcccaaaatttta

SEQ ID NO: 255999 - DNA, 566 bp, Homo sapiens
aaccaactctgtagatgccttgttctcagacttccagcctccataactataagacaataaattttggttatttaggccactcagttgtgggactttcttatggcagccttgacaaactaatacaggactacatcattcttcacgtcttggcttaaatctcatttcctcagagcaagcttcttgaccacctagttgacacagcattttctaccaaagcgcctgttgatttccttcagagcactgagacaaacctgtgactattgtgttggtttgcttgtttatttgtctgttgccttcaccttcactrgagcatcaggggcatgggcgcaggggtcttgtctggctcttgctttcttcacagcagctctcagagtgcctggagcatcccagtgctcaataaacatggagggtaaatgacgccaagatgcatcaaaggttaaggagaatgcgccaagagctgtgtacgtgaattgccatgcacatttggtatttagcagagataaagttttttaaggaagtgagaacatttctaaatgttctcaatcctttgttttatgacactctgc

SEQ ID NO: 256000 - DNA, 585 bp, Homo sapiens
ttcttaaaactcccttgttatttagttatatgtagaagcctctctgttgtctgctattttatctcagatatagaaaatttgtactccttttctattctttcctagctcaattccatgatggatatatcaatttcacttggtttttgaaagaattaataattgattagttctctattttatattgtttattcactatgtaattttctactttattttcttctaattatgtaaattttgatgaactgtttctaatttcttgagaagaatatctgattttcaataaattatcacargaattatctatgtaggcttttaagatttcctgtttaaaataaatttatagatgtaagctattttgtcaaaaggcatgcctttgtacattttgacatattgtaaatatattcttaaattgtcctgcagaagtgacattgctttttctgtatctcagaaataccgtgtaaatcattattgaaaaaataaaaatatttgccaatatgataaatgtcaatgaagttatattatctatttaattgtatctgaggtgcaatatttattatgttatggcaattttatatcattttataa

SEQ ID NO: 256001 - DNA, 302 bp, Homo sapiens
gcatgaactcagctctgaatcaaatggatctgatagatacctacagaactcttgactcaaaaccaatagaatatacactcttctcatcaccacatggcccttgctctaaaatgaaataactggaagtaaaacacttctcagcaaatacaaaagaacagaaatcatagcaaacaatgtatcagaccacagcacarccaaattagaaatcaagactaaaaaatgcacacaaaactatacaaatacatggaaattaaataacctgctacagaatgatttttaggtaaataatgaaattaaggcaa

SEQ ID NO: 256002 - DNA, 602 bp, Homo sapiens
actggcaaattggctttactcaacacgccctgagtcaggaaactaaaatatctcttggtctgggtagacactttgactggataggtagaggcctttcccacagggtctaagaaggccaccacggtcatttcttcccttctgtcagacacaattcctcggtttggccttcccacctctatacagtcctgtaatggaccggcctttattagttaaatcacccaagcagtttctcaggctcttagtattcagtgaactaayggtcttttaaaaacacacctcaccaagctcagctaccaacttaaaaaggactggacaatacttttaccacttgcccttctcagaattcaggcctgtcctcggaatgctacaaggtacaggccatttgagctcctgtatagatgctcctttttattaggccccagtctcattccagacactagaccaactgggactgcgcccccaccaaaaaaaaataaaactgttatctctactatcttctgtctagtcatactcctattcaccgttgtcaactactcataaatgccctgctcttgtttacactgcctgtttacactgtttctccaagccaccacagctgatat

SEQ ID NO: 256003 - DNA, 542 bp, Homo sapiens
agttaaaaaaactgtatgtcatacagttatgttttcttttattcattttctcattttattcattagttttaagattatacctgtttatatatttatgagaaaattctatttttcctttattaggaagtctctttatgccctagttacattaacatatttatctaatttcctaatattttactaatatattatttttcctaatayatgggattaagcctgcaacataatttttatgttttaaagttttaagaaaaatgtctcttaggtaaatggtcaaatattgcacagaatcgtctcataaaaaatagtaatacagggatttctggcaagatggctgaataggaacatctctggtctgcagctcccagcgggattgatgcagaagatgagtgatttctgcatttccagctgaggtacctggttcatctcaatgagactggttggacagagggtgcagcccatggagggcgagacgaagcagggcagggtgtcacctcaatcgagaaatgcaaggggtcggggaagccctgagagaccctacc

SEQ ID NO: 256004 - DNA, 423 bp, Homo sapiens
aaaggaatagcatcaacatcaacaaaaagtacatgcacacaaaacccccaactgtacgtcaccaacatcaaagacaaaaggtagataaaaccacaaagatggggagaaaccagggcagaaaagctgaaaattccaaaaaccagaatgcctcttctcttccaaaggatcacaactccccaccagcaagtgaacaaaactggatggagwatgagtttgacgaattgacagaagtaggcttcagaaggtgggtaataacaaactcctccaagctaaaggagcatgtcctaacccaacacaaggaagctaacaaacttgaaaaaaggttaaacaaatagctaactagtataaccagtgtaaagaagaacataaatgacctgatggagctgaaaaacacagcacaagaacttggtgaagcatacacaa

SEQ ID NO: 256005 - DNA, 423 bp, Homo sapiens
aaaggaatagcatcaacatcaacaaaaagtacatgcacacaaaacccccaactgtacgtcaccaacatcaaagacaaaaggtagataaaaccacaaagatggggagaaaccagggcagaaaagctgaaaattccaaaaaccagaatgcctcttctcttccaaaggatcacaactccccaccagcaagtgaacaaaactggatggagtatgagtttgacgaattgacagaagtaggcttcagaaggtgggtaataacaaactcctccaagctaaaggagcatgtyctaacccaacacaaggaagctaacaaacttgaaaaaaggttaaacaaatagctaactagtataaccagtgtaaagaagaacataaatgacctgatggagctgaaaaacacagcacaagaacttggtgaagcatacacaa

SEQ ID NO: 256006 - DNA, 613 bp, Homo sapiens
atgcaggagtgttgacctatgaaccatctgtatcagaattgccacttgaaccagatttctgggggaacatccagggaatttttaacaagaattccaaataaaccttgtgtataatgaattttaagaccaagtgagtggattagctttcactgcttcgtatacttgagcccagtgggtttgggcaaacaggggaaaaggagcctcaaaagaagcatatttcccrcatataagactgatgaatatctactcatttgttgcttggaaaataaaacttgatgctccatgtatatgttcaagtgtgtggagcaaacctaagtaatttgtatccatttattatcatgaacattttcatcactgctccacagcgctaccatttaaaacactattcaatcttgtgtgacttgagatgtgatacatatagagatatatgtctactctctctctatatatatatatacacacatatatatacacacatatatatacacatatatatatacacatatatatacacacacacacatacacacatatggagagagaattggagataattggatataattggggttatgtttctacattatatgtacataatgtatatatgttatat

SEQ ID NO: 256007 - DNA, 613 bp, Homo sapiens
atgcaggagtgttgacctatgaaccatctgtatcagaattgccacttgaaccagatttctgggggaacatccagggaatttttaacaagaattccaaataaaccttgtgtataatgaattttaagaccaagtgagtggattagctttcactgcttcgtatacttgagcccagtgggtttgggcaaacaggggaaaaggagcctcaaaagaagcatatttcccgcatataagactgatgaatatctactcatttgttgcttggaaaataaaacttgatgctccatgtatatgttcaagtgtgtggagcaaacctaagtaatttgtatccatttattatcatgaacattttcatcactgctccacagcgctaccatttaaaacactattcaatcttgtgtgacttgagatgtgatacatatagagatatatgtctactctctctctatatatatatatacacacatatatatacacacatatatatacacatatatatatacacatatatatacacacacacacatacacacatatrgagagagaattggagataattggatataattggggttatgtttctacattatatgtacataatgtatatatgttatat

SEQ ID NO: 256008 - DNA, 548 bp, Homo sapiens
gttgaaatattgggggcgggttcccccaatacattgtaacaaagcagtatcacctccactagtattttcaaacagctacataagagccttgaggattattataatcgaattccacttttcttaataaataccctggccaagcgcagtggctcacgcctgtaatcccagcactttgggaggcygaggcgggcagatcgcaagatcaggaaatcaagaccatcctggataatacggtgaaaccccatctctactaaaaatacaaaaaattagccaggtgtggtggcgggcacctgtactcccagctacttgggaggctgaggcaggagaatagtgtgaacccaggaggcagagcttgcagtgagccgagattgtgccactgcactctagcctgggcgacagagcaagactccatctaacaaataaataaataaataaataccctataactaactgcataatgactcattggagtatattcaaatagtcctcagagaaattaaaaacctgattttttaatatttttatcaaaaaatgcctaaattaatgat

SEQ ID NO: 256009 - DNA, 617 bp, Homo sapiens
gatcaccaatgacaattttccatattgaaaatcagagaggcttttacttttctttctattgttagttcttaaaatgattatgtgttaaacgacacaattcattggaaggagaaaaacatatcgcaggtgacaaaattacaattatgatagaaaacagtctatttgatatctttttcttagtaacacaactttttaacattttaaaaactttgccattttgaatgctataatcaggtatttgaacagaattgacaaaatgttaaaacatgtaatatgattgctcatttgttcaatacttttactaattcaatgagattaatatataagttagtaatctactctgctgcatgattcactataacaggacactatttaatttgaaagtctcagaaagaaagtgatgatagtctgtgtaaacaagtaagttaaatgatcttgctaatataaaatttagaagttagatcaagaatataagaatcaaagtattgraaagttacagttagaaaatattaagatggggtattacataaaaggagagagagagaaagttttcagcaatattattatttcaatttgttttcaaattgcaggtcctgggtcagatatttaaggtgaaa

SEQ ID NO: 256010 - DNA, 617 bp, Homo sapiens
gatcaccaatgacaattttccatattgaaaatcagagaggcttttacttttctttctattgttagttcttaaaatgattatgtgttaaacgacacaattcattggaaggagaaaaacatatcgcaggtgacaaaattacaattatgatagaaaacagtctatttgatatctttttcttagtaacacaactttttaacattttaaaaactttgccattttgaatgctataatcaggtatttgaacagaattgacaaaatgttaaaacatgtaatatgattgctcatttgttcaatacttttactaattcaatgagattaatatataagttagtaatctactctgctgcatgattcactataacaggacactatttaatttgaaagtctcagaaagaaagtgatgatagtctgtgtaaacaagtaagttaaatgatcttgctaatataaaatttagaagttagatcaagaatataagaatcaaagtattggaaagttacagttagaaaatattaagatggggtattmcataaaaggagagagagagaaagttttcagcaatattattatttcaatttgttttcaaattgcaggtcctgggtcagatatttaaggtgaaa

SEQ ID NO: 256011 - DNA, 591 bp, Homo sapiens
caatctgtggagtcatcaaacctgaaatgatcaattcctgttgattgaaagtgtcaagatgttgtgcatgactgcacaggattcaagacagagttkttcaagaaaatcatgaaagagattgtaaatatggcaaaaaaaaaaaatgataggggagtggtgtttcaccatgtggatcttggagaaattcaagagctaataggcactcaccagaggaattaacagaaaacttcatggagataagcattcctaaaccagtgccaaacgatgaaggagaagacatagaagaagcggtgctagaaaacaaattgcattagacagtctgactgaagagttccaattattcaagagtgctttcaacttctttcatgacatggacccttttataatgcaggtactgaaactgaaccagtttgtggaagaagaatcgatactctatggaaacatttttagagaaatacaaaagcaaaggtgtcggacagaaattacgatgaatttccataaatgtataccaagtgtaccttccacttctgcctctccttttacctcctccaccttttcagcctctactgcccctgagacagcaagacctac

SEQ ID NO: 256012 - DNA, 698 bp, Homo sapiens
ggatcatgggggtggattaccctctgctgttctcgtgatagtgagttctcacaaaatctggttgtttaccagtgtgtagcacttcctcctttgctctttctctctcctgctctgtcatgtcaagaaggtgcttgcttccccttcacctttctgccatgattgtatgtttcctgaggactcccagccaygcttcctgtacagcctgtgacactgagttaattaaacctcttttcttcataaattaccagggagttctttatagcagtgtgagaacagactaataaataggataaaatagatccagaacaaaaagtattaccacacatgaagaagactagtttatgaagataaagcattatctcctcagataacaaatataaatgtctatatttttaataatggagcttcaaaatacatgaagaaaaaattaacacatttaaagggagaaatgaaaaattctcaatagtattttaaaaccccctctaagcaatttatgagaacgacaggaataaaagtggtaatacttataagatctaaacaacattatcaagtaccttgatttcactgatatttatagaacattatatctaacaagggaataatatttactatttaagagcaaatactatatcagcatgatgcatcatatgaagggccatataaccagtcttaatacattttaaaatattaaaataata

SEQ ID NO: 256013 - DNA, 698 bp, Homo sapiens
ggatcatgggggtggattaccctctgctgttctcgtgatagtgagttctcacaaaatctggttgtttaccagtgtgtagcacttcctcctttgctctttctctctcctgctctgtcatgtcaagaaggtgcttgcttccccttcacctttctgccatgattgtatgtttcctgaggactcccagccacgcttcctgtacagcctgtgacactgagttaattaaacctcttttcttcataaattaccagggagttctttatagcagtgtgagaacagactaataaataggataaaatagatccagaacaaaaagtattaccacacatgaagaagactagtttatgaagataaagcattatctcctcagataacaaatataaatgtctatatttttaataatggagcttcaaaatacatgaagaaaaaattaacacatttaaagggagaaatgaaaaattctcaatagtattttaaaaccccctctaagcaatttatgagaacgacaggaataaaagtrgtaatacttataagatctaaacaacattatcaagtaccttgatttcactgatatttatagaacattatatctaacaagggaataatatttactatttaagagcaaatactatatcagcatgatgcatcatatgaagggccatataaccagtcttaatacattttaaaatattaaaataata

SEQ ID NO: 256014 - DNA, 634 bp, Homo sapiens
atattgacagtggctgacctgttaaaagtcaccatgccttgctgagtttctggattttagtcagttatctgagctggaacctattgactgcagtggttgtgtagtcccagaggtattatgcatatatagtgtattgtgcactatattgtttccccaattgttcttcaaagctactggtggtcatttacttaggtgattacacactggggaaagatatatccaaacattttgagagctaagagacacagcatataagttggcactgaaattagaggaccaaaagtgtcactatggttccacttttagagtgtaggctcaggggggcatgtaataaatgaactcttrgataacgagtaacacgtaatgggtccactgagtttgcaaaccatccaatcaccatttccccagtcccagaatttataattgggattgattgtcattagtataacaaccacattgggccctttgcctattagataaaagctagcatcaggggaaaatgacaaatggaagtgtttccaattcgcttcttggccaaaataaatcatatagatggaaagaatggaagggactagtgataccattaaagacataaagaatgaaatgttggtggtccctgttatttttatactta

SEQ ID NO: 256015 - DNA, 523 bp, Homo sapiens
gactaaattaagaccttcccatcatataaggctcagtgatctctttatgaaagagatctccctaaagtttcatgtttttccttataaagaaaaatacttactcagggaatgagagtttccctatctgtttgcagaaccttggcaagcacaaacacaygagtgtttacaaaatatctaattcacagtcatggaatcccatataacatagcacccaaccaggaacctaagatatagataaagagttatggaagaaggcccatgaccatgaggtccattggttgtatcacttatcaaccatagagaaacaatcaatcagcctcattgagctctgaaatggctcaatggaggcaaagttgaaggaataattttgaagcaatgctctgaaaaaatatggaatcattcttcaagatacagtatatacattaaatcagagacttaagtatgatgttgtttctccaatgggaagaaaacctggaatcatgtatcaactggttgaaacaaaagcaaccccatttgccatcat

SEQ ID NO: 256016 - DNA, 555 bp, Homo sapiens
ctcttgattctcccttaactgtttacaattgtgaatggaacttagcagcaactggcttgagaaggggtatgacaaccaaaggctcagaccacttagaaatggggatataaggaaaccacaaagaccttccaaggtcatagcaagagggggaagagataagaatagagtaggaagaagagaacraggtaacagttgtgtcctcaagaccaactgcaccaacagggacggtagtttatcctactaacctcacttttgtcagtttcccctcagcaagagagactcacaggatttatgaaagagatatccctaaagtttcatgtgtaagtgtatctctttggggcaagctgtagactgtggcacccatggaagtatttttctcaaatctctttcaaggcaaactgatggggagaattgactgatagaattagctgcactggcattcatttaggcaacagtaacctggaactgctctttgtcaaagacaaggcagggccagggtaccagtcctggcctatttctgcctaacacagaaaggacttcttaccggtaaaccca

SEQ ID NO: 256017 - DNA, 571 bp, Homo sapiens
gtattctatcctcaaaattcctaccaaggaaactctccaaacactagcaaaaattccagtgcagaggtatgaagcaaacagtagggaataaaaggaatataaattgaaattctgtcaattcacatgtgagaattctttctaatcctcattccaaatgataaatattaaagaagttagatttcatgctaacaaataacagtaaaacattattatatgttgtctattataaattatatataacactatgcagcatatttatatataactatatgttaatattatattaataaggcattttattgattacaaaagtctttactaaatttaatatacacaataawgatatgagataggctttgtaattaaatccccgttaatagtttatgcaagctacttaacctctctgggacttacttggcttattataaaaagagggaattaaagcacagtaaataattttataccctaatatataccctattacagaatatgggtgtccctttattaagtagatactacaatattacgcattatggtgaacttgtattcaaaggacagcaaaataaattca

SEQ ID NO: 256018 - DNA, 594 bp, Homo sapiens
taacctctctgggacttacttggcttattataaaaagagggaattaaagcacagtaaataattttataccctaatatataccctattacagaatatgggtgtccctttattaagtagatactacaatattacgcattatggtgaacttgtattcaaaggacagcaaaataaattcagagatctgtgtgaaggagacaaaatataatctgaaacttgggtatttttcattggcacatctaaaattagaagtctttttgagatgtgatggtccagagggaaaagagaaataaatttgtgatctctaaaataaaagataactgagatttgactgaaaatytgtacttcacaggacagactttaaattatacatattttatttctttttcttagtcttctgatatgtttaaactcttttttgaaagttccagtgtatctcacctatgctaaccaacttaaaaggacagaattttgactttgatttgctcagagcattaattaacatatttatgcatttttgaatggcaaatattggtgtcagcagcaaatgagggaagatgtaacttgataccatagaatgaaggacacttaatcagt

SEQ ID NO: 256019 - DNA, 575 bp, Homo sapiens
aatttttctgaggttatttgcaattataccaatatataaagcaatccttcagcaagttaatttttagtttttttgtttcagctgttataaatggagatagtttttaaaatagaactttatatggatgttttggtctgtacgagtatgtgtgttttaatattatatatggggtctagcaattgaataaaaattacatacaattattctgtcaatgaatgtgaaaggctaaaactgaaataacacacagataccaggttatataaagtagaayagaaaagtacatgaactttgtaatgtgtctatagcagagcctaggatattgcctgacaggttgcctgacaggcagagggagctttattatgatttgttagaaagttaggtcataaattggttcttagatgtttcattttaatgcaaatattttattttaatttataaacctaaataaaataattactgtatccctataccactatgtcttttgaattatccatgtgcatttgataagaagctatattattatctagatttaaagttcactatatgtccatagaattaaccttatttgttacagc

SEQ ID NO: 256020 - DNA, 610 bp, Homo sapiens
ctatgtttagctgacctgttaattctattttcaaataactttcatttgaaatacctatgtccacttatttgtacttaaaaattattatcacaggcatgcactgacactaacagatgcaacgggcttcttatttcttatttttagaagatctaattacaatattggctgacagttagcctctgctaatcacaagttcatataattgaacaaagctaattgaagktaccaaaccatgtcagcatgctggctaataaaaagaggttgagacccccttgaaaattaagtcaatggaattcaaagtggcactacgtcattaattaaattccagattattttcttactaacaagtataaaatgaagctacatttgcttctcttttttaatcctataaaaatgtgtctcataataatgtttgggtagtggtagatttaacttttagacttcttatttacattttttaataatcaataaataaataattttgatttttgttgatactctaccataaactgtttatgattgatgtataaaaaacaaggcagtgcacatgtttaaaatctaaaattataccatattgacatttttccccattatatgcaaatatgtttct

SEQ ID NO: 256021 - DNA, 486 bp, Homo sapiens
ttgcaatcatttatattattagaaacttcttttttgtaatattatatatgtgcattgtcccttttccttattcttctccaaggctacaatttgcaatggtggtagtctctgacagattaaatagtctcacatgtataccatgcccatcacacgccagaaagtcagcattctagaagaaaaacttatagctgttaaagcatgattgaacktgaaatatgatagtacatgcaatgatattttttctattgttggatcattcaggggaagatgttatataataatgcatttttgaatgacttttaggaaaatgcctccagtttctcaccatttgtaattatactgaccaactgttaaagagaaataatcttcattatcttaatgaattatcctcctaagcttagattactgagacattttactaagagtgaatgttgtattctatcaaatgctttttggcatctagttaggtaaccatgcatttttact

SEQ ID NO: 256022 - DNA, 581 bp, Homo sapiens
ggcacccttgtaaaatcctaacttgagagagaaagtaatgctagctttattaatacctctcatcacttatttctagaggctgttgtatggaactcagtcatggaaaaaggatcctccttctccatctaacaatctacctgaatggcatcacttgtgtgccttactgtttaaaaagcataaaaatctaaatttacagtattaaaaaaatgacatagggaggagggtaagcttcttttatattacgtgtagatctttattaaaatggacttcataagtgtttctgatacatgaaatttttcttggcatgccttaaatggttttccaaaaaaatttaggatgatcacttccagtatggccrtgtaagctcctaactctaatgcatataacagtataatggatatggatatggacaaagtacataaaacaaacattagtcaatgtaaaaagcagacagattcaggatggatttgaaactcagaaaaaggaaaattatgagttgagttggagaagagcaaagatcatctggtggcttgagttggagaagagcaaagatcatctggtggctatcaagcaaaccatcc

SEQ ID NO: 256023 - DNA, 425 bp, Homo sapiens
gggaaccctagttcactgttggtaggaatgtagactggtatagccattatggaaaacactgtggaggttctaaagaaattaaaaatagaactaccatatgaccctgcaatccctcttctgggtccatacccaaaggaaataaaatcgccacctggtagatatctgtactactgtgttcattgcagcattattcacaatagtcaagatacagaaacagcctaaatgcccactgatgggtaaagaaaatgtgatgtctatccacaatgaaatattattcagccttttaaaaaaagagagagagagagagagattctgtcatttgccacaacatggakggacctgaaggacattacagtaagccagacatagaaaaatattgcaggatcttattcatttgtggaatttttttttgaaagaaaggtcat

SEQ ID NO: 256024 - DNA, 470 bp, Homo sapiens
tgttaggtgggcagagcaggtggaggaggctttgtgccttccttctgcagaaggaattctcaggatggtggagagaataaaaacatatgtaacaaaaataaaaagtactggccctacaagaaaaatcatactagcaacaaccatgctaataatatttatggagatattagcacaggccaattttaagacagccaagatttcacaagtaaaatgattaatgacgttatctccacagaaaggaagccgcattgcaagggaggtttgcaacacagaattgatgcctcctccaatccaggaccccgcagccatggacatgtatgaagccttgctcatgatgatagggtatcrtagagggttacagatggccacatagcagtcaaacgccatcatacttagaaggacacactctgttgctcccatagcaaaagagagaaacatttgcactccacacccagagaaggaaatagttt

SEQ ID NO: 256025 - DNA, 435 bp, Homo sapiens
aaaaattaagagcttggacattcttctaagacttggaaaaatattggaattccctcgggatagcaaaaaaattgggcatcttctaaatgggcattgataggacactccattcaacccaaaactagtccacattattatctggaccagtagactgattttcaaacctatttttaattttgcaaaatgttctttatgctaaagccaacctataagttaaagcaaagaaagaccataaagcaggatatcccgattgattgcataggccctgcttttaaactctatttatctcctgcccsttgatagtcccaaatactcagcttcacacaaaaatatttaaatacagaacaagaaaatagtatttaatgactcaacaggatctggagattaatgtgaaactataacacaaggcttgccactggaaaatgtgagtgcagt

SEQ ID NO: 256026 - DNA, 670 bp, Homo sapiens
caacccaaaactagtccacattattatctggaccagtagactgattttcaaacctatttttaattttgcaaaatgttctttatgctaaagccaacctataagttaaagcaaagaaagaccataaagcaggatatcccgattgattgcataggccctgcttttaaactctatttatctcctgccccttgatagtcccaaatactcagcttcacacaaaaatatttaaatacagaacaagaaaatagtatttaatgactcaacaggatctggagattaatgtgaaactataacacaaggcttgccactggaaaatgtgagtgcagtatattgggtttttttctgttttgctttttctacaacagwgggctttatttattttgaaagagtcaatgaaatgttgcctatgaaataacattatgtagaaaagtgaacataaaaaggcacatcacacccaattccaatacagcaaaaatttaaaaaccataatacgaaagatactgttcaaaatgttgaaaagtagccatttcccactattagagtaataggtagcccctctgtcttcttcatcctactgccctgtatcttgcaaattctctagagtggacatgcaataattttgaaatgctgtatctcattattttaacataatatatgaaaatgcagaaaaata

SEQ ID NO: 256027 - DNA, 581 bp, Homo sapiens
agagttctttatatattttggatatgagttatttatcatgtgatttgcatatattgtctcccagcagctggtttgtcttctcattctctaatgcaaacaccttttagttgccatgttaattggttgctgcctaagtccaattgaacatgatgcaaagaaagactacgactaaagagacatgttctaacagcacatctcactttaggtgatactgcaggaaaatatccactggaaaatagccattccctgggaattggraatggtggattttgcttaaacttgcctcagaaagtctcaagctatctcttttaattttttctcaggaacagtcatttctccccacccaactacccctctacacaaacaaatttccagtagtatcattgtccattgatgaatatcttccacttagttcacaaaacaaaagtaatttctgaaaacaaaccaggcacttaacacataggccatttttctttattcacaaaacttggcacaagtttaaggtctaaattgagttgtttgaacttatttcaaccagcttctaactaaccagctctgcctttggccattataagggtatt

SEQ ID NO: 256028 - DNA, 581 bp, Homo sapiens
agagttctttatatattttggatatgagttatttatcatgtgatttgcatatattgtctcccagcagctggtttgtcttctcattctctaatgcaaacaccttttagttgccatgttaattggttgctgcctaagtccaattgaacatgatgcaaagaaagactacgactaaagagacatgttctaacagcacatctcactttaggtgatactgcaggaaaatatccactggaaaatagccattccctgggaattggaaatggtggattttgcttaamcttgcctcagaaagtctcaagctatctcttttaattttttctcaggaacagtcatttctccccacccaactacccctctacacaaacaaatttccagtagtatcattgtccattgatgaatatcttccacttagttcacaaaacaaaagtaatttctgaaaacaaaccaggcacttaacacataggccatttttctttattcacaaaacttggcacaagtttaaggtctaaattgagttgtttgaacttatttcaaccagcttctaactaaccagctctgcctttggccattataagggtatt

SEQ ID NO: 256029 - DNA, 581 bp, Homo sapiens
agagttctttatatattttggatatgagttatttatcatgtgatttgcatatattgtctcccagcagctggtttgtcttctcattctctaatgcaaacaccttttagttgccatgttaattggttgctgcctaagtccaattgaacatgatgcaaagaaagactacgactaaagagacatgttctaacagcacatctcactttaggtgatactgcaggaaaatatccactggaaaatagccattccctgggaattggaaatggtggattttgcttaaacttgcctcagaaagtctcaagctatctcttttaattttttctcaggaacagtcatttctccccacccaactacccctctayacaaacaaatttccagtagtatcattgtccattgatgaatatcttccacttagttcacaaaacaaaagtaatttctgaaaacaaaccaggcacttaacacataggccatttttctttattcacaaaacttggcacaagtttaaggtctaaattgagttgtttgaacttatttcaaccagcttctaactaaccagctctgcctttggccattataagggtatt

SEQ ID NO: 256030 - DNA, 570 bp, Homo sapiens
gttgtttcaaaacagcatacattacatcagctatatttacaaaggaaggctaatgtggttctgctagttcaaaagtaagaggagaagaaaatactgggcagttcactttgtgaatatggcacatttcatttgcccttgaagcccaggtggaaacattgtcccattgagaaggcccaggaaattctctaaagaatcttccttgggctcagggaggcaatttaaatatttcttgctctcagggacttctgaaaatttctaagtgataactttaaattgcttcaggcaaaacatattcaaaacttttagaaatttcaagaataatgccctaaagacttaatcatatgagacccattattgtaatttacataaccaatcagaagccctgaagacatgtcttatcccattttcaatctattactatatactgctgagatcctttcyccaaatatattctaatcacttggtccagacctttgttcatcctatcatgtcatcttgtatgtagtacagtagaaagaactcagactacattaagtcttcattattaacaataataataatagaatacaa

SEQ ID NO: 256031 - DNA, 524 bp, Homo sapiens
cctgccatgcagaactgtaagtccaattaaacctctttttcttcacagtctcaggtatatctttatcagcagcatgaaaacagactaatacagtttccctcctaagaagaaagcggttttggacttctgtattttgttttgtttcataactatgtactttttttttaagaaataaaaaggtaagctctttactcatttttccctcctctttcttgccaagtcacaagggacccctaaatcctatatccagcattacttaagtaaagcctccaaatcagtcatatcagaacagtttcaagctaatgagattgttcacttactttatttggcaaagttttagttactgtttttttaacctatttcattaaacctgggacataggtcatattgtataaaattaaatggtccattaaagtactccmccatcagaaaattttttaaagtacagttatttcttctgatacaacttgggatgtgaaaaacatcctaatggacatgcagtgcaactcagcctttatgtgtga

SEQ ID NO: 256032 - DNA, 524 bp, Homo sapiens
cctgccatgcagaactgtaagtccaattaaacctctttttcttcacagtctcaggtatatctttatcagcagcatgaaaacagactaatacagtttccctcctaagaagaaagcggttttggacttctgtattttgttttgtttcataactatgtactttttttttaagaaataaaaaggtaagctctttactcatttttccctcctctttcttgccaagtcacaagggacccctaaatcctatatccagcattacttaagtaaagcctccaaatcagtcatatcagaacagtttcaagctaatgagattgttcacttactttatttggcaaagttttagttactgtttttttaacctatttcattaaacctgggacataggtcatattgtataaaattaaatggtccattaaagtactcccccatcagaaaattttttaaagtacagttatttcttctgatayaacttgggatgtgaaaaacatcctaatggacatgcagtgcaactcagcctttatgtgtga

SEQ ID NO: 256033 - DNA, 533 bp, Homo sapiens
ccaagaaccctaacattctaccttgccaccactgctgccagtttcctgcagcctaggccactaaggtacctacagtcatcactgacattgattatagctgaaaaaacctcatggagactacagtactatgcccacccagacccacactytacccaaatgacagtcaacacactctatccaattgacacaataagacccatcttcaagggaaagtcttcccctataaaagctattgtataaaattaaaaggcaactgtttcatcagatacacagagatcaatacagggacacaagaaacatgaaaaaaaaaaaaaagaaggaaacatgacaccaccaaaggaaaacaatatttctccagtggctgaccgcaaaagaaatggaaatatataagctgcctaaaaagaaattcaaaacaattttcttaaggaaactcagtgagatcaagagaacacagaagacaagtcaatgaaatcaggaaaacagtttgtgatctacatgagaaattcaacaaaaatatagatttaaaaaaaaaa

SEQ ID NO: 256034 - DNA, 623 bp, Homo sapiens
atagttagaatagcctggtgtgccagagattgtcctctagtatccatccttttcttcttcctttgataatataatcccacgtttttcagctcagcacatgatttcctgcaatcgaaccatgtatcacaccagccgcccttgcagctatgtgtgaccatgtggtcactgggatgtaagagtttcgtgtgcaattttcgggacatatcctcagcaggagggaacatgctgccctccctctgccttttaaacgcacacatcctttattttattataaaaattaagatttgatatggagattttctatatgataatggtcacgtaatgcatagataaaggaaccatctattctgatrtgacaatgctagaaatagaggggactaaaacacatatctttagaaatgtgcaagtacagttgtccctcagtatacacagcagattgggtcaaggacccttgcatatacccaaatccacaaaacatgcccttttgttcaccggctggaatgtggacataatagttggacatgagtagccgtctcagaccatgagatggaagccacttgttgaagatggtaaagcaacaagaaggagcttcaggccctgatgactgtgagggagaattttga

SEQ ID NO: 256035 - DNA, 407 bp, Homo sapiens
cctccagccctggcctcctcagcccagggtactccgggctgtcacaccctgctgagaaaggtgggctcagtatctcagggcctttctgcttctgtttctactgagacatggtgaaaagaaaagcaagccaacttcctcaccctcaaatctcccctaacaaagtgttatgagggtcaaaactagacctggaaagagaaaagtggctaygttacagagaaacagctattaaactataccccgtgaagctctggttgcaaagtccatgcaggaagccagggagtggagaatggagctcgggctgctctaataaaatcatagggactgggtggcttaaacaacacacatttgtttctcacagttctggaggggaagtccaagatcagggtggcagtacaagtgtattctag

SEQ ID NO: 256036 - DNA, 407 bp, Homo sapiens
cctccagccctggcctcctcagcccagggtactccgggctgtcacaccctgctgagaaaggtgggctcagtatctcagggcctttctgcttctgtttctactgagacatggtgaaaagaaaagcaagccaacttcctcaccctcaaatctcccctaacaaagtgttatgagggtcaaaactagacctggaaagagaaaagtggctatgttacagagaaacagctattaaactataccccgtgaagctctggttrcaaagtccatgcaggaagccagggagtggagaatggagctcgggctgctctaataaaatcatagggactgggtggcttaaacaacacacatttgtttctcacagttctggaggggaagtccaagatcagggtggcagtacaagtgtattctag

SEQ ID NO: 256037 - DNA, 595 bp, Homo sapiens
ttatttgaaatgcaccctgtactgagattttgcatttctctatcctcaacctccttagtacttctgtagcacttgctttccaccctgtttagtcatttatgtgctgctttattccctctgtctagacagattcagtcttttttgtctttgccagtttgttcatctctgcggtaagcatggtagggatctgtgcagtttggctgcccttcgtgctgttcacagtttgccaagggcctccataatgaaatggatttgggtaggatggtgctgtgggtggcatgcggaggaggccttcctatgaagccctgccttccctgggatgtgacaaaggacagctgatgaagccaggcttctggactctggctgcccrttagaacagccagggtagggcactttgaaaactgcgggagtgagggccccacctccaaacaagctgcttcatttaggtgggtggacctggacatcagggcttgaaaatactgaccattcccatgtgcaggcacatttgagttgagaatcagtgctttcagtgaaggggctgctctttgaggacttatattctcatccagagtttttactcactcattaaatgaag

SEQ ID NO: 256038 - DNA, 538 bp, Homo sapiens
atgtcaatctctttattaagcagaagttgtcttatacctggtgtcttgttaatttttattgaaatctttgtaggatagaattgtctatcttccatgggtctggagggctaccttttgtgtatttaatatttagtattataatcatatcgtaagtgttttttaaaaattatctgttgcttttgttgtttgttttggtttaggaatgtgaagaatgtaatatattggggctttggtttccttcctttaggaaaaaaagactagtttgaaagaggtttttatttctgggaaatatgaaagagaagggaatgttttaatggaaaatttccaacctcctcttyttttaatccagagtcaggaaacacttttaaaaatagcatcagatttggtacatatagttatgtaggtgaaaaagaactgaactgaacttgggctggacacatacatgaaagtcagagttttaaaaagccatgtttctataaatgaagaaagtggaggctttgcattcatattgctaattaactgaaaaattaagtaaatt

SEQ ID NO: 256039 - DNA, 586 bp, Homo sapiens
aggaatgttcatgtttgcttcgtgggttttacgaatggttttgtctcttttatatgtgtttgcaatttctaarttctccacgttgaatacttatcactattttaaaacaccccacatcaagcataatgcccttaatttctggtgtagggtataatggtattaagcgaaaaagttgtgccgtgacacaagtgtgatgcatttgaacagatgtgccttcttttccctacagcgtccacactaaaaatttgctctgttatgctgtcatcttctccttctctggcacacactacattttttaaaaattaggttttacatacattctcatggatggttaaacaaatatttctccatgatcatgacctcacagggactatacacacacactcactgaaatgccaagtggacgagacctgcaggggctaactggtagctctacagctctgagagcatttctctgaagtcacggggacaacaaggtggaaacgtctgtggtaaagagattgagttaaagattttattttatttttttctttttcattaaaaataggtttaacttatatttccatgatgattagtgatgttgagt

SEQ ID NO: 256040 - DNA, 503 bp, Homo sapiens
tcctttttaactggccattttattttatttcctttctttctttcttccccgcctccccaggttgatgtatttaaccaacacttcttcccaacaattacttctcaatttactctactttggtgattttattttctcccatcttatcaaaaccacctctattaacaagccaatcttttaagcaaacgtatttgaatattcttaatgattcttctctcatacatctttatcagtagatgcaycagacttaaagtttatggtgcaatgaaaacaattttatgaacaaaaagctacagaataaatgttggtgatgatattgatgatatgtatttttttttttttgagacgtagtctcgcactgtcacccaggctggagtgcagtggcgtgatctcggctcacaatgatacgtattcttaaaggaatttcattacagtttttctttcatactgcctttaatttgttcttgtttgaatgtgatatactatgtgacaaaattgtatgttgc

SEQ ID NO: 256041 - DNA, 630 bp, Homo sapiens
ctaatgacaaatgcctttaagaagaagagaagacacagagggaggcaaccacgtaaggatggaggcagagactggagtgacactgccacgagctgaggaacacccggagctgccagaaaaagaagaggcaaggaggaggcttcctctagagcttgaggagagaatgtggccctgcaacatctggatttccaacttctggcctcctgagttgcaagaaaatacatttctgttgttttaagacgctatgtttgtggccattttgtgatggcaggccctgaattaggatactaattcagtagtcatcaattcatttctgaaattactctccttggcaattctaagctgtgtttgtcacctttctttaatcctaatctcctragagcaaggactctgctttagattggaccctgctctgttcaaatgcctgccagtgaagcatccttgaaaaaaagattgaaataatggagtaaattttggtgttctcaatggacatgcaattattcccaaaagatgaaaaaaggaaagacgcaaacatttatttagctttttgagtttattttacatttgtaattgattttattctacagttaacttttaaggtcactaggtatttctttaatctaattatgc

SEQ ID NO: 256042 - DNA, 630 bp, Homo sapiens
ctaatgacaaatgcctttaagaagaagagaagacacagagggaggcaaccacgtaaggatggaggcagagactggagtgacactgccacgagctgaggaacacccggagctgccagaaaaagaagaggcaaggaggaggcttcctctagagcttgaggagagaatgtggccctgcaacatctggatttccaacttctggcctcctgagttgcaagaaaatacatttctgttgttttaagacgctatgtttgtggccattttgtgatggcaggccctgaattaggatactaattcagtagtcatcaattcatttctgaaattactctccttggcaattctaagctgtgtttgtcacctttctttaatcctaatctcctgagagcaaggactctgctttagattggaccctrctctgttcaaatgcctgccagtgaagcatccttgaaaaaaagattgaaataatggagtaaattttggtgttctcaatggacatgcaattattcccaaaagatgaaaaaaggaaagacgcaaacatttatttagctttttgagtttattttacatttgtaattgattttattctacagttaacttttaaggtcactaggtatttctttaatctaattatgc

SEQ ID NO: 256043 - DNA, 618 bp, Homo sapiens
ttaccatagagacaatgcagccaagatttcagggtgcttttacctgaccaaaaagtgtgctcacatctccccgtcagcagaccttccaaagttcttgattgagtcattttataaaccttgattctttataagattttatactaactcacacaggtggatatttaagatttatggaagaactatgacacaactctatgaaatgaaagtaaacatatcaataaaacatgaaaaaagttttatttcacaatacataaataacggttgattttaaaccaaactgtaccatgtatgtaaatcgagtcaattatttagttgtcatatgctgtatttcttacaggttccatytgatgcattgattccaagggaggggatttctagctcagattgaagtgttgaaggggcacagctaacagggacaggtagaggtcctattttgtagcagagtatgattattccacttactcagggtgtattataaattaaaggaattcgaaaataattttcctaaaacatgtttattcactttgcatatttttctttcctattattttcccacttaaatttacacagactggtctacatgttccaacagtactccatggtgcagacatgcacacc

SEQ ID NO: 256044 - DNA, 618 bp, Homo sapiens
ttaccatagagacaatgcagccaagatttcagggtgcttttacctgaccaaaaagtgtgctcacatctccccgtcagcagaccttccaaagttcttgattgagtcattttataaaccttgattctttataagattttatactaactcacacaggtggatatttaagatttatggaagaactatgacacaactctatgaaatgaaagtaaacatatcaataaaacatgaaaaaagttttatttcacaatacataaataacggttgattttaaaccaaactgtaccatgtatgtaaatcgagtcaattatttagttgtcatatgctgtatttcttacaggttccatctgatgcattgattccaagggaggggatttctagctcagattraagtgttgaaggggcacagctaacagggacaggtagaggtcctattttgtagcagagtatgattattccacttactcagggtgtattataaattaaaggaattcgaaaataattttcctaaaacatgtttattcactttgcatatttttctttcctattattttcccacttaaatttacacagactggtctacatgttccaacagtactccatggtgcagacatgcacacc

SEQ ID NO: 256045 - DNA, 598 bp, Homo sapiens
taacctgtggcccctgggccctgagtggctcaaggatggttttcagcagctctagtcactccctggagttgtgtggaaaattttgtgggtagcacatatgtgcattcttctgcacagagtaactttcattagaagacctgaaatacattcctccaaaataaagaacacctayttatctgttcctttcatttaaacatctgaggacacacagatctcatttatgagccctgattcctgcaacatacacaaaacagatttctatgagaaaaatcaatgatagcagtgattaaatcaaacacatttttgtttaaatgctagatttatttgagatataattgatgaaatagctataactacagtcccatttcacttgaggttcttgaagtgaagaactccataattttaccatgaatacccagtgattttaaatgcccaatagacaatagaagtgggtagagcaaaaggaaaataagaattttagggagcaaaatattgggtaccttaggccaggggtccccaatccctgggccatggaccagtaccaggtcacacagcaggaggtgagtggcaggtaagccagtgaagcttcatctgtatt

SEQ ID NO: 256046 - DNA, 598 bp, Homo sapiens
taacctgtggcccctgggccctgagtggctcaaggatggttttcagcagctctagtcactccctggagttgtgtggaaaattttgtgggtagcacatatgtgcattcttctgcacagagtaactttcattagaagacctgaaatacattcctccaaaataaagaacacctatttatctgttcctttcatttaaacatctgaggacacacagatctcatttatgagccctgattcctgcaacatacacaaaacagatttctatgagaaaaatcaatgatagcagtgattaaatcaaacacatttttgtttaaatgctagatttatttgagatataattgatgaaatagctataactacagtcccatttcacttgaggttcttgaagtgaagaactccataattttaccatgaatacccagtgattttaaatgcccaatagacaatagaagtgggtagagcaaaaggaaaataagaattttagggagcaraatattgggtaccttaggccaggggtccccaatccctgggccatggaccagtaccaggtcacacagcaggaggtgagtggcaggtaagccagtgaagcttcatctgtatt

SEQ ID NO: 256047 - DNA, 583 bp, Homo sapiens
tttatgcacgtagaaaaggtctcctgaccaaccatagaatctttaatctgtgtggagaagctgttcttttatggcagctaggctgtgagatttgatactacaggatatgctaaaaatgtgatgtagagaagaaaagtcccagatccacaacttctaacccaagcctttcaggggaagagggagatgaaggtaggagagacaagagacaagtattgtgttaaatctctgtgtggttatcgacctggagaggggaaatatatgaggcaggttcaaagggacttggagaaactgaygacttgggcctgtattcatctttggaggtctcagaggtcacctggcaaaaagtctcacacagtcttctgtgggtggctgcaccacgatcaatttagtaagcaagagagatgtggaaatttggcaagccagagagagcctggcattgtgcttcccagccaccttatcaggtggccttatggaagctcaagatcactatgtgcacacaaaaaggggaaggagtcaggcagacagctggcaggaagcgaacggcctgctgagactggctaccaggagtggcgctgagctgcag

SEQ ID NO: 256048 - DNA, 511 bp, Homo sapiens
ggcagctaggctgtgagatttgatactacaggatatgctaaaaatgtgatgtagagaagaaaagtcccagatccacaacttctaacccaagcctttcaggggaagagggagatgaaggtaggagagacaagagacaagtattgtgttaaatctctgtgtggttatcgacctggagaggggaaatatatgaggcaggttcaaagggacttggagaaactgatgacttgggcctgtattcatctttrgaggtctcagaggtcacctggcaaaaagtctcacacagtcttctgtgggtggctgcaccacgatcaatttagtaagcaagagagatgtggaaatttggcaagccagagagagcctggcattgtgcttcccagccaccttatcaggtggccttatggaagctcaagatcactatgtgcacacaaaaaggggaaggagtcaggcagacagctggcaggaagcgaacggcctgctgagactggctaccaggagtggcgctgagctgcag

SEQ ID NO: 256049 - DNA, 565 bp, Homo sapiens
ctggtaagttttttaatacctttagacaccaaatagtctcttgcctaagaggatacatacaaaaatgctctttaggctaacaagaggttattattacatcattaagaatattaagaaacattcaggagttatgatttattcattcagcacacacattgatcacttcctataaaataggtactatgcttggccctaartatatcacccatcggctaatggaacacaagcatacaaaataaaactttagtagatacagtttgacaaatccaattataaaagaatggaacaatggtaacacagacgaaggcatgattaaatatttttggagggatggaaagtgtggctgagttaggtcttcagtgaagaataagggctctcaatatgtatatgcatggtagggcacatggaataagcacctgcccaaacagagcagcataggatgcataagctcactgaagaatggaaaaggcagtaagtaattgaaggagcatcagaaaggttcctgaaaacatgaagagggtgatgggttgatttgtgtcataagtttaagtcctaacccccagtt

SEQ ID NO: 256050 - DNA, 604 bp, Homo sapiens
tgaattcatcttactgcaaagttgtaaatgacagtgctgtgctgtagtttggatgtttggcycccaaacctcatgttgatatgtgatccccagtgttggaggtggggcctggcgggaggtgtttgggtcatgggggaaggctcctcactaatggctttgtgctgtcctcgcagtaatgactgagttctcactttactggttcccatgagatccaattgttaaaaagagcctggcacctccctcccctcccttgcttcctccttcatcatttgagctcagcacaacggctctccttcactttccaccatgagtggaagcagcctgaggcctcaccagaagcagaggctgatgccatgcttcctgtacagcctacagaactgtgaaccaaatacacttcattttgttaaaataaattactcaacctcaggcattcctttatagcaatgtaaatggactgagatagacagtgagatatcaaaaagaaaaaaggcaagttttcctttgacgtcccactccacccatggtctttcccatagtcaacactttgatgtgcaaagttttgatatattctttaatttacattaaatatgtatgcactcctaat

SEQ ID NO: 256051 - DNA, 543 bp, Homo sapiens
tcacatatgagctacatagtccatagagtaggctaagtaggactttcagactgaatgagtattcaacatcacatttcaggagactgaacaagttcctcttgtgtcagtyaacaggatgcctttccccagtgcacttccatacctctgagaaactccaaaggtttgcatacttggattcattccacatgcatttattcagcatgtatgctgcacctggtatcaggctaggtattggaagcacaacaaagagtaagatagagtcctgaacacagagaccacatagtctactagaaaagaccaatgcataagcagacgatgatgacacagaggcaaatacattgcaaagggagcccaggatcctgacttccagaatggtggtagaaggagctccatgaacacacttcccaacaataactgaatgcaattataaaacaactatttaagttgtccagaaatgagtcatgcaaccgatgtagaaacgtttattcaggaaaatctactaaattgcagtaagaagagctggagtctgcaacatttgagcca

SEQ ID NO: 256052 - DNA, 543 bp, Homo sapiens
tcacatatgagctacatagtccatagagtaggctaagtaggactttcagactgaatgagtattcaacatcacatttcaggagactgaacaagttcctcttgtgtcagtcaacaggatgcctttccccagtgcacttccatacctctgagaaactccaaaggtttgcatacttggattcattccacatgcatttattcagcatgtatgctgcacctggtatcaggctaggtattggaagcacaacaaaragtaagatagagtcctgaacacagagaccacatagtctactagaaaagaccaatgcataagcagacgatgatgacacagaggcaaatacattgcaaagggagcccaggatcctgacttccagaatggtggtagaaggagctccatgaacacacttcccaacaataactgaatgcaattataaaacaactatttaagttgtccagaaatgagtcatgcaaccgatgtagaaacgtttattcaggaaaatctactaaattgcagtaagaagagctggagtctgcaacatttgagcca

SEQ ID NO: 256053 - DNA, 543 bp, Homo sapiens
tcacatatgagctacatagtccatagagtaggctaagtaggactttcagactgaatgagtattcaacatcacatttcaggagactgaacaagttcctcttgtgtcagtcaacaggatgcctttccccagtgcacttccatacctctgagaaactccaaaggtttgcatacttggattcattccacatgcatttattcagcatgtatgctgcacctggtatcaggctaggtattggaagcacaacaaagagtaagatagagtcctgaacacagagaccacatagtctactagaaaagaccaatgcataagcagacgatgatgacacagaggcaaatrcattgcaaagggagcccaggatcctgacttccagaatggtggtagaaggagctccatgaacacacttcccaacaataactgaatgcaattataaaacaactatttaagttgtccagaaatgagtcatgcaaccgatgtagaaacgtttattcaggaaaatctactaaattgcagtaagaagagctggagtctgcaacatttgagcca

SEQ ID NO: 256054 - DNA, 484 bp, Homo sapiens
atgtactcaagaaaaatcacagcataggtcatcaaaaaagttgtacatgaatgttcattacagcattatccataagagctaaaaagtggaaacaaccagaatttctattaastgacaaatgaataaataacataatggtatatttgtacagtggaatattatttgtccacaaaaagaatgaagtactgatatgtactacaacatggataaagcctgaaacattatgctaagtgtgagaagccagtcaccaaagaccatatgattgcattatgtaaaatattcagaacaggcaaataggtagacagaaagtaaattagtgattgcctatggctgggtgagtgtagagaggaggactaattattagtgggtatgaggtcttttatggggctaatgaaaatgttttgaaattagattgtggtgatggctgtccaactctgggaacataatagaatccattgaatgttacatttaagtgcatggattt

SEQ ID NO: 256055 - DNA, 553 bp, Homo sapiens
aaaatttggctgtttcccaaaatattaaatataaagtttccgtatgattccacaatttcattcctaggtatgtactcaagaaaaatcacagcataggtcatcaaaaaagttgtacatgaatgttcattacagcattatccataagagctaaaaagtggaaacaaccagaatttctattaactgacaaatgaataaataacataatggtatatttgtacagtggaatattatttgtccacaaaaagaatgaagtactgatatgtactacaacatggataaagcctgaaacattatgctaagtgtgagaagccagtcaccaaagaccatatgattgcattatgtaaaatattcagaacaggcaaataggtagacagaaagtawattagtgattgcctatggctgggtgagtgtagagaggaggactaattattagtgggtatgaggtcttttatggggctaatgaaaatgttttgaaattagattgtggtgatggctgtccaactctgggaacataatagaatccattgaatgttacatttaagtgcatggattt

SEQ ID NO: 256056 - DNA, 484 bp, Homo sapiens
atgtactcaagaaaaatcacagcataggtcatcaaaaaagttgtacatgaatgttcattacagcattatccataagagctaaaaagtggaaacaaccagaatttctattaactgacaaatgaataaataacataatggtatatttgtacagtggaatattatttgtccacaaaaagaatgaagtactgatatgtactacaacatggataaagcctgaaacattatgctaagtgtgagaagccagtcaccaaagaccatatgattgcattatgtaaaatattcagaacaggcaaataggtagacagaaagtaaattagtgattgcctatggctgggtgagtgtagagaggaggactaattattagtgggtatgaggtcttttayggggctaatgaaaatgttttgaaattagattgtggtgatggctgtccaactctgggaacataatagaatccattgaatgttacatttaagtgcatggattt

SEQ ID NO: 256057 - DNA, 597 bp, Homo sapiens
atgttgggaagatgatcaatgggagaagctctaggataaattacttctgcttgaaaaatatattgcctacctgggtaaaaatgtaattgtgactgtagaaatggaagaaatcaattataaaaataatgattgcctcagattgtttataatgaattcagtatttttttatttgctaagttcgtragcaaactggaaagatagactgagaggagaaatggagtacatgaaagtttaaggatgatcaaatgaactaattttcttctttaagttaatgttttgaatgtacataaaggtaaatgaattatgttcaaatatactgatacattttcacaaacagaaaatacccatccacccatatcaagtcactgaacattaccagcatctcagaaccttgccattgggcccctttttaggctgccatcccccaccttccatcccatatgactgtcttgacttttaacctcatacatttattttgaagctggcattattttggtggggggaggggacaaatgcaggcagggtaaaaggataaaatgagtattcagatcattcagaataaaaaatcctctagagaacaaaaaaaaaaatgaagaa

SEQ ID NO: 256058 - DNA, 609 bp, Homo sapiens
cagtcagagaagaaccactaaggtatatataacgtgctaatatatacgctattgattatataatacttaataatattagatacaaagccagatgatgtgtaatatgtatataaagggatttattccagggacttgacctcacacagctgtgagagctagttaagcacttttggtgaggccgccatcttcatgcctgatctggacattgacttttgcagggaaggcaattgggaaggacagataaatatatatatatatatatatatatatatatatatatatatatatatatagaragagagagagagagagagagagagagaggatggagctggaacccacgtacatgcattggaatccatgaggatggactggaccctgggtcagtctctcgataactctaacttcagttttgtaggtgtccttcatgagaaaatggggctctctcagagaactaaaacatacaccttgaccaaaacttgaagaggatgagggagaaaccagggtgaggtgggacaactgcaggcccagctgctgctcattccaaagagatgcgctagcagggcagcaaaaacatgtgggcaacaggggtccctggtacacatatgg

SEQ ID NO: 256059 - DNA, 520 bp, Homo sapiens
gggacccagagggtttgtgtgggcagctaatggggcaggacgtgctgatttgcagcatctgcagtgtgatttctgcactgggatcagacactytaggtttccatcctagagttgttttcagatcagtcttcgaagtgaaaccagcagcctttgccactctctggtcctatcctacgtctttatttcccgtttcccacattgtatgattattagtgtatgtctgcttttatccactagattttcataactttaagggcagagattgtggtgtgcctgcctgccttcctgcctgtcttcctcccttcctcccttcctcctttcctcccttctttccttctctccttctctccttctcgcctgccttcctttgttttaaaaccactgtacacattgtctacttgcatgtctggcacagaagaaactcttaataggtttcttgaataaatgaatgaatgattggtgacatgtgttatatataaatatacacatatgtgtacatattgtatataattatatgtat

SEQ ID NO: 256060 - DNA, 520 bp, Homo sapiens
gggacccagagggtttgtgtgggcagctaatggggcaggacgtgctgatttgcagcatctgcagtgtgatttctgcactgggatcagacactctaggtttccatcctagagttgttttcagatcagtcttcgaagtgaaaccagcagcctttgccactctctggtcctatcytacgtctttatttcccgtttcccacattgtatgattattagtgtatgtctgcttttatccactagattttcataactttaagggcagagattgtggtgtgcctgcctgccttcctgcctgtcttcctcccttcctcccttcctcctttcctcccttctttccttctctccttctctccttctcgcctgccttcctttgttttaaaaccactgtacacattgtctacttgcatgtctggcacagaagaaactcttaataggtttcttgaataaatgaatgaatgattggtgacatgtgttatatataaatatacacatatgtgtacatattgtatataattatatgtat

SEQ ID NO: 256061 - DNA, 575 bp, Homo sapiens
ctgtgtaaattatatatttatatgtagyaaattttcaacatttaatcattacttttagataaattttatatacaatttcaaacataataaattaacattaactttataaatattggtcaggtgtttataaatcgattcaggaaaacttaatttgatgtattgctgtaaatggtctctagataaaattgtgaaacactgtatttaccaaattacattctttaatcttagatgaaaaagatttatttcctgatctgagtttacaaataataattagaggaggccttattatgaatttaataaacgttgaattatgcataattatagagccaaggctagagacaacttcagaaatattttcttccccaaaacagaggcagccatactattggagacagtagaataaagatattgcccctcctcttctccatgaaagtaaacacaagatatggagaatgactgctgagtgcagtggcaattaagccatgaaaaagaagtctgagaggcagagcctgtagacagctgagccttctgaagcaggtggctacactgtgcactgaagcaaattacctcttttt

SEQ ID NO: 256062 - DNA, 575 bp, Homo sapiens
ctgtgtaaattatatatttatatgtagtaaattttcaacatttaatcattacttttagataaattttatatacaatttcaaacataataaattaacattaactttataaatattggtcaggtgtttataaatcgattcaggaaaacttaatttgatgtattgctgtaaatggtctctagataaaattgtgaaacactgtatttaccaaattacattctttaatcttagatgaaaaagatttatttcctgatctgagtttacaaataataattagaggaggccttattatgaatttaataaacgttgaattatgcataattatagagccaaggctagagacaactkcagaaatattttcttccccaaaacagaggcagccatactattggagacagtagaataaagatattgcccctcctcttctccatgaaagtaaacacaagatatggagaatgactgctgagtgcagtggcaattaagccatgaaaaagaagtctgagaggcagagcctgtagacagctgagccttctgaagcaggtggctacactgtgcactgaagcaaattacctcttttt

SEQ ID NO: 256063 - DNA, 568 bp, Homo sapiens
tttcatctatgttaaatgtaaatattaatgtgctgtacagttgcacttctgagttacagatcaacagattttatatttagaaatttcccacctgtgttcatttgctgttccttaaataggaacattttttaaaaaaattgctaaaccacaaggcatggaggcagtagtatacagacagcagctgagtaattatcaaggcaaaatagctcctttcacgtggactgtctttctggatttgagaaaagaatgagacatcaatgagaggccaatctaaaaaagtaccataacaaatgctatgcatccattcttaatcatttgcattggtaataaccagaattaaaggaaatttcatgaataaaattgcttctcctcatgaagattttaarttatgttggaaaattacctttgatatgtttaaaatatgagtgacattttgcataaattctacgtgcaacattgctagcttacgccagtcccttgttacaaacaaggtcaaaaggatatttaaaaatcataactgaatgttgacaaaatgacgatttttcctctaatgtgaattgaggataat

SEQ ID NO: 256064 - DNA, 526 bp, Homo sapiens
gttacttaattaagacaagggaataaagaagcaaaaaattcaccacatggtacatgtttggagccagcattttttggttaccatgaaagtcaaaggagacaaaagccatgcccaggataatgagctgccacaggccctataatgccaatagatttagtccttgaggttttctcttctagtgatagccctctaccatcaattaagaaattgggaaacatctatttgggaaggaaaagaacaaaattggctttagaaacttcaattctgggaggaaaaaaggttaaattatttacttagggttttgtttgtttgtttgtttgtttaatccacagggacttattcttgtttttctgtcatggctaaaagttcctaatactcactacrtgcatactggactcataaatctcaactataatctgtttgtcaagaatttgcactggataaaaatattttttattttggtcagttacactgtccggaaaatctgtgatttaaaataaataaataatacagacttaataatcat

SEQ ID NO: 256065 - DNA, 650 bp, Homo sapiens
caggccttgacaaatttttctgtaaaagcccagatagtaaacatttcagcctttacaagaaagaggcaaaatcaaggatattctgtgtgtatttatataacaatacaaaaataaatttctacagtaattttgttgaacaacttcaagatatcataatcgagtacagtgtcttttacaatacaggtctattagtgagaagaatggaataatttttttcaggctataacatttcacttcattaggttgtaaagtgagcgctccctctcatcaaattgattgaaaatgttcatctgtaaacatgtgccttgaaggccacagaatacaggcagccatctgacctctgctctgaagcaggaatgctcaacgtttcgtttttttcatagtaattattggggaagatcgtcatgaatgcagatttctgaattccagagagaaggttttgactttgtttgcttgaaatagggcccagtaaattgcattgtsagagagctgcccagctgattctggtatctgtggattcacaccacgctttaaggaagacacagtcagagtgaaggcctgagactggccttggagttcctgtgaagggacaagaagagagagcaggtgttcagttgtggatgtcttgaggttaaagtttcagggtcaca

SEQ ID NO: 256066 - DNA, 589 bp, Homo sapiens
aacaccagtgacacgaagtctgtagtgcaggcaaccactttgaagaatggggcaagagtaagagagaaaacatgccagttgtgtgtcttggttcttgggaggaggctggcaccatcagtaggtgatgactgcagaggaaaagggactgtttggaaagagcagtgctcaggtatgctatgcctccactgcaggttgcattaagctcatagctgaactacccaggaggttaacatttgcttggaagaaggtggccacattgggctggagcagggacatcacagagtgccccagggtgcctgacaaggcccacaccrtgaccatgaggtgggccttgctaaatgaggtagctcagtccttactgaacatcaccttccttatcatcagcacaggccctggagccagatagcctgtgtgagagtcctggagccactgcttatttgctgtgaaacaccatgcaaggttctcaacctcgctgggcctgttttctccttgtaaaatggagataataacaatgctgacatcatagggatggtgtgataatgagatgagagtgtaagcaaagtgctttgaacagtggctggcagctggt

SEQ ID NO: 256067 - DNA, 634 bp, Homo sapiens
gctggtaaaatattatttctgggagtgtttgtgagggtgtctccagaagggattggcatgtgaataagtagaatgagtaaagaagatctcccctcaccaatgtggcgggcatcacccaatcagctgggtctggatagaataaaaaggygaaggaagagtgaattctctctcttcttgagttgtgacatccatcatctcttgccttcagacatcagagctctaggttttcagaccttcaaactcaaactgaaatacatcactggccttcctggttctttagcttacacatagaagattgtgggactagcttacacatagaagattgtagctacgtgagccaattcccataataaatttcctcttatacatctgtatttctcctattggttttgtttctctggagaacccccaatacagtgctcaaggcttagttcctcacccttgaagaactgacattaataatcaatgtacttacataagatatggttgaaaatattgaaagcctctatatcttgactcaatttagagtctccaaacctcttactaatctttggcaagaaagtgaggtcagcactcaaggatccccgaataacctctctcctatagctgggcagcactgcggaacctatttttg

SEQ ID NO: 256068 - DNA, 634 bp, Homo sapiens
gttggggtcaaatttcaacataagattgggaaaggtcaaacaaaccaaactataacattgcttgtgtggttgctctgcactaacatgcctgccatccactgagaggcaaggcccgaatgctctcagtcccacagacactgaaggaatcttcatttaggggactgatacctttaagaccactgggatatagctcggctggggctctggcaggtgtccagtgccacaggctgggagggctagacatacgggaaagtaatttggaccatattcccccaggaagaaatccatgatactgggcaatcttgtgagcaggtggaaggatagctggctccagtgtggctcccattttagaaaggatggggccttggcyggacatatgaatcactgatggagcttttaaaaaatacacatgcctgagagattctgaaaaggaaggtctgggatgggtctagaatctttgaatttttaaaagctcagtgggtaattctagattgaaaattgaattttagtggttagctgcaccccctttagccagaaaactgatcctatggtattgttcatttcccaagccagagctagtgctctttggggagcagcaggcagagttctccatggcagtggttgaggagcaggg

SEQ ID NO: 256069 - DNA, 593 bp, Homo sapiens
gcttttaaaaaatacacatgcctgagagattctgaaaaggaaggtctgggatgggtctagaatctttgaatttttaaaagctcagtgggtaattctagattgaaaattgaattttagtggttagctgcaccccctttagccagaaaactgatcctatggtattgttcatttcccaagccagagctagtgctctttggggagcagcaggcagagttctccatggcagtggttgaggagcaggggcagtgcagattttcccaaaggccatttccagcacaaagcagtcccagggccacagtgcatgcatggtggcktggagcctttggtcaagcaaggaattggccctatgtgtgttaagttgctcttgttagagtccaagagaagggctctttgagggatgagatttcacagaccagagaaaaaaaatttctgtattccatcttttgcactgtctttgggagaggcttagaggcaaaaggaatatcgagggaagcagagactagcaatgtgggcagtggagcaggctgtgggttaaatggtgtctccccaaaagatatgttggagtcctaacccctagcatctgtgaatgtgac

SEQ ID NO: 256070 - DNA, 618 bp, Homo sapiens
gtgggcagtggagcaggctgtgggttaaatggtgtctccccaaaagatatgttggagtcctaacccctagcatctgtgaatgtgacattactcagaaatagagattttgcaaaggtaataaagttaagatgaggtcagtagggtgggtcctaatccaatataaaagttgttcttataataaaggaagaagacagggacacgcagggagtggagggccatgtgaccatggatgcagagctagagtgctgcatccacaagccagggagtgccaggactgctgacaaacatgctggggaaggcaaggaaggattckcccctgtgggtttcagatggagcttggctctgtcatcccttttatttgtgacatctagcctcaaaactgtgagagaaaacatttctgttattgtaagccacctaattggtggtcctttgttatgtcagccttgaaaatgaatacagggcattttttttttagtccatttctgttatttgggtgaggcaacgtggggaccagctggccgtgctctgtaaggagtcccaattctgctcaggaactattgccaacctcattagcagaggaactaggggcctgggacatgggatcacatcccaaaattg

SEQ ID NO: 256071 - DNA, 529 bp, Homo sapiens
taattatattaatttaatagatcaaattattttactttttgtggaattttcttcatgtttccagttatctttattttttggtgcattgactagtcatgtcctttgagctaaagcttttgtgtattttttatcaatttaaataaccttttacaaaataaaaatatcaactttttcccatccctcttgctgtatgtgttttttttttaagtctgtttcataacctttgctgtagtggaagttgttcatatttatatatgaatttttctgtacaatgtagtggttgagtacagtttggaatcagcagggatgaatatgaactcaaatcaattaggtaaccttggactaatcacttaacctttcttaatatttttatcttgtttgtaaaatagaaataataatattattttcatcatgagggatgtggatattaaatgaggtaatgwtatggacaggaggcagaggcagaaaagggcacggtccctggtgaagccccaccctgaagcctagacccaaggcccaaagtaagagc

SEQ ID NO: 256072 - DNA, 574 bp, Homo sapiens
tgaaaagaatactcttgggtgagagaagtatcaagaggaagctaagcccagatgaatgcccaatatttactcttcccttctggtccactgcagagcgtatccacaagatctggaactgattcacacattaaatttgacaagcagtgttgcctttctttttaattcagccttctccctgaacttattccttctaggatctctccagtcttacaaggctcaccaaaatggaaccattgctactctaagatggaagtacatgtcttcccctctacaaagttacagaagctgccacatatttgcccaaatttatgrccttttctcctttcagtattagtcttgggtcagcactggattgactaaatataactccacatttgttagttctaagactttattgtcatgaacaccatccaatcagtggaactctttgtatttctaattttattgaaggccactgtcggataatgtgagttcagcactttaacctgaaaagaagtcaaagaagtctgagtggtttgaagggtctatgtaggggataacttccagggtgcaggattccagaggtccaagacag

SEQ ID NO: 256073 - DNA, 210 bp, Homo sapiens
gggaaccttttaacttatgyttatttcttaacagttacgtattgaacatttatggaataaggaagtaaaccaggcacttgtattgttcctaactgaaaatcagtataacttaagcttggaggggctaaatgctctggcaagaccatgcattcattaagtgctaaatttggacctaaaatgacacctagaatctggttctttctactgtat

SEQ ID NO: 256074 - DNA, 616 bp, Homo sapiens
tattaaatgcaataaaataaggaaaaacaaaaccaaaacattgagaagacctggaagtaggtaagagacaaagatatgcatcctctagtactgttcttcgaactaggaatacatttgtctttcttgaagcatgaatgaaattttaaaaacttctcattgtgagcataataaaatcactgaattttctccttttatagctgaacttccttgtttattttacactttattttacttgtgacccttaatataaggtatctccaattttttcataaaaagaggtgtgcagtataagtgaatgaatgtatttgggtgaacctggtgtcagccgttaccctgtccactgtaggttgactccacataggccccctgtgaaccagtattccaagctagataggtcattttcaagttcatacatagcatttaataacaattaacaatttcatatttttcactagtgatttggggttcctccaggagggtattacattgtacccagaaaagtcattctctctccycctttcctccttctcacaggttcaaaatcatttccattttgttaggcgacaaacacctgttcacacaggcacaggagccttgtcttctgcctcagagtaga

SEQ ID NO: 256075 - DNA, 571 bp, Homo sapiens
gcggggggccccataagtgtttgttggctgcctccaactctcaaccactggaagctaacattctttctggtttgttcggtttagcaagtgcgtgaagtacctcttgaagattgactctgcggtgctcactcactcacacactgacatgtaatcaaatgttttactgcagttccattatcttttcatcaacacattttgaaaaaaaatgactgacaccaccaagttgattcagttgtggacaaacaatcttcaaagcagagttatctcttcctgatctagctcaatagtttacaatattaacttcataaattaaattacttctgcttcagactgacttttcttgaaagcacatattmttctctttctttttacatactcaatcatgaattaaagtaggtaacacagattgtttgctacaggtcaatttctctataaaactacaaaagggaagatcagaaagaagagggtgaagactgtagattgctaaaataaaagctttgtaaagaaaatcttaaactacttattcctttggctcccaggaaatcatattctcttctctttctaagttatt

SEQ ID NO: 256076 - DNA, 613 bp, Homo sapiens
tcattgcagtattactcacagtagccaagatatggaattaaactaaatgttcatcagtggatgaatggataaagaaaaagtggtatatacgtacacacacagtgaaatactattcagcctttaaaaagaagaaaattctgtcatttttgacaacatgggtgaacctgaaggacaytgggctaagtgaaataagcagacacagaaagacaaatgccacatgatctcacttatctttataatctaagagttgaagtcacagaagcagagagcctagagtggtggtcacaggggctggaggggggaaggggaagaaggggaagggaatggggaattgctgggcaaagggtacaaagattcagataggcaggaagagtaagttttgccatatcttgtacagccaggtgactataatcaatagtaagtattgtatatttcaaaataactaagagattttagataactaatttcagatgtctcaccataaaaatgataggtaatgaggtgatggatatgttaattagcttggtttaattatttcccattatatatatataaaacaaaacatcacaatgtactccataaatgtatacaattatgacttgtgaatggaaaa

SEQ ID NO: 256077 - DNA, 613 bp, Homo sapiens
tcattgcagtattactcacagtagccaagatatggaattaaactaaatgttcatcagtggatgaatggataaagaaaaagtggtatatacgtacacacacagtgaaatactattcagcctttaaaaagaagaaaattctgtcatttttgacaacatgggtgaacctgaaggacattgggctaagtgaaataagcagacacagaaagacaaatgccacatgatctcacttatctttataatctaagagttgaagtcacagaagcagagagcctagagtggtggtcacaggggctggaggggggaaggggaagaaggggaagggaatggggaattgctgggcaaagggtacaaagattcagataggcaggaagagtaagttttgccatatcttrtacagccaggtgactataatcaatagtaagtattgtatatttcaaaataactaagagattttagataactaatttcagatgtctcaccataaaaatgataggtaatgaggtgatggatatgttaattagcttggtttaattatttcccattatatatatataaaacaaaacatcacaatgtactccataaatgtatacaattatgacttgtgaatggaaaa

SEQ ID NO: 256078 - DNA, 530 bp, Homo sapiens
actaatttcagatgtctcaccataaaaatgataggtaatgaggtgatggatatgttaattagcttggtttaattatttcccattatatatatataaaacaaaacatcacaatgtactccataaatgtatacaattatgacttgtgaatggaaaataatacagataaataaaaaagtctgacatgtagaagagaatggatrttagtggggaaaaaagagaatagtgtaagaaggttttccacatatgtatttatgactgcctgctcactcaaaggattctgatgaatttattaattttaaaaattaaccacctaattgaatctcacaccggtttttatgactttttctcaccacaatttgactgtaagcatctgagtataatttttatattatgcagaaatggttgaatttttaagcatctatttctttttatcatttgctttcctctgtccactcagttaatttagcctctttgcaagcatgtgaatttttcaggccataatggtagcatagattatgtgaatgatgaag

SEQ ID NO: 256079 - DNA, 480 bp, Homo sapiens
gaaattgccaggcaatgaatcatgaatacatcactaagagcttatactgcttcgctaaaatatgctttgctcttttctgttactagtacctgagatcaagtgttgctttaatgccatttcactatcttaaaatagaagaaatatattagaacattgacaaaaatatgttccatttccagatgagctactatgattttggactagtcactaaaaattctccttccatctctacatttcaaatatgaaaatagtaataattctcctgctccagctgaatgatgtgtctaggtaaatagtaacttgaagaactaggaaygcctttgatagaattttaaagaaacaagttaatatagactattctgccccggaaagtgtaggatctgagttcttacctctacaaacaatttggattaaaaaatacaaaattattggacccatgagacgtaatgggaggataataacaagacgagaggagagatt

SEQ ID NO: 256080 - DNA, 585 bp, Homo sapiens
gtagagagaaggtacaaaggtcaggggaaggcacagagaaagtccctaacccaactggggttgaggtgtgattgggagagcaggaaggcacagattttatagatgccaatatcactgttgagaattaaaagatgaggcaaactttgccagattgagagaggattgttgatattccaggaaggcctaacactaaaaagaacatggaattttcaaataatcacatacccttcagcacaggtggaacataaggtttagcagagaagaaagtagaaagtgttgaggagggtaaaaggaatagttagggattagacacaaaggacaaggactgggacgtacttttgagtttacagggcattttccctcactatatttggcttgatgttcacagaagcttataaaaacatgattktccctattcaaaaataaacaaggatcaaggctgagagaggttgagtcatttacccaatgtcacaaagctgggaattaggcctgggtctgtctgctttaaagaccacagtaggaatatagcatttactggcttctcagtcaaggagtttctatggtactgggctcagtcactcatga

SEQ ID NO: 256081 - DNA, 563 bp, Homo sapiens
tggaaggaaacagttaaactgagaagaaatttaaaatgaaaataaaataactaaaggaatacatacaaatcacttttaataaaatgtgttttgtatatatttataaaattatactgccaattgtagaaaacagagaataaaaaatagtagaaaaaaagagaaaaattctgctatttccctaaacaaccacgatttgtatttcgatgtacttccttccagtcatttttctttaracatttttacgtaattgtgatcataatgtggaaaattctgttccattttttcttctagtattttagaataaatatttgcaatgctacataatcagtacttataaataattcctttcaagcgtagtttaatgtcattggaaaatagcttactgttacttatctttgaaaataaatagttagtgtatattttccaaatgtataagattgtctctttgttgtatttaaagatttttataaccaaagaaacaactttcctcttaaagttaagggatatttaaacatgaatatattagaaagtttaattgataaatgacataaacacaaattgtg

SEQ ID NO: 256082 - DNA, 523 bp, Homo sapiens
tatatttatttatatacttatttatatacctatatacttatataagtatatattttatatatttatacatatgtatatattctgtagtatattagataggtagatagacataagatagatagatatcttgtaaaatacataacatacacacaggttgagcattccawatatgaaaatgtaaaatatgctctgaaatagaaaaattcttcagtgccaccaagatgctcaaaggaaatgttcatcagagcattttggatttcagatttgcggatttgagatgctctgattccaagcattttgggggatactcaacccgtattgtgtgtgtacacatacatacaatatgtctaactgtatcttatataatgtatatatatgggatctatacatgtttttctccctctgtctctctacatatatacatggagagagattatgaggaattggccatgcaattatggaggctgagaactcccacgatctgccatctgtgagctgaggacccagaaaagttggtggagta

SEQ ID NO: 256083 - DNA, 523 bp, Homo sapiens
tatatttatttatatacttatttatatacctatatacttatataagtatatattttatatatttatacatatgtatatattctgtagtatattagataggtagatagacataagatagatagatatcttgtaaaatacataacatacacacaggttgagcattccaaatatgaaaatgtaaaatatgctctgaaatagaaaaattcttcagtgccaccaagatgctcaaaggaaatgttcatcagagcattttggatttcagatttkcggatttgagatgctctgattccaagcattttgggggatactcaacccgtattgtgtgtgtacacatacatacaatatgtctaactgtatcttatataatgtatatatatgggatctatacatgtttttctccctctgtctctctacatatatacatggagagagattatgaggaattggccatgcaattatggaggctgagaactcccacgatctgccatctgtgagctgaggacccagaaaagttggtggagta

SEQ ID NO: 256084 - DNA, 630 bp, Homo sapiens
gtttgagaagtggtgaatgctaacacatctgtatcaatgcaagggcctcctcataattctattccctctatttctgctcttccaaaatcagagtggccctctggccaccctctcttcaaactccaccactgacctgtgggaggatcatgcaaaagagatgatcaaatctggcaagagataaacaacccctgccataagatcagagatcccttccatattaccttttggttttcctgaagcctcaaaccccatagtcccctgtacttgagtcttgttcgcctctgagctcagcatggggctcaaggcttgtttgactcttaagggtggaatarctatcaaatcgtcattttcttatttttccccgttgatgaatgaacaagagttttcctttgcctgttttgtctatgaagatttacctgatttctcaaccctaggatcccatctcatccttgttgaatgccctctttttatttctgcccaaacaagtcacccagaaagaagctgtctataaataaatagctattcataattttaatataaatttaaaacttaaaaatatctgaacactaaataacaaccctaaggaagagtcaactacacctcctggttctagctgtcttttactaacta

SEQ ID NO: 256085 - DNA, 539 bp, Homo sapiens
aaaatcatgaataacatagcatagaagcaaaaccaagggatcacatagccattaagtaaaagagagtatggcctgggtttctgacacctttcccatgtgcatttacttgtgctgcatttaccattcatggtggctgtgcagactctgagtctttgacagcctcttcccatctctcacccctgtcactccaacacccatacacacaaacatatattgtcaccattttctggaactaatttgaaattggtctgtttctctttgactaggataaattataatcatmtgttttccaccatactatttatgtaaagtagaaaaaaatgactctcaaggtgaaaatgcttatgatgtagttagtttttacaagacacttagatgatgaaggttctatgtgactgttaaagctttttgtaatcctaaatttttaatattcagattattattctctctgaattaaaacttgtaatttttatggaaataaagaagaaaataaagtaatagctaaaagtgtatgtttggcaaagaataacataaaaata

SEQ ID NO: 256086 - DNA, 597 bp, Homo sapiens
ctgatttaggcaaaaaagagaatttgtggaaggaaaatacagagcatagggtttatgtagagaggcagtaccactctgaaaagataaagcctggcagactgctgaagggagtaagccagctgtaccctgagagttctgcattgggtttttatggtgttggactttttttgaagttcatgccttctgtctcaagcctctgccttttttctttgcctagttttcccaattctgccttaagtcccctcttctccttaccagcatgcatctagctacattctgacaggttagctgcagagtgaatgattactgggcawcctagtgggaattccttccggcataggtattttccctcctctttgctcatatccagcatgcatgttttgggtggtccctggggtatgatattttccagacctcccttttctcaggggctcacctctcttgctcatgtctggctgtctgcgtactctaacagaatacttaagtcatatacattaattatgtactttttaatctccctgactaacctgtatgatccttgaatgcagagacagtatcatatttgcctttgccttttcatacccattgttttcctaa

SEQ ID NO: 256087 - DNA, 511 bp, Homo sapiens
tacctatggcctgcccctccccgattctgagcccataaaagccccagactcaaccatattagagggacttttctgcctttgggtagggggaccacccccatgtcccctctctgctgaaagctattttatcactcaataaaactccctgccttattcattcttcaattgtcagcacctcctcattcttcttgggtgtgggacaagaactcaggaattggtgtgcaagccagacttggccctggtaggatgagtaggtgggccatttcctgcagcaggcagcattgccamgggagggccaggtggggtgtcactggctggaggtccccggtttgcaaagtgaccaagaagaaaatctcgtgtcaatatctacacagagaacaaataatatctggggggatattttcagtagaaaacattagaattttctgagctcagccactcaactgagtaattataaacattttttttatgtaaccagcatgtattgtattaggtattgtaggaaaccaaa

SEQ ID NO: 256088 - DNA, 511 bp, Homo sapiens
tacctatggcctgcccctccccgattctgagcccataaaagccccagactcaaccatattagagggacttttctgcctttgggtagggggaccacccccatgtcccctctctgctgaaagctattttatcactcaataaaactccctgccttattcattcttcaattgtcagcacctcctcattcttcttgggtgtgggacaagaactcaggaattggtgtgcaagccagacttggccctggtaggatgagtaggtgggccatttcctgcagcaggcagcattgccaagggagggccaggtggggtgtcactggctggaggtccccggtttgcaaagtgaccaagaagaaaatctcgtgtcaatatctacacagagaacaaataatatctggggggatattttcagtagaaaacattagaattttctgagctcagccactcaactgagtaattataaacattttttttatgtaamcagcatgtattgtattaggtattgtaggaaaccaaa

SEQ ID NO: 256089 - DNA, 614 bp, Homo sapiens
atcttctgaacccttcctgtgggaatgagtaagtctaaagtgactaatccactacagcatctmaatctccctaagcctttggatcccttcctctccattaaactgagaaagaccaggcatttctagcttactcacagcgggccatctttcaatccatatttcagccaaccaagcaaataaactgttagaaacttttttttaactccccaagctgcagcattaaatgcagagtccctacttagtgggctcaaatcaataaattcagcctgatccaacactatgtttcttccaccattatcccacacccttaaaatccattcccatacctgttctccatatttctgtatatataaattacaaaactcaagcagtacttttcaagtgtagcacatgtcctcatgggtcacactcaacctcacctctaggttcctgctgggactttagttataagtttagaagcaaataggggtgttgggggttgttcttgcagagaatcaacattatcttgcctggcaaatgcctcaggggaggtcatcactgttgcttcaggtagcacagagtttatctcctcagacaaaggtggaaatgctgatggcagcatgtgttggggaggg

SEQ ID NO: 256090 - DNA, 442 bp, Homo sapiens
ttcttgcctctcacaagtggcrtatcaggatcgtcaaatgcatttatttttcataactctctgaacagttcatgccaaggactatcagtgttctctatattattagaagtagagtccttagcatttttgggtttaatcatattaagcagccaactccagaaacccccaagccaatgaaagaacaccattcttaatattctgttcctctagagccagtcctggtatgaaaatcagtattggttagggttctctagagggacagaactcatatatatatatatggatacaattatagaatatgaaaataatcagtttaaaatatttaagaaataaagatggcattaaaatatgacaaagaaaaactcgattgacaaaattgacaagacatttgaaaatgaaacctaagagacactcagaaaaaaatcccaaatattgtagtaaa

SEQ ID NO: 256091 - DNA, 591 bp, Homo sapiens
tcttgtcattcttaagtgtcactctgatgtggctaggtttgaatccctttttatttattcagcttagaatccactgagctttctatatattagggctaatatctacatcagtgctgaaaattctcatcatgtatctctgctctccttctttatgctgtatcttcttctggaatttccatgaggcctatcccagacgtattcctccagcttctgcatcacctgagctctctcacatagttcctccttccttgtcatttttgatgccacttaagtaattttctcacctctgcttcctgcccaattttctcttttcatctctttctaaattctagattagtatatccaattagtttttactacaatatttgggatttttttctgagtgtctcttargtttcattttcaaatgtcttgtcaattttgtcaatcgagtttttctttgtcatattttaatgccatcttctatttcttattttaaactgattattttcatattctataattgtatccttttaataattttcattcagtaaattattaaataataatttaataaatccaagcaccttccttgtaccaggctcttgtcta

SEQ ID NO: 256092 - DNA, 581 bp, Homo sapiens
catgcttagaaatcaagggaaggaaatcaggccaacattctgagattattgcagatggaaaaggatttaaactgctggctccaagaagaaagctcacagcattagtttactccagaaatgactattagatttttcccttcatagaaagccctagagggcaaaacttatctagactttcttattattatcttccaggtctctttaggcaacacagtttccaatcaatgagtcctgagacctaaatccccatagacagatttggtagaatgagtgaggagggttggtgctcaatgcctccactgtgaatccactttctacccagaatatggcttccacctacagacattgtggacccacaatcagtgttatctctgactgctctaaccagtgatgaaaaaccatatcaaatcatgattacaaagcaaaacyagtctttgagattttggtttatggatgtcttaatatgaattccccttgaaatgaccattgttttccattcgagttgaaatgatttccaaccaacctaaaaacctacaacataaaacaccctcattgcatatttcctttctggagtttagttt

SEQ ID NO: 256093 - DNA, 525 bp, Homo sapiens
tgtttatatataataaatatttatctaatttgtctaaacactcctactcaactaatacatatcatgttgttagaaagagacagaaaacactgtaggaaaatacactacagatataaataggctaaatacaaaaatgcaatgaaccacacttaaacttccatttgatcacgatacgttaattttttgatgcatcattggattggttgtttggaaggaatatatatattatatatattcaaacatatatatgacttcactttttggatttccatctgaaatccactgagcctggtagttcagtgttggctatattataggaagatttttatcaaacatggaactctatatttattggaatttttcagtkcagataagaattacaaatattaatttgaactgaaattaatctgatctgaatgaacataatttttccatgatatttggaatctctggttcatttatgatatcttcttctgaattttgtaacttccaaatgcttttttgaagaattgtacaaagggattt

SEQ ID NO: 256094 - DNA, 572 bp, Homo sapiens
actgcctttactactggtgttttccatcaagagcttgctctccagttgtgtcaaaactgtaataattgttttatatagcagagaataccctgggaaaccactaaaggcacagagctattaagcttccagagtgtacagagagggttgctgcaagtgtccgtgaagcttggttgtcactgcagagagccctgaagttcagccatatggcaggctctgcagcagtcattggttctgtgccttactatgccctttcagagagtagaggatctccttccctagccttggattgtaacctaggacattggtcccagaatagttctctgaatactaatgcttaatgtgtgtgtgtgtgtgtgtgtgtgtgatatggtttggctgtgtcctcacccaaatttcatcttgaattcctgcgtgttgtgggagggacctggggggaggtaattgaatcatgggggcaggtttttcccatgttgttctcatgawtgttagtcagtctcacgagatttgatggttttaaaaaggggagtttccctgcacaatctctcttctcttgtctgctgccatgtgagatg

SEQ ID NO: 256095 - DNA, 609 bp, Homo sapiens
aagcctccacatatcaactgattcagatgtatctaatttgatggggccatctcaggatgaagagttttcgttttttacttccttgatgctaaggaaagaaacaaaaagtttcagtcctttaaatacgtagccatttatctcaatataatttaaacggttcccataggaaataaatgaaagaggaagattttaaaaatctcaactgttttaaaacaagatgatatttttgtcaggaaaagtagcaaagaagtcttaaatccctagccttcgtgaagaaatataaagttgcttttatttctactggcattttagtgagcaaactctctccactttaaactggagatgacgatttgtcttgaatttgagctggaaatgagataacaaatattgcctaaggctttatgggatgccttttatatctgaattagaatagacagtcagaaactattgcaaattctttattattttgtttttaagcccccaaaatcaaaagcaatgcrtataggcaaagtacatttaaaaggttagcattataccacaaaggtttaatctatatctttctctatatttataaatttatataggaaataaacaagaatctcccttgtc

SEQ ID NO: 256096 - DNA, 591 bp, Homo sapiens
gaagcagcaaacaggatacaattttttcaaatatctaccatgttgccttgataatatcatgtcttgttggggcattgcatatctaacataacaaagtgatctgatatgaattgacatgacattatgctggtagacactactgtcaaagatgtgaaatgatagtttggataatatatcaagctgcaaagttaattaggccacattcattgggactttgccttggaagaaaacaatctatcccttatacctatacagcctctctgacaggatacttgaagaatggtaaaagtgcaatacttatatctactgaagactcatgggagatttatttttttaaagaaaattctaacaacactactttattttcctcccttcaatttgatcatgacttcaaccgatgatagtgaagtttcttgtagggggaaaagttgtagaaaatggagattctcctaataaaaattaaggtgaaatttgatgttaataaatagaggagtagagaagagccaggattctaggacacagtgtgatgtggagtrttacactacttaaagagggatacttgatgaggattacatagatttgaacacaacc

SEQ ID NO: 256097 - DNA, 540 bp, Homo sapiens
tgtaacaaacctgcacattgtgcacatgtaccctataacttaaagtataataataataataaaaagaaaacttttcttcagagtatactacaggaagacaatattaccatgtttaacactaattgcatgttacaaaataaacaatccrttatagtaaagctgaagcagagattgactttgatttttagtgagcattcacatgggatacaaatatacctcattgtcaccagtttcccaattatcttccttccatctctctatctggaagaaacctatgcactatgaaacaatgcagatttgctccttttgccatctctgtttcctggaaaaattaattaccaggtgaacattttaaagttctttccattgagatgcttttctttaaccgctgtcttttaatgtgatgcaggaaaagagctgcaataggaccatgcatgtacaatacttaaataattttcttcttcagtcactggttacagggaaattaatatgaagccgtaagtctggactgagagaaaaaaaaggcaacttagccacatt

SEQ ID NO: 256098 - DNA, 621 bp, Homo sapiens
acactaacatggcacatgtatacatatgtaacaaacctgcacattgtgcacatgtaccctataacttaaagtataataataataataaaaagaaaacttttcttcagagtatactacaggaagacaatattaccatgtttaacactaattgcatgttacaaaataaacaatccgttatagtaaagctgaagcagagattgactttgatttttagtgagcattcacatgggatacaaatatacctcattgtcaccagtttcccaattatcttccttccatctctctatctggaagaaacctatgcactatgaaacaatgcagatttgctccttttgccatctctgtttcctggaaaaattaattaccaggtgaacattttaaagttctttccattgagatgcttttctttaaccgctgtcttttaatgtratgcaggaaaagagctgcaataggaccatgcatgtacaatacttaaataattttcttcttcagtcactggttacagggaaattaatatgaagccgtaagtctggactgagagaaaaaaaaggcaacttagccacattaggggccatgacacatggattcatttgcttgtacaacttacttgtgcattcacat

SEQ ID NO: 256099 - DNA, 601 bp, Homo sapiens
aggcactgcagcaaatagccccatgtgtgggtgccaggctgctgctccctgcaccccagggctaccatgactccctggtgggtggaggaagcaccgggacccccttcccaggcagaagcctcccggagcaggacaggatctggggccaggggaggccacagagcccaccagtatctcccctttccaaactctccatcatgccagcagccaatgcctttgttctggggagtgagggggataactgaggcattgttggtctccctgattgactcccctccctgccacatgtcatgtttgccagttcactgtgtttttatctgtgtttactcagtaagctcccaaaaatcctaggacagcaaagaaaattatatcccatttcacagatgacaggctcagagaggttaagcaactttcttggcatcacacagcaagtcagtcaatggcagaatagaggatccasggctcctgactgctcaagatctctgctgtctctgaattgtgcagttccacagagggggaagaaccatagcccagcctggggtctgcagggttgtgtgggtggaggaggaggatgaggaggcatcagtgagagctgaagcac

SEQ ID NO: 256100 - DNA, 596 bp, Homo sapiens
agagatggggaaagctggagagcaggatggagtgagatgcacccaggaccagagactgtcaatgtcatcatttaataggtccctctcatttgtcacttgagaaactgaaacccagagacagaaagtgacttcctcaatgccatatactggataggtggtaggtgaagtacaagtgtcctggccttggttctctttccgtggttatcccccgaccgtcttagtctattcagactgccataacaaaataccataaactgggcagcttatacacaaccgaaatttacttcttaccatcatggaggctgggaagtccaagatcaaggcactggcagatttggtagctggtgagggatcccattgtcataggtggcaccttctcacatggtggaagaggcaaggtcactctctggggcctcttttrtaagggcactagtcccattcaggaggtctccaccctcgtgacttaatgacctcccaaagaccccacctcctaatactatcaacttgggggttaggatatcaacacatgaattttgagggacacaaacattcagagcatagcacctatacttggcattcccatacctgctgacggg

SEQ ID NO: 256101 - DNA, 505 bp, Homo sapiens
ctagagctagtgatccccactgaaggaaagcttcacttttcccagtggattcatcaaaagcccctaatttgagtctcatttgcctgagccagtccctgaggccaggcaggtaaaatgctctaactggccagggtgggtcctggtctgaccctgtggcaagggttgggggtgagcatcacaggatctgcctcatccaaaccagaggggctgagaaaggggaggaggtgttcctcaagggcaatggagtctgggtgggaagaaatagccaatgtccactccaggactctggaaagtgtagcttttctttctccctccctcttcttgtgctgagatacttttgaaggctgcagcacgaggggaagatgagttccttggcataggcgtgatctccactcatctgtcccaatgccaccagtgtctcagccccactaactgtatgatccttcccctcattatgccccctcaggtcatctractgtccttgccatgccagaacaagctggcc

SEQ ID NO: 256102 - DNA, 643 bp, Homo sapiens
catgtgtatagaggaggggaagaaggagcaggaatgggctttcacctggtggaagacgtaatgaaaggttcaggtatggctgtgtgtactcaaggttacatggaacaccacaatgaagtagaatgtttgtcctgatatttggtttgaacagggccccgtatccacagctgggcagtttgcaatcgtgtagatacacgtgtgtctacacagtgcggtaccagtggaaaattttgcctgtgattattcagcagccgttcaggctgtgtagaaagtcaatctgaatagctcaagcgaaataaaaatccactttgtrgtctaaattattcataccgattgcttacactgaactgaaatcctgggtaattattatttctcccatttatgctatgtgacatattccctgggggttgaaatcaagtttgttttaatgtgaatgtatccatttattcattctgccaattaaaaaacatctaagacaagcatcactcatcatagatgcatgtgtggcctttggcatgttgtctgcacttcctgtgattgtatgaactcctaaagataaagataactgtcttgtgttcttttagcacgaaacaatattcttgaagacagtattccagctcagagatattccaaacaatccaaa

SEQ ID NO: 256103 - DNA, 579 bp, Homo sapiens
attgtgatgatttggtaagaatatttttgaatggagtctggcaggtaatgtaggtgtacattaatgactaattctttcacccttttccctgaaaacttagctcaagctgcacgcttctcctttgacctcctatagcatctatgagatctctctgaagccactatcagcagcacctggcatttaccacaaactatgagtttccttttgcatattgttagtttcctttctatctgattacttccccctaattagactataagctacttaaaagcaggaccaaattctcacttctctggatgctttatagcatctagccacacacacagtagagacttagttaaatcaaaggcttctgctggaatactgctgtgataaaaagacaggaaaacctgaagcctatagagaagaggataatggtcataataccgatgygataataacaataactgatttatcgagtacttactcttgtcaggcatggtgccaagtgttttaaatgcattctctcacagactccttccatcagtcctggctaagaggttggtttgttggtgggttagttggttagctttaactaac

SEQ ID NO: 256104 - DNA, 476 bp, Homo sapiens
acctcttctgttcatcaggaaagaatttcccagattttctcctgttcccatggtgggaactgaatcacatggccatctctaactgtaaggcaggccaaaatgtgagtatctggcaaagaggcttcagggtcccatgattggcttagaccaattacaatttgtatttattgagccctttaattcctaccttttgkgtgccttttttgatcttcactcttactgcagtcaagggaaaagaaaggggaaatggctgttaggcagctaacagtctctgctactcatgtgatgtcgtatctcataccatcttctgagctctgataagcaagaaagggcaataaagaagttgcctacctatatgctgtgattagggctggtcaagaagtggattatgtctctttgtggttcctgcattatccttggccacagaatgaaaaagataacaaagacaccaaaaaaggtaaaaatgtgaagactaa

SEQ ID NO: 256105 - DNA, 410 bp, Homo sapiens
aataatttgctctaaaaaccagtccccaagtctgagtctcccctatctactttggatgaggtcttatgaattggggaggggagccaggagcctgccaaggttgtaacatgacatttaccccagaaaacgaccacatggagcataattttggcttttgccaatcccagcctctccctgcactattttctttggtgcctctagagcctagaggccagtctgtgaaattaaaasgcagtgtcaatgggaaagtgattactatataacgcaaaatttaaaattagaataccaaattgtagctaccaagtgacctcagatatatccacatatatgtgtgtaattatataaaattagaaaacttaataatagttatctccaggtggtggtatttggatgatttttctttatgcttt

SEQ ID NO: 256106 - DNA, 563 bp, Homo sapiens
acagggagattaatgctgttttcatgcttgtgagtgcaacttccattttcrgcccataaatcaaggagtaatttcaaatttcaagttttattctttgagaaataaatttcataaagctatagttgccacagatagtgattcctctgacagatctgggcaacatcagttgaaagccttctggaaaggattcaccattctagatgccattaagaacattcatgatttatgggaagaggtcaaaatatcaatattaacaggagtttggaagaagttgagtctaaccctcatggatgattttgaggagttcaagacttcagtggagaaagtaactgcacatatggtggaaatagcaagagaactagaattcgaaatgaagcctgaagatgtgactgaattgttgtaacctcatgatcaaacttgaatggatgagaagttgctttttatggaggagcaaagaaagtggttcttgagatggaatcaactcctggtatagatgctatcaacactgttgagatgacaacaaaggatttagaatagtacattaacttagttggtaaagcagt

SEQ ID NO: 256107 - DNA, 563 bp, Homo sapiens
acagggagattaatgctgttttcatgcttgtgagtgcaacttccattttcggcccataaatcaaggagtaatttcaaatttcaagttttattctttgagaaataaatttcataaagctatagttgccacagatagtgattcctctgacagatctgggcaacatcagttgaaagccttctggaaaggattcaccattctagrtgccattaagaacattcatgatttatgggaagaggtcaaaatatcaatattaacaggagtttggaagaagttgagtctaaccctcatggatgattttgaggagttcaagacttcagtggagaaagtaactgcacatatggtggaaatagcaagagaactagaattcgaaatgaagcctgaagatgtgactgaattgttgtaacctcatgatcaaacttgaatggatgagaagttgctttttatggaggagcaaagaaagtggttcttgagatggaatcaactcctggtatagatgctatcaacactgttgagatgacaacaaaggatttagaatagtacattaacttagttggtaaagcagt

SEQ ID NO: 256108 - DNA, 599 bp, Homo sapiens
agaagttttaaattcagtaataaaaagacaactcactcagtttaaaaataggcaaaggagctctccaaagaagacatataaatggccaaaaagcacataaagagatacccaaggccaggcacagtggctcacacctgtaatcccagccatttaggacaggaggattatttgtcacctgacacaggaggattgtctgttgccagaagtttgagaccagcctgggtaacatagcgagaccatctctactatatatrtatatgctgggctatatataatatatatttatatatattatatatagcctagcatggtggggtgcaccttagtcccacctactcaggaggctgagacgggcggctcatttgagcccaggagttcaatgctgcagtgagctatgatcacatcactgcactccagcttgggtgacagaggagatcctgtctcttaaaaaaaataaataaagatgcttgacattattagttgctggtcatcattcatcatcatggaaatgcaaagcaaagccacagtgagatactacttcacccatactactacccataagatgccaagaataaaaaagataacaacaggcattggca

SEQ ID NO: 256109 - DNA, 575 bp, Homo sapiens
ttactgtacttacagtttcatatggctgggaaggcaaggaagagcaagttacatcttacatggatggcagcctgcacaaagaaagcttgtgtagggaaactcccatttttaaaaccatcagatctcatgagattcactcactatcatgagaacagcatsggaaacacccgcctccatgattcgatcatctcccactgggtccctcccacaacacgtgggaattataggagctacaagatgagatttgggtggggacacagagccaaaccatatcagccaccaaatgcattttggcaccaaacttataaaggacttttaagttttcagacttttttggtttcagaattgccaataagaaattatgagcctgtgatcattttttccagcctcttctgcaggtagaagggtctttgtgaccctgatgtagccaatgcattttttttaaagtctgctgagggggcttattacaaatagggtttatttcttgataaaagggtatagaacttccttcccatttgtttttgccttgaacttggagatgatatctggaactctggttgccatctcatgatctt

SEQ ID NO: 256110 - DNA, 571 bp, Homo sapiens
gattcataggaaaggtgacattgcaggtaaaatgaactctctttaataaattctactgggtcatttatatattcatatggaagaaataaaattccacccctacttcatattaaatrcaaaaatgcaatcccagaagaattgtagatctaaattttaaagttagaaagtaagagttctagaagctaacacagaaaaatatcttcataaccttgagtagacaaaggaacatgaaccagacaacatttaggataaaaaagaaaaaacatgataaatagactacattaaaagtaagaacttctgttcatcaaaagacacaataaaagggatgaaaaggcaagccactaactgggagaagatatttgcaatgtgtatgatgacagaagactcatccagaatatgtgaagaaccttcacaaatcaataagaaaaagaccttatggaaaaataggccacaaacttgagcaaatacttaacaaaagagggcatccaaagccaatacgtgtatgaaaaagtttccacttcagtagtcactaggaaagtgtaaattcagtaggtggttttcccctgacagt

SEQ ID NO: 256111 - DNA, 571 bp, Homo sapiens
gattcataggaaaggtgacattgcaggtaaaatgaactctctttaataaattctactgggtcatttatatattcatatggaagaaataaaattccacccctacttcatattaaatgcaaaaatgcaatcccagaagaattgtagatctaaattttaaagttagaaagtaagagttctagaagctaacacagaaaaatatcttcataaccttgagtagacaaaggaacakgaaccagacaacatttaggataaaaaagaaaaaacatgataaatagactacattaaaagtaagaacttctgttcatcaaaagacacaataaaagggatgaaaaggcaagccactaactgggagaagatatttgcaatgtgtatgatgacagaagactcatccagaatatgtgaagaaccttcacaaatcaataagaaaaagaccttatggaaaaataggccacaaacttgagcaaatacttaacaaaagagggcatccaaagccaatacgtgtatgaaaaagtttccacttcagtagtcactaggaaagtgtaaattcagtaggtggttttcccctgacagt

SEQ ID NO: 256112 - DNA, 470 bp, Homo sapiens
gctgtgggttgtttttgtttcgctctttttgcccaggctggagtgcaatggtggttttttttttggggggcaggctctctctgctgctcaggcagtagtgcagtggcaygatcacggctcagcaaccttctggtctcaggcagttctcctgccttagcttctggagtagctgggattctgatcctagatcccttttgaggataaaatgtgtaagaacaaataccttggtcatctctcacaccctccgggggggtcaagctaagaagacctgtgtaagaggatatgtattataagattgtgttccactacagagggagataatgtcaagtagggtgtatgtgtcacagcaatcagaagttaatgcctaccactccgggagaactcatactcctgtggtagtgtttaaggaactgctgacacattcttccagctttaccttttgtgtgcttcactatgcaaaatgaatggca

SEQ ID NO: 256113 - DNA, 550 bp, Homo sapiens
gaaaattttctttaccatcagcaattacttttacagtattttgaacaaaattgaatgctgggtcagagaaaacaaattcctagggattgacratcatcaatgataattctttccatttcctagtgtctaattttttcagatcagcttgtcatatattcattgtgactatcttaattattgtaagcctcactagtattaaaattcttttttcccaagactggcaaatagaatctaaatctttccaagtcttatccggggccctttccatcacagaatgcttccggaaggagaagagctccattttcctatttcttatatcaattactgatcattgatgatgattattgaaaattgttaacgttagataatgtaaaccagaaagtatctgaaacaggactcaatcagtatagaaagttattttgtcaaggttaaggacacatctgtgacacagcctcacaaggtcatgaggacacacatctgaggtggttgaggtacagcttgctgttatacattttaaagagacatgagacatcaatcaatatacgtaaga

SEQ ID NO: 256114 - DNA, 523 bp, Homo sapiens
aaataatgattttacaagacttgtgtaatatttcatatttttcttggctccacgtgtttatataccatataggaatttagattctcctcaagcacttggacactgaaaagtgaaattcaatctagacacttgaaaatctgctaagtcagaaaaattctagaggtgctatctgaataggtgttacagagtaactgattctggaatggacatcaaaggctttcatgttcactctgcactggggagaagtctttcctaataggaaacaaatatgtgttcactgcctgatgttgacatgctataggtaattagattttgcattgtacacaattttaaattggggcaaggtgatcatatgtgcatatatattcatgtatatatgtaaatgtatgctttatatatatatgtgtatgtgtatatctattttatatrtaagcctatagtctcagtatgctttgttggactatattaggctatattactaaaagtgttattaaaaatttggttttgggactacacaattgaa

SEQ ID NO: 256115 - DNA, 525 bp, Homo sapiens
aagccaaaatggtaagcaattaaagtttggactctaaattccctctgctactactctgtaaacaaggaaaaatcgctgtcttcaagtcttgcttctagtgtcccatatgaggacactggatctgaacaattggaattacacgcccagaatacgaactgggatttgtacatgagaaaaggtccatatattagtttgctaaggctgccaaaacaaagtactggataccttaaacatcagaaatcgattttcacagttctggaggctaaaattccgaaatcaaggtgtcaacagagagggcttcttctgaaactattcttcttgacttacagatgtccaccttccttctatgtcttcacatagtcttccctgtgtgtgtatgtgtgtctgtgtcctaatctcctcttttaaggacactagtcatattgkattagcacccatgtttatgaccagattttacctccttaaacaccttttttttttttgagacggagtttcactcttgttgcccaggctgaagtgcgatgg

SEQ ID NO: 256116 - DNA, 525 bp, Homo sapiens
aagccaaaatggtaagcaattaaagtttggactctaaattccctctgctactactctgtaaacaaggaaaaatcgctgtcttcaagtcttgcttctagtgtcccatatgaggacactggatctgaacaattggaattacacgcccagaatacgaactgggatttgtacatgagaaaaggtccatatattagtttgctaaggctgccaaaacaaagtactggataccttaaacatcagaaatcgattttcacagttctggaggctaaaattccgaaatcaaggtgtcaacagagagggcttcttctgaaactattcttcttgacttacagatgtccaccttccttctatgtcttcacatagtcttccctgtgtgtgtatgtgtgtctgtgtcctaatctcctcttttaaggacactagtcatattggattagcacccatgyttatgaccagattttacctccttaaacaccttttttttttttgagacggagtttcactcttgttgcccaggctgaagtgcgatgg

SEQ ID NO: 256117 - DNA, 570 bp, Homo sapiens
ctccacacccctaaattattctgcaacgtacaaaactaaacactttgtggtagagactcaactgttaaggtaataactcagaggtggaataagttagatatttaggaaggcctggatattcacttggccatgaggagacaatttggggcattatagcagagtgggcttctggaggaatttcctctaatcccttatttcttgtaggcagcattggagtatgccacactttttactaaaatgttgaggtttggggaaaggataagatgtaatctaataggcatttatctttaaatccttcctactcttagcatatctctgaggaacagcaacagttctacagtttaatgtgacagatggttgggagcaaagttaaagaatttagagaattatttattgctttgaaacaccgaattacaaatcaaccaaaaggtctcctagaaacttgatagaactgttgggtcacccaaaatgtgatttgtgcccagaagtttcagaatcagagagagcagtttcctgtttactaggtaaatgtctctggaaaagttaamtaaaaaatccaagtctcaattg

SEQ ID NO: 256118 - DNA, 593 bp, Homo sapiens
ttcaggctagtctagctccttgaaagttactgggcatggtggctcacgcctgttatcccagcgccttcggaggccaaggcgggaggatcacctgaggtcaggagtttgagaccagcctggccaatatggcgaaaccctgtctctactaaaaatacaaaaaaaaaaatttagccaggcatgatggcacatgcctataatcccagctgcttgggagactgggagaggacaatcacttgaacccaggagacagaagttgcagtgagctgagatcgtgccactgcactccagcctgggtgacatagcaagactgcatcttgaaaaaaaaaaaaaaaaaaaaaaaggttacctgattagcamccctaatttcatctgcaactgtaattcttctttgccaggtatcctaatatattcacatgttctgggaattagaatgtgaagatttttgggtaggggagcattattttgcctatttgaagtgctaattattattggcaggttcttcggtttctatttttaatctgtggaaacaacaatagtatcaatttcaatttcatagtgtatttgtgataattaaataaactagtggacataaa

SEQ ID NO: 256119 - DNA, 580 bp, Homo sapiens
gcttacatgttcccaaggaagcatgtctcatgacaggaaatgaacctgtaaccaggaacctaggtatgtaaactgaagagagaaatggaaatacaccatgttgattcagagtcttcttgcattctctggcttacagacctgtatattttgaggtcatgcaggtcaggaagaggaaagagagcaaatgtagtggaaaatgtgtggtgtggtttcttactctgcatcctttcagttgtgtgatcttggtgtagtcacatgccttatatgaggctctatgacatcagccaaatgggaacgcttgggcctgatcttcctgcctcagggtctttatgaattcaaaggatatagaggatgggaaagttgtgtatagtgcttcacaaacataagcacctatgcttattgttgtgtaagatagatggcaaaattatagtttcattctttttcgaatttactctgaggtggaaattttgccttatgttatttaggcagaatacttactattagatacrtagggttagaaagaatgcttccttgtaattgaatgaaataaaacagtggaggcagaggaatacgtactaga

SEQ ID NO: 256120 - DNA, 568 bp, Homo sapiens
taacttctgtttaccacacaaagtggcaactattaacacaattaagaactattcgtcacttagaagaaattgctcttttatcggacttctctgtacattttaaagaaatggctgagagttgcakgttactattatctgtatgagacatagtcagaacttaaaagtagtaaaataaaaaaattttgaaaattgtatttcataactcagtcttgtcaattaatttagataggctttttcccaattaactgagtcatacttaactctctcaagaggtatttatacacacacacacacacacacacacacacacacaaacgaacagattccatagagatacaattgcaatcgcttctcatgtttttatctttcttctggctacatgccccatccttccatttgaaaactgtgaaactgcaacaacagatcttctgtagctaggcaatgttgatttcattcaacaaattaattgggaaaagtcaccaacaataaagaaaatggtacccaattatttatgaaagttatttctcaaaagctatgtattttttcttctttagctacctctagaatt

SEQ ID NO: 256121 - DNA, 568 bp, Homo sapiens
taacttctgtttaccacacaaagtggcaactattaacacaattaagaactattcgtcacttagaagaaattgctcttttatcggacttctctgtacattttaaagaaatggctgagagttgcaggttactattatctgtatgagacatagtcagaacttaaaagtagtaaaataaaaaaattttgaaaattgtatttcataactcagtcttgtcaattaatttagataggctttttcccaattaactgagtcatacttaactctctcaagaggtatttatacacacacacacacacacacacacacacacacaaacgaacagattccatagagatacaattgcaatygcttctcatgtttttatctttcttctggctacatgccccatccttccatttgaaaactgtgaaactgcaacaacagatcttctgtagctaggcaatgttgatttcattcaacaaattaattgggaaaagtcaccaacaataaagaaaatggtacccaattatttatgaaagttatttctcaaaagctatgtattttttcttctttagctacctctagaatt

SEQ ID NO: 256122 - DNA, 569 bp, Homo sapiens
tgttcttagaggagtaatgtggtataaggtaggaaagtgtgataaggccaatcagggagaatgttaaagacgtcaaagaagctcattttagtagagttttaaatgtccctgctctatgtttattgtattgttgggataatagggttggaaagtaaatgactgccttgctgcagcaattggtatcctgttttgtctctgtagtctatctccaccccctgctccatttcagccagatgtgtatttagagtcttcccaagtcctctatagccttgtctctgctatttgtctctatatattcagtaaatttctatgtcccaagtggctgtgtatgtgtgcatcaatgtggggttcttagagcagagtgaggcttagatcatctgaaccaactataaaaacaaggcttggaaattacacatggcccaaaaccaggtaaaatgtaggcaattgtgrtgtctggaggtttagtctggtgtgtgaaaactggcaatgaattttttcagtatttatctccattgtgacacagaaagattagtaggccatgtagaaccacttaatctggttccaccaat

SEQ ID NO: 256123 - DNA, 569 bp, Homo sapiens
tgttcttagaggagtaatgtggtataaggtaggaaagtgtgataaggccaatcagggagaatgttaaagacgtcaaagaagctcattttagtagagttttaaatgtccctgctctatgtttattgtattgttgggataatagggttggaaagtaaatgactgccttgctgcagcaattggtatcctgttttgtctctgtagtctatctccaccccctgctccatttcagccagatgtgtatttagagtcttcccaagtcctctatagccttgtctctgctatttgtctctatatattcagtaaatttctatgtcccaagtggctgtgtatgtgtgcatcaatgtggggttcttagagcagagtgaggcttagatcatctgaaccaactataaaaacaaggcttggaaattacacatggcccaaaaccaggtaaaatgtaggcaattgtggtgtctggaggtttagtctggtgtgtgaaaactggcaatgaattttttcagtwtttatctccattgtgacacagaaagattagtaggccatgtagaaccacttaatctggttccaccaat

SEQ ID NO: 256124 - DNA, 502 bp, Homo sapiens
ctccttttaatggatcctaggtctagaatacatggcaatctcatgtttcttaaaagagtggggttatgaaaatacttacataattcctgcttctgagagggtgaataactcctcattcagatgggatcaccagtgatgtagctttgagaatgtgaggtacacaaattcaaaagaaagtagcatgacagcccacgtgggaaaatccaacttgagctccaaaaacatcttgcaacctctaacatagcttttattagaggtaaacttggctttcttttcaggtatttatttttattttcatgaatcaagctgataaaatcgtgaacaattgtttattaaatatttccagctacaaaatgcagctttggaaaaactgcatatctgtattctgccatatcctatgcccattattaaataagataatsaactagattacagatttgtccaaaagactggacacatgaccgatagatagattcaaaatattttgaagggattgaaataa

SEQ ID NO: 256125 - DNA, 608 bp, Homo sapiens
actttacctgttttataacctgctatattcccagtacccaggtgagaacctgctacatagtaggacctcaataaatatatttggatacatatttacttatttgcctacttgctattgtcattagtactctattggtaactgaatgttctaaatgagaattaatacttactgaagtaaacatatagcatatcaatacttgacaatatccrtatttgtcttaatggtcaatagtgtccttttaattgctggcagaaattttcaatttccatagaacaggaaaaacgaaagactaccgattactaaatcaatagctaattatcttaaatattaaaagaggatataaattaaaattttaaaaatcatgttttctataagaggtttctccagttgttttattatagaagttaccaagtagtttaaggaaaataaacaaaattacatcttacagctctatagacacagtaagaaatcagcagggaaggcttgagctgataaattaatgcactcttgggtgtgaattttgacagttaattatctttagttaatttaggcattgtttgcccttcaagataaaaatggatacctagtcattcttagaccatcgtttt

SEQ ID NO: 256126 - DNA, 608 bp, Homo sapiens
actttacctgttttataacctgctatattcccagtacccaggtgagaacctgctacatagtaggacctcaataaatatatttggatacatatttacttatttgcctacttgctattgtcattagtactctattggtaactgaatgttctaaatgagaattaatacttactgaagtaaacatatagcatatcaatacttgacaatatccgtatttgtcttaatggtcaatagtgtccttttaattgctggcagaaattttcaatttccatagaacaggaaaaacgaaagactaccgattactaaatcaatagctaattatcttaaatattaaaagaggatataaattaaaattttaaaaatcatgttttctataagaggtttctccagttgttttattatagaagttaccaagtagtttaaggaaaataaacaaaattacatcttacagctctatagacacagtaagaaatcagcagggaaggcttgagctgataaattaatgcactcttgggtgtgaattttgacagttaattatctttarttaatttaggcattgtttgcccttcaagataaaaatggatacctagtcattcttagaccatcgtttt

SEQ ID NO: 256127 - DNA, 599 bp, Homo sapiens
aatgctgaaggccaactggtaaatgtggaagaaagaccagggttggaaaaaatcatcattttgcaacaatcatggtgaagtttggatcaggcaaaactatctggatgctaaatctaasgaagaaattttacatggggataggatgtttattttcattatttttaaaattaatttacagaccatttattagttgtaaaggagaaaaaaataacagtatttataaagtggagatatcaggagacaccttgaatgtgtgatcaaaattactatcagtgggggaccgaaggacattatgtgcctgcatatgtgataccttgacatagataaaatattgcctatttcactcaagaaggaggagtgttatattaatgaaaatagtgtgtgttgggtacactttgttttccagaaatatcaatgtcataaaaggcaaagcgaataagtggaaatgtttcagaaagaataagctactacatgaaataactaactgtagactagattttgtacctgagggtggaaggaaggcataaaagacattgttagatcaaatgaaaaaattagaatataaataacaggttagatacaattatgatatctatgta

SEQ ID NO: 256128 - DNA, 465 bp, Homo sapiens
aaaatgtttgcagccaccagaaactacatgctgttccgtgatatgttaagcttcacatcccatttgaggccatttaaatggtaacagagtgaagttgagtcgataggcagttaaaaattcttcattaactcttcactctttaggaatggcttctttcattggctatttcagagcttatttyttcagcgcattagattttccatcacactacttaggcagggagtcgattgagaacaaaagaaaaaaaatacaacccccaattgtgaaaggagaaaaggattgtaatctatcatcctcagtcacaatttctgcaggaaagtaaaaaaaaaaaaaaaaaaaaaaaatcatttgtcctctttcttcctctctctttagaactgcaccattgctctcacatattcactgtgtaccttttccatttgttctctttttcatttgtaacgtagcactagatatatatgtatt

SEQ ID NO: 256129 - DNA, 635 bp, Homo sapiens
ttgttctctttttcatttgtaacgtagcactagatatatatgtatttattaagaatattgcttattgtctgttttttttttctcactagaaaaaggttaagtttctcgagggtaaaaatcagtgtctattctgtctatcaatgtacccaagtgcctacaaaagttccttgcatatagtaggcactcaatagttgtgtgttgaaagaataaattttaaaattacataattgcacacatgacccaagtataaggagattcatatcccatattgtcagcaaattgataaatcggtgactgttacaagaatggcctagaatcagttaaaaggttttataacatatctttttcttaaatgggtatgttaaaaccccagatgttccctgggattgtaggtttgctctccatgtgaagcagggatatgcaagaagctaaaatcctatcyggacagacaggatcatgaaaacagtgtttatgaaaaaaattaaatcctgctacagcccaccaatgccaagcagtattctaacaagaaaattctggtgcagtcaacccataaggatgatgaataataagtctttggaattgtatgcatgtcagtatttactgtgtacctaatataaagtcagaagtgaagtaac

SEQ ID NO: 256130 - DNA, 566 bp, Homo sapiens
atcctgctattacgttttacaacatcctaaccttctaaccaacctctatttcacctggtcaattgcctccagtcgacacagttagctcagaagtttccttgattagtggctggttagcgatggcctttctaaaggtaaaagttagtataagggtagaagaacaaaacagatgctatagaaaaaaaatacgaaaaaaaaatcatgttttcaagtgccaatatcatcttgtgcacactatatagaaaaaaaatcatgcttcaaatttaaatagagctaaaattatrtattagaattttagcattacactgtcttgcagatattgtcctataggaatataaaactcattttttcccttcatttatgaaacaccaaaaattactttcatgtgtatttatgtctcctccgatcatgggttctattactaaaatgacatgaaaaagagatatgattcagatctatcagaaaagctgatggctcagccaaattaatctataatctgaccaagacagggtatgacaaattttagacttttgctttaaaaactttgttggaaacactgcatgtta

SEQ ID NO: 256131 - DNA, 566 bp, Homo sapiens
atcctgctattacgttttacaacatcctaaccttctaaccaacctctatttcacctggtcaattgcctccagtcgacacagttagctcagaagtttccttgattagtggctggttagcgatggcctttctaaaggtaaaagttagtataagggtagaagaacaaaacagatgctatagaaaaaaaatacgaaaaaaaaatcatgttttcaagtgccaatatcatcttgtgcacactatatagaaaaaaaatcatgcttcaaatttaaatagagctaaaattatatattagaattttagcattacactgtcttgcagatattgtcctataggaatataaaackcattttttcccttcatttatgaaacaccaaaaattactttcatgtgtatttatgtctcctccgatcatgggttctattactaaaatgacatgaaaaagagatatgattcagatctatcagaaaagctgatggctcagccaaattaatctataatctgaccaagacagggtatgacaaattttagacttttgctttaaaaactttgttggaaacactgcatgtta

SEQ ID NO: 256132 - DNA, 605 bp, Homo sapiens
tcaattaccaatgtaaataacttccatgaagatcctgaacaatggcaatcargagcctctgggttgatgaacacattgaggcactgggaagataacatgcctggagagggcaaggaagctctctgacaccccttcacccaccaccaccaccaccaccataccttgttctatacatctctttcacctgactatttctgaatggtaccctttatagtaaactggttaaactatgcaaagagtttaactgagttcggtgagcattctagccaattgttaaacctgacaagagggttatgggacccttgacctatgtacaactggtcagtcagaagttagaaaggaagcctagacttggattggcttgtgaagtgggaacaggcttgtggaactgagtgcttaacctgtaaggtttaatgctaactccaagcagacagtgtcaaaattagattgaattgtaagaccctcagtggtgtctgcagagaactggttaattatttagtgtgtgaaaaacccaaaaatttggtgctgggtgtgttgagaatgtaagaaaaacacttttatcctaattaccaatatactatcttactataccataaaacttccta

SEQ ID NO: 256133 - DNA, 605 bp, Homo sapiens
tcaattaccaatgtaaataacttccatgaagatcctgaacaatggcaatcaagagcctctgggttgatgaacacattgaggcactgggaagataacatgcctggagagggcaaggaagctctctgacaccccttcacccaccaccaccaccaccaccataccttgttctatacatctctttcacctgactatttctgaatggtaccctttatagtaaactggttaaactatgcaaagagtttaactgagttcggtgagcattctagccaattgttaaacctgacaagagggttatgggacccttgacctatgtacaactggtcagtcagaagttagaaaggargcctagacttggattggcttgtgaagtgggaacaggcttgtggaactgagtgcttaacctgtaaggtttaatgctaactccaagcagacagtgtcaaaattagattgaattgtaagaccctcagtggtgtctgcagagaactggttaattatttagtgtgtgaaaaacccaaaaatttggtgctgggtgtgttgagaatgtaagaaaaacacttttatcctaattaccaatatactatcttactataccataaaacttccta

SEQ ID NO: 256134 - DNA, 605 bp, Homo sapiens
tcaattaccaatgtaaataacttccatgaagatcctgaacaatggcaatcaagagcctctgggttgatgaacacattgaggcactgggaagataacatgcctggagagggcaaggaagctctctgacaccccttcacccaccaccaccaccaccaccataccttgttctatacatctctttcacctgactatttctgaatggtaccctttatagtaaactggttaaactatgcaaagagtttaactgagttcggtgagcattctagccaattgttaaacctgacaagagggttatgggacccttgacctatgtacaactggtcagtcagaagttagaaaggaagcctagacttggattggcttgtgaagtgggaacaggcttgtggaactgagtgcttaacctgtaaggtttaatgctaactccargcagacagtgtcaaaattagattgaattgtaagaccctcagtggtgtctgcagagaactggttaattatttagtgtgtgaaaaacccaaaaatttggtgctgggtgtgttgagaatgtaagaaaaacacttttatcctaattaccaatatactatcttactataccataaaacttccta

SEQ ID NO: 256135 - DNA, 564 bp, Homo sapiens
aggtctatatatttatgggttatatgggatattttgatataagcatgcaataagtaatactcacatcagggtaaatggggtatccatcacctcaagaatttatcctttgtgttacaaacaatccaattatactcttatagttatttttaaatgtactatatattgttttttactacagtcaccctgttgtgctgccagttactaggtattatttattctttctgtttttttggtaatgattaaccctccccatttttccttcatcccccaatagcctctggtaaccattgttctactccatctccatgagttcaatcattttaatttatagctccaaaaactgagtaagaacatgcaaagtttgtctttctatgcctggcttatgtcacttaacataataacctccagctccttctatgttattgcaaatgacagtatctcatacttttaatagctgaatagtactccattgtgtatatataccacattttctttatccacttatttgttgatggacacttaggttgcttccaggtcktggttattgtgaagagtactgcagca

SEQ ID NO: 256136 - DNA, 555 bp, Homo sapiens
aagcttgataatttatgtatcttaatcacatatcagaaaattgatatcttccatatgtaaaatttagaaggctgtcaaattgtttcctctcaaaaagcaagatctatatgtagacaaatttttatttatttgtttacttatttactaggagtctctttctgtcatccaggttgactaggagactcttatttacagagtctctctctctgtcacccaggttggagcacagcagtgcaattgtagctcactgcaacctcacactcctgggctcaagcaatcctccctccttattctccagagtagctagaactacaggcatagaagcatgcaccagcatgtctagctaacttttgtattttttatacagacaggatcttactatgttgccaagactggtcttaaactcctggcctcaagcaatcctccagccttggcctcccaaagtactgagattaaaggcataagccattgaactccccccagccatataattaggggaatcttttatattagtccctttgccttgtgttayggtttggatctgtgtccccactg

SEQ ID NO: 256137 - DNA, 573 bp, Homo sapiens
agaaaattctttatctctccttcatttctgaaagacagctttgccaattaaagtatttttggttgacagatattttttctttgttttgacactttgaatacgtcaacctactttctctgacctgcaaagattttgctgagaaatctgccattagtctcatgataattcccttgtatgaaatcagtttctttttcttactgctttcaaaattctttttttctttaactttgttttttaattatttgacttttgacaatttaattataatgtttctcagtgaagatctcttgatgttcacttattgtggttctttagccattatgtatctggatgttcatttctctttgagayatgagaagtatttgtcattattttttaaataagcttttgttcctttctctttctctgttccttctgaaacagcaataatgcacactgtattttgcttgatgatgttcattagttcctataggctttcttcatcctttgtaatactttctgttcctcttactgcataattacaaatgatatgtctttgatttcacagattctttcttctgcttgacttcatct

SEQ ID NO: 256138 - DNA, 487 bp, Homo sapiens
gcctggtagtacatggttgattgaaaattaattaaattctgataaatataccaaaatagtatcattggataatgtattttttgtgtcaaagccaatttcatgtggtgctgaattcaattgaaagtttattaattgcaaattagattatgtcactaaaaaccccttgtgtatagtggtggtgacacaactctgggatattaagatttgtacttaattttatttcaaattgacaagaagagggccaacttttggttattcaattgaagatattttatcgtaaaacatagagaagttaaaaataaaaaaataaataatggctttagcagattcatgaagaartttagaatctcttataggtattcatattgaatgagaaattccagtgacccaagccaaaatatgtgagcttgtggcagacagtcacatcatacactcattcatatattcattcttattctggtgacacatctacacttgtaaatatgtt

SEQ ID NO: 256139 - DNA, 534 bp, Homo sapiens
tatcccccttctttgaaccacctgtcttctgttttgtttgtttgtttaaacttcaagtttaaagtttgaactttaagtctgaataggaagtggaaaaaggtagattggagggtttccacttargtatggatcccaaaatgtagaactggatttaagtcttgagagaagctcaagacatggtggtgggtgggcctaattttcagacagtttgatgagcgagtggacagttactctctggaaagccctgcaaaaaatgactatgtcctatcagttcaaggaccatgataatggcaaatctaggagtaagcaatgtatagaagcccaggttagcagtcaacttttaaaaagtctgagaaacagggcccaagtcacagggatagagatcagtgggaaattctagctgagagtagttgacggattaagcaaacatgaagattttagggcaggattggccaaagcaacacaggacaatcatctatagggcatatgtttcaagcaagtattcagaaatatcaggattgagtgccattactg

SEQ ID NO: 256140 - DNA, 651 bp, Homo sapiens
gttcttcaaaatcatcctgtttttctatcattgtgataggtggtttcaaaatgcctctaaatattgtgtgtccttctaatgttcacgcgcccttgtaaaaatcttctccctttgtgtgtggactgggcctaatgacttgtttctaacaaatagcaagtggtaaaaatgtttggatgtcacttccaacattagattatagaagagtaagactttcatctggctttcactctgtctcatcctttcacttactggctctcatgaagccaaattctatattaatgcctacctcagggtgaggcccacatagtatgaaagacagaggccaccagccaatagcttgagagcacaccataccttccgttcaatgacccaaaaggaatgaacccttccaacaatcactgagtggccttagaagatgatcttgcctccatcaaacttgaagtgactgargtcttgttcaacagcttgttgtcttgcaagaccaagaccagaaaacccacttaactcatgcccagacttctgatatacagaaactgcagatataaatggtttcaggtaatgtgtcactcagtaatagataactaatataattttttgcactgaataagttaaaaagcagattcaaaatgtttaaagtcactatttcttcag

SEQ ID NO: 256141 - DNA, 604 bp, Homo sapiens
ggaacattgtaatctagttgttagagcagaatagatatcagctgatagatgtcagggattgctcttttctttctcacaactaaagcagctatttcaaactatgagcattccagagattggctagggatggtgcacagattacaagaagaagagaacatgggtagaccctgaagtatatcatcagttctttaaaatccctctcatcttactttctcaatcactgccattcctaaactcttaacgtcttctttaagtcatggggtaacctacaaaagaccaatcaagttttttgcctctagtaagttgagaaatttggttgacaggaagccaggagattctacagggatcagcaattttacacctcaagctcttctctaaagaatatgttgtataaaaaatctaaatatcagagaatcctcttctctgaacatttaaaataggagaagaggctttaatggcaatttatgagcacattaaatagagtttgaasaatatttaaaatagtgattgtgaggagtatgagagaaagtgggctggaggaaagcagcatgactttaaggtattattaaggatccatgtgaaattaatcatcatgtatttggca

SEQ ID NO: 256142 - DNA, 595 bp, Homo sapiens
aaaaaaaaaaaaaaaaactagaaaatctaggcaaaatggatatatttctggaaacatgcaacctcacaagattgaaccrggaggaaactaaatacctgaatagactaacatgagttctgaaattgaataagtaatataaaacctaccaaccagaaaaagccctagactaaatgaatttgcagccaaattcttccagatgtagaaagaagagatggtaccaatcctgaaactattgtaaaaaattatggaggagggactcctccctaactcattcaaagaggtcagcatcattctgctaccaaaaactggcagagacacaacaaacgaagaaataatttaggccagtattcctgatgaacaacacagatgcaaaaatcttcaagaaaatactagcaaactaaatccagcagcatgtcaaaaagctaatacaccaggatcaaatagattttattcctgggatgcaaggtttgttcaatatatgcatataggcttttaaaaaatttcagcatcatttcctgttaaaatccctcaacaaactatgcacttaaggaacatccctcaaaataaaatgattcatctatgacaaacccacagc

SEQ ID NO: 256143 - DNA, 518 bp, Homo sapiens
  misc_feature (1)...(518): n = A,T,C or G
tgtggacaatacatgtcattagattcaaggatttagcagttgagagagacagacacagtccntggcctcctggagnttaaagttttntggtattgntgtagcacatttgtctcccctacgtgatctcaaattctttgagtgcataggtcattctgttcaccagttagttcctgtatgtcatagtgtctccaatgcagcaggtgtgcagtgacaatctgcccacttactgtgcagaataaatacataggtcyttagacatgtgttcattattaataaaaaaagtatgaatattgggcaagattagatctataaagtctgctacatgtttacagatgtagaaaagacttacttgtcccatttcttcagtgaagtgctcgctactgaggagacttttgtcaggtttacgagctccagctcacaaataaaaatgtagaaaagcccagagtgcacgtgcagtagaattttcttgaggctgctttgctgccagtaaatatactcacaaactattaacaagaaag

SEQ ID NO: 256144 - DNA, 555 bp, Homo sapiens
tctatgaaactctgtcagtaataggcttactgtagatgtytgggtacatcactgggttctctattttgttccactgatctattgtctgtttttatgacttgctgtttttggttgctataggcctgtactataatttaaagtcagataatgtgagtcttccagtgttgttcttttggctcagaagaactttggctactctgggttttttgtggttccttataaattttaggattgttttatacattgctgtaaaaaatgtcatttgtattttggtatagattacattacatctgtagatttgtttgggtagtatgaacattttaacaatgttgattcttgcaatccatgaacatgaaatatcttttaattttttgtagcctcttcaattccaatcatcaatgttttataattttcattgtagagatctttcacttctttggttaagtttattcataagtattttatttgtggctgtttgaaataggattactttcttgatttatttttcagattgattactgttggcatgaagaaatgctaatgaactttgtacgt

SEQ ID NO: 256145 - DNA, 555 bp, Homo sapiens
tctatgaaactctgtcagtaataggcttactgtagatgtctgggtacatcactgggttctctattttgttccactgatctattgtctgtttttatgacttgctgtttttggttgctataggcctgtactataatttaaagtcagataatgtgagtcttccagtgttgttcttttggctcagaagaactttggctactctgggttttttgtggttccttataaattttaggattgttttayacattgctgtaaaaaatgtcatttgtattttggtatagattacattacatctgtagatttgtttgggtagtatgaacattttaacaatgttgattcttgcaatccatgaacatgaaatatcttttaattttttgtagcctcttcaattccaatcatcaatgttttataattttcattgtagagatctttcacttctttggttaagtttattcataagtattttatttgtggctgtttgaaataggattactttcttgatttatttttcagattgattactgttggcatgaagaaatgctaatgaactttgtacgt

SEQ ID NO: 256146 - DNA, 534 bp, Homo sapiens
gcattcctgccaatgttagagatagatattgattcagagtgtatgtaggatttgagtgatggatgtgcttagataggaggaaagacaaattaattaacttgtcaaatccttcttctcagacagcaagaatgcaatagattcttgcataaytaggtattgattcccagtagttccaaacatctgtttccttgcttatcttgatgttcccatttgtgatttcagaggaactcataaattagaaatggttttcacaacaatggcaaacggaggctgatgtacatttgtaatattaaacaatttatcttactcttgaaattgtctatgctctttagacataacatgcatgaagtgcatcaccattctttatactgtcaggtagatgactttgaaacttagaattggaagcagttttactgtaaaatgctgttgatgacatttagatgaatgtatacaataaaattaattttatgtaaataaattttcacattttaattatattatattgtcttttaattttaacagatacattttacc

SEQ ID NO: 256147 - DNA, 423 bp, Homo sapiens
aagactacttgatcttggtgaattaactttttgatgtgctgctggatttggcttactaatattttgttgaggatttttgcatctatgttcatcaaggatattggcctgaagtctttttttttaattgcatgtatgccaggttttggtgtcaggatgatgctgccttcataaaatgrgttagggaggagtacctcctagggactggaggagtgggacttaccattctttatatatttagtagaattttggtgtgaatccatctggtcccaggctattttttgattagcaggctttttattactgatttaattttcaaacttgtcgttagtctgttaaggtatttaatttctttctgattcagtcttgggagagtatatgtttccaggaatttagccatctcttgtagtttttctagcttgtgta

SEQ ID NO: 256148 - DNA, 423 bp, Homo sapiens
aagactacttgatcttggtgaattaactttttgatgtgctgctggatttggcttactaatattttgttgaggatttttgcatctatgttcatcaaggatattggcctgaagtctttttttttaattgcatgtatgccaggttttggtgtcaggatgatgctgccttcataaaatgagttagggaggagtacctcctagggactggaggagtgggacttaccattctttatatatttagtagaattttggtgtgaatccatctggtcccaggctattttttgattagcaggctttttattactgatttaattttcaaacttgtcrttagtctgttaaggtatttaatttctttctgattcagtcttgggagagtatatgtttccaggaatttagccatctcttgtagtttttctagcttgtgta

SEQ ID NO: 256149 - DNA, 526 bp, Homo sapiens
tgctatcaaacaaagagtcatttgagtggacaagtaatggagttgccaagcaatttggaggacccaacagaaattgaaaaccataaatctgccctgcctggcagagttatgtagttttgccagcaaagctcaggagagggaaaaagctattgattagagagatccagtttggaaatgggtttaaatgaaagcatcacagagcaggagaagaagggaattgaagatgagtgtgggctgaaattgctagacatgatgatgaattttgttagaaatgtaaagtcaagaatcaaatgataatttaaaaatatatggaggratttaaagtctgaagtgaataaaaaatatatttatcagggataagtgtttgttatcagatagaggaatttcatattaatggtttagaatgcatttccattcagggagataataaatcctgaatgaagcctcaggcatggagtactaaagaaaaataaagtgaaagttgttgtcatagaaaaatattatgaaattgtgaggaaactaaagt

SEQ ID NO: 256150 - DNA, 548 bp, Homo sapiens
tgattgagaaaaattagccttgactgttgtaaagccattctaaaatctcattcattataccaataaaactttattattttatttatattattttaattaacaaatcataattgtattacatttatgaagcacaatgtaatattttaatagagtataaaatgtgaaaagatttaaccaagctaattaacatagctattacctcacttacttgctttgctgggtgggacctcccagccaggccctctagccacgcgccccgaccttcacatattactgacagagctctgatgtctccaagggatggagtgcctgcgggacaggaggactgccacctgggttgattggaccactcagccattccagcctgtgagcattggactgtccaagcagacaggggcagaggaggttccccaccatgacacaactgttttgtcaggcatgtccagactgtttctttaagcatgacacagatccactyttcctcttggggctgttctcccagccggcgccttcagccacccccacccatgttctacagggacaacaga

SEQ ID NO: 256151 - DNA, 548 bp, Homo sapiens
tgattgagaaaaattagccttgactgttgtaaagccattctaaaatctcattcattataccaataaaactttattattttatttatattattttaattaacaaatcataattgtattacatttatgaagcacaatgtaatattttaatagagtataaaatgtgaaaagatttaaccaagctaattaacatagctattacctcacttacttgctttgctgggtgggacctcccagccaggccctctagccacgcgccccgaccttcacatattactgacagagctctgatgtctccaagggatggagtgcctgcgggacaggaggactgccacctgggttgattggaccactcagccattccagcctgtgagcattggactgtccaagcagacaggggcagaggaggttccccaccatgacacaactgttttgtcaggcatgtccagactgtttctttaagcatgacacagatccacttttcctcttggggctgttctcccagcyggcgccttcagccacccccacccatgttctacagggacaacaga

SEQ ID NO: 256152 - DNA, 585 bp, Homo sapiens
tatgcatacatttccccaaacttaaaataaatgttggaaatcaaaaaaacaaaataaaataaaataagataaaataaaataaaaaagaatgttgtgaaaaggttgtcatgggaacaaagtttattcaggctgagaggtttgagcatcctttgtgaaaataatgaagatagatcaaagttgtataagacatggtcctaaaagtaagtgtatgagttggatgagggaggatactgtgaaagtgtaggtcagctggatattgacttggatggaatagrtaaagaatggcttttaccaatgaaaaccatcagatagcatggaaatggaaagaacaggctaatggggaaagataagtggcacatttgcaaataatttcataaaatttgagtgaaaaattacacatcaatattcctgccaccaaatgtctctatacctgcctacagcaacacagagtaaaatgaaatctaacagacatcatccatagttgtgtgatgggactgatttttagactaaaaaagtaaaaccatgtaacatatacattttaatttggcagctattttcatgctagtgtaataattattttagtct

SEQ ID NO: 256153 - DNA, 604 bp, Homo sapiens
tggtcctttgctatctacttgccaatgacagagaaataaaaactcaacttcgcaattcctgatgtcaacatgcttaaaaggtagtggagatgatatactatcaggatctgctttgaggtgccacaagtgggataggtatgctcatgggcacaaaaatatgaccrggtcaaaaaaagcttttctgagatgacacttacaccgattggaaaaataaagatagcaaccacaataaggtagcttatttaattggccaagaaatgaagtgtgtgtgtgcgtgtttgtgtgtgtgtgtgggtgtgtatgatgactactaccacagtagcccacccccttaccttcagggaatacattccaagaaccccagtggatacatgaaaccgcagatattcttgaaccttatatacaccacgctttttcctatacatacacacttatgataaagtttaactacaactttgtcacaatgactgattaacaagaataacaataaaatagaacaattataacaatatactataatgaaagttagacaaatatgaaccatctttctcttgctctctttctttcaaaatatcttactatattgtacccaacattttttgga

SEQ ID NO: 256154 - DNA, 568 bp, Homo sapiens
atacaccacgctttttcctatacatacacacttatgataaagtttaactacaactttgtcacaatgactgattaacaagaataacaataaaatagaacaattataacaatatactataatgaaagttagacaaatatgaaccatctttctcttgctctctttctttcaaaatatcttactatattgtacccaacattttttggacagtagttgacctccaataactgaaactgcagaaagcaaaatcatagataagtcrggactcctatatttcagataaagaaaatagcattgaagaattctatgcactccccaataatagtgctttccagagatggatgaagagtttagtgaagatgaggaagcatccgagggactggcaggagacaagactacaggagttggagttggtgtcacttgatgaagcaccttttgctccatgtgaaaggtttacacatatggagtgtcaatgaaaaactgtaggcagaaaaatagctacatgagatttatggtttggaaaaattgttctccttattacatggagagtgggttttagaaaataaagaac

SEQ ID NO: 256155 - DNA, 528 bp, Homo sapiens
ggttttactttctgaaacatggaaaacaggaagaaaaacaaccatgatttgacctttagatgtagcgctcagggaagatgtcttgtttggaatctatttattttctcaaagtattacttgaacatctatgatgagctttacataaaaagcagaaaaaaatctgtaaaaaatctaatatttgcttattckttgctctggtatttctttattattttaatgatttcacggaaattattgccattactagcagtttaatttgcacttacttccagtgacatgaggtgtaatttttctcatggaaaaaaggaattactgaaaactggaataataaagagcttctaggtggtccttagaatcacttatctcatgttagtgcttactattttcttatgaatacctcctatattattttctgtctgatggtcttttgtcaggacagatgtgactaaagcaaatacaaagcagtgggctctcttttttcagtactcttcctcaatattatgtcagccaagcaagccttaattctat

SEQ ID NO: 256156 - DNA, 611 bp, Homo sapiens
tatgactcataattgtttttgtcagaagacatcttgtatagtatagctgaagcttatttaaatagtatttatgccctgaaatgggcaaatttttccctttgctagatctttagtatgggagtttgagtcagtaaggtgagcttatttatgttactgggctcaaattcttctaagatcactatgtttaaaatggagcctgagttaccagagcgcaattctcactctttggtctatctgcagttttagatatcccttgtgttgtgtctccacgtttgctggtgtctttgggactatgggtgctgctctagtattctgatccaacttctctgttggacaattataatgtccaacagtgacaatgttcttgcaggacattgtcagagttcttgctacttcccagctctacttcttgatcaagcacatattcctgccctgtcytagtggtagatttttcctttttcctttcttcagctgcaatgggttttcactggtacccaaaggaggcaacgttttctgttgtacctacagaagcttaaggtttttgctcagtaagagagatttgaggaaatggatttaggcaggattctgcgcctttactgcagccaccagtg

SEQ ID NO: 256157 - DNA, 495 bp, Homo sapiens
aattatcattgatgtaatttgtccatttatttaaaatgtacatgagaatggaccataaattttgaatgtayagtctgctagaatcccagaaagcttaccatatcttaatatgcaagtattttattccatttcttattaatcttttgagagcaaagaaaatctttgaaatctaatcagggaaggtcaacggtttggactgatgttttaaatgatagagaccaccctattgtcttttcgttggccatctcatcctcactatttagaatgtcttttttgccctcagaaaatgttcaaaaacaaaaaaggaaaatccaaattatttacaaacatacgtaatcaagttgtaatgaaagcaaaatcagagtactcacaaaaatttgaagccaggcattcagatcaaacaaatgttaaaccagatacataaaaccaaaagtgaattcaccagaaaacatatggtcctcacagtcagaatgtaaactctgtaggaacaagagt

SEQ ID NO: 256158 - DNA, 495 bp, Homo sapiens
aattatcattgatgtaatttgtccatttatttaaaatgtacatgagaatggaccataaattttgaatgtatagtctgctagaatcccagaaagcttrccatatcttaatatgcaagtattttattccatttcttattaatcttttgagagcaaagaaaatctttgaaatctaatcagggaaggtcaacggtttggactgatgttttaaatgatagagaccaccctattgtcttttcgttggccatctcatcctcactatttagaatgtcttttttgccctcagaaaatgttcaaaaacaaaaaaggaaaatccaaattatttacaaacatacgtaatcaagttgtaatgaaagcaaaatcagagtactcacaaaaatttgaagccaggcattcagatcaaacaaatgttaaaccagatacataaaaccaaaagtgaattcaccagaaaacatatggtcctcacagtcagaatgtaaactctgtaggaacaagagt

SEQ ID NO: 256159 - DNA, 495 bp, Homo sapiens
aattatcattgatgtaatttgtccatttatttaaaatgtacatgagaatggaccataaattttgaatgtatagtctgctagaatcccagaaagcttaccatatcttaatatgcaagtattttattccatttcttattaatcttttgagagcaaagaaaatctttgaaatctaatcagggaaggtcaacggtttggactgatgttttaaatgatagagaccaccctaytgtcttttcgttggccatctcatcctcactatttagaatgtcttttttgccctcagaaaatgttcaaaaacaaaaaaggaaaatccaaattatttacaaacatacgtaatcaagttgtaatgaaagcaaaatcagagtactcacaaaaatttgaagccaggcattcagatcaaacaaatgttaaaccagatacataaaaccaaaagtgaattcaccagaaaacatatggtcctcacagtcagaatgtaaactctgtaggaacaagagt

SEQ ID NO: 256160 - DNA, 561 bp, Homo sapiens
tgaaatacattcattcattgtaagctagcactaaatatgcatttcaatttggtgctttgaaatttatacattttttacattggtttaagtatctcaagttaatgttcctgtattttaaaatggctttttttttggtcagaaagatttctcttcacttttttcttcatggctaatcaggataaattggattaaaatgatctatttaaaagtttaacactgatcttgtactgcttaaggaggatcttcaattgattaatagatttcatgtcaagatatatttactggctttgtgtaataatagaagtggtagaaggaaggtgaaattaaaacttcactaatactatcattattcaaacgwtttatcttccacaaattctatcataacttacttccaatccctaaattgtttaatgttatgagtacatagtgatgccagtagtgtcagttagattccattttttccagagtcattctatattgtgcttcacctagttccttcttttaaaaaccaacctattgaaataaatgaacaaatccatctttcctctggcttcatgtttg

SEQ ID NO: 256161 - DNA, 635 bp, Homo sapiens
tttggagatggggccttcaagaaggaggcagttaaggctacatgaggtcataaggtgggatatggataagatagaattattgtatctacaagaagggacwtcagagtgttatctctttctctgtccatgaagacagagcaagaaggcaactgtttgcaagtcagaaagacagatttcatcagaatttccaccatgctggcaccctgatctttgatttccagcctccggaactattagaaaataaatttctctttaagccacctactttatagtattttgtcatgtgaattatgtattagcctgactaatacacctgtattgtatcaactgtattctattccttaattttaaaccatgattcgcttcaaatactatggtgtcaaaataaaatttgattgtatatctaatgacttatatataaattaattttgacatttaaaacaatataaaggaaagctttctgtaaaagaagttgattctcacaggttttgcttgattttttgttgatgctgtggagagacaagctcttggagctatctactctgccattttcactaatgtctttgttcttttttagatgccctagttattcttcaattactcttgcaaggaaactatttggaatcagaagcaac

SEQ ID NO: 256162 - DNA, 635 bp, Homo sapiens
tttggagatggggccttcaagaaggaggcagttaaggctacatgaggtcataaggtgggatatggataagatagaattattgtatctacaagaagggacttcagagtgttatctctttctctgtccatgaagacagagcaagaaggcaactgtttgcaagtcagaaagacagatttcatcagaatttccaccatgctggcacccygatctttgatttccagcctccggaactattagaaaataaatttctctttaagccacctactttatagtattttgtcatgtgaattatgtattagcctgactaatacacctgtattgtatcaactgtattctattccttaattttaaaccatgattcgcttcaaatactatggtgtcaaaataaaatttgattgtatatctaatgacttatatataaattaattttgacatttaaaacaatataaaggaaagctttctgtaaaagaagttgattctcacaggttttgcttgattttttgttgatgctgtggagagacaagctcttggagctatctactctgccattttcactaatgtctttgttcttttttagatgccctagttattcttcaattactcttgcaaggaaactatttggaatcagaagcaac

SEQ ID NO: 256163 - DNA, 613 bp, Homo sapiens
gttttagacagccatttaatagtgacaggagaagcaaaatatgaataaaatgtatgttgaaaattcattgatatttttcaggtcaacgttgaaatcacttcagaaaggtttttatgttttttggagtgatattctccaaactcagtaacttattacaacattcgttgctaggaaattatgtacaatttactatactgagtttattataggatacagctctctagtagttttaagattagcatttcagtgcactcatcagtcactctttaatatagtaatcacttccttacacraaagaaacctgggaaacaaatcatacagagtattagagatttttacagttttaccctataattttaatgccctatttacaatgaaatatgtggagtttttagaaatatttgaaactagttttattaattatttaataaacattaaattatcatttgctaagttctaaaaataattataaagtaaaattaactaatttagttctcatgaaataagtatgtcatatgttcttattttatatttaaaggaactgagaagggagagtaattttcccaaggtttttctccctgcaaataaatactgataaagttgaagacctgag

SEQ ID NO: 256164 - DNA, 636 bp, Homo sapiens
ctatttatctctgttagagaaactttttttcagcctctagaatgttaatattaatgtccatgctctgaattattagaatttrtcttgtaattcacatgaaataccagtacctaaggcattcatttgataatttgacaataatttggttgccttccagtacatgacaaaagcatgactgagataattcccatttgaaagagacactctaaaggacttgctaattaaatattccttcagatcattgtttccaaagagctagtgtgcataaaaatcacctgttaatattcaaatgccctttcctatgattaaataaaacttgattaattgggtaatattcatacttcttttcttttgtttctctcgtagtccatcttccccttcagtcttcatcctcaagctttttcccttgttcacctattttaattagatggagtctgagacacattagccaatgttttattaatgattgtggttgctgtttctaagttacaaaccagattctgtcattcctttattttactttttgtgctgaggtgaaaattatttcattctttacttgcatctaatttcaaggtccatataattgtcaataagctaaattcagcaattcagggcctgagatagtatatgtttttt

SEQ ID NO: 256165 - DNA, 636 bp, Homo sapiens
ctatttatctctgttagagaaactttttttcagcctctagaatgttaatattaatgtccatgctctgaattattagaatttgtcttgtaattcacatgaaataccagtacctaaggcattcatttgataatttgacaataatttggttgccttccagtacatgacaaaagcatgactgagataattcccatttgaaagagacactctaaaggacttgctaattaaatattccttcagatcattgtttccaaagagctagtgtgcataaaaatcacctgttaatattcaaatgccctttcctatrattaaataaaacttgattaattgggtaatattcatacttcttttcttttgtttctctcgtagtccatcttccccttcagtcttcatcctcaagctttttcccttgttcacctattttaattagatggagtctgagacacattagccaatgttttattaatgattgtggttgctgtttctaagttacaaaccagattctgtcattcctttattttactttttgtgctgaggtgaaaattatttcattctttacttgcatctaatttcaaggtccatataattgtcaataagctaaattcagcaattcagggcctgagatagtatatgtttttt

SEQ ID NO: 256166 - DNA, 483 bp, Homo sapiens
tgacgtaggcttaatgttgaataagtggaagatgtggggctgtagccagtttgtgaaacctggtctagatgttggaaaataagttgtggagaaactagaaagaaagactatttcagaagtttaggcaaaagatgatgccggcatgataagttggttatgaagggaagtgagagcaatgtagatatgttttctaggtagaaamcaatagaactggttgagggattagaggaagggcgagacgagaagtaagtgagtgtgacagacttttagcttgaacaactgggtggctaatagtggcatttaccaagatagaaaaataatattgaaaaaaataagttttggaagccatgtcaaatgtactatctggacatgttacatttaagataatgatcagttagatacttaaacataaaaacctataaatcagagaacgattcaaggctaggaatacttttagtagtcagaccagatacggtgtttcag

SEQ ID NO: 256167 - DNA, 590 bp, Homo sapiens
cttcatagtattcagcagaatttattagtatttaatgtgttttgttaattatktatatcaagtctttaccacatcataggcttcctgaggaaatagcatctggagtagttgccatttcacatctaaagtctggcacagtttctggaacattgattataaggaaattttggtaataggaaaatgactgaactctggcaaacactttctctttatttccatttgatctaatggaaagagtcacctgaatattattacttctcctaaaatatatgcattataaatttaacccatcatgaattgttttattaatcactctggaattctcatttaagtattatgaacattttgcattcctctaaccaagctacctcatcactaccctccacttttcctaaacaaatgatgctgctgaaatgacaatgtaatctgagataacctgatataaatgtatttaacctatttttttctgaatcaatatattctttttaatttttacatgatgttttacaaatattatctcaaaattaatactctgttttcttctctcacactcttaaagtcactttcctgaataatctttcttttcttta

SEQ ID NO: 256168 - DNA, 590 bp, Homo sapiens
cttcatagtattcagcagaatttattagtatttaatgtgttttgttaattatttatatcaagtctttaccacatcataggcttcctgaggaaatagcatctggagtagttgccatttcacatctaaagtctggcacagtttctggaacattgattataaggaaattttggtaataggaaaatgactgaactctggcaaacactttctctttatttccatttgatctaatggaaagagtcacctgaatattattacttctcctaaaatatatgcattataaatttaacccatcatgaattgttttattaatcactctggaattctcatttaagtattatgaacattttgcattcctctaaccaagctacctcatcaytaccctccacttttcctaaacaaatgatgctgctgaaatgacaatgtaatctgagataacctgatataaatgtatttaacctatttttttctgaatcaatatattctttttaatttttacatgatgttttacaaatattatctcaaaattaatactctgttttcttctctcacactcttaaagtcactttcctgaataatctttcttttcttta

SEQ ID NO: 256169 - DNA, 545 bp, Homo sapiens
aactaataggagatatacatatatatatatatatacacgtgtatatatgtatatgggaatttattagctagtattaaatcacaagatcataggtcccacagtaggccatctgcaagctgaggagcaaagaagccagtccaagtcccaaagcggaagaacttggagtccgatgtttgagggcaggaagcatccagtatgggagaaagatgtaggctgggaggctaagccagtcttgctttttttacatttttctgcctgctttatattcgctggaagctgattagatggtccccacccagattaaggataggtctgccttcctcaggccactgactcaaatgttaawctcctttggcaacaccctcacagacacacccatgatcaatacttagcaatccgatacttcaatcaagttgacactcagtattaaccatcacaccatgcctttcttcctgtcctgcttttggttttgaaatttctgccttaatgaaaatctttaataagattagaatgccacattttatcagtggattgaagtgcgtatg

SEQ ID NO: 256170 - DNA, 453 bp, Homo sapiens
ttgttttatgacctaatgaacagaataaatttgccagaaacactagttaaaaactaaaattagttaacaaatcttgaattatattgtagtattagaataacactacatttttaattaatgttactatttatacttgagaaatgttattaactaagatgttggaataatgagcttttcacacctcaaagctcagtggagagtttggctgtagaggaaaatcaattcattataaaattatcttctaagcaactagaagctgttaataaaataaatcrtcatagtattttcagaaccatgaagctgctcatgcaacagtgatgaagtgaaaaataattggcgtttatgcatgtttcatactcgaatgggctttacctgctgtttcaattttgatattggagaaagaaccaaaaaataataatcaaaacgtatagtttaattattggaaaccacttt

SEQ ID NO: 256171 - DNA, 466 bp, Homo sapiens
taattaagtaacaaatatttattgggcatttacgttgtgccaagcacttttctagctgctgagaatggagtgagtggtgaacctatatgtaagaaccagggggttgtggtagagtgacyatggttgaggtctggccatgtctgatttggtgtttaaggaaggtcctttcaggggtgacactaaacaccaaactgaaagaaaaggagaagctaggcttacaaagatataggacataccattttaaatggagcaatagcaagtgtaacagtgcaggtttagcacatgaagaaaagcaaaaagaaggcctgtgtggctgaagtatcatgaataagcaggagagacagcatcactagatgaggttgaagaggagggtggaatcagatcatggagagcttttaggtcctggtaagttgccttttattctatattttattgaaacatttttgtacttatattaccacatgtt

SEQ ID NO: 256172 - DNA, 621 bp, Homo sapiens
tgggttgcttatcagggatgagagaaagaaagaaatcaagattgcctcctaaattcttgcttgattatctaggttgatggtaaggctggtaagctgagatggtattatggtttggctctacaaatttcttaaatttggaatgtctttcagtcttttttttaaattttttacctgcctaataaggcctggtggtggtcagaatggctgatgttgaagctagggtaagatgttatttttatttttgtacaagtctttcccactgtaattatctccataatagtatttcacaggaggcagcagcttygggtttcagtctttctctttgacatccaaactcaaactccctgtgagagctttatatatccctgccctttgtttgccacatcgattgccaaatcttgctgcctcactttaaatctgcagcttttttctccccctccactgctgccctagtctttacctgaatgattctcttcacggaaaccctctgcgtttaagcagtccatctgttccatttctgcctactgccactattcaaaagattctttctgtgcttccagcatttccattcttactcttaaatcccagaaggtattcccattccccaagagtcaagtgcac

SEQ ID NO: 256173 - DNA, 621 bp, Homo sapiens
tgggttgcttatcagggatgagagaaagaaagaaatcaagattgcctcctaaattcttgcttgattatctaggttgatggtaaggctggtaagctgagatggtattatggtttggctctacaaatttcttaaatttggaatgtctttcagtcttttttttaaattttttacctgcctaataaggcctggtggtggtcagaatggctgatgttgaagctagggtaagatgttatttttatttttgtacaagtctttcccactgtaattatctccataatagtatttcacaggaggcagcagctttgggtttcagtctttctctttgacatccaaactcaaactccctgtgagagctttatatatccctgccctttgtttgccacatcgattgccaaatcttgctgcctcactttaaatctgcagcttttttctccccctccactgctgccctagtctttacctgaatgattctcttcacggaaaccctctgcgtttaagcrgtccatctgttccatttctgcctactgccactattcaaaagattctttctgtgcttccagcatttccattcttactcttaaatcccagaaggtattcccattccccaagagtcaagtgcac

SEQ ID NO: 256174 - DNA, 614 bp, Homo sapiens
ttaaacctatgcctcatttgagttttgtttgttctgtgtccctgtcagttgtttcctcactgtttttccattatcatactcttgactgacccaatttggattctgttttggaaacaatccagactgtgtttttgtccaacttttgcctgaattttttcattgtttgtaattgcttaggcaattgcagctgtatttaaaaaaataaatttctgagcatattagagcagtagttttgtaatgcaaggaggtaaatatcccagtcaatcaattgttctatatgggctttggtgagaaacagatctaagcacgaatcttagctccatcacttactagctaggtaatattgatgtcatttcatcttcctaaacctcagttttctcatctataaaacagaattcatggtgaacatgaagtgggataatgtatgtaatattcttagttattcacactttccatgtaccaggtgatgagctaragcagcatcatccaataggaaaatattatgtggtatgtatctaatagtaaattttctgttagccacattaaaaaagtaaaaaaagaagccatgaagtcaatttaataatatgattttatgtagtctgctgtgtccaaat

SEQ ID NO: 256175 - DNA, 535 bp, Homo sapiens
tctaaatatgagtgtaatatagagttcactggacatttcccagttcaaataattccatggtgattgtaaaaaaagacaaaacagtaatatttatatatatagtgacttaaataaactagaactatagagaatattctaaacaaatgagattctaacatattcttcacagaacacatatttatataatattcaatgtttaatttgttttgtatttattgataaagctccattattataaggtacatgggtacactttggtcaagaattagacccaggcagacatccaggcatgcacgagttagcgggattggtgcaccagtgcatgctccacttgttatataacctgtttgtgtaagttcatacttggctctgagccactattgtcttagcaggtacaactgccctgctattgctgtacaggagctgctggagcccagaaaaatagagaaccagagctgctcatcttgcagatggacagaggagagccagggcatggccygcctggacgtggcatgcactctggtccccagagaga

SEQ ID NO: 256176 - DNA, 591 bp, Homo sapiens
gacaatatattcttacagtttgtttgttttttttttttttcaacaaatccaggggattaaratgggtatctaggaaggtgtgttagtcagctttgggctgacataaaatatcacagactgggtggcttaaacaacagaattttatgttctcacattcctgcagcctggaaattcaagacccgggtgtcagctgattcagttcttggtgagagtttgcttgctggattgaagacaactgatttctctgtcacctcgcttgataggaaaggagagagagagagagagagagtctggtgtctcttaatataaggtcattaatcctaacatgaagagcttcaatgctatgatctcatttaaactttatcacctcctcatgggccccatctccaaatgcagtcacaatgggggttaaggttgaatcataccaatttgaggggtaggggttgatacaatgcaatccatagcatgaggcaactgctgcatccacaagtcaggctgcaagactaatctttcctgttgaaatttcctcttaggccccacaaactaatgggtcttgtatcatcaattaggtcatagttttccaaactgtca

SEQ ID NO: 256177 - DNA, 577 bp, Homo sapiens
aaagtcattcacttctgtattgaacatgtcataatgaaacaaattttagtttaagttacttggaaatctatatttgacaatatattcttacagtttgtttgttttttttttttttcaacaaatccaggggattaagatgggtatctaggaaggtgtgttagtcagctttgggctgacataaaatatcacagactgggtggcttaaacaacagaattttatgttctcacattcctgcagcctggaaattcaagacccgggtgtcagctgattcagttctyggtgagagtttgcttgctggattgaagacaactgatttctctgtcacctcgcttgataggaaaggagagagagagagagagagagtctggtgtctcttaatataaggtcattaatcctaacatgaagagcttcaatgctatgatctcatttaaactttatcacctcctcatgggccccatctccaaatgcagtcacaatgggggttaaggttgaatcataccaatttgaggggtaggggttgatacaatgcaatccatagcatgaggcaactgctgcatccacaagtcaggctgcaag

SEQ ID NO: 256178 - DNA, 577 bp, Homo sapiens
aaagtcattcacttctgtattgaacatgtcataatgaaacaaattttagtttaagttacttggaaatctatatttgacaatatattcttacagtttgtttgttttttttttttttcaacaaatccaggggattaagatgggtatctaggaaggtgtgttagtcagctttgggctgacataaaatatcacagactgggtggcttaaacaacagaattttatgttctcacattcctgcagcctggaaattcaagacccgggtgtcagctgattcagttcttggtgagagtttgcttgctggattgaagacaactgatttctctgtcacctcgcttgataggaaaggagagagagagagagagagagtctggtgtctcttaatataaggtcattaatcctaacatgaagagcttcaatgytatgatctcatttaaactttatcacctcctcatgggccccatctccaaatgcagtcacaatgggggttaaggttgaatcataccaatttgaggggtaggggttgatacaatgcaatccatagcatgaggcaactgctgcatccacaagtcaggctgcaag

SEQ ID NO: 256179 - DNA, 556 bp, Homo sapiens
atttagcaaattcaaaatcatgcatgcatggtaaccatcagatggggctgagtaacagctgtccatattttagctmtttcttttctagttgagcacattctcctctactccctattgtctttcatctcctactcctttactaatttacatacagtctttacttgtctggcccctttgcactcaagtctgcattctcaatacaaataagtcctctactattactacggagtcggttttatcatcaaggactttacatctcaggaaaagctctgagatagatattatggtgtgaaataatttgcagtgcaaattaccttaggcttagaggttttgaaatgacttatccatgtatattaagacatgcctttgaagggaaactagaataaagataaattaaattcactcttcatatgaggtaaattttccaatcttagaatttggaagagaatggtatcatgacataatgaaatcgtccagagccccgtactaactctgggtcagctttaggcagattattttatttatctgggtctcagattcctcatccttaaagtaa

SEQ ID NO: 256180 - DNA, 613 bp, Homo sapiens
tacttcttactcgggaaatccgtctgttctattgaggccttcaactgattagatgaagcccatccactaatagagggtaatctattttactcaaaatctaatgttaagtctaaatgttaatctcatctaaaaacaycttcattgaatgtccacaatgtttaaccacatatctgggcactgtgacccagtgaagttgacacataaaattaaccatcaaaggcctgaatacagcaagaaaaaaaaaatttaagagatgcaacttgtaagggaagaaaaagtttccctgctctaaacctggtcaaacctttcctggtgtcgtgttcaagtcttgacaagatgttctaagaagtgcctagagacacttggatcataattacatcagcacagagcaaagcacttttgataatgaagggacttaaaaccataacatgggtaagatggctaaggggaagaagaatgtttaatttttttaaaaaaattagagttttggaagggatacaataactatcttcaaacagttggggaattttcaagtggagtttttctggttaatctaaatatccaaagacaaatgctgaatccagtccagagactacatgctacaaagagattg

SEQ ID NO: 256181 - DNA, 604 bp, Homo sapiens
gagctgattgtggtccttgataactgattacctgtctaggacactgcaatcttctgtctattgacaggaaaatatagtttcccctgaagtgccaatatccattcttgcctttgaccatgaaccactctgcaaacacccgggaaggctcaggtgcatctgacaggctctttgagggagagattgattccatttgtatgcctgttagataatgaccttcggcctctgtacccaaagtgacaataaaaaacgccatctcatattcatctcatgtcccaggaaatactatttggtttcctgtaaacagtttacaagctttgggttttccagttgttggtttggtagttttgtgttgttttgctytcttttctttttttcatttttttctttgtttttgttttcctcattggacagaaagaaaaaatacaagagaggaaaaagagagattatttcatgagataagaaaaggtctcatctcatcacaggtgagatcataggaagtcattttctgggtctaaagcatctcccagggatgactgatgctctccctagtccatctattttgccattttggtagcacattacttattacatcattaaacatata

SEQ ID NO: 256182 - DNA, 227 bp, Homo sapiens
tctaataaaagggcaaaaggaaacatatttgggaacttgggccctggaaagaaaaacacaaaaagaaagccagaaaaatattgggaaaataatttatattaataattcacatatttatgggacattgaacctaatgattatatctcaaatataatcagaatccacagggagtaaraagaggcctctgaattcaaaatacatgaaaaagtccatttggtatagttttc

SEQ ID NO: 256183 - DNA, 477 bp, Homo sapiens
caagaaggcaagggacttactctccagctcctagtctggtgctgcagtttcatctctagtggggaaggctgccttttccgattccttccagcctcatgttgcaggtaggtgcactgagaggattgggtatcttttcccccacctagccaccactctataaggaagaagctgtagtccaacatcatcctaatattcttaagaaaatgcaagacctcaagaaaagccaaacaatctkgaataggaatacgggagtatttacactttctgatttcaaaatttaccacaaaactgcagtaatcaagacagtgtggtcctggcataagggtagacatatagatcagtggaatataactgacagtccagatataaaccctcatatttatgatcagttgatttttgacaaggctatcaagacaatagaggaaagaataatctttaagcaaacagggttgggaaactgaatatccacatgcagaa

SEQ ID NO: 256184 - DNA, 490 bp, Homo sapiens
tctctggtcctgctagaagatcccactggacatacagatttggaagggatgtgatactgcctttactgatttctcatgtcatggaggtaagtcagggaagaggctttggtgcagagcaatttatggctttgagaacctgttaccaaaccatttgtgaataataataagactaacattaatgataacaacatttattgaatgtttattattactatgtgctttagacttgtttctttatttaatgtacttacatacacaaaacttatgacaagtgtagtgtcatgatcttaatttgcagacgaggaaatccaggcacttgcagtttaaaygacttgaccatgggcactaatatagtttggctctgtgtcccacgcaaatctcatctcaaattgtgatccccacatgttgaaggaaggaagtgattggatcatgggagtggttcccccattctgttctcttgatagtgagtaaattctcacaagatctgatg

SEQ ID NO: 256185 - DNA, 538 bp, Homo sapiens
agcataacaattattcaatataagtgttacaggacacagaaggcttcagaaatgaagacccaaagaaacagggaaacctgtgtatttctatgctgtttgataaagttgatagttgtggaraagtatgcgaggacaagtatgatctaatggtgatagactggggaaacttagcaaagcctgtttgctcagattcttttctgggtctcagtgtcttcagagataagaatgttcttttcctccatgtatagggtcttatggggaaggtcagttaggttttatggcctgctttatgggagaagtgatgaggggaaggtgagagtgacctttctgcttttgctgttttctcaaataccaaggtgccatattttggggtagcatgtcctaagcctcatcattaacctctctgggacttaatttctttatttataaaatgtggacaaaagtattttctactttataggttaattgtgagggttaaatgagctaattttatgaatagacagacatagaaaaaccattaaagtagtgattgacacac

SEQ ID NO: 256186 - DNA, 582 bp, Homo sapiens
acatcatttgatttttaaacaggctcatcactaatgttcccagataagtggtaataataatgatagtaagcagtttttacatgtgtactatgtgccaactatactgtcatcattctttaaaatgattctgggatatagacattattatcctattttatagataagaaaacttaagattagataggttagtaacttgttaaaactcaagcaattatgaaatgatacagcagggacttaaatccaactctgctttcaatgtctgtgctattaaccaccacactgtggcgttgtttcaacttctaccttgaacttctcactctagacaaagcagtccggacagctttatgagtaagcagggtagatgattacttatgcacaaaagattaagtctacttcctctcagttcatcattataatttcagtcttttgggtcatggtkttttagtctttgagaatccatttatgtttaaaatgctattacttgtgggaagggtcattcatttagccatcatcagctaacatctttattattagtcaactacattgcattaattgccagacagttttactgccccaagaggg

SEQ ID NO: 256187 - DNA, 540 bp, Homo sapiens
tcaagttataacctttgaaccttaatgcattcactctccttttctattttagagtctgatctatgaaactctttttcctccctttcctcattgcattcagggtttctttgacataggacacagtgaactgctctttagttcttgtctttccccaaccctttgtgaggtatcaaatccaagtccactaatctataaattttacctctagagccatrcaaaagagaatcagttactatcacacttataggtctagagaaaaggatgcaaagctaaattgcacaatctcgtttgaaacaattctagttctattagggatcttgtcagcagtaaaaaaatgcacaagcagcaatcccagaaatgctgagaggctatccaaaactcacctttttccaaaatcttaccttcttctaaaaagaattcaaagtattctttgttctcatttttgacaagattttgatttgggatatgagtagaaaacagtgaatatacagtagtaggtactaaatatataatcagcttttgttttagaagctacatatg

SEQ ID NO: 256188 - DNA, 659 bp, Homo sapiens
caccatgccctgctaatctttgtattcttagtacagtctgggtttcatyatgtcgaccaggttggtctcaaacacctgacctcaagtgatccatctgccttggcctcccaaagtgctgggattatgggcatgagccattgtgccaggtagaaaatacagtttttgattttatatttgtatgcacgagaatggattttctgctgagaaaccctttatattgtgccattggaaacagactcaatgacttaaataacatagaatttttgttttgtgcaagtgaagaaaggaacctatatcattctgtcttaccaaggaaaatggggaaaggtaatatttccaataaacagaggacactagataattttggaaataaggagtatataggttaaactgttagaaaagagaaaataatataaattaagaagtggacttttgatctttcagataaaataatataaagggatggaattttgatctttcctgtttgttataagccaggcactcacttttaattatatgtttgtttttttttttgcctttctctccttccttcttgccaccttctttctctacctcctttccttactcccatgctcccttcctccttctcttccttcctcccttctttctttccttccttccttcctttattttgtttt

SEQ ID NO: 256189 - DNA, 500 bp, Homo sapiens
atcccttctgaatttcagaaaatcccacaataaacaaactaccctccccagagtcaggttttctaagagcaaacaggggtaatgatatctgctgcagcacaacacagtaaatagggttttgagaataagcattattaacaggctcacygaactgcttcaaatcctatttggagggaggcatggtataaataaataaacatgctccctggatccttactctctgaggtttagtgagctacttcaatcttggaaaggcattaaaattgctggtacataattggatttgttttgctattagggtgcagatctctaattttttccatgtaggccacattcatggagcagtagcagtcttattgtgatagaaatgctaccggcagtgtgactcttggggtcacctgaaggatagagaaggggaagcaagggatacaaatcctcgtgttcccacttactcttaatgcatgcctgttttttcttgctgggtaaatagataggctagt

SEQ ID NO: 256190 - DNA, 500 bp, Homo sapiens
atcccttctgaatttcagaaaatcccacaataaacaaactaccctccccagagtcaggttttctaagagcaaacaggggtaatgatatctgctgcagcacaacacagtaaatagggttttgagaataagcattattaacaggctcactgaactgcttcaaatcctatttggagggaggcatggtataaataaataaacatgctccctggatccttactstctgaggtttagtgagctacttcaatcttggaaaggcattaaaattgctggtacataattggatttgttttgctattagggtgcagatctctaattttttccatgtaggccacattcatggagcagtagcagtcttattgtgatagaaatgctaccggcagtgtgactcttggggtcacctgaaggatagagaaggggaagcaagggatacaaatcctcgtgttcccacttactcttaatgcatgcctgttttttcttgctgggtaaatagataggctagt

SEQ ID NO: 256191 - DNA, 578 bp, Homo sapiens
tttatcagaatacaacaaggaataaaaagtagataagcggctgggcgcaggggctcacgcctgtaatcccagcactttgggaggctgaggcgggcggatcacgacgtcaggagtttgagaccagcctggacaacatggtgaaaccctgtctttactaaaaatacaaaaattagcctggcgtggtggcgtgcacctgtagtcccagctacttggaaagctaaggcaggagaatcgcttgaacctgggaggtggatgttgcagtgagctgagattgtgccactgcactccaggctgggcaacagagtgagactctgyctcaaaaaaaagaaaaaattagataagcttttttctcaagaatatagaaaaggatgataaatataaactaaagaagtaggaataaaagaaataataaatataaaaggcataaatcatcctatctagggaagaatatctaaatagatgattagcaagaccaattaattattaaggtaagaaaatttaaaagactgatagatttctggcaagactgatagagaaaataatatggaatcagaaaggacaatagctacagataaaaa

SEQ ID NO: 256192 - DNA, 622 bp, Homo sapiens
tcagtgaagttagttccactctactcaagtctaacagaatcagtggtaattattatttaactgaattgtattccacatcatatagcattatgattaaacaatgtcctcaaataggctctgttatctccactatgataatagataggtagatgatagatagatatgtaggtaggtaggtaggtaggtatatagattagatagatagatacatagatagatgatagatgttttataatgctaaagtcccattttattgttatgaagwtggtatatctgaagttgatgtgaaactgatcctttttttccccaaaattttcattctcctcagcccttcctccactctctataatgtaaatgaaaattaaggtatgaattttcagggtgttctaagaaacatttgataactgagtgtttcttgaacaaagggactatttacagagttgtaagtagatttaaggatatcttaagctaataatggcaaaacacacacagaaaaacaacaagaacccattataatcccttggaaccaaaggaatcaggggaaagtaaggtagtggtgaagcccagagaggtcttagggccatgaaggaggagccacgtgatacaacctataattgtagga

SEQ ID NO: 256193 - DNA, 537 bp, Homo sapiens
attacaatagccttgaaattaaaaaaaaatctatagctatgagtggcttgtttacatatatgtgaagcatgtaagtgtgagtgtaygcatttatgcatatgtgtacatcttttgtataaaagtgtaggtgaggaaaattgtcataatacataaggaaagcacaaatacctagaaagaagatatataaattatttgtaaaaattgccttagaaacctcaggcaagttggccaccagtaaaaatgacatcaattgtagctgtggtcagtactactgtaacatggagcacttccagactggattactccttgtaaaaatattctctaaattatgatgtttatctagttttgttccacagagttactggaaattaagatttttaactagaaactctaagaaagttttaaaagaatttttgagaatgactaaaccctcactctataattagaagtacatactttttttagaaagttgaacatgaagttatacaaaaattacaaatgctatttgctgagattcgaatgtaaattagagtcatt

SEQ ID NO: 256194 - DNA, 550 bp, Homo sapiens
tactttaattaactcatgcattcatttattcagcatgaatttattatactcgtatatgtactaagttaactactktggtaggtactgagagaatagtaaaaattacatataacacaacactaggctaagaaggaaagctaaaatgacatacagcaggtccttgaataacattgttttgttcagcgttgttttgttgtgaagttgatgagaaaaagaaaaactggtttcagtatgtgtcatattttgcttaaagtcacggtttccaagaacctctcaatgacagtgagagaagacctactgtatgtagatagtccttttatatgagagtccatgaagaaagtaaattttaaactgggccaagggaatggttcaatatatttttataagcaaggaaaaaagtgaaggacatttttattcaaaggatgtcagaagcaaagttctctggagttagcaatgtggttaatgtaaacttgggtcaatagggtcctgactgaattggagattaaattgctttctagaagtgagtatatagtaaaataaaagtttgaaa

SEQ ID NO: 256195 - DNA, 550 bp, Homo sapiens
tactttaattaactcatgcattcatttattcagcatgaatttattatactcgtatatgtactaagttaactactgtggtaggtactgagagaatagtaaaaattacatataacacaacactaggctaagaaggaaagctaaaatgacatacagcaggtccttgaataacattgttttgttcagcrttgttttgttgtgaagttgatgagaaaaagaaaaactggtttcagtatgtgtcatattttgcttaaagtcacggtttccaagaacctctcaatgacagtgagagaagacctactgtatgtagatagtccttttatatgagagtccatgaagaaagtaaattttaaactgggccaagggaatggttcaatatatttttataagcaaggaaaaaagtgaaggacatttttattcaaaggatgtcagaagcaaagttctctggagttagcaatgtggttaatgtaaacttgggtcaatagggtcctgactgaattggagattaaattgctttctagaagtgagtatatagtaaaataaaagtttgaaa

SEQ ID NO: 256196 - DNA, 615 bp, Homo sapiens
tgaatgacatgagtttgaactataagggtccactttacatgcagatcttctacctctgccatccctaagacagacaagcaagaccagccccttctcttcttcctcctccttagcctattcaacatgaagatgatgaagatgaagactttyatgaaacccacttatgcataatgaatagtcaatatattttctcttcattataattttcttaataacattttcttatctctagtttactttattgttaagaatacagtatgtaatacatatgcaaaatatgtgttagtcacctgtttatataccagtaaggcttctggtcaacagtagactattagtaaagtttttggtgagtcaaaaattatatatggcttttcgactgcatgggagggttggtgcccctaacctctgatttgttcaagtgtcaactgtaattctttcttcagttttatggtataataccaggaaaagaatcttggagtcaaggacatggaaatgaattctagttccatcatttactaattgtctgacattgattttcagtcaattcctatgtaaatgagcataataatgttgcatatctcaaggcataatagaaaaaatacatattattagccc

SEQ ID NO: 256197 - DNA, 595 bp, Homo sapiens
gtaatttgaggtctagactatgaaatgtataaaaagaaactgaaaaattctgtcttattaatcaccaaacaagaaagttaccaaaaacttctgagagtgaatcaaaagcacttaggagtaaactaaagaggctcctactgaccaaagatggagcaaaatgaacatcaagaagaataatgattacaatggacttaaagatatcaaatttatataaatccatttgtatgcaacgatacttagaacaaagaacagcaaaattaaaacaacctcattggtcacctttggagratgccaggtgttgaaattattacttaggaaactagtaaacaaacggaaagaatcaagcaactatctttcctttgctatatgaattaactttagattaagcaaggagttggttaaagtttctctttataaagtgtgttggtttcctaaggttgctgtaaaaaatatgacaaactggggggtaccttaaaacaacagaaacttattttctcaaagttctgaaagccagagcccaaaatcaaagtgttagtcataccccctccagagcctccagaggaggattcttgtctcttccagcttctggtggctg

SEQ ID NO: 256198 - DNA, 509 bp, Homo sapiens
ttcctgaaaggcagaatatatttggatacataataaccaagaattagagaaagacatgaaacattaaaaggagtcatagaattttcttttaggagagatttttctaaaaatgtaaccaaccacaacaaaaacatccatacctggacagaatgtaacagtaccaaaatgaaagaaaaactttaaaagtttttggagasaaaaagatcacccctaaaaggtaattattggatcattatattcttcatcagtaacattagatataagacaagagtttggtaacattttaaagttttgaaagaaaatgaatttctatataatattttatattccagttaaactactatttaaatatttgtctttataagtgtgagttttctagaaaacagaatcatacgatatgaagtttttagtgacttttttcacttagcacattttcaaactccatccatggtttggtgtaagttcagtactttatcccttgtaatggccaaatactattccagtatatg

SEQ ID NO: 256199 - DNA, 509 bp, Homo sapiens
ttcctgaaaggcagaatatatttggatacataataaccaagaattagagaaagacatgaaacattaaaaggagtcatagaattttcttttaggagagatttttctaaaaatgtaaccaaccacaacaaaaacatccatacctggacagaatgtaacagtaccaaaatgaaagaaaaactttaaaagtttttggagagaaaaagatcacccctaaaaggtaattattggatcattatattcttcatcagtaacattagatataagacaagagtttggtaacattttaaagttttgaaagaaaatgaatttctatataatattttatattccagttaaactaytatttaaatatttgtctttataagtgtgagttttctagaaaacagaatcatacgatatgaagtttttagtgacttttttcacttagcacattttcaaactccatccatggtttggtgtaagttcagtactttatcccttgtaatggccaaatactattccagtatatg

SEQ ID NO: 256200 - DNA, 591 bp, Homo sapiens
caaaaaattcagggtaaaatgaaggacaatgatacctgaaattcctgagataatattgtcgaaagagtatttccaattcatttatttctttattccaaagtttttgttaagaaaaactatgtataaaatccctcaaggtgtgatatctttaaaaagttmttgaactagataaaagagatatctcatattggaacatctaagccctaactctaccacagcaggagaagatctattcttgcatttagtaagcatttgagtatattctgtgtgtcgtgttggggacacaaagtggttctccctgagttcacagtctattgtggagacaattatgattcagaatggtaagtgccaggatagcagcaggcatagatatctttaaaaacgccaaggagagcatctaatgaaacctgtcattaatggttaaactgcagaaggaagaatagttaaaattgtgaagaagtaagaaaggtgtttcagttagaagaattttttttaactttaaagttcagggatacaatggtttcttacataggtaaactggtttcatgggggtttgatgtacacattattttatcacctggatattaaacc

SEQ ID NO: 256201 - DNA, 591 bp, Homo sapiens
caaaaaattcagggtaaaatgaaggacaatgatacctgaaattcctgagataatattgtcgaaagagtatttccaattcatttatttctttattccaaagtttttgttaagaaaaactatgtataaaatccctcaaggtgtgatatctttaaaaagttattgaactagataaaagagatatctcatattggaacatctaagccctaactctaccacagcaggagaagatctattcttgcatttagtaagcatttgagtatattctgtgtgtcgtgwtggggacacaaagtggttctccctgagttcacagtctattgtggagacaattatgattcagaatggtaagtgccaggatagcagcaggcatagatatctttaaaaacgccaaggagagcatctaatgaaacctgtcattaatggttaaactgcagaaggaagaatagttaaaattgtgaagaagtaagaaaggtgtttcagttagaagaattttttttaactttaaagttcagggatacaatggtttcttacataggtaaactggtttcatgggggtttgatgtacacattattttatcacctggatattaaacc

SEQ ID NO: 256202 - DNA, 614 bp, Homo sapiens
cattcttcttaatggctgcatagtattccatcacatatacataccayaatttctttatctagtctatcattgatgggcatttaggttgattccagtctttgctattgtgaaccgaaagaagacatacatgtggccaaaaatcatgtgaaaaaaagctcaccatcactgatcattagagaaatgcaaatcacaatcacaatgaggtaccatctaacactagtcagaatggctattatgaaaaagtcaagataatagatgctgctgaggttgtggagaaaaaggaatggttatacactgttggtgggaatgtaattgagtttgaccattgtggaagacaatgtggtgattcctcaaagacctaaagacagaaataccatttgacctagcaattctactactggggtatataccccaaaggaatataaatcattctattataaaatcagaagaaagtttaagtgcaaaggtgtggaaatgagagacagcacggaatattcagagaagagaaagtagctagaccgagaagtgagtgtgacatgttcaactttattattatacaaacatctattttccgtttagaagttagcatggttgaaaacaattattttcactgg

SEQ ID NO: 256203 - DNA, 614 bp, Homo sapiens
cattcttcttaatggctgcatagtattccatcacatatacataccacaatttctttatctagtctatcattgatgggcatttaggttgattccagtctttgctattgtgaaccgaaagaagacatacatgtggccaaaaatcatgtgaaaaaaagctcaccatcactgatcattagagaaatgcaaatcacaatcacaatgaggtaccatctaacactagtcagaatggctattatgaaaaagtcaagataatagatgctgctgaggttgtggagaaaaaggaatggttatacactgttggtgggaatgtaattgagtttgaccattgtggaagacaatgyggtgattcctcaaagacctaaagacagaaataccatttgacctagcaattctactactggggtatataccccaaaggaatataaatcattctattataaaatcagaagaaagtttaagtgcaaaggtgtggaaatgagagacagcacggaatattcagagaagagaaagtagctagaccgagaagtgagtgtgacatgttcaactttattattatacaaacatctattttccgtttagaagttagcatggttgaaaacaattattttcactgg

SEQ ID NO: 256204 - DNA, 592 bp, Homo sapiens
aagacgtagcaaagtgggacctgaggctgataggacacagactaagcacatctgccctccgctccaacttttcatacatcactaaattgttccttggagtaatttgagaaccaggaattaaataacaaagccctaatttgaggggatttagctctaaatcatactggaattgtagtagcaagatggtagaaaaaaggaaggaaactataaatgaataggrccaacataaaacgatagacatgcatataagaatggatttcagaggaggtcaaatttagatcctctgaattggatggtaaacttgagttcaacagtagcagaaatctataatacagattttcaagaaatggcaatattcaggcaggtaattcttatgggtatctggtttaagaatctgaagatagtgataataagaccccgcctccatggaaaaggaagaaatagtggcaaggaatatctacacagtgtcagagccctaacctagaggaatgtagtttcatcagaaaaactgaaaagaaaataaagaaatcaatccagaaatgtagtcatacgaattgggaagatacaatggggtgttttaaagcctgaatct

SEQ ID NO: 256205 - DNA, 592 bp, Homo sapiens
tgcagtgagccaagatcacgccttcagatttcagcctgagcaactgagggagactccatcaaaaatraaaaggttgaagagagcaccctagtctcttttgtctaccatcacttccaccacatgagaacatagtgttcattccctctggaggatgtagcaacaaggctgctgtttccaagcaacatcttggaaaacagagacagggtccctacaagacaccaaatctatctgagcctttaacctggtcttccagatatatatatttggaacagcattgtatgaccacacatttgaaaatgaagatggaaatgggaaatagcagccctttgattcaaaatacatgaacagggaaaggagaaccatctcttatcagataaaaagattaagaatttgaagaagccaagagagtagaggaactaggaaaaaatgaaaaagggaagagaaaaaaagggaacagaacaggaagggtaaatacaaaatgcacctcagtgtcattaatctatccaataaaaatatgcggagcaccatctaagtgcctggcactgttagattctgggatacaatgctgtgcaaaatcagtgttgagcctcac

SEQ ID NO: 256206 - DNA, 425 bp, Homo sapiens
gcccaacggctgaggagcgcgggcacatggcggggcactggtgggcagctctgccagcagccttggggcgggaatccactaggcaaagccagctgggttcctgagtggagtggggacttggagaacttttatgtctagctggaggattgtaaatgcaccaatcagcactctgtgtctagcattggtggggggcaggggttcgtagacgcaccaatcagcaccctgtgtcaagctcaaggyttataaatgcaccaatcagtgctctgtgtctagctaatctagtagggacttggagcacttttatgtctagctagaggattgtaaatacaccaatcagcactctgtgtctagctcagggattgtaaacgcaccaatcagcaccctgtcaaaacggaccaatcagctctctataaaacagaccaatc

SEQ ID NO: 256207 - DNA, 425 bp, Homo sapiens
gcccaacggctgaggagcgcgggcacatggcggggcactggtgggcagctctgccagcagccttggggcgggaatccactaggcaaagccagctgggttcctgagtggagtggggacttggagaacttttatgtctagctggaggattgtaaatgcaccaatcagcactctgtgtctagcattggtggggggcaggggttcgtagacgcaccaatcagcaccctgtgtcaagctcaaggtttataaatgcaccaatcagtgctctgtgtctagctaatctagtagggacttggagcacttttatgtctagctagaggattgtaaatacaccaatcagcactctgtgtctagctcagggattgtaaacgcaccaatcagcaccctgtcaaaayggaccaatcagctctctataaaacagaccaatc

SEQ ID NO: 256208 - DNA, 587 bp, Homo sapiens
aaagatatctttaaagaaacatatatatattattttcttttgagacaggatctcactgtgtcccccaggctggagtgcagtggcatgatcatggctcacttcagccttaagctcctgggctcaagcgattcttctacctcagtcttctgagtagctgggactacaggcacgtgccaacatgatcgggtaatttttttgttttgttttgttttgttttttgtattttttgtagggacggcattttaccatgttgcccatgctggtcttgaactgctgagcccaagcaatccacctgcctcagcctcccaaggtgytgagattacaggtgtgagctaccacacctggccaagaaaccacatttttttaaaaatctggaaatatagtcacctgtgtattgagaagaagcttaccaagatgaggttttatttatttaattaattaatttattgtttttgagatgaggtctcactctgtcacccaggctgaggtatagaggcattatcacagctcactgcagcctcaatctcccaggctcaagcaattcttccacctcagcctcctaagtagctgggaatgcaggcaagcac

SEQ ID NO: 256209 - DNA, 530 bp, Homo sapiens
tagaaatctataccttcaaaagcaccctttaaaaatgaaagctaaataaaaacagaaacagaaaaaaattgtcacttgmagaccagcattatgagtaacactcaacgaagtttttctccaggaatctgtgaacgccaccagaatgggcaaagatgtgaaaaaacataaagtactctttagaaactttctttaggagactattgaccatttaaagcaaatagaatagcaaaataatcgataatgaaaaaatacatgacatttgcacaagggcagaagggtaataaaattatactgtagtaagtttcttacattgtttatgaaatgataaaataaggaaaaggtaagaacacatattgtaatctttagtaaccactaaaaaaataccaagagatattactagaaaaacaataggtaagataaaatagaatactggctgggcacagtggctcatgcctatactttcagcactttgggaggctgaggtaggcagatcacttgaaaccaggggtttgagactagcctgggcaaca

SEQ ID NO: 256210 - DNA, 555 bp, Homo sapiens
atgggtacttaggttgattccatagtttggttattgtgaatagtgctccagtaaacatgaaagtgcagatatccctttgacatattgattttgcttcttttgtatatatacccagtagtgaaattgctggatcatatagcagtttttagttatttgagaaacctctatatagttttccataatagccgtactaatttacattctcaccaccagtgtatgagtgttcctctttctccacattctcaacagagtctgatattccctgtctttttrataaaagccattttaactgacttgtgataattcattgtggttttgatttgcatttctctgataatgagtgatgttgaacatttttttatatacctgttggctatatgtatgtatttttttttgagaaatgtctattcagattgcttgcccattaaaacaattgaatcatttgtgtgggtttttaaatttaaattaatttaatttttttttttttttaccattgagttgtttgagctccttatatattctggttattaatttcttgttaggtggatagccgta

SEQ ID NO: 256211 - DNA, 564 bp, Homo sapiens
ttatcattttcataatattaatgatttcaattcatgagcctggaacatctttccactctttgtgtcctcttcaatttctttaatcagtactttatagttttccttatatatatatctttaacttctatggatatattggttcctagatattttatattctttgtagccattgtaaatgagattgcttttttgatttgtttttcagattgttactgcccacttacagtagcttatgtaagtgctactgatttttgtatgttgattttgtatcccacaattgtactgactttgttatttctaacaatgtttaggtgaagtctttaggtttttctaagtataagattatattggctaggcatggtggctcatgcctataatcctagtactttgggagrccaaagtgggtggatcacttgaacccaggagttcgagaccagcctgggcaacaaggcaaaatcccatctctatgaaaaatacaaaaattagccagacataatggtgtgggcctgtagtcccaactactcaggaggctgaggcaggaggattgcttgagcctggaaggtt

SEQ ID NO: 256212 - DNA, 517 bp, Homo sapiens
ccaagctagtcttccatggctgcccattagtctgctaaatacattttacaaaataatgtgtaccaagtgttctgctataggcagagcacttacaatacactctcactacctaaatcagagtgtctcaacagtggcactattgacattttggtctggacaatctgtcgtaaggagcctctcctacatccttgtagaatgtttagcagcatccccagcctctcctgctaggtgccagtagcctccccaacttgtgacaacctaaaacatctctaagcgtcgtcacatctcttctagtgagtaaattcactaccagctgggaccactgatccaaatcaasaagttagaaaacaaaatttgccatgtatctatttatacagtgtatgtacttgtccaattttacctcttccacaaatgtttaagatttcatagcttaatacaattaattcatattgtactaagtacaccttagtatgacattaagatgtcttatgtggtcatacagttaaataaaagagcg

SEQ ID NO: 256213 - DNA, 634 bp, Homo sapiens
agatttttatccatggattctcactaaaagaactaacaaagaatgtccttcagcaacaaataaaaccagcagggatgcaagttatattttttaaatgatacgctcaaaaattaataaaaataaagttaattaatattagtattgactgtaaaaaaaaaaacactacttttgaaaacccatctctaccaaaaatacaaaaaattagccgggcatgggtggtggacacctatgatcccagctactcgggagactgaggcagaagaatcacttgaacccggaggcagaggttgcaatgagccaagatcgcaccatggcactacagcctgggcaacaagaggaaaaatcactctcaaaataaaataaaataaaataaaataacamtcatatcaggatgggagagtgtagtcagtaaataactcaagcatgctaagaatattttcatgtttggagaagcatagaaatggcaaataacttaaaacgtataaaaaattatagttaaatattatgtgaataaggattaccactaacatacatatgtgtatggtatgtaatacatatataaaattagtataatttgtatgtaatacatatatataaaatcactaatacatgactcagcagaggaaaagtatga

SEQ ID NO: 256214 - DNA, 634 bp, Homo sapiens
agatttttatccatggattctcactaaaagaactaacaaagaatgtccttcagcaacaaataaaaccagcagggatgcaagttatattttttaaatgatacgctcaaaaattaataaaaataaagttaattaatattagtattgactgtaaaaaaaaaaacactacttttgaaaacccatctctaccaaaaatacaaaaaattagccgggcatgggtggtggacacctatgatcccagctactcgggagactgaggcagaagaatcacttgaacccggaggcagaggttgcaatgagccaagatcgcaccatggcactacagcctgggcaacaagaggaaaaatcactctcaaaataaaataaaataaaataaaataacactcatawcaggatgggagagtgtagtcagtaaataactcaagcatgctaagaatattttcatgtttggagaagcatagaaatggcaaataacttaaaacgtataaaaaattatagttaaatattatgtgaataaggattaccactaacatacatatgtgtatggtatgtaatacatatataaaattagtataatttgtatgtaatacatatatataaaatcactaatacatgactcagcagaggaaaagtatga

SEQ ID NO: 256215 - DNA, 608 bp, Homo sapiens
cagcccttgtcttattacaaagtatcacaatgactctattattatttcaaagatcttactttataaaaaataaccacattgacaatgttctatgtggcacataaattgtggtacagtataaacataaactgtggtacagtgtagtacatagaagaggaatgaatttatgatggtcttgctgccaagccctactggggctaccttctgtactatatttgacttctggaacatatgagaacaacagtgttggtcattatgtattagaaaaacataaatccttccatattttctagatacaaaataaagtacaaagtctgtacttgatgtgaaatttatagaaaataaagtttatacttataaagtatacattttctccttgcttcccattgttttgttttgcacaccccatgttagaaactacattytttgaggatgaggagagtggatattttgctctagcaacatggtcctatttaaaacagtaaaacagctcagtaaaacagtgacttgggtgaataaaggttccaggttctcaagacacctggtatgatagagaattcatgccaaaacatcttactgcagtacatttattaagtaccaactacata

SEQ ID NO: 256216 - DNA, 584 bp, Homo sapiens
aatccaacttatgacttcttatatccttttccatgaacattaaaggttctattccataatcattaaagaaggagctttaatgattaatggtaaattgagagtaaaaagtctgctagtctattagtgtcacaaggagacygtcttaaagacaatgaaaatggtggctcttactggtacagcagagaaaatgagcaaatacccaagtgtcaatgaataagacattcccatctttcctaaacttgggacaaaagagacaagcaaagatctgaattttattcctttcttttagccaataaggagaattttaaagaaaaagaaattcatggaataaactagaagtgtgcctcaagacagacaaagggaatgcaaaattaaatttttgatgtgaaagggaaggcacaatgaaaccttctggatgagatacctttggagaaaatttcaatttcactgtttcttttctttcaggcttgctttatttttttcacagatatgctctgtggaaagcctgaaagcctttttattatttcttattttctttttctttttactatgtggtacacattcattttttttcactttcctcc

SEQ ID NO: 256217 - DNA, 566 bp, Homo sapiens
ggctttataaataggaatcatacaaaacatactgctttgtaacatttatttatttatagtttacatagtttttaaaaaataatagagtttattttttagagcagttttaagtttacagaaaaataagtagaaagtttggagagttcccatatccctccctggcctttatatattacttgctatatcatgaacacttttgtaaatactttaagttgatttttgaaatatcttcataatataccatcacatatatgtatagcactttaatcaatctcctatagttcagattatttctcacattccttatgttcactggtataaacaatactgcagtcaacatccttataaattagtatttgtccaaatgtctgattctttcccagaatagagtcttagaagtggaattgtcaggtcaaaaaacatgtgcattttcaaggcttttgatacatattgtcaaggtcattygaacccattttaaaagaaatacaaggcagttccagagatctagaaaagccagcaactctagttttccatatagacccaaaatcaccataagaaagtgaaac

SEQ ID NO: 256218 - DNA, 623 bp, Homo sapiens
  misc_feature (1)...(623): n = A,T,C or G
aatgtgtctgaacataggaattgctcaaagaatgatagagatgtgttaaagaacacacaagccaaactgaagggacttccactggataaattggggataagttgggcaccaaaataaaaatattgattaattgattataaactattaaatagtaaaccatgagcaaacactgattaaatacataaatttattgactgattggaagtgtgatgaggaatgggatattaacagttttaaggcatatttccaccaaacatttattaattacataaagaaaawgagtaaaccctggtagataatacttaatttaaataatagatatgaactccataatagggcaaactgaaattacaagccaccatacagtgtgaagaactaaacatctttttgtggtattctggaaaaagaatctttacctgngcatgaggaatcatgagataacattggacaaagccaaatggagaaacattttacaaaaacccaaattaaggaagtttctagaagggaatattcaaaaatgtccaagaccactatagtggataaaatctaagatgatcagtcttccctccctctcacctccctgaccccacccattgatccctgccctttgatgttcatgcctt

SEQ ID NO: 256219 - DNA, 595 bp, Homo sapiens
agtggataaaatctaagatgatcagtcttccctccctctcacctccctgaccccacccattgatccctgccctttgatgttcatgcctttgtataatctcctatccttcggtttgggcaggatctgtgacttgcttttaaccaataagatatggcataggtgatgaaatgtcactcccataattacattatgatttttatatatgtaaaatcatataaaaagttatatatacatatatatgtctmtaaatatgtgtgtgtgtgtgtgtgtgtatatatatatatatatataaactctagcttactaacagaggtgctagagagacaattccttactgtccttgaagaaataagctgctgaagtaagtggctatgttggagaagcccacatgacaaagaaatgtggacaggttctaggagttgagggtggtgtccagaaggaaactaaaacttcagtcctgaaccagcaaagaaggagcttggaagcagatctttttaaagccaaggctctggtgagaccacagggacttcagcctggtgagacataaaaccctgtcaagcctgatccacagaaattttagataataaatgtgtgt

SEQ ID NO: 256220 - DNA, 595 bp, Homo sapiens
agtggataaaatctaagatgatcagtcttccctccctctcacctccctgaccccacccattgatccctgccctttgatgttcatgcctttgtataatctcctatccttcggtttgggcaggatctgtgacttgcttttaaccaataagatatggcataggtgatgaaatgtcactcccataattacattatgatttttatatatgtaaaatcatataaaaagttatatatacatatatatgtctataaatatgtgtgtgtgtgtgtgtgtrtatatatatatatatatataaactctagcttactaacagaggtgctagagagacaattccttactgtccttgaagaaataagctgctgaagtaagtggctatgttggagaagcccacatgacaaagaaatgtggacaggttctaggagttgagggtggtgtccagaaggaaactaaaacttcagtcctgaaccagcaaagaaggagcttggaagcagatctttttaaagccaaggctctggtgagaccacagggacttcagcctggtgagacataaaaccctgtcaagcctgatccacagaaattttagataataaatgtgtgt

SEQ ID NO: 256221 - DNA, 454 bp, Homo sapiens
catctcccaagtaagctatctgcacccaaatacttcttaggcaggaaccgaaactaagacagaggcatttcctagaagtttaggaacaaatacttcccttttaaacccctgtcatggcaggggagattagaaaggcaagcttagagctcactgggtatgccctcatgttttgttacttgcatcacattgccagatgtccatttggcactaggactgcaccagtgccacacactgatcttkaaaaggatctggaccacattcccagttattggcatgtacttacctttgttttttattgaggggacatgttgctgtgacacagaacagcaatgaggaggaatgacctttagtgctcaaagcctgactctatgactcagcagatacctttgggcctgttactaaacctcagtttacacttctggaaagtgaggataataataccaacctcattaat

SEQ ID NO: 256222 - DNA, 560 bp, Homo sapiens
gtaagctatctgcacccaaatacttcttaggcaggaaccgaaactaagacagaggcatttcctagaagtttaggaacaaatacttcccttttaaacccctgtcatggcaggggagattagaaaggcaagcttagagctcactgggtatgccctcatgttttgttacttgcatcacattgccagatgtccatttggcactaggactgcaccagtgccacacactgatctttaaaaggatctggaccacattcccagttattggcatgtacttacctttgttttttattgaggggacatgttgctgtgacacagaacagcaatgaggaggaatgacctttagtgctcaaagcctgactctatgactcagcagatacctttgggcctgttactaaacctcagtttayacttctggaaagtgaggataataataccaacctcattaatttgttgtgaagataaaatgaaaatcatataaatgtaaggttttatagattgtaaaagaccttaaaaaatattggagtccccgttgcatattcattatgaacatcaggagtaaaact

SEQ ID NO: 256223 - DNA, 637 bp, Homo sapiens
aggtcactaaaaattgttacataatgagccaaacatggcctttgtgtattgggtcccagattatttcttcactgcacactgagattcattagcaccaaattcaaatttttatatatccaaytattaaaatagcccaagctagcaaatttttaacctcttaaagcctgcctgctttgcatactctgcaaaacctcacctgatagtcactgcccattgataaggtacagccctgtggttataagacccaagctaccatggttctttgcagccctctgacccacagatcgcttgctgtgctgctgggtgacagcacctagacctaccatcctttttgaaatgtttacttggaagtgtactccaactaacaaaatgtgaatcgaaagtagtagaaattgtggcataagaggactaacaaacatctgaactatttaaacaaagtctaagtgatcgatggaaatgtgatcgtctgaaataaaatatgtagaacatttaaaaagaaatatttcaaaaatatttttaaacataaatctgggcctaaagccatggaaaatattaatggctaaagcatagattgtgctgcctgcaagtcagatatcaagtcctaataatacactgcttaacagacatgtatgtaaaa

SEQ ID NO: 256224 - DNA, 637 bp, Homo sapiens
aggtcactaaaaattgttacataatgagccaaacatggcctttgtgtattgggtcccagattatttcttcactgcacactgagattcattagcaccaaattcaaatttttatatatccaactattaaaatagcccaagctagcaaatttttaacctcttaaagcctgcctgctttgcatactctgcaaaacctcacctgatagtcactgcccattgataaggtacagccctgtggttataagacccaagctaccatggttctttgcagccctctgacccacagatcgcttgctgtgctgctgggtgacagcacctagacctaccatcctttttgaaatgtttacttggaagtgtactccaactaacaaaatgtgaatcgaaartagtagaaattgtggcataagaggactaacaaacatctgaactatttaaacaaagtctaagtgatcgatggaaatgtgatcgtctgaaataaaatatgtagaacatttaaaaagaaatatttcaaaaatatttttaaacataaatctgggcctaaagccatggaaaatattaatggctaaagcatagattgtgctgcctgcaagtcagatatcaagtcctaataatacactgcttaacagacatgtatgtaaaa

SEQ ID NO: 256225 - DNA, 564 bp, Homo sapiens
ctggtttctttttcagaccactaactcaactatttccagtttacatgttgactttggttgatattagttagggttattaagatttcagagtactcacattttaataacacaatcttaagaatcaagtccctttaaatwtcaggtgagtctatttttttttaagttgtatttcagacaggaggtaaggagaattattttttgaagaaaaggaatttgattgatgcttcttaaataagcagtggcctattttccctgcttatgggtatccagcaattaaattaaatgaggtataatagctgtaaaatatacaattagtgctcactcttagtttctaggaattatgttaatgtagcttggtgttgcatcaaccaatctcaatggaaattatagaaaaaaacccaataatatactgaaaagcatctctgtgaatctaaattggaatagaaactctataatgtattaaaatcaacattctcatatttgaaatagagaaatataacttgctggtattactgttctacctaacataaattaaaatgataagattataacatgaaatggata

SEQ ID NO: 256226 - DNA, 564 bp, Homo sapiens
ctggtttctttttcagaccactaactcaactatttccagtttacatgttgactttggttgatattagttagggttattaagatttcagagtactcacattttaataacacaatcttaagaatcaagtccctttaaatttcaggtgagtctatttttttttaagttgtatttcagacaggaggtaaggagaattattttttgaagaaaaggaatttgattgatgcttcttaaataagcagtggcctattttccctgcttatgggtatccagcaattaaattaaatgaggtataatagctgtaaaatatacaattagtgctcactcttagtttctaggaattatgttaatgtagcttggtgttgcatcaaccaatctcaatggaaattatagaaaaaaacmcaataatatactgaaaagcatctctgtgaatctaaattggaatagaaactctataatgtattaaaatcaacattctcatatttgaaatagagaaatataacttgctggtattactgttctacctaacataaattaaaatgataagattataacatgaaatggata

SEQ ID NO: 256227 - DNA, 595 bp, Homo sapiens
cctatgctcctttggagtgatttctctgtgacttttcacactatttcacaattctgtcctaggctttatcaaaatccatggacatctgatcgaaacaaaaattaacagcaatctgcaaaagagctattagggacattactcttgtgaatagatagtcagcactctggggacagacactktgttatctttctcatcttaaatttcactgctgggcttaacggtgctttgtgcctaccagtgttcaatcattggatcaatgttgaatgactgttaaactccttgatgtcagagctaattgctgacaacaccctacagggtttgctatgagatgtatataaattgcaatctgccaaaatgagaacccagagctgcttctggggatcaaaattaagggcaacccatctttgctttgctggctgtgcattagatttaaaaggaaaaacaaacaaacaaaaaacccagagttgattccagaatggaatatgtgtaaagagttcacatttgttgtatcttagttggtattccacaatatgatttttaatagatctttcattttgatctcatctgctatgaactaatgtgactacaataggtt

SEQ ID NO: 256228 - DNA, 619 bp, Homo sapiens
gcctagcacttttcatctcaaaaagccttttatgcacattaacaaattaattcaaataactcttagcaaggcaaactgtatacaaaataattcccattttacagatagggaaataaggttaaattacttaagggaatattcacacaagagaaaggcaggggttgagatggttatatccacagtgaaatcaaagytcttggattcccaaaatgtgttctggatactctgtcttttacttcttaaatgcttttttactcttagactagataatagaatcaaactcaatagtaacaggtctgacctggaacaagtactaagaacttgctgtgctgtgcctagctcattgctagttatctttgggcatcacaaatatatcctgacttgtggtcacctgtcttctttatcatttattaatagtctcttgttctcaatttcatcatatataaaattcacagaatagcttcatacttattaaccatatatacttacctcacattcttatatgaaataaaggatgtgaatgtttgaaaatcaaggaactccgtttcaagtgtcttctgcatggtaccctctgatgtatccactcccaactcccctaaagacagagaaagaaaacctc

SEQ ID NO: 256229 - DNA, 631 bp, Homo sapiens
ttttctcattgttcaactctcacttatgagtgagaacatgcagtgtctggctttctgttcctgtgtttgctgagaatgatggtttccagcttcatccatgtccctacaaatacatgaactcatccttttttatggctgctaattttyttaaatcagaaaaaatatgagctcagactagcttatattgatagcaatgtagtcataacatttttagcttttatgattttttttttttccctagagatagagtcttactctctcacccaggctgaagtgcagtagtgtgatcatagcccactgtaacttcaaactcctgggctcaagagatccttctgcctcagcctcctgagtagttgggactacaggtgtttgccaccactcctaattacttaatttattttatttgtagagaaagggtctcactatgctgcccaggctagtctcaaaatcttgggctcaagcaatactctggccccagcctcccagtgtgctgggattacagatgtaagccaccatgcctaaactattttttttttttaatgtaagaaggtatccaaaaaggtaaaagcacctgaggctcatgaaaatcatagtacgggcctagtggaagaaacaagccctgaccagccag

SEQ ID NO: 256230 - DNA, 617 bp, Homo sapiens
gcccacatctttttttttttaacccacttggctttagattgcttgagactaaaccttgaaataatatagaatgtttatagttctgagcagaaatgccataaagtaatgcaaattaatcatttattagtcaatcagtacctcatgcctaacagtttgctatatagcatatgcagaaaagacaaatgagagtatgatgatatgtagctgccttaggggactcacatgatctgagaagcctgcctcccatcactctggtaggaagccacttccatgttaaattccagaggtggcttataaaagattttcctactgaaatgtcaaacttcctacactggttctaaagccatcaatcgtatgaaccctacttattttatgtatatatgacttgttataagaaagaagaagatatatgtgtatgtgtgcaacaagatcaaaagtaaaataaataagaagaggcagagataatggagggtagaaaactacaatgaagctgggaatgaggcatcatattatttccatgtcttaagtttcacaactatttggcagattaatttwtatatatatatatatatatatttatatatatatgtaatgagatttgttattatttccacatt

SEQ ID NO: 256231 - DNA, 549 bp, Homo sapiens
cacaaacccatttttaaataacttattatggcctgtttaaatatagtttttaaggtaattatctgtatagcaaacatctgcaattttattcaattckgtgaatttttactaatagataagaggcaaaaatggagaagaaggaagaaagaactggcaggaactaacaattttgagtagtgtatgaggacttctcatgcattatctcatttaatccttacaataagcaaagagcttactgtattattatctctatttgcagacaggaatttgagactcagaaaggtgagaagtcctctgtaagagacagggctgggtagcctgccctcatcctctccaaagcccgagttcttgcctctgtaacaaatggcagatacatatacagaacagctaagttaggcagcagatgagtaggagaaaggctgagataaccttgagtaaaaacagaataaaggggaaaatgtataggccaaaggggaaaattaatcggcaaaataaaagcatgaggaattaccctcttgaaaagagcaaaaaggcaactggcttcttgaa

SEQ ID NO: 256232 - DNA, 557 bp, Homo sapiens
tacataatttgataagactttcttgacaaacgcccagtggaaattttaaacagtgtttcctttggtctctctcaaggtaagcccctgtccacaggttcagttcgttctaagaaatcatcttaaaactaaatatgtacacacttccttcctgacagtcaatgttcacttttacctaagcgtaactgarcaaccggagttttcaggtgggttacagagtggaaaacaaatacaagctaatttcatggaataatctctctaggaagaaacaaaccatatcaaaacaatcccttgtgtagatcttcaattaaactgtactatatcatggacaaaacactcatcataactaggaatagataggtattgtttcaaacatattatgtacaaatcatctaatttttcaaggttaatgagtgtaatttatccatctttggttactgaatgggttacataggatgaacaaaacttaagagttcatccatttcatttctgttgatttgcctctatttgtttggcttttatgtccatgtaattgatttgtataaatctgtccaaagcag

SEQ ID NO: 256233 - DNA, 636 bp, Homo sapiens
ttttttctttccttcacaccctgtatcagcaaattctattaattctatatacccagaaacagaccacttctcattactgccaccatggctacctaggctatgtcaccaacttctcttccctttcctgtttcatagcaatagtctcctaactgatctcccttctgctcttgactcatttaatctctgcaaacccagtacttagagcgatccttttccactatgtaagtcaaatgatatcactcctttgctcaaatccccgggggctcctcctttgactcaaaggcagaggccttaaaaccctctacaaggcactcccccatcatcgttctgagctcataggctcctactttccaccttgctcattccaccacactggacttcttcctctgcctgctgcatctcctactcgatatggtttggatgtttcccccctgcaaatatcatgttgaaatgtaatccccagtgttcaaggtgtggcctggtgggaggtgtttgsattatgggagtggatccctcatgaatggctcagtgccatacccttggtaataagtgagtgctagtcctgagttcatgtgagatatagttgtttaaaagtgtgtggcacctcctgccacccctcttgcgccactttcgcca

SEQ ID NO: 256234 - DNA, 601 bp, Homo sapiens
attttagagaggattaaagtaaatgataatgtatgttaaatacttagcaaagcacctgggacagagtaagcactcaataaatgtcagctatatagtgaactcttctcccctattattatatcagcaatcttgccttctagaggatgtttatatacatccctagttcactttactcagcaggaaatctttcctgtctagtttgaaaagattctttgaggatcccctgggagatcacagtattttagaattggaaaggacttagatgccttataatccggtaccccaattttgtttgctcatttttggtctactccctcttcattttcagttaacttccaattcatgtgtagttgaagcttgtccttcaaggacaatcacccttctaccagctacctagactgggaacatggataaccttccagacagagccctctcatgcccagaaaaggccctgctctgctgttcctttgatggttagaaggtttgcccttccggcaaacatagccgctttgcctcccttgcccaaagagaagttctatgaatgcttgtcctgaattttaaaaaccarcatgttttcctcactattagccatctaagagtt

SEQ ID NO: 256235 - DNA, 553 bp, Homo sapiens
aacaggctcctctggaaacaaagtacagataccgtgagaaaaggtgggttaaaaaaagtagggaaactaggaggctgaaagaacaatattcaaatgctactcttcagaatggttgtgtttcagttgcttcatcttggattgtcaactcacaaggcaatactaatgttttccaatgaaatggtttaattgtataygatgtgctcattagcactgagttccccctttgtcctagtgtctttcctggtacctcatgtgctcccatagcacgccctgtatgcactcatcacatcattgaccacagtttcccatcctccttcctcattagactgagagtttctggataacataaaccacgtttctgttatcattacgttcttagttcatagcacagcatccagctcctgatagttgctcatttcatttgttgctcaaaaaaatgtcagaaaatttaagggcagctttccccagatgtggtctctgtttctgcctttcaccaatattaacacaaagctcaacacactttacattcccccaaaaacaattcattcacacc

SEQ ID NO: 256236 - DNA, 672 bp, Homo sapiens
caaggtcacaaagctaacgagtagggaagttggaatcctgatgtggctctgaatcatactctcaattagcatataccatttctgcaaaggtgcagatagaaggcaagagagggccaaagtaggggggaaatggagatgatgcatggttggtttgggtgaaaggaacgtgtagacttggcattaacggctatcttccggggtacagaaccacccacagcgtattgtttcttcctacggcgagcagtgaatattgcgcagcaatattatgtgtctctctccaaatatgtattcagtcatatgcttcatagcaatgcgaatgcatatacaatggtggtctcataatggagctgaaaaattcctatcacctartgatatcatagctgttgtaacattgtagtgcaatgcattccttttttccgtgtttagatacacaaatacttaaccattgtgttataattgcccagagtattcagtgtagtaacgtgctctacagttttatagctgagcagcaataggctacaccatagagcctcggtgtgtagtaagctacaccatctaagtttgtgtaagtgcactctacaatgttcacatgatgaagaaatcgcataacaatgcattttttagaacatattcctgttattaagcagtacctgatggtacagtttatatatc

SEQ ID NO: 256237 - DNA, 585 bp, Homo sapiens
ggttagggtaggggagaagtctacattgagaaacaataaaagtatcagtcactgtggaggttagaaggttggcctggctaaatgagtttagatttcaaatgaytgacactaggaagcctatggaagttcttgagagagaagtgacatcatgcaaaggggtctaaagaagccaattctaataactgtgtccaatgggttgaagaggaaagagactatatgtgtatgagggtagaaagggcactagctcagggggtgtctttgtagcccaggagcacagttgtccatcttacactaaagcaagtgtttgctgatttgggaccaaaccaaggattaagctttctggtgtattatagtaggcatcaacttttcaagttaaaaaaaattgatgcaatctattggtctcttgcctcaagaaataaggtagaaaaaaaaaacaacattgagattgtggctgctcagggtcatccattatgccaaataaaatgtttttatagggcctgaagtttgctaaacatgactgctagtactctatccctgctgaaataggatgtttatccagaggggataaatgacctcacaaaaagg

SEQ ID NO: 256238 - DNA, 585 bp, Homo sapiens
ggttagggtaggggagaagtctacattgagaaacaataaaagtatcagtcactgtggaggttagaaggttggcctggctaaatgagtttagatttcaaatgattgacactaggaagcctatggaagttcttgagagagaagtgacatcatgcaaagggktctaaagaagccaattctaataactgtgtccaatgggttgaagaggaaagagactatatgtgtatgagggtagaaagggcactagctcagggggtgtctttgtagcccaggagcacagttgtccatcttacactaaagcaagtgtttgctgatttgggaccaaaccaaggattaagctttctggtgtattatagtaggcatcaacttttcaagttaaaaaaaattgatgcaatctattggtctcttgcctcaagaaataaggtagaaaaaaaaaacaacattgagattgtggctgctcagggtcatccattatgccaaataaaatgtttttatagggcctgaagtttgctaaacatgactgctagtactctatccctgctgaaataggatgtttatccagaggggataaatgacctcacaaaaagg

SEQ ID NO: 256239 - DNA, 585 bp, Homo sapiens
ggttagggtaggggagaagtctacattgagaaacaataaaagtatcagtcactgtggaggttagaaggttggcctggctaaatgagtttagatttcaaatgattgacactaggaagcctatggaagttcttgagagagaagtgacatcatgcaaaggggtctaaagaagccaattctaataactgtgtccaatgggttgaagaggaaagagactatatgtgtatgagggtagaaaggrcactagctcagggggtgtctttgtagcccaggagcacagttgtccatcttacactaaagcaagtgtttgctgatttgggaccaaaccaaggattaagctttctggtgtattatagtaggcatcaacttttcaagttaaaaaaaattgatgcaatctattggtctcttgcctcaagaaataaggtagaaaaaaaaaacaacattgagattgtggctgctcagggtcatccattatgccaaataaaatgtttttatagggcctgaagtttgctaaacatgactgctagtactctatccctgctgaaataggatgtttatccagaggggataaatgacctcacaaaaagg

SEQ ID NO: 256240 - DNA, 585 bp, Homo sapiens
ggttagggtaggggagaagtctacattgagaaacaataaaagtatcagtcactgtggaggttagaaggttggcctggctaaatgagtttagatttcaaatgattgacactaggaagcctatggaagttcttgagagagaagtgacatcatgcaaaggggtctaaagaagccaattctaataactgtgtccaatgggttgaagaggaaagagactatatgtgtatgagggtagaaagggcactagctcagggggtgtctttgtagcccaggagcacagttgtccatcttacactaaagcaagtgtttgctgatttgggaccaaaccaaggattaagytttctggtgtattatagtaggcatcaacttttcaagttaaaaaaaattgatgcaatctattggtctcttgcctcaagaaataaggtagaaaaaaaaaacaacattgagattgtggctgctcagggtcatccattatgccaaataaaatgtttttatagggcctgaagtttgctaaacatgactgctagtactctatccctgctgaaataggatgtttatccagaggggataaatgacctcacaaaaagg

SEQ ID NO: 256241 - DNA, 288 bp, Homo sapiens
aatttttgggagaaaaggaaggttttttattcaagtcaacatggtgttttgcatgtaatagaaccagagaaatatttgttaaattgaaagttatttcagtatagattgtggtcatgttttcatcctataatttgaaaaagatcctcagaatattagagatgaaagggatcttgatattgtcaaacatcttatccagagccccagtacttactcgattcaggtgggatragcatctcactgagggtctgggatcttcctgctgggtcttccttctgcagtggcccctga

SEQ ID NO: 256242 - DNA, 597 bp, Homo sapiens
cacaggagtaccaactgtatgatcccaacgatgtgaggttagagatgaggcaaaactaatctatgggtggaaggggaagaggggagccgggattaattggaaagtaacataaggagctttctgggcgtgatggtaatgttctatatcttgacaggggtttgggttagaggtgtcaaatttgtyagagctcagtgcatgcacttaggatttgtgcatttcattgcatgtaaattttatcttaatagaaagtatcaatattgagctgtagttaaaaatatgaatactgaagtgtttaggaggatgcgtagtgatgtcttcactgtctggagggatgaatagatatatgatgaagcaaacatagtgaagcaatgacagaatttaggtgatgtgcaaaaattagcttcgctgtaggtttcaacatttttttaagtttgttggaaaaaacacgttttcaaagaaattcagatacattgtcaaattaaaaagcaggatagaatgctgcatgtgtaaggtgatatagtttagagagagtgaaaaaacactaaaagagaaaagccaatggttatcttggggtgttgtggtaatgtgtgattttaa

SEQ ID NO: 256243 - DNA, 597 bp, Homo sapiens
cacaggagtaccaactgtatgatcccaacgatgtgaggttagagatgaggcaaaactaatctatgggtggaaggggaagaggggagccgggattaattggaaagtaacataaggagctttctgggcgtgatggtaatgttctatatcttgacaggggtttgggttagaggtgtcaaatttgttagagctcagtgcatgcacttaggatttgtgcatttcattgcatgtaaattttatcttaatagaaagtatcaatattgagctgtagttaaaaatatgaatactgaagtgtttaggaggatgcgtagtgatgtcttcactgtctggagggatgaatagatatatgatgaagcaaacatagtgaagcaatgayagaatttaggtgatgtgcaaaaattagcttcgctgtaggtttcaacatttttttaagtttgttggaaaaaacacgttttcaaagaaattcagatacattgtcaaattaaaaagcaggatagaatgctgcatgtgtaaggtgatatagtttagagagagtgaaaaaacactaaaagagaaaagccaatggttatcttggggtgttgtggtaatgtgtgattttaa

SEQ ID NO: 256244 - DNA, 542 bp, Homo sapiens
taatattttgaaggtaatctttttttttctgagcaataggtctcaagagtaggcttaaaatattcagtaaaccatactgtaaatagacgtgctatcacccaggctttgttattccatttatagagcgtaggcagagtagatttagcataattcttaagagtgctacaatttccataatgatgaaacattggctttaacttaaagtcaccagctgcattagcccctcataagagtgtcagcctgtcctttgaagcttggaagccaggcactgacttctctctagtgataaaaattctagatggcatcttattccgatataaggctgttttgtctacatggaaaatctgttgtttagtgtggccatctccctcagtgatcctagctagatcttctggataacttcctatagcttctccatcagctcttgctgcttcaccttgtactttaatgttatagagatggcttctttctttaaacttcctgaamtaaactccgctagcttccaactttcttctgcagcttcctaacatctctccaccttc

SEQ ID NO: 256245 - DNA, 589 bp, Homo sapiens
ggtggttaaaactatgtgttaattgtgattktgaacttcgatttatcaaagatggtctttaaaagaactactagtgatctttgaaagagttaaaaaattaaagaaggaagatttattataaaagtagtgacttttagccagaaaataaatattctggacacagtgcaatgttgaatttggctgaagctttggtctatgacaagaatcctgctaggtattctatagagaaacaaataaatgctaaaacttttcagaaatcatctagaccatacaaaattttcctcacctattcatggacaaaaatttggtaaagctgaagggtatattaatttgtgtttcggtttatgaacatttctgactctggggatatgaacatttctgactctcaacagaaatgtgattcagcataaacgtagtaacctatacaattaattttgcagtgaagaagtattaattaggactcattagttaaaagttatcaaaacctacctgaaactaacaagcaaaagagagaaatttatgggaagataataaggtgtttcacagaactcaagaaggattagaacaatcaaaacttttaaaaaggcaa

SEQ ID NO: 256246 - DNA, 573 bp, Homo sapiens
tctcccactctgttgcttgtcttttcatcctcttaagacaatattctgcagagtaaaagttttgaattttgaggaatccaatctaccaagtttttttatggattgcgctttagatgtcaagtctttactgaaacctatatccaaagattttatcatgtttttaaaaaaagttttatagttttgtggcttacatttaagtccattatccattttcagtgactttttttggtaaagtatgaaatttaggttgaagttcatacttttgcctatagatgttcagttgctccaggactattgcttgaaaggctatccttactttttttttaacttgcttttgcacatttgtcaaaagtcagttgggcaaatttgtgagggtctgtttctgtttttttktatttggttccattgatctaagtgtctatccttcagccaatacaatgctgtcttattactttaatttttttatatcattaccaatgcctttgaacagggaaattctcttaaaccactgaaagttgaagaaaatgaacctcaaactctacctcataccataaaaaaaactcaacttagaat

SEQ ID NO: 256247 - DNA, 557 bp, Homo sapiens
cgatagtgctagatatcttctcatccagacccatcatcctttttcaccctaccctatgttccaggaatatggactacattaatgaaatccctcgccatatggcttctggttagatgtggccagaaccccagaaggaaatcagaatgagagaggagggtgaggtcagagtatttatttctctgggtctctccttgaaagagtgtcttgggttggcctcaactgaagctcactgcttatttcagagcatctatctccacaggactcactccttgtgggttctgacaagtgcttcctccttttgtccctactggactaagcttggtaactgctactccactgctattatccctaggtcatatattaccctktgcgtttcctctacaatatatccatacatttataaatacttactttgaaaacaaaccctccagaattattctaattttaacaacagctttattaaaacataattgatatacaaagagctgcacatatttaatatgtataatttgatgtttgagtatatacaaatatccataatgccatcaccacaatca

SEQ ID NO: 256248 - DNA, 557 bp, Homo sapiens
cgatagtgctagatatcttctcatccagacccatcatcctttttcaccctaccctatgttccaggaatatggactacattaatgaaatccctcgccatatggcttctggttagatgtggccagaaccccagaaggaaatcagaatgagagaggagggtgaggtcagagtatttatttctctgggtctctccttgaaagagtgtcttgggttggcctcaactgaagctcactgcttatttcagagcatctatctccacaggactcactccttgtgggttctgacaagtgcttcctccttttgtccctactggactaagcttggtaactgctactccactgctattatccctaggtcatatattaccctgtgcgtttcctctacaatatatccatacatttataaatacttactttgaaaacaaaccctccagaattattctaattttaacaacagctttattaaaacataattgatatacaaagarctgcacatatttaatatgtataatttgatgtttgagtatatacaaatatccataatgccatcaccacaatca

SEQ ID NO: 256249 - DNA, 599 bp, Homo sapiens
tattatatactgtattcttacaataaaataagctagagaaaaagtgttattaagaaaatcataagaaagagaaaataaatgtatagtactttactgtatttgtcaataccataagtgtacatcatctatttgcaagattaattgtctgtctgaaatggtgggcaaccacagctgcagacctcaatctatagaaaatatcaagcaactcaactttttttgataggggttgcattaaatctgtagattgctttgggtagtatgaacatattaayaatactgttttttccaatctgtgaatatggaatatctttctatttttgtgtcctcttaaatttctttcatcagtgttttatagttttcatggtaaagatctttaatttctttggttaagttgattcctaggtatttcattttatttgtagctattgtaaatgggattactttcttaatttctttttcagatttttcactgggcatatagaaatggtactgatttttgtatgttgatattgtatcctgaaactttactgaatttgttttccagttataatagtttttttagtaaagtctttaggtttttccaagtttaatatcgtatc

SEQ ID NO: 256250 - DNA, 582 bp, Homo sapiens
acttactactgccatattgttatttgttttctagttgttttgtagtcttttctctcgtcttaacttccttcctttctttcttttagtgaaggtgatttttttttctgctggtattatttaatttctcactttttaatgtgtccattgtatggttttgtatttgaggttaccatgargcttgaaaatactgtcttataatccattttttaagctaataacaacttaacattgtttgcataaacaaaaaagtgaaaggaaaactaataaaagctctacactttaactttattcccctgcttttaaattttttgttgtttctatttctatcttcttcctttcttccttatacctttaaaagttgttgcagttattattttccattggttcatcttttgatctttctacttaagataggacttgtttacataccacagttacagtgttgtaatattttgtgttttttctgtgtacttactattaccaatgagttttgaaccttccaatgatttcttattgttcactaacgtccttttctttctgcttgaagtactccctttaacatttcttgtcgggcaagtctgg

SEQ ID NO: 256251 - DNA, 594 bp, Homo sapiens
tagatagcatcagaactgaattaaattgtaggacacccagcctagtgtccactggagaattgcttggtgtgtagggaaaaccccacacacatctggtgtcagaagttttatgttaaacaactgtatgtgagtagagagaaacttttttcttcagattatcacctggagcaagtcatttttaaatgcgctccttctttgtatgagaaaattattttcartgataattatgtacataatctgtacctaacctgtaaaaattgttattttgtttttatttagttttaaaccaaaaattgattttaaaagactaaatttcaatcttaaacatattcaagaagtaaaatatatcatgtgtgaactaaaaatttcacttatctagcaaaaatagtctatctcacagctcatactgtgttctattgctttgatttttaaatgtttttacttttttttatttcaatagcttttgggatatacaggtttttggtacatggatgaattatatagtggtaaattctgagattttagtgcactcatcacccgagtagtgcacattgtacccaatatgtagtttttttatccctcatccgcctgccc

SEQ ID NO: 256252 - DNA, 525 bp, Homo sapiens
tcttagaggaaaagctttcaacttttccccattcactataatactagctgtgggtctgtcatctatggcttttattatgttgaagtatgttccatctatatacctaggtttttttagggtttttctttatcatgaagggatgttgaatttatcaaatctttattaagcgtttattttaatgatcatatggtttttgtccttcattctgttgctgtatcacattgattgacttgcatatggtgaaccattcttgcattcctgggataaatcccacttggtcatgataaatgatcttctcagtgtgttgtgcaacttggtttgctagtattttgttgaagaatttgcatcaatattcatcagggatgttrgcctatagttttcttttattgatgcatatttgtctagttttgatatcagagtaacactggcatcatagaatgagtttagaagtattccctctttattttttaaaatagtttgagtaggattggtattagttctttgaatgtttggtagaattcagca

SEQ ID NO: 256253 - DNA, 427 bp, Homo sapiens
tttactaattttgggatcggtttgttcttggctttctagctctttaagatgcatctttaggttgtttttttgaagcttttcttcttttttgttgtagggacttatagctataaatttttctctrgtactgcttttgctgtatcccttaggttttggtatgttgtgtttccattataatttctttcaaaaactttttgaattttcttcttaatttcatcattgaccaactgatcattcaggagcatatcatttaatttctgtatgtttatatagtttccaaaatttctcttgttatttatttatagttttattccattgtgatgcttgatattatttcaagtttttgcatgttttaagatttgttttgttacctaacatatgatctatcattgtgaatgatttatgttttgaggagaaaaatgtgcat

SEQ ID NO: 256254 - DNA, 427 bp, Homo sapiens
tttactaattttgggatcggtttgttcttggctttctagctctttaagatgcatctttaggttgtttttttgaagcttttcttcttttttgttgtagggacttatagctataaatttttctctggtactgcttttgctgtatcccttaggttttggtatgttgtgtttccattatmatttctttcaaaaactttttgaattttcttcttaatttcatcattgaccaactgatcattcaggagcatatcatttaatttctgtatgtttatatagtttccaaaatttctcttgttatttatttatagttttattccattgtgatgcttgatattatttcaagtttttgcatgttttaagatttgttttgttacctaacatatgatctatcattgtgaatgatttatgttttgaggagaaaaatgtgcat

SEQ ID NO: 256255 - DNA, 518 bp, Homo sapiens
ggacaggtctggagttgattaaatctctcagcttttgtttgtctgggaatgtatttctccttcatgctttaaggatattttcactggatatactattctagggtaaaaggtttattgtttcaacacttatatcatgccactccctccttgcctgtaaggtttccactgaaaagtctgctgccagacatattgaagctctatcatatgatatttcttttctcttgctgcatttaggctcctttctttatccttgacctttgagagtttgattgytaaatgccttgaggtagtctttgggttaaatctgcttagtgttgtataagcttcttgtgcttgaatgttatctttctctaggtttgggacattctgtcatataatgtctttgaaaaaacttcctactcatagctctttccctaccttctctttaaggccaataactcttagatttgcccttttgagactattttccagatctgtaggcatacttcatttttttattcttttttattttgtctcct

SEQ ID NO: 256256 - DNA, 530 bp, Homo sapiens
taaaaaataatgagatcctgtcatttgcaacaacatggatggaactggcagtcattagtcattgaactaatggagatagagtatagaagaatggataccagagcctcaaattgtagtcgttaatagggaraaggtggggatggttaatgggtaccaaaaaatagttagaatgagtaacttctagtatttgatagcataacaatgggggaactagagtcaataataacctaattgtacattttaaaataactaaaaagagtataattagattgtttgtaacacaaaggataaatgcttgatggggtgaatactgattttccatgatgtgattattatgcattagctatctgtaccaaaatatctcatgtaccacataaatatatatacctgctatgtacagaaattaaaaataaaaaatatgaagaaagattgaagcaaaaataacaacttctcaaatttgatgagaagcattaatctacacgtcaaagaagctcagcaaatgccatataagataaatacaaacagccaca

SEQ ID NO: 256257 - DNA, 591 bp, Homo sapiens
tgggcgtggcagcatgcgcctgtattcccagctactcgggaggctgaggcaggataattgcttgaacccgggaagcagaggttgcagtgagccgagatcacaccactgcactccagcctgggtgacagagtgagactgtcaaaaaaaaaaaaaagatatcatcaacttttatttttttgctgggccttctcagatttaccctgtctatgcttgttatcttcccaatcagccaaggatgtatggagagcttaagtagcccktctatagctctcacattataagaatattcccattacatttctagtttacttgctactcacctcaacaaggactacaacatcaggctagctaagctgtaggtcatccctcttgtttactacctttttaaaaatactttaagttctgggatacacgtgcagaacatgcaggtttgttacataggtatacacatgccatggtggtttgctgcacccatcaacctgtcatctaggttttaagccccacatgcattaggtatttgtcctaatgctctccctcctcttgccccccaccccctgacaggccccggtgtgtgatcttcccctccctgtg

SEQ ID NO: 256258 - DNA, 576 bp, Homo sapiens
agaagagcccttgggctctaagtgaacattgacagtagtctgacaatactcctcatgggcctgtgatcgtgttggccacagggtggggctcctttgaatttggaaacgggagggaagagtgggaaggaccgtgtctagttgactgtgtacagctcagtcgcagtacaatagaacacsattagacttccaaggtttttgaatctagtccctggctgccagacagcatctctgggcctccctggggcctgggggatctcatcctaccttgaagggaaggacacaggcctgtctggttttgccacctgctgattgtagagacccatggtcttgagcaaacataggcattagccaggtagtagttatagcaggccttggtcaagaccccgtgctgtactggcttcaggtctgacccagtgcagtcacagtggtggtgaccacaggggtgcttgtgtcatgccacccccagcttcaggtggctcagaacacagagagagagagactctatttgagaaagtaagggagaacaggagtttctgcctagtaatctagagaattcttccagatcttgtccaagac

SEQ ID NO: 256259 - DNA, 576 bp, Homo sapiens
agaagagcccttgggctctaagtgaacattgacagtagtctgacaatactcctcatgggcctgtgatcgtgttggccacagggtggggctcctttgaatttggaaacgggagggaagagtgggaaggaccgtgtctagttgactgtgtacagctcagtcgcagtacaatagaacacgattagacttccaaggtttttgaatctagtccctggctgccagacagcatctctgggcctccctggggcctgggggatctcatcctaccttgaagggaaggacacaggcctgtctggttttgccacctgctgattgtagagacccatggtcttgagcaarcataggcattagccaggtagtagttatagcaggccttggtcaagaccccgtgctgtactggcttcaggtctgacccagtgcagtcacagtggtggtgaccacaggggtgcttgtgtcatgccacccccagcttcaggtggctcagaacacagagagagagagactctatttgagaaagtaagggagaacaggagtttctgcctagtaatctagagaattcttccagatcttgtccaagac

SEQ ID NO: 256260 - DNA, 620 bp, Homo sapiens
tcagattgtgaagactacaataagtacccaactcttcaatgcccagacacagacaaacatctacaagtatcaaaacaatccaggaaaacatggccycactaaatgagctaaataaggcactagggaccaatcctggagaaccagagatatctgacttttcagacagataattcaaaattgctgttttgaggactctcaaataaatatgagataacacagagaaggaattcagaattatatcagataaacttaacacagatattgaaataattttaaagaatcaagaagaaattctggagctgaaaaatgcagtaggcatactgaagaatgtaccagagtctttccataacagaattgatcaggcagaagaaagaattagtagtgagcttgaagacaggctatttgaaaatgcacagtcagagaaaccaaaataaaaaaagaataaaaacaatgaagcatacttacaggatctagaaaatagcctgaaaaaggcaaatctaagagttattgatcttaaagaggaggtacaggggtaggggagggtagaaagtttatccaaagggatagtaacagagaacctcccaaacctagagaaagatatcaatatccaagtacaagaa

SEQ ID NO: 256261 - DNA, 620 bp, Homo sapiens
tcagattgtgaagactacaataagtacccaactcttcaatgcccagacacagacaaacatctacaagtatcaaaacaatccaggaaaacatggcctcactaaatgagctaaataaggcactagggaccaatcctggagaaccagagatatctgacttttcagacagataattcaaaattgctgttttgaggactctcaaataaatatgagataacacagagaaggaattcagaattatatcagataaacttaacacagatattgaaataattttaaagaatcaagaagaaattctggagctgaaaaatgcagtaggcatactgaagaatgtaccagagtctttccataacagaattgatcaggcagaagaaagaattagtagtgagcttgaagacaggctatttgaaaatgcacagtcagagaaaccaaaataaaaaaagaataaaaacaatgaagcatactyacaggatctagaaaatagcctgaaaaaggcaaatctaagagttattgatcttaaagaggaggtacaggggtaggggagggtagaaagtttatccaaagggatagtaacagagaacctcccaaacctagagaaagatatcaatatccaagtacaagaa

SEQ ID NO: 256262 - DNA, 607 bp, Homo sapiens
actacaataagtacccaactcttcaatgcccagacacagacaaacatctacaagtatcaaaacaatccaggaaaacatggcctcactaaatgagctaaataaggcactagggaccaatcctggagaaccagagatatctgacttttcagacagataattcaaaattgctgttttgaggactctcaaataaatatgagataacacagagaaggaattcagaattatatcagataaacttaacacagatattgaaataattttaaagaatcaagaagaaattctggagctgaaaaatgcagtaggcatactgaagaatgtaccagagtctttccataacagaattgatcaggcagaagaaagaattagtagtgagcttgaagacaggctatttgaaaatgcacagtcagagaaaccaaaataaaaaaagaataaaaacaatgaagcatacttacaggatctagaaaatagcctgaaaaaggcaaatctaagagttattgatcttaaagaggaggtacaggggtaggggagggtagaaagtttatycaaagggatagtaacagagaacctcccaaacctagagaaagatatcaatatccaagtacaagaa

SEQ ID NO: 256263 - DNA, 457 bp, Homo sapiens
gattttctctcttaatttcttgttttcaatttctttgattgctgccctaattttactattttatttcttctacttaatttggacttaacttgcctttcttttctagtttcctcaggtaaaagtttatattattgattttatatctttctttctaatatgtccattaaatgctatwaatagccttctaagcactgcttttgctacattctgaaaattttgataaattatacttttattttcatttaattaaaaaaaatttaactttttctgagattttatttttgaacaatgtgttatttatatgtatgttttttaatctccaaatgttttggaggttttcttcctatttttctgttactaatgactagtttaattccaatatggtctaagagaatactttgtatgattttaattatttttaatttgttaaggtgtgttttaaagcccaagatgtgat

SEQ ID NO: 256264 - DNA, 396 bp, Homo sapiens
ttcctagcaaggaatattaataattaagaccctgggaaaggaatgcattcctgggtggaggtctatagacagccgctctgggagtgtctgtcttatgtggttgagataaggactgaaatacgccctggtctcctgcagtaccctcaggcttactacggtggggaaaaaccccaccctggtgaattcaaggtcagaccggttctctgctctcgaaccctgttttctgttgtttaagatgtttatcaagacaataatacgtgcacagctgaacatagacccttatcagtagttatgttttgccttttgtcctgtttcctcagaaacatgtgatctttgttctcctttttgycccttgaatcatgtgatctttgtgacctactccctgttcatacaccc

SEQ ID NO: 256265 - DNA, 572 bp, Homo sapiens
agaacttgaattgtaacctggccttcagattcctcatcagaagggtgggaccaggaataagagcgagcgttacacttggctcaagtccaaactgcatgactgcacaaacactgtaactgctctgtattcagacacatttgaaaggatttttccagcataaatttctaaatgtgctgcttgttttgtaattcaatctagggcagcagcagcagtgctatcattatttacatttctagcttttggtcttggatccaaaatatttgtagcagtgtgaattggctcataagaaaattctcttttcttcaaaaaagtttcatgttactttcttttatacctgtaagcaagtaaatattaataatcttttacattgatttgtttctgagacatttggtcagaaataatttgcagaaataaattgattcagacactgtagctaatttaacattaattttttcctatttctttgatttttagaaattattccagtagaggagaacctcatcagcaacatattaactttctratattgttaatacaattttttcattttaatgaacaaaaggcaatacaaa

SEQ ID NO: 256266 - DNA, 568 bp, Homo sapiens
tcagccctcaaatgacctcagtattacatccttcctgaagtatcgcagaatttttctctaaattaaaggagaatcacaggacgtcacacttaatgactgctgattcaaaattaattttccttcctttgatgcctaaatctacttcagcacataattatagaattctgctttggaaggggccctagagcttaatctaattttcaactaattgcaggattcattattagagaaccaatgatagtttgtaaatcagtctttgagcatttacctrataaaactattccatcagtagttagaaactattccattagtacttagctcttaaaatgagctaagacccacctccttaaaacttcctttgagcaaagcttcatggccccacaaaagaaaagattttcctattttcatttaaaatatcatattattaaattatctctaaatggcaaatatagcatattttaacaggaagtattcctagtggttctatctccattaatccatactccaaaatattgcccactcttttaagctaccagccctatgcagtatcccaaatatcagtgccaaa

SEQ ID NO: 256267 - DNA, 613 bp, Homo sapiens
aatgatagtttgtaaatcagtctttgagcatttacctaataaaactattccatcagtagttagaaactattccattagtacttagctcttaaaatgagctaagacccacctccttaaaacttcctttgagcaaagcttcatggccccacaaaagaaaagattttcctattttcatttaaaatatcatattattaaattatctctaaatggcaaatatagcatattttaacaggaagtattcctagtggttctatctccattaatccatactccaaaatattgcccactcttttaagctaccagccctatgcagtatcccaaatatcagtgccaaaaccagaagtgcattctcctattacattaataataattttacagtatggtggcaggaaatgcactttcagttcactggctatagctattaaactatgaggaaatgactgcctggaaggcagccaggtccttggcttaaaggccaactctgaggaagacaaaggtaatacaagaagggaaactatgccacctgaccaaaaacrttattgagacactctagagcagtgcttctcaactctttgtggtgaaggaactttttttttttaatttccaatcggcc

SEQ ID NO: 256268 - DNA, 575 bp, Homo sapiens
ggggaaatactggcttttctctctttccacgtacaataaacaagagatagggcaatcagattctgcattaattgccaagggaacaaggatttttcacatgtacagaaaatatgaattccagctaaaaacattttctaatctaggtcttcatatgtaaatgtaaacaggcaaccgagaatcatcaaattgagtgaaaaccaaaaacattagatccaccagactcaaccaacacaataactaatggttaaagaaatagtatgtggagaaaacagaagtgaactatatggataaataggatttagagaaagatttttcacactcaatcacacaatgcccaatacataattaaataccttggatccataaaataaaaataagcttttacaaaaaaggaagtaaycagagttcttagctataagcaatataatccacttgggcttttctaaaagtaaacaaatacctaatgagtggtaactatgtgttggttattcttttaggcactggggatacagcagtgagtaaaatagacattccctgtccttaaagagcttatattccagtcagaggctagagat

SEQ ID NO: 256269 - DNA, 610 bp, Homo sapiens
gtaacatttgagctaggaatcaaaggaagtgatgaggtgaatcaagagcaagagaaaaatattctgagcaaaaggaacacaaaataaaaaaaatttgaggtggaagtatctgggggttttgactaatagcaaggacaccagtttggcttcagtgggctgtgtgagaaagagtgatagaaattgaggtgagggcaataagaataggccaaattatayaggaccttgtagactattgtattttggctttcactatgatttttgcctggggaactagaataactaaggtactgtttattataatggagaaaattataggagaatcagttaatttttgttggagaatgaagagctgaagttttggacatgttaactaggagatgtgttttaaatattcaattggagattttgaatacccagtgggatacattattctggagttcagaggagggatcgagtctatagatattaatttgagagttatttaaagtcatgagactgcatgagatcagctaaggaatgaatgtagataaacaatagaagaggaccaaggattgagtcttacattacttcagtattttgcagttgggaattaaaatatcaccagaataca

SEQ ID NO: 256270 - DNA, 537 bp, Homo sapiens
gaagtaggagtccaacttcattcttttgcatgtggctattcagttgttgcagcaccatttgttgaagagattattctttctccattaaattgtgctgactcccttgtagaaaatcaatggatcataaacgtaaggttttatttctggactctcaattatattacatttgactatatgtatatccttattccagtactataccatcttgattactgtagtattgtagtaagctttgaagtcagaaagatttaatacttttattttgttcttccttttcaagattgttttgactattctgtaccccttgcatttccatatgaattttagggttcattcatgaatttttgcaaaaaaatctggctgggactttgatagggatwatgttttctgtagatcactttggagagtatttctatcttaacaatattaaatctttcaatctacgaatatggagtgtctttccatttatataggtctgctttaacttctttcaacaatgttctgtggttttcagtgtatgtcttgtatttttttgtt

SEQ ID NO: 256271 - DNA, 633 bp, Homo sapiens
ttgaatatttcacatttatccgaaactcagtgttcaaattgaactgatcatctctttcctgccaaaaaataaataagtaaattccactattctagtattttgtatctcagcaaacaatcctgccatccatcccatcagccaagtcaaaatgactgtgggggaatatcccacattcaatctagaactaagccatgtgtattttacctcctaaaagtctctcaaattagatgacttattccccatgcccataatttcccatttctaccttaagtcgtcaccattctctcatggtgattttagtaaccttaagactggttcccctgttacctttcttggcctcctatatactagtctccatactagggccagagtagtagtagtatctctataaaataccaatttgacttcttctcttctcttctatmtctctctctctctctccctcaaacacacacacacacacacacacacacacacacacacacacacacacaccagcattgcttaaaatcttatctttcagtggctcctcattgctattaatataaagtcccatgtttaaaatcttgaaccctgcaagaactgtcccatatctcccattgtggtttcactttttgatacactctcttggtt

SEQ ID NO: 256272 - DNA, 637 bp, Homo sapiens
ggtcactttacataatgccatatatttcaaaggctttcttcatttttttaaaacttttttctttatttctgtctaagtaggttaattcaaaagacctgtcttcaagctctgaaattctttcatctgctttgtttagtctattgttaaagctttcaactatattttggaacttctccaatgaatttttcatttccagtagttctgtatggktttttaaaaaaattttctgtctctttagtaaatttctatttatatcctgaattatttttctgatttctttctgttcttttcaactttctcttgatttccactgggtttccttaaaattcatacttttaattctttatttgccattgcagaattttcattttgactagaatccattgctagagagctagtgtgattctttggggttgttgaaacacttcattttttatactaccagagttcttacactggttccttcttatctggataagctgtcacttctcatttttgaatttattttcatttggatgagactttttgtttccccccacccccttgagtgtgtgactgtagtgtatgttcagtagagtcatttggcaatttttctgagtgctttcaggggaacaggactctgtacgaatgccaggga

SEQ ID NO: 256273 - DNA, 391 bp, Homo sapiens
cttcatttccagcactctttatttccttgtgtagtcccacattttagtctgatatgatactctttctgcctgaaaaactttcctttatcttgtagaatgagtcttctgaaaatgaattatctcagtttttgcttgtctgatacagtttttatttcaccttcattttaaaaagatttttttctggatatagaatcctgggttgacaaattattctttctacctgttaaaatgatcattccattgtgtcctgacttgtatggcttatgacaaatagtctgctgttattatcttttttctctatgtttgatgtttccttttctctgmcttcaggattttctctttgtcttttgtcttccagcagtttgaataaaatatgcctaatttgtttggt

SEQ ID NO: 256274 - DNA, 574 bp, Homo sapiens
aaaaatatcaatattttcctaggatttaaatcagattgaatgccttaaaatgtaatattcaaaatgttcaggatataaaccaaaaacyagctggcgtacaaagaagcatgaaaatctcggcttgcatgggaaaggacaatagatgccaacaataattatctgacaaaaactttaaagaaagtattatgaaaattatctagtgggcaattgtgaacacttttgaaacaaatattaaaaaagaaggtatcagcaaagaaataaaaaatataaaggagaacacaatagaaattttagaactgaaataatcagttaaataaaaatggaatatggtcgggtgcagtggtgcacgcctataatcccagcactttgggaggccaaggcaggcgggtcatgaggtcatgagataaagaccatcctggccaacatggtttctaccaaacccctgtctctactaaagaatacaaaaattagctgggcatggtggcacacacctgtagtcccagctactcgggaggctaacacaggagaatcgcttgaacccaggaggtggaggttgcagtcagctgagatcgcg

SEQ ID NO: 256275 - DNA, 574 bp, Homo sapiens
aaaaatatcaatattttcctaggatttaaatcagattgaatgccttaaaatgtaatattcaaaatgttcaggatataaaccaaaaactagctggcgtacaaagaagcatgaaaatctcggcttgcatgggaaaggacaatagatgccaacaataattatctgacaaaaactttaaagaaagtattatgaaaattatctagtgggcaattgtgaacacttttgaaacaaatattaaaaaagaaggtatcagcaaagaaataaaaaatataaaggagaacacaatagaaattttagaactgaaataatcagttaaataaaaatggaatatggtcgggtgcagtggtgcacgcctataatcccagcactttgggaggccaaggcaggcgggtcatgaggtcatgagataaagaccatcctggccaacatggtttctaccaaaccccygtctctactaaagaatacaaaaattagctgggcatggtggcacacacctgtagtcccagctactcgggaggctaacacaggagaatcgcttgaacccaggaggtggaggttgcagtcagctgagatcgcg

SEQ ID NO: 256276 - DNA, 276 bp, Homo sapiens
tcttcatagcatgcatcactctgttactatattatttatttacttgtttattgtcagtcttttctcactagactgtaagctcaatgaggtgatgaggcctcagatgttttatgaycgctgtatcttcactatctaatatgatgccttgatatttgttgaacgggtaactgattaaatcaattaagcaagtggtttctgacaatatttcaaaagaaatgctttctcatttgtgctaacatggcaagattgtttgttacttccttttttcctggggtc

SEQ ID NO: 256277 - DNA, 582 bp, Homo sapiens
tttggaaccaccttgatacttgcaatcagacttttacagggtgtttgatttggaattcacctctgaacacatgcacagatgaatggtcaaaaaccaaagcttccctcatgagtattaggtgaggaaacactttggaaatcccagtggaacaaacatctacttactgaggctaaattcctaaatctctggagtcccccaggaggtgaaacctaattccttggaatacatgtcagctttgatgaaaaaggaataattaagcagccttctactgcctcttgtctgtttaattgctccatggaaaaatactggctttcagtgtgcctagaggcgcctgacaggtgttcagtcatgtgcagagtagcagaaactcacaggttatgatttctatcaagaatcaaatggaggaaaaaattctcagcctacttagtgggagctaaatgayaagaacttacgaaaacaaagaaggaaacaacagactctgaggtctacttgagaggggagggtgagaggagggaatgaagcagaaaagataactattcggtgctgggcttaataccttgatgacaaaatctgtataacaaa

SEQ ID NO: 256278 - DNA, 632 bp, Homo sapiens
tattaacagtagctcctggtgtgtaaggaaaatgattatgattgagaaataatgccatggagattaataagcatggggataacatatttgacaaggcatttttaaggaagacaactgccaacacatccccacacagcacacaagctgatcataagactttgccttatgaaaaggcaagtgctccctcctgtwtgcagtgacacccaaataagaacaagtttcttaccttgtctctactgcttaatgaccccatatgaacatcaaaggccaatataaaaatcgccacaaaaccaaaaccttacattttatcgtacatttaatctgagcctcaaaataacaatatgtctgattagcaaatagcttattatcctcaataaataatgaaatattatagataaataagataaaaaacataccttatagacaaataagataaaaatgggtaaatgaacagcaaagtcatgaaatggataaaaattgctaataaacgtgaagaaaatattcaaatttgctgtttatctaaatacaaaataaatgaacaataaatgttccaggtattggtaacagcataataaattgtttgattacattttcttgtagctattaattataaaacctgaacaacaactgta

SEQ ID NO: 256279 - DNA, 570 bp, Homo sapiens
aactacagtaataaagacagtggtattggaaaatggacagacatacagatcaatgaaagagrgtagacagcccagaagtagacttatgcagatagagtaaactgattttaattgaggcgcagaagcattcaaaggagaacataccgtcttttcaaccaatggtgttgaaacaattggatatttacatgcaaaaaaatgaacctccacatgtataacataccttacacaaaatttaactcaaaatgggtcatagaccaaaaatgtagatcgtaaaactgtaaaacttctagaagaaaacatgggggaatatcaatatgaccttgcatttggcaatgagttttaaaatgcaataccaaatgcacaatccatgaaagaagagaaaggaataattggactttatcaaaatgtaaaacttctgcactgtgaaagacactgctaagagaatgaaaagacaaggcgcagtctgtgagaaaatatttgcaaattatgtatctaatcaaggacttctatccataatatataaagaactctcaaaattcaataataagaaaataagcaacccacttgaaa

SEQ ID NO: 256280 - DNA, 594 bp, Homo sapiens
aatgtataaacaaactgtggtacatccatacaatggaatatgattcagcaacaaaaaggaatgagctaattgtagaatagcacatttgttattgctgtgggttagtatattttcttagaggaggtgaatagttttctgtattaatcatatacaagcaaaatattccgtgagagaaataatttgttctgacaaaacaagaaattaagggaagacagaaatggtgggaaaaactgaagtcccataagcgatggcagcagcagcccatctggagtggctgctgcaaagacgccagctgcagcaggggaggcctggccagggttgtgggcttcgcagagcccgagggagccgagaacaggagggagcccggaactggagggggccccgccctcccaggtgcagctgcagccgctcagccatggctctgaacccaggcatccctgcactcttgggggccttggaagcccccctgtgcctgcaggcttggaagcgcctgctcctgcccctggcctctccctgctccygttgcccgctctgatttcggagcaaagttgtggctaggcccgggtgctatcgcaacctagcagtgaccagacc

SEQ ID NO: 256281 - DNA, 529 bp, Homo sapiens
gagtccctgcggcctcttcttcccctttctcctcctcctatcaacaagaggggaaatttgagcatgtgtcatgatacggtttggctgtgtccccacccaaatctcatcttgaaatcccacatgttgtgggaggggcctggtgggaggtaattgaatcatgsgggcaggtctttcctgtgctgttttcgtgatagtgaatacgtctcacaagatctgatgattctatcaggggaagtttccctgcacgagctctctctttccctgctgccatccatgtaagacgtgatttgatcctccttgccttccgccatgactgtgaggctttcctagccatgtggaactgtaagtccattaaacctctttctttcgtaaattgcccagtcttgggtatgtctttatcagcagcctgaaaacggactaatacatgtcactcatcaaccaatgggcctgaattaaaaatgggtttgcaggtctacttcgatatgttatatactcatttaacagtcattctttcatttattcattcact

SEQ ID NO: 256282 - DNA, 529 bp, Homo sapiens
gagtccctgcggcctcttcttcccctttctcctcctcctatcaacaagaggggaaatttgagcatgtgtcatgatacggtttggctgtgtccccacccaaatctcatcttgaaatcccacatgttgtgggaggggcctggtgggaggtaattgaatcatgggggcaggtctttcctgtgctgttttcgtgatagtgaatacgtctcacaagatctgatgattctatcaggggaagtttccctgcacgagctctctctttccctgctgccatccatgtaagacgtgatttgatcctccttgccttccrccatgactgtgaggctttcctagccatgtggaactgtaagtccattaaacctctttctttcgtaaattgcccagtcttgggtatgtctttatcagcagcctgaaaacggactaatacatgtcactcatcaaccaatgggcctgaattaaaaatgggtttgcaggtctacttcgatatgttatatactcatttaacagtcattctttcatttattcattcact

SEQ ID NO: 256283 - DNA, 529 bp, Homo sapiens
gagtccctgcggcctcttcttcccctttctcctcctcctatcaacaagaggggaaatttgagcatgtgtcatgatacggtttggctgtgtccccacccaaatctcatcttgaaatcccacatgttgtgggaggggcctggtgggaggtaattgaatcatgggggcaggtctttcctgtgctgttttcgtgatagtgaatacgtctcacaagatctgatgattctatcaggggaagtttccctgcacgagctctctctttccctgctgccatccatgtaagacgtgatttgatcctccttgccttccgccatgactgtgaggctttcctagccatgtggaactgtaagtccattaaacctctttctttcgtaaattgcccagtcttgggtatgtctttatcagcagcctgaaaacggactaatacatgtcactcatcaacmaatgggcctgaattaaaaatgggtttgcaggtctacttcgatatgttatatactcatttaacagtcattctttcatttattcattcact

SEQ ID NO: 256284 - DNA, 529 bp, Homo sapiens
gagtccctgcggcctcttcttcccctttctcctcctcctatcaacaagaggggaaatttgagcatgtgtcatgatacggtttggctgtgtccccacccaaatctcatcttgaaatcccacatgttgtgggaggggcctggtgggaggtaattgaatcatgggggcaggtctttcctgtgctgttttcgtgatagtgaatacgtctcacaagatctgatgattctatcaggggaagtttccctgcacgagctctctctttccctgctgccatccatgtaagacgtgatttgatcctccttgccttccgccatgactgtgaggctttcctagccatgtggaactgtaagtccattaaacctctttctttcgtaaattgcccagtcttgggtatgtctttatcagcagcctgaaaacggactaatacatgtcactcatcaaccaatgggcctgaaytaaaaatgggtttgcaggtctacttcgatatgttatatactcatttaacagtcattctttcatttattcattcact

SEQ ID NO: 256285 - DNA, 602 bp, Homo sapiens
aatgttttctaaggtgtagggtagggtaggaaatgctgctagcacagagcaacagtgaacgttgaatcacacagtaagagagaagttgtggctcctcttccaattcccttacaatccttctgataaaaccaagaagaccaaggctcagtttagaaccttggtagctgtcagattctctaacatttgctacaatctctttggttttaacaaagttcttcttmaccaagaacaggctcagagctttctgctacaccagtatttcacacgtattaaataaggttacattttccattgtacttatttttacctttactttctgtttagggcatttacgtgactgttataaagtttgctttaaagtaaaaatgtaaaatgagacaatcttaagaaaatattaaatggctgagagcaagcaggttctgggatttggcaaaaatcaggaaaataatgcctggatgactaaagtctgagaatcactgttctaaagacagtatgtcacatatttagaaattaacatctaatttttccttcgttgtctctttgaaatatgtccaaacaatttcaaagggattggaccacagcaatgctgcacgtgcatgagg

SEQ ID NO: 256286 - DNA, 442 bp, Homo sapiens
ctggctactctttctgagtggctttgcttccaagtcaatgagctctaawctggcacgaattcttacccaagatcataagagtaaagttaaaccctggaatgtgacacagaccactcaagacagaaccaagagaattcctaggtacatttatgccaggtgagccaaatgggagacttccagtggttgagtcagaggtgtggtgcttaactatccctgtggttgaaaggcattcttaacacattcatcctttccaaggaagctttggcttatagagttttggatcccctaatctctgactcaaactaagaatcaaggattaaaattcattccttggtgacctcacattgaagacaccaagtgttatgaggaatcatcttagcatgtttgaaacttgaagttgcatgcatgcttttgcaataaacttgactttttgtgagaatgt

SEQ ID NO: 256287 - DNA, 601 bp, Homo sapiens
ctgcatgtttgcctctgtgagctccttaaagataagcactaggtcattgtcatctgtgaattccaaaatgcccacataggcacagagatgatgcttcattactggtggaccaattaataagtgtgctacctccattttacacataagaatattcagattcagacaggtaaagttaacctttgtactctttgccaagagttttgtaagaacaaatataagctctttgctgggtctggaatctctctcccacctgctatacctgggyggcctcctactcttcctcaagtctcaaattaaatgagaccacctctatgcaccttctctacccccttctggctggtggaggtagcgcttcacttcgccttgattccctagcactctatatatcactatagaaactgtttattttcctctttctcactaagctatgaagtcctgggtggacaaggtctccatcttccattaagcccttcacatgtaggtattgcatgtgtgttcttttccaggtgccaaagatataggcagatacatcagttgtatcagttgaagatttttgagttccaatggatggaaacccaactcaaagtggattaatcaatag

SEQ ID NO: 256288 - DNA, 594 bp, Homo sapiens
tggagggaggtctataaacggctgctctgggagtgtctgtcctatgccgttgagataaggactgagatatgccctggtctcctgcagtaccctcaggcttactaggattgggaaaccccagccctggtaaatttgaggtcagaccggttctctgctctcgaactctgttttctgttaagatgtttatcaagacagtatgtgcaccgctgaacatagtcccttattgggagtttctgattttgccctgtccctgtttcctcagaagcatgtgatctttgttctcctttttgccctttgaagcatgtgatctttgtgacctacttgctgttcttgcaccccctccccttttaaaatcctcaataaaacttgctggttttacggctcaggtgggcatcacagtcctaccagtatgtgatgtcacccccggcrgcccagctgtaaaattcctctctttgtactctttctgtttatttctcagactggctgacacttagggaaaatagggagaacctacgttgaaatgttgggggtgggttcccctgatatatgtgaaactccgaaaagcttgaaaggaatcaaatgctaggaggaaag

SEQ ID NO: 256289 - DNA, 602 bp, Homo sapiens
ctcccaaagtgctgggattacagacgtaagccaccgtgccctgctgaacacaacattttttaaagtaaaagagaggaatgtaaatatttgtgaccaaaggaaayttgagaacaccaagtataagaaaatcaaatctaaaggcaaataatgaaagtactacaatgaatttaacgatgtggaaattgtagattctaaaaagcaggacaaagcatccaaaatctcattctctatcactacctggacatgaactattccagtgttattacaaggaaattgaggtgagtcagtttaaataaatcaaatctagcctgtttggccacttttctgatttctgtgtcctttcttagtacatcacttataatttaattattgtcatattctctaaatactagtatatgtaatccccatccctacccccatattacgtataagtaacataattgcttaatggcattgtgatctcgcaatgtcatcacaactcataccgccaacataatctttttctcataaagccaaagagtttgaaagttcttcagagacatgcccatgaattattcacccgacacaggacagatgcctaagcaacaggttgtccaataagc

SEQ ID NO: 256290 - DNA, 602 bp, Homo sapiens
ctcccaaagtgctgggattacagacgtaagccaccgtgccctgctgaacacaacattttttaaagtaaaagagaggaatgtaaatatttgtgaccaaaggaaacttgagaacaccaagtataagaaaatcaaatctaaaggcaaataatgaaagtactacaatgaatttaacgatgtggaaattgtagattctaaaaagcaggacaaagcatccaaaatctcattctctatcactacctggacatgaactattccagtgttattacaaggaaattgaggtgagtcagtttaaataaatcaaatctagcctgtttggccacttttctgatttctgtgtcctttcttagtacatcacttataatttaattattgtcatattctctaaatactagtatatgtaatccccatccctacccccatattacgtataagtaacataattgcttaatggcattgtgatctcgcaatgtcatcacaactcataccgccaacataatctttttctcataaagcyaaagagtttgaaagttcttcagagacatgcccatgaattattcacccgacacaggacagatgcctaagcaacaggttgtccaataagc

SEQ ID NO: 256291 - DNA, 550 bp, Homo sapiens
cctgtaaacacaataatcaccaacacccttggtaacgaatcaacaaactgccttatgtttttctccaactcacaacaaactaaattcagacttccttcaaacatctagttccaacagtaatttaccagaagtgcatttgtaactagtattggcctttttattttatgtgtattctagatcaggttataattcttaaaaacttctaaataaaacaatgcacccacataagggaaacatgaatagatattattagatttaaaatatcagcttggtaaaatacacatccaaatgctttcgaactacartaaatatcacaaaatcatgcaaaaaatgtgttattaaggatggctgattttacatattgcactcctcaaataactttacagcaaatttaattcaatttggaggattctgccccaaaatatggaattatatttaagatacaggcatatagctcagtgtttcttaaatattaaattctatcaaaatccttaaaccaaagtactgatcccattaagtatttcccagcttcaaaagtaagaattcctgt

SEQ ID NO: 256292 - DNA, 582 bp, Homo sapiens
ttcttaaaaacttctaaataaaacaatgcacccacataagggaaacatgaatagatattattagatttaaaatatcagcttggtaaaatacacatccaaatgctttcgaactacagtaaatatcacaaaatcatgcaaaaaatgtgttattaaggatggctgattttacatattgcactcctcaaataactttacagcaaatttaattcaatttggaggattctgccccaaaatatggaattatatttaagatacaggcatatagctcagtgtttcttaaatattaaattctatcaaaatccttaaaccaaagtactgatcccattaagtatttcccagcttcaaaagtaagaattcctgtaactatacttggctctaataatttatatttagtagaaataaggatatataaaaaagaagcagggagaaggaaatagatcaagtgacaaggttaagcagcatgtatgtccagggaatatgattgtaaaatgatcacacamaagacctttaaaacggagatgaaactctcctataaatgttaaagtatttatgaaaaggaattatataggaatcaaaataatg

SEQ ID NO: 256293 - DNA, 530 bp, Homo sapiens
ccccagcccgtaaatggtacagatcacttctgctcacattgcactggggagaccttagactcatgaccacacctaatggcaagggagcagaaagatctagttcagttgtgtgtccaggtacagtgtatttggtgagaagtttattgtttccaccacaaatgtgaagaccaaatgaatctacttcctaaaattattttgaattgttcctcttgtctttcttcccatagctattttcttcattcaggccaccatcacctcctgtttagatttcagccatggttgattcygatgcctcctggattacctaccttccagtacattccccaggccaggctattgcaaggtggttttcttacattggttaggcaccctccttcaggaaagtcttactccattttctttcttctcatttcaccttacataactgccaatatttgctataaaaaaataaaataaatttattgattgctttctgtgtgctagggactatctcaactgttttggatatatactaccatttgattccaaac

SEQ ID NO: 256294 - DNA, 604 bp, Homo sapiens
tagaacatctgaacttaatattatagttcattttgtcattttgtctataaatgacaaaaatttttagaagttccagttttcttctatgtatgtcactaattctcaaatttaaaagacagaataggccaggcgcagtggctcacccctgtaatcccagcactttgggaggccgaggcsggcagatcacttgaggtcaggagttcaagaccagtctggccaacatggtgaaaccccatctctactaaaaatacaaaaattagctggcgtggtggcaggcacctataatccaagctactcgggaggctgaggcaggagaatcacttagacccaggaggcagaagttgcaatgagccgagatcctgccactgcactccaccctaggtggcagagcaagactccgccacaaaaaaaaaaaaaagacagtattttattgtaatatataactgtattattaatttgaatcccaagacattaaaactctgctttaataaaatataggcatttacttggttaaaattctttgctaagcctgtcaggtaaccttcgatgaagtctagtttataagccttgtttaaggccaccctgctcataaaaggccaccaaa

SEQ ID NO: 256295 - DNA, 559 bp, Homo sapiens
acattcgtaagtacttcatagcttctaaaacccgtcaatagaaatactctaatgtccaaccagctcctaaaaataagttttattatcatcccattttacaaaagaggctactcaaggacttgctctacaactcatcagttggagaacaaggagtaactgtagattttgtgacatgtgccatctttcctctctaatcacatcacccaggcacraatacctcctagtagcctatacaacagaaaataaagaacaatttctgagacagattcaaaatcttctagaaaaaacaggcaatgctattttaaattatcttgaattaaactcctaaggaaactggcaaaacactcttagtttccttacatgaattagaataaatatccaccagtcttttaaacggtatttttaacgtaagtgattctgagtatattaataagggatctgtcagttgcaagttagtgacatccaactcaaactaatttaagggaaggaacattaagatctcatatatacaaaaagtccaagagtgactttcaggtacagcttgatccagatgtgcaca

SEQ ID NO: 256296 - DNA, 356 bp, Homo sapiens
ggctgtgttggaaacttaatcctcaatgcaacggtgttgagagccgggacatttatgaggtgatcaggtcatgagggctctatgtattaatgctgttatcgcagcatttgaaccagatttgaaccaaaactttattatttgcatgatattaagaattagaaaaaaagaattacaaatatgagtggtaatggagtagatatcaggatgttamatttttatattgcttcattgtttacatgaagtaacttagtatcctaacttagcggtaatttaatgtcctatatgatttgtatctagcttaaatactctcaagaaagctaagaaaaccatgcagttcctgggggactgcttcacag

SEQ ID NO: 256297 - DNA, 566 bp, Homo sapiens
aaaccatgcagttcctgggggactgcttcacagttgctgtgtaatgggctctgtggtaaattaccatacagttaatgcaggtcaatatcraagccaaaagcagcataatttagtgattgaaagcatgagctttggagtcaggcagatttgagttcaggccctgagctcttaccttgggcaagtcacttatcccttaaacttccatttcctcatttgcaaaacagaaacaacaatgccaaccacacgatgggtgaggattaaacaggagaatgcacaggaagcttgcagcacctggtgagaactcaacgaaggtgtgggtccgccttctgatgacggaacctgttacagctgtctgtctgaagcgatgagatgaggcaacccttgctctgggaaggcagagtcacctggcatcatcaaggtataagaaaaaagactctctggagagcaggataattatgacttcattattctgctagaatgtaagctttcaaagggcagagatctttttctgtgttatacattgatgcccccaagtgcttagaagagtgcctggcacaaagtggctg

SEQ ID NO: 256298 - DNA, 519 bp, Homo sapiens
aatgcaggtcaatatcaaagccaaaagcagcataatttaktgattgaaagcatgagctttggagtcaggcagatttgagttcaggccctgagctcttaccttgggcaagtcacttatcccttaaacttccatttcctcatttgcaaaacagaaacaacaatgccaaccacacgatgggtgaggattaaacaggagaatgcacaggaagcttgcagcacctggtgagaactcaacgaaggtgtgggtccgccttctgatgacggaacctgttacagctgtctgtctgaagcgatgagatgaggcaacccttgctctgggaaggcagagtcacctggcatcatcaaggtataagaaaaaagactctctggagagcaggataattatgacttcattattctgctagaatgtaagctttcaaagggcagagatctttttctgtgttatacattgatgcccccaagtgcttagaagagtgcctggcacaaagtggctgtttggaaattatatgttgaatgaatc

SEQ ID NO: 256299 - DNA, 588 bp, Homo sapiens
ttctctcaaaactgtcctaaacatccccacttccctctatcaccactgctatcctcctagtccggctgactcatgatctacctgggtgtctgctgcagaagcttctttcttgctctcactcctcccagcctttccactcatacccaccaccatagcataatccagtttccrcaatgcagtagtgttggaatactgcactccacaatccagtattgtggaaatactgcattgtgtagtaaaacaatattttaaagatgtgaatgagaacaaatcatctctaaaccatgtaaagatgtcccatcccatttggaatgacaccttgtctccttacaaacatgattatttgcttcctgaccaacccttccattcctccctgctcccctgcctcaccatgttgggctcctttttctgttctttgagcaaaccaggctctcccagtctaataattttttgcatttttctctctctgggaaaagtcttcctttgttcttcacataactgtttccttctccttctcaggtctcactccaattgtcatccgttcagagatgacatttgatgaccttctttgactacccaaataagctc

SEQ ID NO: 256300 - DNA, 517 bp, Homo sapiens
agtggacggctcgacattgcttggagagcctcactatgcatggaagaggcaggtttatcaacactcggctacaacatggcccctcctggggaacaggcatgagccaggggctgtgggagctggaaggacagactcagccctgcctaggaagggctgagaaattaacagtcgcagcactgagtacactactgctgttcatgaaaaccatgggcctgtgcattttaattcataaaaagacaataggattcagattttataattttctattttaaaaaaagaaatcagtaagtgcaaggagcctcccacacttagcctctaatgctcctaccaagcccgtaatcggctgttgctatccacattttaccagcaactgaggctgagacaaattagggttgtyggcagaagtcccagagccgggtggtgacacagccagaatctagccctgccaccaatgctcttgtttcccactgtaattttaaaataacataagcaagatgttatagtttttgaatttaaa

SEQ ID NO: 256301 - DNA, 582 bp, Homo sapiens
tgtctgattaactccaacttatgctctacttatcagcaaaaataccacttcttcacagaggccttctctaaacctcataacctaaattatacccctgtatcagttagggttatttggctgcaagcacagaaccaactggttaacccaagaagaaaggaaattaattggaacaatttgaggtcatggagagattcaaagggaaagctaaaaataggctcaagaggacaggaactgagatccagggatccaaatgacaagaattgacagtctgtctgtagcactttgatagcagtgaatcagatccaacttttttgtgtctttgtgtkgttccagttaaggttacggtccaaggagagaatctaattggtcttaatcataccacatgcccatgtctgatgagagtggggtgaggtggagaggaaccttaaatgacagccccacaaaaactacagacaatgaaggagagtcatttccctaaggcaatatgggcagttttagcagaagggggaacgagtgctggatgcaaaattagtgggttgtcccattgcatgctctcactgtactacctacacttcccttaca

SEQ ID NO: 256302 - DNA, 605 bp, Homo sapiens
gtgggggggggttgggcattggagaggggagaccaggtgagggagggagactgagcagaaggaatatgggaggaggaaagaaaaagagacaaagatatctgataaaagttgaagggycagcaaaacctctttaactcaggtttcataagttgagaaatattttatcacccttgcgagtcaaacctctgaaaatcaatagggcttgagagttgcatatattgatctgaatgcccgagatgtattgaaatattcatggctggatgtatgtgttcagagaagatgctgggggtggggcctggtgcagagagagggagatgggtaggtagatttctaagtaaaagccagtctccttttcattaaaaatagattaattctattagttggactaaaaccttacacttaaaaggaaatgagcttgtttgtcagacaaataagccactggcaaacccaggaaaaaaaaacatttatttattgctatttaatagcagaagagccagggagagttgataaaattagcacagtatccccaagcgggggagcaagggctgctttgtttgcaaagccaatttggacaccgcagctttgatcttcactttgagcatttg

SEQ ID NO: 256303 - DNA, 626 bp, Homo sapiens
tcttaaatggacaaattcctagaaacatccaacccagaaagaccgaatcatgaagaaaaaaaaatatgaataaacctatasccaggaaagagattgaatcagtaaccaaaaacctcccaaaaaagaaaagaccaggactaaatggcttcattgatgaattctactaggcatttaaagaagaattaacaccaaccctcctcaaactcttccaaagaggaggaaacactttcaaacccattccatgaacccaatattacactgataccaaagccagacaaagaccatccaaaaagaggaaacaacagaacaatattcctaaatattgatgcaaaaattctcaacaaaatacgagtgaacagaattcaacactacattaaaagtattatatacaataagcaagtgagatttattcctagaatgcaaggatggttcaacacacaaaaatcaacccatgtaatataccacattaacaaaatgaagcaaaaaaaaaagccatgattatctcaattgatgcagacaaagcatttgatgaaattcaatacccttttatgataaaaacactcaacaaccagaaatagaggaaaactacttcaacataataaagatcatatatcaaaagtccacag

SEQ ID NO: 256304 - DNA, 626 bp, Homo sapiens
tcttaaatggacaaattcctagaaacatccaacccagaaagaccgaatcatgaagaaaaaaaaatatgaataaacctatagccaggaaagagattgaatcagtaaccaaaaacctcccaaaaaagaaaagaccaggactaaatggcttcattgatgaattctactaggcatttaaagaagaattaacaccaaccctcctcaaactcttccaaagaggaggaaacactttcaaacccattccatgaacccaatattacactgataccaaagccagacaaagaccatccaaaaagaggaaacaacagaacaatattcctaaatattgatgcaaaaattctcaacaaaatacgagtgaacagaattcaacactacattaaaagtattatatacaataagcaagtgagatttattcctagaatgcaaggatggttcaacacacaaaaatcaacccatgtaatataccacattaacaaaatgaagcraaaaaaaaagccatgattatctcaattgatgcagacaaagcatttgatgaaattcaatacccttttatgataaaaacactcaacaaccagaaatagaggaaaactacttcaacataataaagatcatatatcaaaagtccacag

SEQ ID NO: 256305 - DNA, 542 bp, Homo sapiens
ttcaaacccattccatgaacccaatattacactgataccaaagccagacaaagaccatccaaaaagaggaaacaacagaacaatattcctaaatattgatgcaaaaattctcaacaaaatacgagtgaacagaattcaacactacattaaaagtattatatacaataagcaagtgagatttattcctagaatgcaaggatggttcaacacacaaaaatcaacccatgtaatataccacattaacaaaatgaagcaaaaaaaaaagccatgattatctcaattgatgcagacaaagcatttgatgaaattcaatacccttttatgataaaaacactcaacaaccagaaatagaggaaaactacttcaacataataaagatcatatatcaaaagtccacagttaacattatacccaatggtgaaaccctgtaagttttccttctaagaatgggaacaaggcaagtatgctyatttttgccacttcaactaaacataatactagaagccctagtccaagcaattaggcaagaagatgaaattaaa

SEQ ID NO: 256306 - DNA, 644 bp, Homo sapiens
gttcatgaactgcaagacttaatattgttaaggcatcaatactacccaaagagagctatagattcaatgcaatctctatcaaaatttctgcattatttgcagaaatagaaagatccattctaaagttcatatagaatctcaagagatcctgaatagccaaacaatcttgaaaaagaagaacaaagttggaagtctcatacttcctgatttcgaattttattataaagctatagaaatcaaaacagtttggtactggcataaagacaaacatatagaaaaaacggaatagaatagacagctcrgaaataaaccctcctatatctgatcaaatgattttcaacaaggttgcccagaccacttaatacagggaaataacattttcaacaaatggtgttgggaaaactggatacccacatgcaaaagaatgaagttggaaactttgccttatgccatatataaaaattaattcaaatgggtcaaagacctaagtgtaagagctaaaactataaaactcttagaataaaacaaaaggaatagttttatgacattggatttggcaatgacttcttggatatgatattagaagcaaaggccaataaaagaaaaaatagataagttggactacatcaaaataaaaaacctct

SEQ ID NO: 256307 - DNA, 516 bp, Homo sapiens
agttcatatagaatctcaagagatcctgaatagccaaacaatcttgaaaaagaagaacaaagttggaagtctcatacttcctgatttcgaattttattataaagctatagaaatcaaaacagtttggtactggcataaagacaaacatatagaaaaaacggaatagaatagacagctcagaaataaaccctcctatatctgatcaaatgattttcaacaaggttgcccagaccacttaatacagggaaataacattttcaacaaatggtgttgggaaaactggatacccacatgcaaaagaatgaagttggaaactttgccttatgccatatataaaaattaattcaaatgggtcaaagacctaagtgtaagagctaaaactataaaactcttagaataaaacaaaaggaatagttttatgacattggatttggcaatgacttcttggatatgataytagaagcaaaggccaataaaagaaaaaatagataagttggactacatcaaaataaaaaa

SEQ ID NO: 256308 - DNA, 381 bp, Homo sapiens
ctctctgttggttccttgccatgtcccagaaaccagggttacacaggagtcataacccctccataccctctcctctcttccagcccaagctaattttcttcactatgttcacgaatacacataaatcttaactcttgaaccagtaaaaggggctctcttaaaatgcttgtggatccttttcagctcttgggacatgcacatatataataaaatatagcrtcttgtgataattgaccaaattatttattgcaactggggagagtgtgagctcatttgaatgagatctcgaaggatagtagtagcagtcatcatagcagtagtaatagtaatactgatagctcttctttattgagagcttaaatgtggcagtcatggtgctaa

SEQ ID NO: 256309 - DNA, 584 bp, Homo sapiens
ccagcacctgttctggtagaggtggcgggggtgtgcaatggattccatgagggttcttagctttggtggtttaatgttctatttttgtgctggttggccccctgccaggaggtggcactttccagaaagcatcagctgtagtagtatagagagggactggcagtgggcagggctctagagcyccccagattatatgtcctttgtcttctgctaccagggtggatagggaaaggaccatcaggtagggatggggctaggtgtgtctgagctcagactctccttgggcgggtcttgctgcagctgctgtgagggatgagggtgagagtcccaggtcactggagttgtgttcctaggaggattatggctgcctctgctgagtcatgcatgttgtcagggaagcaagggaaagccggcagtcacaagtctcacccagctcccacacaaaccaaaaggccagtctcactcccaccgtgcccccaccaagagcccaagtccgtttccaggtgcagagcatgacaggcttgaaaacttgccccaggctacctgcctctccagctgagaaagaaaagggcttggttctttcc

SEQ ID NO: 256310 - DNA, 591 bp, Homo sapiens
ttcagttctctaaattgactcagctccaggtagtcagaaacttctcctgcaaatggacatttagcttctcctgtgggtgtgtgtgttggggagaggagggtctcccttttccacctccacagttggggctctcacagtattcrgggtgtctcctgggtcccgcaggagcagtctgtttccttcggacggtctgtgggtcctctcgggtttgctggtttgtacttgccagttgatctggagctaaaattcacaatgcgagcttccgcaagctgctgtgtctggagctgcaatctagccctgactcccattggccatgacgatcaaattgaagacattttttgccaaacatactgttttggcaaaaatatgtgtcagtaggatccccatgtgtaactgctgagagtgcaaactgatagtcattttataaaacaatacagcattatcgtataaaacaaagttcttataccccacaactcagtaattctactcccagacacatatccaagaaaaactttagtatgtgtgtctcaagagataagtacaaaaatgtcatagcagcactattcataatatcaaaaaactagaaatagc

SEQ ID NO: 256311 - DNA, 591 bp, Homo sapiens
ttcagttctctaaattgactcagctccaggtagtcagaaacttctcctgcaaatggacatttagcttctcctgtgggtgtgtgtgttggggagaggagggtctcccttttccacctccacagttggggctctcacagtattcggggtgtctcctgggtcccgcaggagcagtctgtttccttcggacggtctgtgggtcctctcgggtttgctggtttgtwcttgccagttgatctggagctaaaattcacaatgcgagcttccgcaagctgctgtgtctggagctgcaatctagccctgactcccattggccatgacgatcaaattgaagacattttttgccaaacatactgttttggcaaaaatatgtgtcagtaggatccccatgtgtaactgctgagagtgcaaactgatagtcattttataaaacaatacagcattatcgtataaaacaaagttcttataccccacaactcagtaattctactcccagacacatatccaagaaaaactttagtatgtgtgtctcaagagataagtacaaaaatgtcatagcagcactattcataatatcaaaaaactagaaatagc

SEQ ID NO: 256312 - DNA, 633 bp, Homo sapiens
gcaaactaataaagattcatcaagaacactggataagagatcaacatataaaattcataacaagcagagtacaatggcttaatctcagctactcaggaagctgagttgagaggatcccttgagtccaggggtttgaggctatagcgagcagtgagctatgatgaggtcactgcactctagcctgggcaacagagcaagaaccctcatctctaaaattaaaataataaaaaataaaattcataacagacaggatagcagcactaacaaatgttgttggcctcctcttatgaatacatgtcccatagaagctagggagaaattagtgaatcagagtggttaaacaaacaaataaaatgctagcaactccagagcaacagtgtgcgattggggtcctggtgaggctgtgagtcagcatgaaccggcatgacaagtataaaagtcaacatgaaaagcgggctgcatagcacaggtaggacgagggaaagtttgtgtgttttttgtttttttgagacagggtctcacctgttgcccagactggagtgcagtggtgcaatgacagctcattgcagcctcaaygtcccgagctcaagtgatcctaccccctcagcctcctgattagctgggaccataggc

SEQ ID NO: 256313 - DNA, 531 bp, Homo sapiens
atcatcagtgagacaagagaggttgttcaaaacatgaaagaggaacataaaagaggacactttcaacactgaaggaggaagaagtcatgaagaatcatctgcacgtattacgcatgagaaatacaatggaaataattcagttaatagcatgaatggagacataatcattttaagatcatattaaagaactcttcctagaaggcaccaagaaagtattaacaaaaaatatgcatatattgaaatgccaggggaagaaaaaaagatatatatatatatatatatatatatatawaaaacacagttgagaagaaataactggattttccagatttcaaaaaatatcactttcagattaaaaataaatgcagagtaaatataaagctctcctgcactaaataaaattataaaacttcagaacattaaagccaaagaggtatttccaaaagattccagaaaaaagcagtggctcacctactgaaaagcaagaatcactttgacatcagactaattacaagaccaaaggcaggcagc

SEQ ID NO: 256314 - DNA, 503 bp, Homo sapiens
aatattcaatttgaatatccttcttagattcataagttattgatatgtggattatttattttacaaatacttggcaattttctaggtatcttattgtgaatttctcactgaattttactatggttaaacacttcagtcttttgaaattatggtctctcttgccaaatgtttcaaatgcacatggtagcattgggatattatgtaaatatcaattaggtcaagttggttgattgtattatttatatcttctgtattcttactcattgcttatccagtaattctataaattcctaagactgctaaaaatctctaactataatcgtagatttgtttttagttctgtcagtttttactttatgtattttgaagttttatttttagcagcatatacacttagaattcttacttctgaattgacgctyttatcttaacataatatgttgatattcatatatccataccaacttccccttgcttactgttcaaatggcacgtatttctca

SEQ ID NO: 256315 - DNA, 568 bp, Homo sapiens
ctgtattttaaagaatttttatttatttatttattactctgtggtgcgatctcagctcactgtaacctccgcctccggggttcaagagattctcttccctcagcttcctgaatacctgggattacaggcacctatcaccatgcctggctaatatttgtatttttactagagacagggtttcaccacactggtcaggctcatctcaaactcctgacctcatgatctgcccgccttggcctcccaaagcactgggattataggcgtgacccactgtgcctggcctaaaggaaaaaaatttgtctttcatattcagccatatatttaccgttcccggtattcttcatatcttcgtatctttgtctacatacaagtttccatctggtataattttgcagcagcctgaaaagcatcccttagcatttctttcagtctaggtctgcatcttggatcattccactgttttccatgagaagtcagccgtcattgtcccctataygtaatgtgccttttttcctctggctgttctgtgatttttctctttggttttcagttgtttgaccacgatgtg

SEQ ID NO: 256316 - DNA, 618 bp, Homo sapiens
aattacaggtgctttatgaatattgaagcaaaacaaaatcagctagaggtggggtgagggaggaaggactttaaatttaagacactgttatttagaaagtttttgaaataaaaaatttaacttcttccaggttcataagtctgtctatcaaaagcaaaggtattttgagcttccaaagtcttactgagggtccttcctggagccctgggtgggtaccctttgtactttgagctttcccaccatttcccttatttcttgtctagaggaatttgaagtggtaacataaaacccagagaaagaaaccagtttttaatatgcaaaccaccgagactaaatctgggcctatgagcctctgaggcttcataaaagggaggataacgtcagcttaggccttacctcaaaccacaagacatttacwttctgatttatggtctaggctggaccagtataagttatcaagaaggatcatgttccatcgctattttttaaaatgtaaaataaaagtaagaggactgaacttgctcagttccttcctttttggttaatggaattgctcatggaggtggggaggcagttagacgccaaagcaatcctttagaacaacctgggtttccttct

SEQ ID NO: 256317 - DNA, 657 bp, Homo sapiens
tggttgcctctggggaagaggacatcagtgacaaaaggaagcagatgtatggactatgtgttgtacaataagtctgtagaggaggaaattattatcctaattttgtagaggaagacattcaggcttagggatgacaagaatgtggctgaagtgaaacttgagtccagctctcctaactcaaggtcctttccttgtgtcatggctgatttctaaaacggctctctgagcctgagaatattttataaattcaagattgccttactcctaggatgtcggtagaagtgctgttatttggtggtagggttgggaaggaagttagtgataatctggctcaatctcattctacatataaaaaacatgggkctcaagaaagatttttcaggtcaccaacatattattaagtgcacagaagggtaccagtgggaaatcactgactaaatttcttttgagttgctaattgcctttgtaacattccaacaaggtagggcttatttttatttcacagatgatggaaccaaggtgcataaagacaaaatgcatagccgggattctacaaacagatgggggttttccttgagcaatcacttctagtgtactcccttgagataggatcctcgtggactgtatcacgtcaagggagctaaaattttactgtac

SEQ ID NO: 256318 - DNA, 657 bp, Homo sapiens
tggttgcctctggggaagaggacatcagtgacaaaaggaagcagatgtatggactatgtgttgtacaataagtctgtagaggaggaaattattatcctaattttgtagaggaagacattcaggcttagggatgacaagaatgtggctgaagtgaaacttgagtccagctctcctaactcaaggtcctttccttgtgtcatggctgatttctaaaacggctctctgagcctgagaatattttataaattcaagattgccttactcctaggatgtcggtagaagtgctgttatttggtggtagggttgggaaggaagttagtgataatctggctcaatctcattctacatataaaaaacatgggtctcaagaaagatttttcaggtcaccaacatattattaagtgcacagaagggtaccagtgggaaatcactgactaaatttcttttgagttgctaattgcctttgtaacattccaacaaggtagggcttatttttatttcacagatgatggaaccaaggtgcataragacaaaatgcatagccgggattctacaaacagatgggggttttccttgagcaatcacttctagtgtactcccttgagataggatcctcgtggactgtatcacgtcaagggagctaaaattttactgtac

SEQ ID NO: 256319 - DNA, 582 bp, Homo sapiens
gattgcctatgactctcttgttttctgcaatatctgaaagtgtccccttcagtaagttgtccatttctttctcttgctttctttcttccatttttctttttctcttctccttcctttttgaatgataccctgaggttaaaggatatacacagccatgcagaaagaaaaaatcagaaataaaatgtttatgaaaacatttctgttgatcagaaggaacaaatgagtactgcttacccgagatatcaaaacaaggactctactgagctaaagcaaagccttcaggctagtgtgatacctactgaaagctttattctgttaaaaaaaaaaagaaaaaaagaaaaagaaaaaagaaaaggcatgtcaggtaaagctcagatgtgtccagcagggcatgtctttgttcagaaggcataagagagcactttttttttttttttttttttggagacagagtctctctctgtcactcaggctggagtgcagtggcacgatctacactcactgcaacctccacctcctgggttcaagtgattctcatgcctcagtccaccaagtarctgtgattacaggcacccaccacca

SEQ ID NO: 256320 - DNA, 508 bp, Homo sapiens
agagtcagcaggctatgcaacacctgcctccactgcatctgtatttgtttattttcattccagaaagaaagagattctgagttttaatcccaactttagtgatggttcctgacagccccatgtagtagtgtaggagaacatgcaggatcccaaaagttgtcagccttgaagtttcaagttaatattaaaatttttttgtggaaggaaattgaagaatagaataaaaaggatgcaggagttgtggatgggtggcaaaagcatgtaagaatgacgtggcaaaggaggaaaagtataaactgcatctgtatatacatatggttgaaattggagttagactggaaaatactcagagcctaattagtgcttagagaraatccctttgtcattggcttgatctaactacttcatctccgggaacaatgggggatgggctgtgctgcctaagggtagcaagtaatggtctgcaccatctgtggctgttctcttgcacctgaacccaaagaggagc

SEQ ID NO: 256321 - DNA, 599 bp, Homo sapiens
ttgccattattatctgatcttatacttctaaattaaaagcttacatctttattctttggtttttaaattttaaacattatctactgacttctaactctaaaacgtgaggatttatttaagcacaattatctctatccttatcatatagcaattaaacaatctctggttaagtcartattttctatttatattaatataaatattattcacaaagttatgtagtagactaagattatattgtccttccagtaccaactcagcaactccctggacagagcctctacgggcaactgaaagcctctgtgccactccctctgcagtggaattgcccttaacaccctcagactaacaaaagagtaaagaccctaagtgcctcattcacgccgccaacaaactgcagttaacccaaggagagaaggccagtccttcttccatgggaccttcacatcccccgcatcttagcaccagacagggaacccctggcttgggaacacagcacaaaccctccctcttgggctgactgcactgagtgattgctaacctgcgtctctctggagtgcagtccccaggagtcaagcaaatgacccttggacacttga

SEQ ID NO: 256322 - DNA, 599 bp, Homo sapiens
ttgccattattatctgatcttatacttctaaattaaaagcttacatctttattctttggtttttaaattttaaacattatctactgacttctaactctaaaacgtgaggatttatttaagcacaattatctctatccttatcatatagcaattaaacaatctctggttaagtcaatattttctatttatattaatataaatattattcacaaagttatgtagtagactaagattatattgtccttccagtaccaactcagcaactccctggacagagcctctacgggcaactgaaagcctctgtgccactccctctgcagtggaattgcccttaacaccctcagactaacaaaagagtaaagaccctaagtgcctcattcacgccgccaacaaactgcagttaacccaaggagagaaggccartccttcttccatgggaccttcacatcccccgcatcttagcaccagacagggaacccctggcttgggaacacagcacaaaccctccctcttgggctgactgcactgagtgattgctaacctgcgtctctctggagtgcagtccccaggagtcaagcaaatgacccttggacacttga

SEQ ID NO: 256323 - DNA, 599 bp, Homo sapiens
ttgccattattatctgatcttatacttctaaattaaaagcttacatctttattctttggtttttaaattttaaacattatctactgacttctaactctaaaacgtgaggatttatttaagcacaattatctctatccttatcatatagcaattaaacaatctctggttaagtcaatattttctatttatattaatataaatattattcacaaagttatgtagtagactaagattatattgtccttccagtaccaactcagcaactccctggacagagcctctacgggcaactgaaagcctctgtgccactccctctgcagtggaattgcccttaacaccctcagactaacaaaagagtaaagaccctaagtgcctcattcacgccgccaacaaactgcagttaacccaaggagagaaggccagtccttcttccatgggaccttcacatcccccrcatcttagcaccagacagggaacccctggcttgggaacacagcacaaaccctccctcttgggctgactgcactgagtgattgctaacctgcgtctctctggagtgcagtccccaggagtcaagcaaatgacccttggacacttga

SEQ ID NO: 256324 - DNA, 416 bp, Homo sapiens
agggattgggaacctatattcaacattcttaaagaaaaaaatcttcaaccaagaattttgcatccacccaaactaagattcctaagtgaaggagaaataagatccttttcagataagcaaatgttaagggactttattaccaccagacctgccttacaaaatatcttgagaggagcactaaatacagaaaggaaagactgctaccagctaatcaaaaacacacttaaacacrcacaacagtgtcattgtaaagcaaccacacaaacaagccaacacaataatcagctaacagcacaatgacaagatcaaattcacacattaccaatattaatcttgaatataaacaggctaaatgccccagttaaaaggcacagagtagcaagctggataaaaaataaagacccaatggtatgctg

SEQ ID NO: 256325 - DNA, 381 bp, Homo sapiens
atcaaccccaacactagcagagacaacaaataacaaaaatcagagatgaactgaagaaaatagagacacaaaaaaaacattcaacagatcaacaaayccaggagttggttttttgaaaaaatgaataggacactagactaagaagaaaaaagttccaaataaacacaattagaaatgatgaagggagtgttactacggaccccacagaaataaaaacaaccatcagaaactactatgaacacctctacacacacaaactagaaaacctagaaaagatggataaatttctggacatatacaccctaccaagactaagccaggaagaaattgattccctgaacagaccaataatgagctccaaaactgaatcagtaataaata

SEQ ID NO: 256326 - DNA, 586 bp, Homo sapiens
atggaacgtgattagggccatgaatatctaggtggtcacagtggggcacaagacaaacatgagtcagcagcacaacattatttgaaaaataacaaacaaaggccttgaactgcctgcagagatgctgggatgcctttcataatactgggtgttgatctattagactttggscctgcacagttaaaatcaagcaacgtatttcctatatactgtcctaagaatttagggaaacccaggaacccttggcagtgtgtgtttaaggaaacgtgttctctttgtgataagttttactcctgggtctctcaggaagcaggatacattgtcactcttcacttctgtccagtgaccttgctcacacagtctttgatcccgagaattgggaagaaccttctagcacttctccagaaacctatttgcctcactgatgcaggtaggagatagtcaaggctaagcctcagatcagaaccttggtctcccaactacttattcagtactctttaaataaataatccactaaaaaaaaaaaattgcacttcatttttgccctgagctagaaagccagatccatgcaagaggacagagttac

SEQ ID NO: 256327 - DNA, 609 bp, Homo sapiens
ttcacttctgtccagtgaccttgctcacacagtctttgatcccgagaattgggaagaaccttctagcacttctccagaaacctatttgcctcactgatgcaggtaggagatagtcaaggctaagcctcagatcagaaccttggtctcccaactacttattcagtactctttaaataaataatccactaaaaaaaaaaaattgcacttcatttttgccctgagctagaaagccagatccatgcaagaggacagagttacatatcttcctagtgcaaaatcttggggatctgacaaaccagcttagaaagtgctgtcttacattagacaaacaagccatgtttgaaatattatgttttgcactaaagagtgtttggtgaggaatagcagatagatactttagaagytgatatatttggatgaattaaactgcagttgatgtcttcctttgaggaaactgttttcacttgttctccctccctccaagagaggataaccagagaaagactgttacactacggaatgtgactgtctaggtagacacaaatgtcccactgaaatactctccatcccctagctgtgggttctctcacaaacctttctggcaagagt

SEQ ID NO: 256328 - DNA, 572 bp, Homo sapiens
gtattcagtacacagtaaaaaatttttcagaaatgtactaatttcttagtctctacctgaatactaagaaagaattgaagacaattcagtgccctaaaagaagtatactatttactgaaaagttacaagatctctaaatttggaaaggacagctttatttctgaatttctgagaagagctgcaatctgcatgctgggaagcagagccactggctgagayagaaaagggaagggtgggacaggagttttatgctaaacaggctggctaaacatacataaagggggttacctacatgcgtgataagcaaatttacatgttacataaatcccatgttcacacggagtgaagacttaacattaaaatgcagcaaaattaggctctataggctctgtacattagaaggtgacactcaggacacaaaggcactacgtgtgcagcttctgtaaaccagtcagaaccagttcatggtcaatggccatttgtaagggaagaatgctttgtgaaactggttatttgccatgtcaaaaccacaaaaagggatgggagttgggctacagtatcaggtggtgtgc

SEQ ID NO: 256329 - DNA, 576 bp, Homo sapiens
acctgcttgtatccctcaacagacactaattgataaattgctttgtttcagtttttgtttgtttttgagacagggtcttactctgtcacccaggctggagtgctgtggcacaatctctgctcactacaacttctacctcccaggctcaagcaatcctcccatgtagctgggaccacaggtgtgcaccaccatgccaagctaatttttgtatttttttgtagagtgaggtttcaccatattgcccaggttggtcttgaactcctaagctcargcaatccacctgcctcagcttcccaaagtgctgggattacaggcatgagccaccatgcccagctctgaaattcttttttgaagctaactttaaaaattacctttattctacttctttgtttgatatctccctttatgcaattcattaatatatccaggtaaatggattcatggaacattaatgaatggcatgtttcccacagcctttaaaaattctgaaaatattttaaatataagacatgaatttttgccaaagttatatttaaaagtttaattagttgaaatacaatttaatcacatgtatca

SEQ ID NO: 256330 - DNA, 587 bp, Homo sapiens
gtgcacaatcctggcatttcacatttcacaaccttacaaaatagctgtgatcccctgctccccagatcccactccaaacccctcccttcctgctgggttaagcatcacctcactgtgtggctcaataaaggaaaccctgggaaattaatggtcttgttacctccattggtgtttaatgaccctgcagtttcctgcagagtgtattctccctgggccagttgttaatgaaccagttcctccttccatggttcaagtggaagtctcttacagcagcagagaagaacagattgaatgcccactaggtgcsaagtactatactatgtgctttatatggattgccttgtttattgctcatttaatccaaaaatgatcctgtgatgtaggcatgattatacccatcttacagatgagtaaagcaagtcatagaaaagtgaggtaaaatgtcaaagaccacacagttagagtcgagtgaggaattaaattcatagaggtaacctgcaaggttcacattcttaatcactacagcattcacatcctcatgtaattctgtctgaggccttgacatgcaggccatctggttggtttac

SEQ ID NO: 256331 - DNA, 602 bp, Homo sapiens
aactctttttctcagggcttcaaatgaacttttaccagctacctttggctatatctgttataatctctcattattgtccaataaatcattattttgaaattccaaaatcattattttgaaatgctcatgtgaaaatttaagaaaatatattttgttgtcctttgcaattttattttttaagttcatcacttttaatttctaataaagtaagtacctatatataacctaccccaccacctcctccaccccaaaaaatcgtggggtcctcaatagtttttaaaagcataaacgagtcttgaaaccaraaagttttaaaactgctgttagatatattttatgcgtagttctcggtatacaaaaagactttaattctctcaaaaaaacatacctcttacagtgaaacaaaccttagctttcaagaccatctgctcttctaggggctttaagagtttatcttgcatggcaaagaccaagagtttgattctgttttcagcagttcactttccctagtgatgcctttttaatagtaaaggggctgagggaataaattgacttggagagaattaaaaatcattgtttaatagttcaaaatattatcctta

SEQ ID NO: 256332 - DNA, 602 bp, Homo sapiens
cctgactgctataaggattccttaactacaagacagcaactgcttaaccctattctctttagaggcaaataaatatgaggatcctcactttgtgatccacatatctcagtggtagagaagctgaaagttttctgagatggttacatttctggtatatacacttcattatttctaggttaaaaaaaataattccaagataaagttaattttaagaaaaagaaaggaggtggggagtaagggggagcatcatttgctcaagtaaagtttacgttgccccaactaatgttcctttccacagtaatcttgcccaacattaatactggggtaacccaaccttgccattgtagtggtggtggaggtgctttacctctccaggtcaagaggctagcaaagttctccattcactcctagacagtagccaactcagcctactcagtccccgagacagtaagtaccaagccygccaggatctcagcacctcctaatagccgataggatctggaatcagctagcaagcctattagtaacatgtcccaggagggctgtaaggaccctattggatcttgctttaaccaatcaaccaatccaaatgggcttcagtg

SEQ ID NO: 256333 - DNA, 521 bp, Homo sapiens
attttggagtaagacttcctgggtttatatcccagctctcctacttaccagcygagggttctcaggtatattattgtagtctgtgagcctcaaacttttcagccataaataggtttagtaatagtcttagcctcatagggttattgtgaaggttaaatggtttaatatgtataaggcacttaaagcaatgcttggtccttagtaagacctatgtaagtgttatctatcatcattactttattatttcaattagggccagcccagctcctaaccagaccattctttgtggataaagctgtatcttgcctgcttttcatggtttgaacaaagaattaggactctttaattgggtttggaagagtctgtcaaaatcatggatctcctcccatcccctctctaatttcctcttaggaagcctggtcagtttatttcacacacatcgactgggctattctctgtgccaggccctacatcttttggatgtatctgtacagagataagtgagacccacttggtctcta

SEQ ID NO: 256334 - DNA, 536 bp, Homo sapiens
ctaactccctgttcaaacccaggtctatattagctccggctgccataacaaaattcaacagactgagtgcttaaacaacaagcattcatattctcacagttctggaggctggaaggctgagatcaggacaccagcatggctgggttctgctgagggctctttttctggctttcagacagcagccttctctctgtcttcccatgrcactaattcttcaaggccacaaatcccctcatgagtgccccaccctcatcacctcaggaaacctaactatctcttaaggccccacctgcaaataccaccacactggggaatactgtgatattcctcaaaacaggaattttgaggccacacagttcagtttatagcaactgctttgacacttcaggagaaaaaagtaagaactggaccatcaagtccccattgtaagctacagttggccctccatatccatgggttccacattcaagaatacaaccaacctcagaaaatagtggccaggcatgctggctaacgcctgtgatcccagtgctttg

SEQ ID NO: 256335 - DNA, 570 bp, Homo sapiens
gctatcatacaaaagcatgacacctcyaaaagaacacaatgattcaccagcaacagacttcaatcaagaaatttatgaaacctcaaaaagagaattcaaaataatgatattaagaagcttaagaaaatacagaagaacaatataaagaaattagaaaaacaatttgggatatgaatgagaaattttccaaaaagataaatgtcatttaaaaaatgaaacaaattctagaactgaaggattaaatgaaatacaaaatacatgcaaaagcttcaaaaatagattagagcaagcagaaggaagactttcagagctctaagttcttttgaaataacccaggcagacaaaaatacagagaaaagaatttttttaaatgaaaaaagcctacatgacatatgagataccataaagcaaccaaatattcaaatttttggtatcacagaaggtgaagagaaaatgaaggggttagaaaacctatttaatgaaataatagctgaaaacctcccaagactaaaaacaaatttagacatcaagatgcaggaagctcagagattcccaaacagatacaatgca

SEQ ID NO: 256336 - DNA, 570 bp, Homo sapiens
gctatcatacaaaagcatgacacctctaaaagaacacaatgattcaccagcaacagacttcaatcaagaaatttatgaaacctcaaaaagagaattcaaaataatgatattaagaagcttaagaaaatacagaagaacaatataaagaaattagaaaaacaatttgggatatgaatgagaaattttccaaaaagataaatgtcatttaaaaaatgaaacaaattctagaactgaaggattaaatgaaatacaaaatacatgcaaaagcttcaaaaatagattagagcaagmagaaggaagactttcagagctctaagttcttttgaaataacccaggcagacaaaaatacagagaaaagaatttttttaaatgaaaaaagcctacatgacatatgagataccataaagcaaccaaatattcaaatttttggtatcacagaaggtgaagagaaaatgaaggggttagaaaacctatttaatgaaataatagctgaaaacctcccaagactaaaaacaaatttagacatcaagatgcaggaagctcagagattcccaaacagatacaatgca

SEQ ID NO: 256337 - DNA, 557 bp, Homo sapiens
tctaagttcttttgaaataacccaggcagacaaaaatacagagaaaagaatttttttaaatgaaaaaagcctacatgacatatgagataccataaagcaaccaaatattcaaatttttggtatcacagaaggtgaagagaaaatgaaggggttagaaaacctatttaatgaaataatagctgaaaacctcccaagactaaaaacaaatttagacatcaagatgcaggaagctcagagattcccaaacagatacaatgcaaaaaggtcttctctactgtacattatagccaaagtgttaamagtcaaagataaagagacaattctaaaaacagcaagagaaaggcatctagtcacttagaactcccaacagactaacagtggatttctcagcagaaatgttacaagctaggaaagaatgagatgatatattccaagtgctgaaagaaaaaaatgtcagccaaagataccatatttagctaagttatgcttcataaatgatggtcaaataaagtctttcctagacaagcaaaaggtgacagaattcatcaccattagac

SEQ ID NO: 256338 - DNA, 625 bp, Homo sapiens
cgagactcccatctcaaaaaaaaaaaaagtggcagttaccatctcccaaaacgtcagataatattcttccaacagaaaaacataaactaaatatgttttaatttgtcaaaatgataaaggatrgtataaaaaaacatactgaagaaaagcacattctgaaaataggcacatttgaaaaaagagtagaatagaatttaaagaaataaaacatatagtcattggaataaaacctaaaaaaaatatatccacaatgaagaatttggggatttaaagaaatggaaaatataaaagagtggttaagagagaatgagaaagtccaacatacatctaataggagttccaggaaaaggcaatagagaaaaagaggagaggcaatatttaaagggaaaatgactaagaattttctagcatatgttaattaataccatatatatttatgaagctctaccatgtaccccacactattttaggtatgaaaaagaaagcaatgaatgaagacaaaaatccctgctttcacagcatttactttctaaaagaaagagataattttgtggttgttgtttttcttcttcttttttttaaatggtccacttgctagagaaagacaagagagatagttttttaa

SEQ ID NO: 256339 - DNA, 625 bp, Homo sapiens
cgagactcccatctcaaaaaaaaaaaaagtggcagttaccatctcccaaaacgtcagataatattcttccaacagaaaaacataaactaaatatgttttaatttgtcaaaatgataaaggatggtataaaaaaacatactgaagaaaagcacattctgaaaataggcacatttgaaaaaagagtagaatagaatttaaagaaataaaacatatagtcattggaataaaacctaaaaaaaatatatccacaatgaagaatttggggatttaaagaaatggaaaatataaaagagtggttaagagagaatgagaaagtccaacatacatctaataggagttccaggaaaaggcaatagagaaaaagaggagaggcaatatttaaagggaaaatgactaagaattttctagcatatrttaattaataccatatatatttatgaagctctaccatgtaccccacactattttaggtatgaaaaagaaagcaatgaatgaagacaaaaatccctgctttcacagcatttactttctaaaagaaagagataattttgtggttgttgtttttcttcttcttttttttaaatggtccacttgctagagaaagacaagagagatagttttttaa

SEQ ID NO: 256340 - DNA, 611 bp, Homo sapiens
tcagcggaggggtttgaaccaccaccttgcgtagtgaggtaggaggatcacttgagctggggaggcagaggttgcagtgagccaagactgtaccactgcactccagcctgggcaacaaagggagacactgtcttaagaaaaaaaagaaaaaagcagccaactaaaccaagaaggaaaaagtgagaagcaaawgcactggtgagcaaagacacccaggaagtattaacatcacatatgtatgaagtgtaatgtcattaagaatgctgggggcctcaaaaagaggatagaagtaaaatactaggcctcaataccatgaaagaggtcaggatgatcagaattaaagtggtatatgagtcctgatcattctgaagtttattttaaaaacctaagttgtccttaagtaacatatgcatgttactaattcgaggctagaacaattggacatccacatggcaaaaaatgaattttgaccctgccttataccatacacaaaaattaattcaaatggacaacagatataaatgttatgagctgaatctactaaactcttagaagaaaacgtaggagtaaatttagtgaacttgggttagacatgacaccaaaagcacaag

SEQ ID NO: 256341 - DNA, 579 bp, Homo sapiens
ttcctttaaaagctaactattgatttatcacattatctaccaatttcatttctctgtatctatccagagaacttgaaaacatatgtccacataaaaactcatacatgactgttctttatatcatcactcataatgtcaaaaagtggaaacacccaaatgttcatcagctgatgaatggatatgacttatgcatataattattatttggccataaaaagtaatgaagtatggatccatggtacgacatcaatgaatcttgaaaacattacattaagtgaaagaagccagtcacaacacttactgaatgattccatttatgtgaaatgtctrgaatagacaaatccacagagacagaaaatagattagtggtttccaagggcagaggggaagggagaatggggagtgactgataatggctctgaggtttcttttggggatgataaaaatattaacataaattgtggtgatggttgccacaccctgtgaatacattaaaatccattgacttgtacacatcacatgggtgaactgtatagtatgaaaattatatcccaataaagctgtttaaaatattttaag

SEQ ID NO: 256342 - DNA, 581 bp, Homo sapiens
atgacttatgcatataattattatttggccataaaaagtaatgaagtatggatccatggtacgacatcaatgaatcttgaaaacattacattaagtgaaagaagccagtcacaacacttactgaatgattccatttatgtgaaatgtctggaatagacaaatccacagagacagaaaatagattagtggtttccaagggcagaggggaagggagaatggggagtgactgataatggctctgaggtttcttttggggatgataaaaatattaacataaattgtggtgatggttgccrcaccctgtgaatacattaaaatccattgacttgtacacatcacatgggtgaactgtatagtatgaaaattatatcccaataaagctgtttaaaatattttaaggataactcctaaaagagtagaaataaattatctgtataacttctaaaccaatagaggtgaaggagggactaacaaaagctgttcagtccaaggaatggtaggagagagaggcgggagaagcaaaggaaaagcaaagcaaataaaacattttagaagagagtaaaaatcaatgtttaaagaaa

SEQ ID NO: 256343 - DNA, 561 bp, Homo sapiens
ggtaaaagtatgaaaatatccacttaaaaacccttgggggccaatccccggtagtatagtgattaggaaaaacatatatattgggggccaggcacagtggcacactcctataatcccagcactttgggaggccaaagctggaggattgtttgagcccaggagttcaagaccagcctgggcaacatcgtgagaccctttctctacaaaaggaaggaaagaaaaggaaaaaatgttgggtattgggggagggaaggagatgaatgagatgggaaggaaagagtgggcttctgctgtccctatcacacacactttatttctttattaagatatgaaaaacactatggcaaattgtcatatatattaaatataggtaaataagctcataggcatctattttctgtatcaatttatatttaaaatatttcttaattaaaaggcaatacaaatarcattggcaagagttcagggaaatggtactccacctctgttggtaataagcctgtataaatttggagagggaattttgacaatatgtacccaaaggtttttaaagtgttcaca

SEQ ID NO: 256344 - DNA, 488 bp, Homo sapiens
ttataaacaaaacacatgtatttctcacaattttggaggctggaaactccgagattaagacaccagcaggtttgatatctagtgagaactgtcttccctgttcatggttggtgccttctgactatgttctttcatggctgaaaacgttaggcagctctccgaggtttctttcataagggcactaatcccattcatgaaggcttcaccctcaccttccaaaggccctacctcttaaaaccatcacattatgggttagaatttcaacatatgaatgttgtggkaacacaaatattcaagccatagcatcttgttcctaaatgaataactttgtctcctttattttcattaagtgttaaactcttctacttagagctagaataaaagagcatttcacaaaccgtgtgcttatgtctttcctactcataatacttcaatcaagattgccttgaaactcatagaactacaaaaaccttagattcatgaaagct

SEQ ID NO: 256345 - DNA, 458 bp, Homo sapiens
gaagagtgggggaaaaggagagttctattgtttaactctcatttttgtctcctcaaatctatcatttcagagttcctcttagctaccagtagtggccagtgcctaaaacctatttctctcattttcttttctataaacgcctgtctgaaatccatttttgcgctgctctgaatagcagtttggaactttgaaggctgaatgggtttgtcaattttagctttaagtctgtggtttgcatgttaattaccctttgccttattaaatgtatcttcttaaattagaaaagaaaaccaatcatttctaattacctctgtgctgctagttcctccttaactttagtttgtactcttctggggggacatccctttgaaagtcattcagaaaatgtaagtgtcattgacacattccttatatgtrgctcgaggtattagcaggtcgttgcttcagcatacactgtc

SEQ ID NO: 256346 - DNA, 622 bp, Homo sapiens
cactgggtggttttaaaaatctgaacaatacatttgagtctcaatgtactcctctttccagcttcatgatgttggaaaaagcagcttaaatactttaaacttgctttcccatcagtacaatcattgtgggtttttgcataacatctatgagatgttgggtaccttcatatacactctccaatttattctgtaaaattgggataatgacacctactagaagagagattatttgcaagaactaaatatctatatgaaaggctttgcaaacwgtaaaaaacaaggcacttaaaatattttcctgccgttattcttatccacaaatcctagctcaaactatttagttcttgatcgatttttagaatcccttctagtttgattcctatatctgaagtttggaaattgagcttgtgtttctctaaaggaaaaacaagatgtttaacacagaaaaagatttttttttcttttaaagtgttcttaacattcctcggattctggcattttcttgaaataaaattaggtatgtgttttgaaatgtcaagttttcaaataaactcctacaaacccgctgcgaagttgctccctttgctttgctaccttctgcatatacaccttcagtttcctc

SEQ ID NO: 256347 - DNA, 609 bp, Homo sapiens
agtgggaggtaatgtggtactgtagcttggaaagaagacacatcagaacaaaacttgaactacaagtaaactctgccatatgctagctgttatttaaaatctctgaacctctatttctttactagcaaaaattgcaaggctattatgaaggagaaggctgatttatgcaaagtgccttactagcagagttcctaccatgattggcactccatgaatcataactctcgggttacagcaaaagtgtattttatcatttactaattgtttcacatgaatatactttttactctttaataataataaagtcctgcaggaaacaaccaatatcatattatggaatggaattcttaggttttgcttctcttcatgcaattttaatcaatgcagccaagttacacatttttctctaaataattctttagttttgcygtggagtttttcacatttcattcatctttaaatgtattgtcatttcttttatttctcttattattgccccattaatccgtggtttaatatctgtgtgttattgagtttgcagatgtataattttaaacatacattattatattatatattttaattggattagattgtagtcaaacctgt

SEQ ID NO: 256348 - DNA, 582 bp, Homo sapiens
ttcttaggttttgcttctcttcatgcaattttaatcaatgcagccaagttacacatttttctctaaataattctttagttttgctgtggagtttttcacatttcattcatctttaaatgtattgtcatttcttttatttctcttattattgccccattaatccgtggtttaatatctgtgtgttattgagtttgcagatgtataattttaaacatrcattattatattatatattttaattggattagattgtagtcaaacctgtatgtccctatgtggttatctctttgaaagttaaagaggtctctcttgtgacataatgaaggtcagatttttataaatactccaagtgtgctgcagaagcgtgaggatccttggctatgtccagttcacacggtcacattgcacaacatttttcctatgcataaaatgtatcactttgcctttcttctctttcccatatggaaaaatatatacatttatatgttattgtagtaggaaatttggaatttcacctgagtttctttagagaggttttttaaaaaagctcctatgtaggatagagcatagagaaaggaggtg

SEQ ID NO: 256349 - DNA, 450 bp, Homo sapiens
aagaagtcgaggtcacaagatcaatacccaagtttaatacccayagggaccagttagcttttctgtgccctgaacccaagtctccaggccagccatggctcagatgtatgggattgtccctgagagatgaatgcttcatgtccatcacacatgcaatacttaccagaacagcagccacagtctgactcccactcgctcaaaggtcaatagcatatcttgataggaaataaagacacagcaatgttagctacaatcgggtgcttacctgtgccaggcactgcggtaaacattttagaatccttgcaacattctttgaggtaggtggtctcattatctccattggataaatgaggaaatggggttcatggttttcaccttctgacagcatgcaacctgtagataacccaaaatccaaggacttaggccagtatgccgggtgctaaccaatgt

SEQ ID NO: 256350 - DNA, 541 bp, Homo sapiens
tataaatgccaatcattttgaatgtgataatcttgtatttattttgtaattaataatcttgtartaattattgtttgttttttgttgattcatataatttgatttgcgtatatagtcattgttgaaaaattggcaaagagaaaacggaggcagagatatctccacagatagattctatcactgctacctacaaccattttaaattactgttaaaattttggtgttttttgctttcatttttattaacacaatcaatattttcactgatataattatatatacttatacaagttttatgataccttcttcattctataatgaaagataaacacttaatattgctattacaaatactggcaactattaattaatattttcagtctgtatgtaattatttttatctatttagaaactatagatagtaaattaagaaaaaatcagtatttgtaattctgtacaccagagagagccacattttaagatattttcttctgtttttttttttatatgcgtagacctatgatttaatctaagttgccag

SEQ ID NO: 256351 - DNA, 541 bp, Homo sapiens
tataaatgccaatcattttgaatgtgataatcttgtatttattttgtaattaataatcttgtagtaattattgtttgttttttgttgattcatataatttgatttgcrtatatagtcattgttgaaaaattggcaaagagaaaacggaggcagagatatctccacagatagattctatcactgctacctacaaccattttaaattactgttaaaattttggtgttttttgctttcatttttattaacacaatcaatattttcactgatataattatatatacttatacaagttttatgataccttcttcattctataatgaaagataaacacttaatattgctattacaaatactggcaactattaattaatattttcagtctgtatgtaattatttttatctatttagaaactatagatagtaaattaagaaaaaatcagtatttgtaattctgtacaccagagagagccacattttaagatattttcttctgtttttttttttatatgcgtagacctatgatttaatctaagttgccag

SEQ ID NO: 256352 - DNA, 510 bp, Homo sapiens
tcctcccccatactaatgacagcaggtttccacctccacacaactgataatgagcttgctgtgatgttggatttgtttccactgagtttttatttgggtcacagtaatagaggaaaatatgagtgagaggaaactaggcctcagaagctctaggaagcactgcctagcccatcacagaggtgatgaaaaatgaatattctgatatagttagaataccttagaagaaaagtgcattccaacactactccatggaacgttctacaaaatgttctatggcttaaagtctaaggactggattgctttccatacaaaggactctgtaacactgaaatgtttttcacaatcattgtctactttcttctcccacgtgtattaagctagttcatgccactggagctcagaaactaataccctaaacctggcactttctcatgctgagcacttaagcaaagaaaattaaaaggtcttacaagcagtcacmgaactgataactttgtaacattttcctgc

SEQ ID NO: 256353 - DNA, 609 bp, Homo sapiens
ctgaaacacaacataagcctttgcaaaaatatgcactagatagggaaggcctgtttgatgcccaggcatgaaagtgtcyacttctcagaggaacatggctttgggtcactgtcatttgcacctgcactgcattttcctttctctcatctacatgcagaatgcttcatattcaagggaggtgccacacccagtcagctgagctgtttacacgtagtgggctagcttgctcatgcttacctgctgtgtcttctgttcatcagttctttctactctgttttacagtccattcgtggaactctagctctcaattattgtttcataaatacaggcaggtaggacaaaaatgtggctgaatcattgcaaaatcaaaatattttctgggagaaaaaaatcatagcacttcttctactgacaagtcagaaacttcatgctctcatctatgtgcccatctgtgcatattcctccattttgtacctgtccatgcattcttcttacctctgacaggaaatttccacattctactcttgaatcctccttaatttagtacctgcagaatgtgcctaacagatgcttgataccctaaattacagtcagataaggcaggatgtt

SEQ ID NO: 256354 - DNA, 631 bp, Homo sapiens
ccaccagatacactgcaagtgtcagacactgtgagctgtggagtaaaggagctctccatcccttggcattggaagaggaagtctgagcctacccaaattgaggtgtagggcgagcctccccttctggagttccaaggtgatgtggtctccacgctgaccttctccatggaacaggaccccatctccttgcatgctcttgaacttcagggagatcacatctttgagagtactcatcaacttctgattgaacctgtacagaagtgagcttcggccatcaaagtcagcaacrtctgattctgggaacaaagaaggagcgggaaagaaaaattagtgcatattctcatgactgctgttactgtttcccatcttatttcatgtccagttcacagaaatgttcttgagatctgccaggtctagtctcaacaggaaacatgtagactagaaccaccctaattagactcaagggaattattcgtttacaagcaatcaccacacactgagtcaaagtgaactgatcattagtttagaagtaaaaactctcattagtgatatgtcagcttttgctggaggggacagggtgaaaataccgcaagtacctatgtctggcttactatgtcagatggcttagaat

SEQ ID NO: 256355 - DNA, 619 bp, Homo sapiens
tttgctggaggggacagggtgaaaataccgcaagtacctatgtctggcttactatgtcagatggcttagaataatctctcttgatttgtcttcctgacagtcagaaccacttgatctccttatctcagacacaacattagagatgaaaaatagatataattatgatgccaactccacatagtactgtctccctagaagtctgtgttgagaaggattctgaggcttctactgggttcagtggaaaaaaatactcagcaaaagaagacttgttatttgaacaaagagggcaaatgtatcactgccttatctgtgctggtgatatttatcattttagtgtttttatacaaaacatttaattccttattgtcaaagcaaaacaaggtgaaggtcaagtaaccatgatttagataaacttatgtaacaggtatgtgtaaacatatctgacaaattatgccaaaaatytaatagagattctatttggaatgtgttgttctaggttatttttgcgggtttttttttctatttttttaattacaaaaacttttataatgagcttttattgtagaaaaacatgtaagactgtttaattacaaattgaaactgattcattatataccat

SEQ ID NO: 256356 - DNA, 592 bp, Homo sapiens
tctctgctcagttctcaaatattgtttttaatcaggtctcatctttcctactcaaactaatttccagttctttgcactcttcctgcttctggtgtataattccgtctccttagcatcttttattagtcagagatcgtgagattgcatttgacagaaccacaactgaaatggcttagtaaaaacaggaacatggttagtttatctagcttgtaattgaagactacaccagttcaaggcacctctggatacaggaatcaaataagatcccagctatgttgttcctctcttcctccccaaagtgctcccagtcgctcccaccctctcagtctcagccaccctttctgcctctcacttctgcttcactcccaggcagatctttccacctggaagtgagttagacacaagcagtcttaggatgacagcctaacagtgtgtcccaaacagaagaaagcagtctttyccccccaaataagtctatggaaattcagaactgagctccaaatggtcagagagttaatgactctggccaggaatatgacctatgttgggttgcccagacatcagcccacacacacactcctgacaaagaaga

SEQ ID NO: 256357 - DNA, 587 bp, Homo sapiens
cattacactggggattagagcttcaacatacgatttggggaaggacgctaacctactgtctacaacaaagctctactcactgaaatcacctacatttgcttctcctagaactcatcttgctgggcattgcttccaccttcaatttttgttaccaaactggagcactgtatccaggacctgaaatctgtgaactcaagggtttttggctttagcctcagccattayttttctattggttgtattctgatataatgtgaccccagattcagaaagtaggaagacaagttcttgctttgggggctgaaatgcaaactgaaggtgaaggaaggacaatgaatgctcagttggcatttcttaggtctcaagcaaagaagaagagatacaggtggggaagcaagtgatgatgtagcaaccagattatgtagttgttgatactcactgctttatttcccccactggccctccatagctttaccagagtcttccctaaacctggctggcagctgattagaaatgccaaatttctaatgccactccaggcctgctggatcagaacctacaatatatgacaaagctggcgggtcatt

SEQ ID NO: 256358 - DNA, 561 bp, Homo sapiens
cattacttttctattggttgtattctgatataatgtgaccccagattcagaaagtaggaagacaagttcttgctttgggggctgaaatgcaaactgaaggtgaaggaaggacaatgaatgctcagttggcatttcttaggtytcaagcaaagaagaagagatacaggtggggaagcaagtgatgatgtagcaaccagattatgtagttgttgatactcactgctttatttcccccactggccctccatagctttaccagagtcttccctaaacctggctggcagctgattagaaatgccaaatttctaatgccactccaggcctgctggatcagaacctacaatatatgacaaagctggcgggtcattcacaacaactttacagttagagaaacaccgctctgaaagtctgagtgccaggtactctgtggttcagggtgtggggagagatttgagatcctacacttggctataatgttaatgggacataattattttactaagctcctcccacaagcaaagtgaatttcaaggaagaaatgttgggcttacatgaacgtct

SEQ ID NO: 256359 - DNA, 501 bp, Homo sapiens
caaaaaaaatctactgcatgggcccaggtcctgacacattacctcattatctatgtgtctgcaccatcttctggctgttgatgcctcatattgacatctctgtgtctatttcaatttctgacccaatgttttatcctaatctctaatcccccttccaatggctgccttgcttcttgacccatggtttttcttacattctgccaagagtacctctttaccatggtttttctcacatggcatmagacttgcttgagtaggatgactttttagttttgtctacaatctccagtattcttggcatttactgcatgcttactcaatttcagacttccacaaactacatgatctgaatttcattagatgcctcccaagtgacccaatgagaacaacagacttgtacctggtcatcagactttctcctgacttggattcctcatgtgacttttagttgccctgccaagtttgctgccaatggaactgtctaatgtctgccaagtgaaa

SEQ ID NO: 256360 - DNA, 597 bp, Homo sapiens
tatctgggaggggttattcttaatacttttttttttttgagatggagtctcattctgtggcctaggctggagtacagtagcgtgatcatggctcactgcaggcttgacttcccaggctcaagctatcctcccacctcagcctcccaagtagctgggactacaccaaagcactgggattataggtgtgagccaccacacccagcagaaatacttgataatcacaacagcttctgtctctcagatacatgtgtaatagtgtgactccagagaagggtttctgaaatgtttcctgtaaatctcatcctcaaaaaataaagccatcctttaaattcatcaaaacrgcagcctgtgaacccagtgacataaacgtataggtgggtccccagttagcccatcctaaagggccattttcctttcattgagtacaaagtatccaggcagacagtgagcagccccttctctgtggcacttttcagggagtgtctgcttctgcatgtacctgaggatctgtctccacagatggcacagatgtgtttaaccagagatccggggctggtggatgggtagttcatgtttccaatcccgggaagccctggt

SEQ ID NO: 256361 - DNA, 430 bp, Homo sapiens
tagcaggtccacataagtagttattgggatgaatgtcaatgccctttgcaaaactgtactttcatccccaaactacaatgtactttctgtctgtaactaccagattttactcgccttcctggactctgttcacaggaaagaaaggaaacaaacaaacctcatacattatgaagcatagggtatcaatggccctgctgattatagtgggtgggggtggcataaatacatgtacacccccactgctgccccatccccactcctctgagcactggggtcaaggaatatatattragcagtttataattcactctctttgctcccttcaggtctgctcctgcgtctatgacagcacacagacagcactgaagtgcaatggatctgcataatgtggccacctctcccacaagattacccgggagcactgattatc

SEQ ID NO: 256362 - DNA, 582 bp, Homo sapiens
ctaccaccacctctagccctaaagctcctaatactccactaatctgtccctctgaggatgggctcattgacatatttgctgcaaaatcgccttgttttgtagccgccctttttcccatgggtaatgcatatatctgaacctaccccacatactcattcacttggagactaatttgaaagatccgattcccagaaatctgttttaatatgaagcctataaaactttcatatgactttctgtgtgtcagtcaaaatttttttagctctcactgcaataacctctcaacagtggggatagaatgaggttaaaagatacatgaacaaatcattgctaaaacattttgagagctttcatctgaactaactttgagagttagtttaaaaccacaccaggaaaccaggsctgatacacagaccttctataacacgctagccctcatgttagtatttggtccttattgggtgaggccatgctgctcccctttactgatggaaagagtcttctactgatgggaaggagaatactttcccatggattctacgtcagaaccctcctacaatgtattgagtcatctgggacact

SEQ ID NO: 256363 - DNA, 586 bp, Homo sapiens
aagcagaacctggggaagcttgatttctctgtctcactccctggaatcggctggatttacgatggtgaattaggtttgcaagccccagccataggtgcccaacaccctgttccatttgctctgcctcgcagtattcttccctgccatccctacccctgaagccctctttttggcccccagaatcctgctagaaactctcctctagaaaaccatcctgaccaatctacctactggctgtatctccagcaaacttttagatacatttccttagagtgggtccagtgcatttcttgaatgtaagcatcctaccctcccctgtttcgagtctatcaaaagctgctcttttatttcccttatggactctgtcctcatcactttccctgttcttccagcttctccccttagcccatggggtgctaactgtttaggttccaggaaaaggctgccgatctgcactccctaaytgcccctgtatgttagggctgagttgatctcagatgctgctttcttgcaggttgagagagcttgaaaatagaggtctgggaaaggtccggagaagagtcctaaaaaactcacaagggcaggc

SEQ ID NO: 256364 - DNA, 579 bp, Homo sapiens
cagtctacctttaggaagtttctgacaaaatccttgggatttatcatcttaattaagcatggtatggtacaatggaaatttccttacatttgcaatagggagactagcattattctttctgaaatgttactgaccagccatgtggccttagaagaaaatcttttttatttttttagacatgaaatctcactctgtcactcaggctggagcacagtggtgtgatcatagctcactgcagccttgaactcctggactcargtgatactcccacctcagcctcccaagtagctgagactacagccatgcatcaccatgcccagctaatttgcttttatttttttagagatggaggtctcactatgttgtcctgggctaaggcagttccctccacctcagccacccaaatagctgggatcacaggtgcaagccaccacacccagcaatttcttattactttggtttccttttttttttaatctgcgaaagagggaataatattaataccaattttcatgggtaaaggattataccatgaagattaaacaaggcaatatctgtatggtaaattgctataattgt

SEQ ID NO: 256365 - DNA, 601 bp, Homo sapiens
atttttcttctgtcacagttctctcctcttctactatttcttagagacagtattcgtttaggagttccatcaaaccttctgtagccctaccttgctaaacacatcttaatcatgctggcagatttaaaaagagaagaaagacaagccagtaaataatttggcttcaaaggggaagtggttaaattctcagcgccttctttataatgttagatcttcagccattctcccctcagtggttaagagtggcctccaactgccagaaaacatcttctgcatctccctctgatgagaaacaagacgtctctcttcttgtctaaatgaggaattgaacccatggccaggccaaktgagtacagtccaactcacccttctgagcatgacgcggtccagcctctgagcaggtccccaagacagcacaggaagcctggaaaacctccctctcactgtgccaagccatgtgtctcctttcatttaaatacttcctgaaatcccaccctcttggtgctccctgatgacttcagagaataataatgaactccttcccttcctcagatcctgtctctccacgaaaggcttttggccactttccctgatcacaccc

SEQ ID NO: 256366 - DNA, 601 bp, Homo sapiens
atttttcttctgtcacagttctctcctcttctactatttcttagagacagtattcgtttaggagttccatcaaaccttctgtagccctaccttgctaaacacatcttaatcatgctggcagatttaaaaagagaagaaagacaagccagtaaataatttggcttcaaaggggaagtggttaaattctcagcgccttctttataatgttagatcttcagccattctcccctcagtggttaagagtggcctccaactgccagaaaacatcttctgcatctccctctgatgagaaacaagacgtctctcttcttgtctaaatgaggaattgaacccatggccaggccaatwgagtacagtccaactcacccttctgagcatgacgcggtccagcctctgagcaggtccccaagacagcacaggaagcctggaaaacctccctctcactgtgccaagccatgtgtctcctttcatttaaatacttcctgaaatcccaccctcttggtgctccctgatgacttcagagaataataatgaactccttcccttcctcagatcctgtctctccacgaaaggcttttggccactttccctgatcacaccc

SEQ ID NO: 256367 - DNA, 582 bp, Homo sapiens
cacagtctcctggaccatgaggagttgtcagttcttcaggactgctcagcctgaggacacatgcaatgaaggccctgcctgagggacgtctgcagagaccattcaaaccctttggcaagcacgcattatggacctgctgagtgctggttctgctccaggagcagcctgggtgaaaccatgtaagatggctggaaaggccttggagaggaagaacacttacctgagagctgggtggggcaaccaagttgattcctggaggcgctgcaagtgctcctgagggtgggcccatggcagaggtgatgactcgatatggagagcccagggcattgaggggggtccccactgcactcagagtccgtggggcactcactggggtatcygtgtagctggggtggctgtccattggcttccctgtggacaaggctgctgatgggctcatggatgtagagccagtgtggccaggggagcctgtaagaagaagaatatagatggtgggaggttggggaacatggaaaggggccctgggggacagaggcctagccccacctttctttcctgtatcctgcccctcttttagccaca

SEQ ID NO: 256368 - DNA, 574 bp, Homo sapiens
gcaatgttcctgatgtttaccagaaccacaatctctaaacaatgaattgcatgtgtgtrtgtgtgtgtgtgtgtgtgtgtgtgtgtgtgtgtgtgtcagagagagagacttactgagaaaggggacacaaaagccagggtacttagaactacagaattcttaccaaggtaaggaagttgctttaggcaaccctcatcctcagccaataaaagcaaaatgtcaagcatgcagtttttctgactggccagacaagggagcaaatggcctggtgtttccacccctttgctgctgtgccaggaagggtagagagtttgctctcccattagcaaccctcttcaggttggaatggaaacttgtaatgaatcattgataacggctaatgcccacccatggggaaagggacagagctaaagacttggcatttttcagagtcaggagtctccatatgaagtcacaggagcaccatggggccctatcccactctgatctctcccacagtggaactgtcacacaccaaagcctgtctctgttcctccagtggagggatatggtgtgaaggcccaacaatgatagg

SEQ ID NO: 256369 - DNA, 574 bp, Homo sapiens
gcaatgttcctgatgtttaccagaaccacaatctctaaacaatgaattgcatgtgtgtgtgtgtgtgtgtgtgtgtgtgtgtgtgtgtgtgtgtgtcagagagagagacttactgagaaaggggacacaaaagccagggtacttagaactacagaattcttaccaaggtaaggaagttgctttaggcaaccctcatcctcagccaataaaagcaaaatgtcaagcatgcagtttttctgactggccagacaagggagcaaatggcctggtgtttccacccctttgctgctgtgccaggaagggtagagagtttgctctcccattagcaaccctcttcaggttggaatggaaacttgtaatgaatcattgataacggctaatgcccacccatggggaaagggacagagctaaagacttggcatttttcagagtcaggagtctccatatgaagtcacrggagcaccatggggccctatcccactctgatctctcccacagtggaactgtcacacaccaaagcctgtctctgttcctccagtggagggatatggtgtgaaggcccaacaatgatagg

SEQ ID NO: 256370 - DNA, 606 bp, Homo sapiens
aaataagaatcttattttaagttgacaagtcatttcttattagatccatggttctcaatgttagctgcataataaaaaagtattaagcctgatgtacttttatagtagtaatccttcagcccatccccccaaattctgatttaattagtctgaagtggattccaggcactggcaatttttttatagctccccaggtgattctaaagggcatctagggttgcaaatcaccgttcttggcagaacccagcttctccttcccaggggtgataaatctctgccttacccataatgaggttgcaaggtgaagagaagagtgtatggattattgggagaaaagatacccaaagaagtattttaaaaatatttccctcttaaacataaatttgttgaatatgtaaaatgaaataaaaatgctagagcaataaggtcacagcaaaaaagttcccagctcagagccctcttttacagtcaggtgcaacrgttctcaaccaagctgcctgtgagactcagctgaggaacatttgaaaatattagtgctctgggtccactccagaccaattctatcagaatctctggggtggggcccaggcatcaatgtattttttt

SEQ ID NO: 256371 - DNA, 553 bp, Homo sapiens
ctttctttattccacttcaacccttccctatgtctttcgggcatttaggccttgggcccacatttgtttcacagttgaactcgaagtgctgattcytatttcagtttggatttgctgccaggtctcccagcccaagttcagtttcccatgggctggctgaaccaccagtgtaaaacagcaagataacatcccagagctggagctcctccagccatgttatgtcaggagaaccgagtccatgttggcctcacagggtcactgtgttctcacagccaggaagccaccctggaagcacatggatggatggctccagcatttcatttcaacgccatccagtctctcattccagctgtcgagagcaaaccaaagggagaagagaaaaaaaaaaagcccaaagaagcactagttcaaggccagtttcagaaatcaagtgtttaaataaaagttatccagactgaaattctggactctgataaattacaaaattaaaaccagaataaaggtaggtagctctgaacactctggtcagtaagtttctgagttaattgaccga

SEQ ID NO: 256372 - DNA, 553 bp, Homo sapiens
ctttctttattccacttcaacccttccctatgtctttcgggcatttaggccttgggcccacatttgtttcacagttgaactcgaagtgctgattcctatttcagtttggatttgctgccaggtctcccagcccaagttcagtttcccatgggctggctgaaccaccagtgtaaaacagcaagataacatcccagagctggagctcctccagccatgttatgtcaggagaaccgagtccatgttggcctcacagggtcactgtgttctcacagccaggaagccaccctggaagcacatggatggatggctccagcatttcatttcaacgccatccagtctctcattccagctgtcgagagcaaaccaaagggagaagagaaaaaaaaaaagyccaaagaagcactagttcaaggccagtttcagaaatcaagtgtttaaataaaagttatccagactgaaattctggactctgataaattacaaaattaaaaccagaataaaggtaggtagctctgaacactctggtcagtaagtttctgagttaattgaccga

SEQ ID NO: 256373 - DNA, 598 bp, Homo sapiens
cacagctgaaaaataagagggtcttaagaaattatagttatctttactatcctttataattacctagaatgatgaaactataactgaatccattatgggaaggattctcagagccatattttgtggattggcttaagttttcagtgagtgctttcggcayttcaaattgtacaccaaagcagggcatgtggtacaaagcactggcattggcaaaggctaacatagatattgcctgggaaatgagtaggaggcatagccatcaatggctcttaagcctgattcatactaaccagggcaaggccaaggtggctccattaaacaccttcactaaggatattttccaaggaaacacttttataactttcagatacaagctaaaagtgacattgggttaaggaaacgtcttaaacaatttttctttttttggagattgctttagcagttagattgaatttatgattggcacatcagctctttgcatatgaaagcaagagcctctaacatgttagaatggatttaaaaagttatactccagtattttaaagtttttttttaaacattctattggtgatatgtgtaagcctcataagtttttgtt

SEQ ID NO: 256374 - DNA, 598 bp, Homo sapiens
cacagctgaaaaataagagggtcttaagaaattatagttatctttactatcctttataattacctagaatgatgaaactataactgaatccattatgggaaggattctcagagccatattttgtggattggcttaagttttcagtgagtgctttcggcacttcaaattgtacaccaaagcagggcatgtggtacaaagcactggcattggcaaaggctaacatagatattgcctgggaaatgagtaggaggcatagccatcratggctcttaagcctgattcatactaaccagggcaaggccaaggtggctccattaaacaccttcactaaggatattttccaaggaaacacttttataactttcagatacaagctaaaagtgacattgggttaaggaaacgtcttaaacaatttttctttttttggagattgctttagcagttagattgaatttatgattggcacatcagctctttgcatatgaaagcaagagcctctaacatgttagaatggatttaaaaagttatactccagtattttaaagtttttttttaaacattctattggtgatatgtgtaagcctcataagtttttgtt

SEQ ID NO: 256375 - DNA, 549 bp, Homo sapiens
tcactttccttaaaggactgagctgaggcttgtaaagcatttagcaaagcattcagcacagcataaatgctcccagtcaaggttaactgttgttgtcgtggatgtgggtttgttgctrctgttattccatcattcaacagacctgtactagacacagtgaattccaagaagaatacaccagcggtccagtccctcaagatgctcaaagcctccagggagggttggatgtgcaaatgtgttctcatgcaaagcagtaacttctttaaggtctgaacaaagtgctataggtacccagaggggagccaaggattaccttcacagaggagatcatcttttatgtgggaacaagtgtgaatttgcctagccagggaaagggtttgcaaggcagagaaaatagcacatgcagaagcttgacttaatgaaaagtcatagtgagctttgaggaacactggtgagtcctgggttactaaagcagaggtcacctgaggagtgccaggagaagtcctgagagttgctgggggccagaatgtgaaagatcttacagagtaa

SEQ ID NO: 256376 - DNA, 549 bp, Homo sapiens
tcactttccttaaaggactgagctgaggcttgtaaagcatttagcaaagcattcagcacagcataaatgctcccagtcaaggttaactgttgttgtcgtggatgtgggtttgttgctactgttattccatcattcaacagacctgtactagacacagtgaattccaagaagaatacaccagcggtccagtccctcaagatgctcaaagcctccagggagggttggatgtrcaaatgtgttctcatgcaaagcagtaacttctttaaggtctgaacaaagtgctataggtacccagaggggagccaaggattaccttcacagaggagatcatcttttatgtgggaacaagtgtgaatttgcctagccagggaaagggtttgcaaggcagagaaaatagcacatgcagaagcttgacttaatgaaaagtcatagtgagctttgaggaacactggtgagtcctgggttactaaagcagaggtcacctgaggagtgccaggagaagtcctgagagttgctgggggccagaatgtgaaagatcttacagagtaa

SEQ ID NO: 256377 - DNA, 549 bp, Homo sapiens
tcactttccttaaaggactgagctgaggcttgtaaagcatttagcaaagcattcagcacagcataaatgctcccagtcaaggttaactgttgttgtcgtggatgtgggtttgttgctactgttattccatcattcaacagacctgtactagacacagtgaattccaagaagaatacaccagcggtccagtccctcaagatgctcaaagcctccagggagggttggatgtgcaaatgtgttctcatgcaaagcagtaacttctttaaggtctgaacaaagtgctataggtacccagaggggagccaaggattaccttcacagaggagatcatcttttatgtgggaacaagtgtgaatttgcctagcmagggaaagggtttgcaaggcagagaaaatagcacatgcagaagcttgacttaatgaaaagtcatagtgagctttgaggaacactggtgagtcctgggttactaaagcagaggtcacctgaggagtgccaggagaagtcctgagagttgctgggggccagaatgtgaaagatcttacagagtaa

SEQ ID NO: 256378 - DNA, 549 bp, Homo sapiens
tcactttccttaaaggactgagctgaggcttgtaaagcatttagcaaagcattcagcacagcataaatgctcccagtcaaggttaactgttgttgtcgtggatgtgggtttgttgctactgttattccatcattcaacagacctgtactagacacagtgaattccaagaagaatacaccagcggtccagtccctcaagatgctcaaagcctccagggagggttggatgtgcaaatgtgttctcatgcaaagcagtaacttctttaaggtctgaacaaagtgctataggtacccagaggggagccaaggattaccttcacagaggagatcatcttttatgtgggaacaagtgtgaatttgcctagccagggaaagggtttgcaaggcagagaaaatagcacatgcagaagcttgacttaatgaaaagtcatagtgagctttgaggaacactggtgagtcctgggttactaaagcagaggtcacctgaggagtgccaggagaagtsctgagagttgctgggggccagaatgtgaaagatcttacagagtaa

SEQ ID NO: 256379 - DNA, 559 bp, Homo sapiens
ggaattatgcattaaacttattttcctttttatacttttctatatttttcatgtttttgcagaaagcataataatcacaaaaaaagtattatactcagaaaaayaggattttttaattttaaaatgaggactatctagggatttctgtgttcccttagtctctcttacttccatcttcacccatcctttgagggtggtagtcctaatgtattcatattaatagtttgcttagagacatttgtgttgacattatttccagaataagacaaagccttaaattacacacacatacacacacagagtactgcttttggtttgctttctgtggtcttgtttttcttcaagttttataaggaagtttccagtttctctctcattgttggactgcattggaagaaacagaaagagtatgggtgggcaaagatgggagtttacatttactgcctgctacatacagggcaagagtaggagttttacaaaaaacaaggtccagagtcaagtatgtagccacacatctagtaaaagctggagacaaaattcactccagtcagtttggtct

SEQ ID NO: 256380 - DNA, 580 bp, Homo sapiens
tttaaaatgaggactatctagggatttctgtgttcccttagtctctcttacttccatcttcacccatcctttgagggtggtagtcctaatgtattcatattaatagtttgcttagagacatttgtgttgacattatttccagaataagacaaagccttaaattacacacacatacacacacagagtactgcttttggtttgctttctgtggtcttgtttttcttcaagttttataaggaagtttccagtttctctctcattgttggactgcattggaagaaacagaaagagtatgggtgggcaaagatgggagtttacatttactgcctgctacatacagggcaagagtaggagttttacaaaaaacaaggtccagagtcaagtatgtagccacacatctagtaaaagctggagacaaaattcactccagtcagtttggtctcaaatctttgctcattcatctatctctagtgccttcaatcaasaaatatccatatcccgcagctcagcaaatttggcaaagctgatcatcagaaacgccattgcatgcactgtggagttctgccaagagtgggcagaa

SEQ ID NO: 256381 - DNA, 580 bp, Homo sapiens
tttaaaatgaggactatctagggatttctgtgttcccttagtctctcttacttccatcttcacccatcctttgagggtggtagtcctaatgtattcatattaatagtttgcttagagacatttgtgttgacattatttccagaataagacaaagccttaaattacacacacatacacacacagagtactgcttttggtttgctttctgtggtcttgtttttcttcaagttttataaggaagtttccagtttctctctcattgttggactgcattggaagaaacagaaagagtatgggtgggcaaagatgggagtttacatttactgcctgctacatacagggcaagagtaggagttttacaaaaaacaaggtccagagtcaagtatgtagccacacatctagtaaaagctggagacaaaattcactccagtcagtttggtctcaaatctttgctcattcatctatctctagtgccttcaatcaagaaatatccatatccygcagctcagcaaatttggcaaagctgatcatcagaaacgccattgcatgcactgtggagttctgccaagagtgggcagaa

SEQ ID NO: 256382 - DNA, 562 bp, Homo sapiens
gcaaaaattgggtccaactttctattaaagtacccaaaccatagaagtgtctcttacagttcacatgtccctgttttccttccttttttaaaaacatttaacgaaccacagttcccaacatttggcctattgaccactctgtccctaactgagctggggatattcagcctgcattttcagagatggattagaataactctagagaaatagaaatgatggtttctctgactgagaccattcaytttcctttaattcaatatcatgtgcttaatgaaaactgttactgttccaagtcaattggaaacttatctcaagtgttttaggagggaaaaaaatgaccctgcagtcactggactcttgttaatgggagaaatacttgtagtcattagtttcattttgataatcatggtgggggaagctccaaggagtatccaattctatcctggtggaaaaaagatgttcttcaccagcaggtatttcatatcgcatgctccaatctgtaacatcattgatcccactgccacagcaagtatgacgtaagcacagagtaggcactcagcta

SEQ ID NO: 256383 - DNA, 522 bp, Homo sapiens
ggtccatctgactgcacattgggagtgcgcatgaatgtgtgaggtcccacttgctggccaatcctccagcctgcrccaccagtccaatcagtcaggctttggactgagctgagccttccctgctatccatgttctccacctgcttctctcgacctaagttcatacggcatgcaatcaggtgggaggaccacttgaacccaggagtttgagaccagcctgacaacaaagtgaaacccccatctctacaaaatttttttgaaaaattagctggatgtggtggtgcatgcttgtagtcccagctgctcaggagtctgaggtgggaggatcacctgagcccaggaggtggaggctgcagtgaactgtgatcataccactgcactccagcctgggtgacagagtgagaccctgtttcaaggacagcatgcagcatggactcatgcaatgagcatcatgattagaataggacagtgacaaatgacacctccttcaaaagcagcagatctcacttttaaaaagcactgt

SEQ ID NO: 256384 - DNA, 630 bp, Homo sapiens
ggtgtgaaaaaggtgagaaaatagtgccatgggggatgacttagtataggttgagagcaggaatgtaatgacaccacatacaactgtgaatgccaaagcccacttagtccgtatgcaagaaaatgctagacttggagcacactcaggtacrtatattcttacaatgttttattgtgaatttgaaggcctagggtcagatacatgttcttgttatgtgactctgtggtcagtgggaaggttagagggtgaaggctgaacattagggtacactgaaaattgccaggctggctctgaatggtgcggagaaaaagcccagcctctgaacttcctcccatggaatctctgatctgtggaattctgctactgaggcttggggaagtgaaagcagcattccattgaatttcaacctgtggaatctcagcgagatgtggctggaccattggagaaatggggtgaggaggaatagcggattctggggacactaacaaaatggtctagatttcaatacgctgggtgggtgcagcagtttaaacaccaaatgatgccaagtagccatggaagtcattgaaacaccatcttgttggcagtcctggtggctgcactttagacattgccagattgaactgtgtt

SEQ ID NO: 256385 - DNA, 607 bp, Homo sapiens
tgaggctgtgtgggcagcccggatggaaggagaattctgaaatgcaaaggcagccaagtgagaccctgtcaacctcacaactttatctcaatatggtcctgttctgcctgaagtctttcttttttctttgccaagttttgtctcctggtatggttggttagaaaatcacagaagatgaggacagctggtgtctgggattgtatgtgttcaaataaagcaactggaagtggaaggcaagatgccgggacagatggcttgacccttgaatgaccttgaggaggtgggcttgggctgccctcctccatctggcaaggtgtcatggtgtgaaaaaggtgagaaaatagtgccatgggggatgacttagtataggttgagagcaggaatgtaatgacaccacatacaactgtgaatgccaaagcccacttagtccgtatgcaagaaaatgctagacttggagcacactcaggtacatatattcttacaatgttttattgtgaatttgaaggcctagggtcagatacatgttcttgttatgtgactstgtggtcagtgggaaggttagagggtgaaggctgaacattagggtacactgaaaattgccaggctg

SEQ ID NO: 256386 - DNA, 614 bp, Homo sapiens
tttttctgaaaggtgatcttgcctgagagaaatgataatgactgaaataaaaggtgtctctcgcatctcctgtgggccttcggcacatttyaatcctaattaaagaagaagtccgagggagcctttccagaaggagttgattataaccccagttccatatggaacacatggaaggttactgctgcagctgttgagcattatagtatgagacgcatgctttaaatgtctctatactaagcacacattgaaaaatgctttcttgaacttggctgtatgggagtcctttagtgtttttaatatcagggggacaagttttttttaataccagaagccccccctcccccttattcctttaagccttggctatgcatttttatgcatggatatttcatgaaaccttttaagttgagtgccctggttacatctttgatacaggacatagcacctggttttaaatctttgtttttgggcagtggggttcttattgactgggtggagatggaaattagtggcttccacgtcccaacttgctggggacaataagtgaaaggtcgatggagatgagtacgaacattattaatgtctgacccagagtaagttgttatgcgaacctg

SEQ ID NO: 256387 - DNA, 614 bp, Homo sapiens
tttttctgaaaggtgatcttgcctgagagaaatgataatgactgaaataaaaggtgtctctcgcatctcctgtgggccttcggcacattttaatcctaattaaagaagaagtccgagggagcctttccagaaggagttgattataaccccagttccatatggaacacatggaaggttactgctgcagctgttgagcattatagtatgagacrcatgctttaaatgtctctatactaagcacacattgaaaaatgctttcttgaacttggctgtatgggagtcctttagtgtttttaatatcagggggacaagttttttttaataccagaagccccccctcccccttattcctttaagccttggctatgcatttttatgcatggatatttcatgaaaccttttaagttgagtgccctggttacatctttgatacaggacatagcacctggttttaaatctttgtttttgggcagtggggttcttattgactgggtggagatggaaattagtggcttccacgtcccaacttgctggggacaataagtgaaaggtcgatggagatgagtacgaacattattaatgtctgacccagagtaagttgttatgcgaacctg

SEQ ID NO: 256388 - DNA, 551 bp, Homo sapiens
tttaaaagtatatatgtctgtgtgtgtaacttttatgcacacaaaaatcttgcattatttgaatcatggttgtatggcagcaagtaaatgctaaaaactataaaacggaatcctaaatgactatatcagaagtatcaggtgtttattctgttaggtccaggaaatgagaacctggtagctgtcactcaatgcgaaatcttacaactttttaaaaattttatcaaggtttgagattaaactcaaagagcccaaagcattatattatataattatttggctaggtartaatgaagagcctttgactagatagtaatgaagagccttccctcttatgtctgtccagatgggggttcttatacctgactgcataaaaataacctgatataaaaatgctgatttcgagggctctcacaccagaaatgatgatttcatagggcaagggtagggctcagtaattggtgttttttcttttaaacaactcctggtgattctggtgaaggtgattctagaccttactaaacttatatcctacttctcaaggccctcttttt

SEQ ID NO: 256389 - DNA, 591 bp, Homo sapiens
aaaaagattggttaacattattagtttcaccagataaaataaccatattgttccacagtctagaatgaataatttgaacctaataatcatatcctttttgtttaccattttttgccrttaagaaactgttttgtactggcaagtcccaatgaaatggcaaatacaccagtgggtgagtcattagtattattatttctagctaatttgttttttccttatagtaatattaaaaatgtatcattttaatatatttttatagtttggatatcaggatgttcgatacaagcaatgcagtttgtatctacacagttgatctgttttctatttgagtgtgtttaactttatttgtggcttcaatacattcagtattaatgatagcatttgggcacagttttttttttaattatcattccttttcattgtaaagaaacagttgtaactggtctctagattatatatagatgtatacatactcattaaatgtgactttgttgaaactctaatttttaaatcctaaagtctatagtttacactgcagaggaacaaaacaaagtactcttcactcatgaagcataatacaatacatttatc

SEQ ID NO: 256390 - DNA, 613 bp, Homo sapiens
ctaccatttattaatattttcatgcttattaccttatatgcactgttcgatttaatctacctatttttattgatatacaatagttgtacctactttgggtggatatatgtaatattttgatacctgtatacaatgagtaatgaccagttcagaataattgggatatccatcaccttatttacatgttctttgtgttgggagcaaaacaaaacttctcttctaagtatttagaaatacataataaattattgttaatcataattttcctactgtactattgaatactaraaattattccttctactctaacagtatttttgtatcccttaaccaacttctctaccctctacccacttcccatccctggctctggtagccattattctactctctacctccatgagatccactttttcagctctcacaaatgagtgagaaaaagcaatatttgtctttctgtgcctggcttatttctcttaacataatgaccttcagttccatccatgttgctgcaaatggcagcgtttcatttataaggctgaataatattccactgtgtatagagacaacatttttgctatccattcatctactgatggatgctaaggttgat

SEQ ID NO: 256391 - DNA, 575 bp, Homo sapiens
catagataaatcttgaggacactatgttatgagaaataagccaggcacaggaagacagctacagcatgatctcacttacatgtggaatctaaagaagttgacgtcataaaagtagaaggcagaacggtggtcaacagaggctagcaagggaaaaggaggagggtacaggtaaattttggttaacagtacacagttacagttagaaggaataaattctggtgwtctattgtagattaggataactaaggttaacaaatatggtattgtatattttaaaataggagaattttgaatgttctcaccacaaagaaatgataaatatataaggtgatggatatgccggctaaatgccctgatttgattttgcacaatgtatatacgtattaaaacatcttactgtaccctataaatatgtatatttattatatcttaataaaacaaagttaataaaaaaattaaatagataatgagtgctgactgtggtgtaggtactgtcaaaggcatatttacatatgataaataatttttaaagaagctggccagatgcaatcattacccattatcctatgttgggc

SEQ ID NO: 256392 - DNA, 546 bp, Homo sapiens
ataatgcaggtactttataaagcctggcacttggcacagagtgaatgactgctaaacatccatctttatcaccactgtcatctgattgcaggaaagccctggaagtatatgagtaataaagtatttattgaaaactcccaaaagttaaactgtggaatggtgggctcctcggtgggacaagacagcyagaaaataaatcttagatttaaaattggggtgccataaaatttactatccaactacaccatttatatccaggataattgctaaaaccaatggaatgcttggaatagctgaaatctgagatttgcgcaggcaaaacagaatatggtgtcacttgattcataatctgacctccacactgcagagaacttgtcttcaaatggaaaaataccagcattgcacagtctgtcactttctgctggcatctaagtaaaggtcatctctatatgcccccaactgtagaaaaaatcagagctataactatgctttctatattggtgttcaataaattactttgttgtttagcaggctgtattttccagg

SEQ ID NO: 256393 - DNA, 553 bp, Homo sapiens
aaggaaggaaacctcagctggcatttattttccctaatttgtacctgagtccttataagaacataaagagcaagtggatgcatgtttgagatagagtataacctcttccagaaagctgatgacctacctgcctctttctctttgaattgctttcagaacttaaaacggaggccagggagagcatcagygcccactctttttttttttttttttttttttgagacggagtcttgccctgtccaggctggagtgcagtggtgcaatttcgactcactgcaacctctgcttcctgggttcaagtgattcttctgcctcagcctcccgagtagctgggactacaggcaagcaccaccacgcccagctaatttttgtattttttttttagtagagacggggtttcaccatattggccaggatagttttaatctcctgacctcatgatccacctgatccacctgccttggcctcccaaagtgctaggattacaagtgtgagctactgtgtccagcctcagtgtctacccttatttccgcattgagagaagctccatgtt

SEQ ID NO: 256394 - DNA, 503 bp, Homo sapiens
cccttcttttatggctaaataattccattgtatgtatataccacattttctttatctattcatctgtcactggacacttgggttgtttacatatcttggctactgtgaataatgctgcaatgagcatcagtgtgcaaatgtctctctgagatcctcattttaattattttggatatatgcccagatttggaattgctggatcatatggtagttccttttaaatttttttgagtaacctccatactgttttccataactgctagaccattttacattcccaccaatggtgtacaagtgttctaattcttcgaagtccccaccaacacttatattttggatttttgatattagccattctaacaggtgtgaggtgataaattctcatagttttgattgcattgycctgacaattaatgatgttgaacatcttttcatacacttgctggccatttgtatgtcttctttggattaatatctgctcaagttcttctttttaaaagcca

SEQ ID NO: 256395 - DNA, 549 bp, Homo sapiens
gaccagcagatctacacacaaatcagtgacaaaaccaaatgcttgccattgtaagccactgagtttgaatgcttttacacagcattattgaggcagtgcttaactaatgtattcatggtgtggtctaactgcttacatagctcaaggacaccgggacctctgaacaagctaccagtagtcccatttccataaggacttgtggaataaaaattttaagggatttgggaataactgattttctggtgccagacraagcaagagaaatgaaggcctgcacatttccataaaggaatgggaggtgctagtttagaaggtaccaccaggacatcttgaggtaggagtgaattgtcacatactgaagttccgtggtcatagcagggtcatcaaaataaaacaagggccacctaagatctctctaagaggagagctagaaccagccacaagttatgctagaaatagcttataccagccacaatcggagtcctataattatctaggtaaagataaaattgattatcactgtgattgtaacacagcccttaggtgttt

SEQ ID NO: 256396 - DNA, 569 bp, Homo sapiens
tttaattgagttcatgctgacacattataaaaatgatcatattaaaagatagttttaaagttaaatgtctccattgccccaacaattccaataaattcaaaacctgwtgtagtaatatgcaatatagtttaaaatacagtaatcaacgtaacattgtaccaataacatatattgctacacttaacaaaaatgtttaccttaaacatgtttataatataaaaccatactaagaagcagaaaacattttaagatgatatatttataagacacttttatatattatcaaactgtaaaaataatcatgaatgtcattggcatgcagtgtatttttatttatttttgtaatttaagaataatcaccttaaataaaataaaatagtttagcattacttttttttttttctttttttgagacagggtctcactctgccacccagactagagtgcagtggtgtgattgtagctcattcccaccttgaactcctgggctcaggcaatcctcctgccccagcctcctgaatagcagacaccacgatgccttactatatttttttaatttttttgtagac

SEQ ID NO: 256397 - DNA, 557 bp, Homo sapiens
ataaccaacctactcctcacaccctgaaattctagcacacacaattgcaaaaagtttaacaaagaatagtaaaacacaaaaacagaacaaaaccacactagcattaaaccattgtagccctctggaagtgttctctcagtcttctaaaatcatttaatatagagttggatacactgactaaatctatataacttycatttactttatgaacttatgctatatggttttataatttcctttccccgtcttttgtaaacagataaaacccatgaaatgatactcatcacacacatatgttgctattaattttacaacagattagcatttggcaaatataatttctgattcatggaaatgtgttaaggaccacccaagctcatatcaatacagtgccaccctatctgattggaaaacaggaaaggaacaattctctcatcctcgtggtgctctctgccaaggaagctttccagtcaaagactcatcctagtagatccttaataaaccctgattggaattaattaactcaaaagaatgactcaatttcaatccttggaacc

SEQ ID NO: 256398 - DNA, 552 bp, Homo sapiens
ggtcagagtcctcaaaaggaaacagtctggggcatcaaaaggccataaattcagccagagtagtggtatttggaaacgaccttaagtatcartcttagaatgaaaatatatgacttttacatccagttcaatttttgaggttatttactttttagagaggctgaagagaaagggttagtacatcaactttcaacctgaaacatatggaagaacgttaaatacttttaattttactagaaaaaaaaatgtctgcaaagtattttaactgagtgggttttggcaaacataaaaactcaattaaataattttttcctatgaaacttttggcatgtccctaaactgggttttcttgtaatattgtctaaattagaaatcaaaattgagacagacattaacagtagtcaatcaaactctgatgcaaaagttgccccatttagtggaagatcctgacatcctgacatcttccactggaaaaaaaaaaaagaaagaataaaagtaaaggaagttcagctgagctgctataccatcatgaccagtgcaactttcaataat

SEQ ID NO: 256399 - DNA, 629 bp, Homo sapiens
acctctgctttccagtaacttccacacattgcagatacccacgaaaagaaataaattttagaaaattaatagaaaaaaaatcacagatctattcccatatagatatatgtttcccattagccagatgttcccttcctcctattcttacctttccctcaaaagagttaccaccctactcaaatatcccttttacaacccaaaatataactactcctctccaaaagtaggcaatccatagtctgataaattactaaattcctccaagtacaggatctccactyattgtaatatggtagcaccggtgcttatcagtgctacctgatgggtatcattggaaatacacatttgtattcctaaggatgcttaatcctcagctatccacaatttataaggctgtattaacccgctatcagctttgactagactcatggtggtatgaaaggggaccaaaagagatcacttgactttcatccacatgacttccagatcccacagcatagcagaaattctactcacccctgatgaaaaagataaatcactccagaacattcctcctaattttcctgttttcccagtaatattcaataagcaacctgaaaaacaatagcagaatatagctgagataacag

SEQ ID NO: 256400 - DNA, 612 bp, Homo sapiens
gaagccactatgcttcctttacagcctgcagaactgtcagccaaataaacctcttttctttataaattacccagtctcaggtatttttttatagtggtgcaagaatgggttaatacagtatacaggcttaggacagagcctgttaatttagatgaagcctcagattaatattctagattgcttaatgtattgtgaaaaaggctttaatgttccacagttaataaatgaaggtgacaagggctcctcaataaagcagacttagctgaattccctggtaaaggttcatagagactctagaacttctcacataatagctaatgtttattaaatgttcattatgtgctatacactgtactatatgttttacrtacattatttagtcctcccaaaaacctcttaaggtgagaaacaattttgatcctgggaaggtactatcattgctccattttgtgaatgagcaaactgaggcacagagaagttaagtaaagggccaatttacacagctagcaaatgtggaatcaggatctgcatgacaggcaggctgggtccagagccagcccactccccgaaaccacacctctgctcattatatcaactttcacatcagtcctt

SEQ ID NO: 256401 - DNA, 612 bp, Homo sapiens
gaagccactatgcttcctttacagcctgcagaactgtcagccaaataaacctcttttctttataaattacccagtctcaggtatttttttatagtggtgcaagaatgggttaatacagtatacaggcttaggacagagcctgttaatttagatgaagcctcagattaatattctagattgcttaatgtattgtgaaaaaggctttaatgttccacagttaataaatgaaggtgacaagggctcctcaataaagcagacttagctgaattccctggtaaaggttcatagagactctagaacttctcacataatagctaatgtttattaaatgttcattatgtgctatacactgtactatatgttttacgtacattatttagtcctcccaaaaacctcttaaggtgagaaacwattttgatcctgggaaggtactatcattgctccattttgtgaatgagcaaactgaggcacagagaagttaagtaaagggccaatttacacagctagcaaatgtggaatcaggatctgcatgacaggcaggctgggtccagagccagcccactccccgaaaccacacctctgctcattatatcaactttcacatcagtcctt

SEQ ID NO: 256402 - DNA, 525 bp, Homo sapiens
gtgaagaagactccaagcatctacactctgtcactctcattctttgtgagatcagtgacaagattttgtgagagaggcaggggagactggatgttccatttagatggaatgcaaaatttgaccccatgtgaaatcctggaaccatcctagaaaaagtactatcatattataatccaaagattattagaaaccctaaaggaaaaggcagacagagagaaggcagttatgttgtttgggaaaatgctgcattatatttccatatagaaaggaagtcatacatggctatgcctyagggatcttaaaacccaaagtttataattatttatagcacaaagtatggctataatgtggcagtttttgaataggaaggatgggattaggaaataaatttaaaaggctaaagacatggatggaggaaaatatttagacactgtcattctttacttttacaactaaaataggatggaaatgacagacacctcatgaggtaggttaggtattaccccattcctgcatgttttcata

SEQ ID NO: 256403 - DNA, 525 bp, Homo sapiens
gtgaagaagactccaagcatctacactctgtcactctcattctttgtgagatcagtgacaagattttgtgagagaggcaggggagactggatgttccatttagatggaatgcaaaatttgaccccatgtgaaatcctggaaccatcctagaaaaagtactatcatattataatccaaagattattagaaaccctaaaggaaaaggcagacagagagaaggcagttatgttgtttgggaaaatgctgcattatatttccatatagaaaggaagtcatacatggctatgcctcrgggatcttaaaacccaaagtttataattatttatagcacaaagtatggctataatgtggcagtttttgaataggaaggatgggattaggaaataaatttaaaaggctaaagacatggatggaggaaaatatttagacactgtcattctttacttttacaactaaaataggatggaaatgacagacacctcatgaggtaggttaggtattaccccattcctgcatgttttcata

SEQ ID NO: 256404 - DNA, 662 bp, Homo sapiens
aggggagactggatgttccatttagatggaatgcaaaatttgaccccatgtgaaatcctggaaccatcctagaaaaagtactatcatattataatccaaagattattagaaaccctaaaggaaaaggcagacagagagaaggcagttatgttgtttgggaaaatgctgcattatatttccatatagaaaggaagtcatacatggctatgcctcagggatcttaaaacccaaagtttataattatttatagcacaaagtatggctataatgtggcagtttttgaataggaaggatgggattaggaaataaatttaaaaggctaaagacatggatggaggaaaatatttagacactgtcattctttacttttacaactaaaataggatggaaatgacagacacctcatgaggtaggttaggtattaccccattcctgcatgttttcataactccccacatcacctgtcctatgcctttggayatttcttgtctttttcactaaactatttgggaacttcatcatccctgagcactctcagtcctagcacagcaccctgctagggcactagcaagtgcttagtaggtatattgttatggcctgaatgtttacatccttccaaaattcttattttgaagccctaaccccctagtgtgatggtatta

SEQ ID NO: 256405 - DNA, 629 bp, Homo sapiens
tttttgggcacaaaaacagaaacggctgttcccacttaaagctgtgggtctccaggctcgagggtggggcctggagactttcatctactcagtgtttccctgtctcctgtccatattagtgggggtcatttctcacggtttaacacaaccctccttggggctgtcgtcatgatagtgagttctygtgagatccagttgtttaaaagtgtgtagtactggccacgtacagtggctcatgcctgtctcccttgggagaccaaggcgggtggatcacctgaggtcaggagttcgagagcagcctggccaacatggtgaaacgctatctctactaaaaatacaaaaattagccaggtgcctgtaatcccagctactcagggggctgaggctggagaatcgcttgaaactgggaggcggaggttgcagtgagtggagatcgtgccatcgcacactagcctgggtgacaagagcagaactccatctcaaaaaaaaaaaaaaaaaagtgtagcacctccctcactttcctcatgctccattcatgtgaagcaccagctcctgttttgccttctcccaagattgtaagtttcctgaggtgtccccagaagctgagcagatgcctgcatcatgcttcc

SEQ ID NO: 256406 - DNA, 644 bp, Homo sapiens
atttgttgacctgtaaacacaacccaagtgctgaaacacgtgcatcatctaaagctctcaaactctgtgagggtgtattactatctccactttcaggtgaagaaaatttcatgttaaaaggtttaatcaaattgcccaatattgcagtgctagacggtggtgaggcagccttagaactcaggtctaactcccaaaccacaacaaatataaattgaataaatgcatagatgagtctccatctgtacaaatccatgtcaaaaaccaagggtcacactctacataaatccttcaagaatgagaaaaatcattcaaggagcagaagaaaagcaaaagataaatacagagctgagaaagtacctgagagggcagatggtgaccggagcaaagggcacgtggaagaaacratgaaggggaataaagagacaggttctactcatgggggtgtgtcagactgaggaatacatcagtggatagtcactgtggactgtgattatgatgtgacataatccatcagaacagtgctcaggaagagacagtggggagtaaggcagaagtgatgtcaggtgcagataatagttttgccataatccaggaaaaaggaaatgaagaactgagcaagatagggacatcaagaataaagaata

SEQ ID NO: 256407 - DNA, 542 bp, Homo sapiens
ctgtgtgtgtggtttctatactttgggaaatttaggagttcmtatacctagattctattccaagctctaccgagtaaccatatgaacttgtgtacataaattgacccctctgcatctgtctcatgtatacagtgtgaactcactatagtgagttagattacttataaactacccagcagctcagattgtctaaagtttgctttcattaggattctttgacaccacactaaagattaaaaagtaagtaatcatctcaagttaataatcttttatctaaataagccagatttggaagtagaaaaaaaagagagagagaattgttttggggttggcacaagtcaaaatgaagttgaatacagggaatttaaactgtaggaagtaaaccaaataactggttcaaaatgtgcagcagaagcttgtttgtccacttaaatttgtcaagtatttgcgaatgagataattgtggatactagcaccagtgaagaggtaacagtctgatcgatctgtttaacagctaattcacaattgtagactgacaaata

SEQ ID NO: 256408 - DNA, 630 bp, Homo sapiens
attctattccaagctctaccgagtaaccatatgaacttgtgtacataaattgacccctctgcatctgtctcatgtatacagtgtgaactcactatagtgagttagattacttataaactacccagcagctcagattgtctaaagtttgctttcattaggattctttgacaccacactaaagattaaaaagtaagtaatcatctcaagttaataatcttttatctaaataagccagatttggaagtagaaaaaaaagagagagagaattgttttggggttggcacaagtcaaaatgaagttgaatacagggaatttaaactgtaggaagtaaaccaaataactggttcaaaatgtgcagcagaagcttgtttgtccacttaaatttgtcaagtatttgcgaatgagataattgtggatactagcaccagtgaagaggtarcagtctgatcgatctgtttaacagctaattcacaattgtagactgacaaatacttgtcagggacctgaacctgatatcacaggggaaataaagatgtttatttaatttagttacttaagcttaggcccaagatgtttccttgcctttgaaaataagttatttattcattgtccattactaatcaaataacc

SEQ ID NO: 256409 - DNA, 599 bp, Homo sapiens
tcagtacattgctgtgtaggtagtttgttgccctggtgaatcatagcataatattaggatgaaagagatgggtaaaaggatatcatagtaatggtgatctgcaggaatcttgggctgttctggagatgaagggtaaatgtagtgaaatggactaccagtcatgatagttaaatttgtccaagggtcctttcctgtgaacagtttctgaggtctgtaactggcttgtagtcagggcaaatggatattcagtgtatgtccagtgaaggttcagggagaatgggaagaacactgacaggcagcaatgtatacctattatttaaatactgttcccaaatttgcaagttcataaaaatgtcactttcctatcacagaaggtccttttagacacaatgttttattaytttaatatctgctgaattctgttgatattatttctgctgttttattattttaatatctgctgaattctgctgatattatctgctgaatatctgctgataagtatttcttcaaagtataattgtaggctaagtgcattaacaaaggatttccttttccagaactatttaaattgaatatttcagattgcagtggagtaa

SEQ ID NO: 256410 - DNA, 625 bp, Homo sapiens
cattatcaggatttgttgatctggttttgaggttttttttaaatatgatggtcagatctagtcagaagctactggccatgaattaggtgtattttggttatgcattgaattttagatatttacatgaatttaattgatggagacagtagttttatatatttagttttctgaatctttatcagggactttttcctgtaatttgagaaatcctaataaacgatttcacatcttcctcaaagtaacatagaggattcaaatagttgttcagatgatttaaatgttgtgattttactcagttrcctaacattttaaattatttctctttcttctcctttggcttggaaacagtggcaacagtaacttctaagagttgaatattattgaatcctttctctgatccacctactaggttcagtattttaaaaacacaaattatatagtcagataatctttgttggccttttatgcctattaaaatatctgttaaaaatatttcctctatttattttgatctttttgtcttttttctctgcattcagaatcattatcttctacctgttctctaagacagtgatttgatttttgacagtggctatcctggtccttgcttttataattgatctat

SEQ ID NO: 256411 - DNA, 534 bp, Homo sapiens
tacagggctgggaatagtacctgttccctctagccagatgggaaaaaaaaattcrtatagcatggaacattgcctagagtattcagaagattcttgtctccctagtagataacaattagcccaagtctaaatgttgctctggcccttgttaacaaatcttaaaagcaagagtcaaaaggttcaaaatttttttaagcagcttaactacctctcagaacaaagctcaagatatttgtaagaatacaacaaatatccaacactcaaaagtataacattcccagtgtctggagtaaagccaaagattatcaggcatgcaaaggaaaaagaaaatatgacccataatgagaaaaataaatcgatctaaaccaatccagaaccaacacaaatgttagaattagtagacaaagaccataaaacaattattttcagttttctaggtttctttacttctttgttttaacaaggcagtacctcatgtcatacaggtttaacagtaagacatttaccacaatgtggtaatgcaacaaagtaaca

SEQ ID NO: 256412 - DNA, 534 bp, Homo sapiens
tacagggctgggaatagtacctgttccctctagccagatgggaaaaaaaaattcatatagcatggaacattgcctagagtattcagaagattcttgtctccctagtagataacaattagcccaagtctaaatgttgctctggcccttgttaacaaatcttaaaagcaagagtcaaaaggttcaaaatttttttaagcagcttaactacmtctcagaacaaagctcaagatatttgtaagaatacaacaaatatccaacactcaaaagtataacattcccagtgtctggagtaaagccaaagattatcaggcatgcaaaggaaaaagaaaatatgacccataatgagaaaaataaatcgatctaaaccaatccagaaccaacacaaatgttagaattagtagacaaagaccataaaacaattattttcagttttctaggtttctttacttctttgttttaacaaggcagtacctcatgtcatacaggtttaacagtaagacatttaccacaatgtggtaatgcaacaaagtaaca

SEQ ID NO: 256413 - DNA, 568 bp, Homo sapiens
tgtctcacagaatgtcaggtaggagayagttgggaatctggatttaaaaacaacagcaactaagggaagagccagttgtgtactgaaagatatgagaacatgattataagcaaatgcttcatttcaataacagacaggttccacaaaaattctccagtgtatttacagaaagtcaatctgatcaaaccacactggttgcccagaagaaagatcaagaatatgtttgaagtgaaatcaacccccttggaactttagacaaagtgacataagcccagaaacttggctgtggtaccagtgatgtggaaaagaatgatatgctttcaatttgaagagaatcacttggcccttgggtggtgccctaaaagctatacaacagtttgtggctaattgttcccggaaaaaaatggaaaatcagttggaccaaaatctccatgatttctatctttgctgaaactaaaacatatattagttctcttggtaaaactaaaatattacaagctggctctttttggtcatgccataaatagcttttggaaaggtactacatccagaatgccaaatgtaaaag

SEQ ID NO: 256414 - DNA, 603 bp, Homo sapiens
ccaaatgtaaaagggaatataactgcttggctccactgcttccaagatgggtaagaaaaagtacctttctaatttcatgattwaaaattttagctttttaactttgttcaccctggcaacctttaacaagacttctctttcactggcctaatcaatgttcaatatcccttatatacagatcatcaagccatgtagcaattgagataaagacctaacatgaagaattctattctgagatccagaagaaatgaatcacagacccagtttgtttcttttcgcatctttgtcatactgaatacacacctagccttctcaagtctttggttacttagcgtgttcagagtatgctgaccacagtcatagagagaaaaaacaagttttatgttagtacctgactccactgaaagatgtgccatttaaaaagtcctaaaagacctttttaataatgacgttgtatttattttagaataaaatttaaaattaaaaaaacacattttatcatgatctttaagttctgaacagttgacgttcctgcctatctgctcagtctccttttctacttttctccccgacactgtgtacacttcagtgacatgagtacat

SEQ ID NO: 256415 - DNA, 603 bp, Homo sapiens
ccaaatgtaaaagggaatataactgcttggctccactgcttccaagatgggtaagaaaaagtacctttctaatttcatgatttaaaattttagctttttaactttgttcaccctggcaacctttaacaagacttctctttcactggcctaatcaatgttcaatatcccttatatacagatcatcaagccatgtagcaattgagataaagacctaacatgaagaattctattctgagatccagaagaaatgaatcacagacccagtttgtttcttttcgcatctttgtcatactgaatacacacctagccttctcaagtctttggttacttagcgtgttcagagtatgctgaccacagtcatagagagaaaaaacaagttttatgttagtacctgactccactgaaagatgtgccatttaaaaagtcctaaaagacctttttaataatgacrttgtatttattttagaataaaatttaaaattaaaaaaacacattttatcatgatctttaagttctgaacagttgacgttcctgcctatctgctcagtctccttttctacttttctccccgacactgtgtacacttcagtgacatgagtacat

SEQ ID NO: 256416 - DNA, 613 bp, Homo sapiens
aatatttgttattgtttctctttttaataatagccatttctgataggtaaggtgatacctcattatggctgatgattagtgatgttgagcatttttttcttttttcgtcttttctttttaaaattttttttctaattttttgagacagggtctcactctgtggcctaggctggagtgcagtgatgagatcttgtctcactgcaaccttcgtctcccaggtacaagcaattctcatgcctcagcctcccaagtagcagggactgcaggagcatgccaccacactcagctaatttttgtatttttagtaaaaacagggttttgccatgttggccaggctggtctggaactcctgagctcaagctatccacctgcctcagcctctcaaaatgctgggattacaggcatgagccaccacacccagccaacattttttttcatatacatgttgaccatttatatacctgttgtttcatttaycttttcgaaaatgtctgttcagaatctttgcccattctttaaatggattatttattttcttgactttaagttatctgagttcttcatatgttttagatatcagtcccttattatatacatagcttgcaaatatttc

SEQ ID NO: 256417 - DNA, 382 bp, Homo sapiens
atacacgtatgtgcacatatacatatatatatgtatatacaccacatttttatataaaatgtgtgcatatatgtatgtatgtatacacacacacacacacacacacacacccaatggaatactacttagccataaaaaataatkaaataatgtcttttgtagcagcatggatggaacttgaggccattatcctaagtaaaataactcaggaacagaaaaacaaatactgcatgttctcacttataaatgagagctaaatgatgggcacacatggacatacggagcagaataataaatactggagactccaaaagttggaagggtggaagggagtgaggattaaaaagttacctcttgggtacaatgctcactatttgagtga

SEQ ID NO: 256418 - DNA, 609 bp, Homo sapiens
ggaactttttgagaactcttaccaatygcttggtacttacacaagtagatatttagaaacaatgttttagatctcaaaataatgaaaataaaataactggtaatcacaccaagtctatttttggttttaacaatagtgagcaagcttttgatgcacacaaggaaagcatgtactctcttttagagtctgtttttcaaaacaaactgtggtcatggttttatacactgagtatgactatcaagattaattctttttttcttttgagatggagtctcaccctgtcgcccaggctggagtgcaatggcgcgattttggctcactgcaacctccgcctcccggattcaagcatttctcctgcctcagcctcccgagtagctgagattacaggtgcccacgaccacacctggctaattttttgtatctttagtagagatggggtttcaccatgttggccagactggtctcaaactcctgacctcatgatctgcccgcctcagcctcccaaagtgtatcattaattctatatgtggagttagacagtagctgactgtttttttcccactcctcataacagccccaaaagtctcccatgataacagcgagtaatac

SEQ ID NO: 256419 - DNA, 570 bp, Homo sapiens
tattgcttttactctcaagcaaccaaatcctttaccctctttcccacgtccgctataatctagggtcatgagaacgccttatcttcattccagatcacaagagtgtcccattccactaaaccacaggcactcccatggcagaaacatcctcactctcaaaacttccttaatatgaagcacggttctaggcacaaaacaggcacacagaaaatacttgtgtggttattgattgagcaaagaattttacaaacagtaaaaggggtactgtatgcctgacagctcaagggttgttgtaaatgcaaacttcatctttctgcctttggggaaaggagtactgatgctggtttaactctgttccctttaagagtgtctggttgaagctgaaactcacaccatcaacttctgataaagcaacagaaatttgactgggttaggcctgactccaaagcagcttttaagatggttatgttgctgccacttttctcacacaaggrgctggaaattctaccaagcctctgatctgacaccagagcctagttctaaacgttccctgggtctgccccaatggta

SEQ ID NO: 256420 - DNA, 582 bp, Homo sapiens
gcttatgattgctgtgtcttccccgacgctggaaagaatggtgttccttgatcccagtgcttccatgaccctgatgaaagcctcagccctggatcccagagtgatcgcctagagcaaatgcttgagtgagatttcagctcttctcttgccaagatgtggcttttcaaggctgggctgccaatgaaaatgtcaacaatgctcagatcaagaggaaaatgctcatttcaccctcagagggcatccaacattccagcagatcagtggtgatccaaggtgccctttgttgatcagggcagagaatacatttcctttcccaagacagagcagtccagtgtggttagtaaatgggccagcaccaaagaggctgcatgcagagtggaagctgaggcaggtgatgccctccttcctccacagagaggcttagatcccttagaasaggcaactggtcttggggacatattctgagtctctcctgaagcaatggaaatgggatccagctttggaatctgatcccctcccttgcaaatgaaacttggttccaaggagcaaccaactgaacaaatcccaaatgccagacattga

SEQ ID NO: 256421 - DNA, 467 bp, Homo sapiens
agctcatctgaattagtaaaaagtctatgcagaatctttgacttattcctttttatctccacaggttctaaaasactatattttgggagtacagcaagggttggcggaatggaactgaataaacaagtgggtttgttatccatctccggaagaatctcttaattttcttgccatttaaagtgtattcaagccagaaacatatttcaggttccttttaaatcttctgtaaaaagaaagccacattcaaaggatttgaatagacatttctccaaagaagatacacatggctaataagcacatgaagagatgctcaagatcattagccattagggaaatgcaaatcaaaaccacagtgagacaccacttcccatccattaggacagccagagtaaaaaagatagtaactattggtgaggttgtggagaacttggaactggcagggatgcaaaatggtacagctgctttgg

SEQ ID NO: 256422 - DNA, 467 bp, Homo sapiens
agctcatctgaattagtaaaaagtctatgcagaatctttgacttattcctttttatctccacaggttctaaaacactatattttgggagtrcagcaagggttggcggaatggaactgaataaacaagtgggtttgttatccatctccggaagaatctcttaattttcttgccatttaaagtgtattcaagccagaaacatatttcaggttccttttaaatcttctgtaaaaagaaagccacattcaaaggatttgaatagacatttctccaaagaagatacacatggctaataagcacatgaagagatgctcaagatcattagccattagggaaatgcaaatcaaaaccacagtgagacaccacttcccatccattaggacagccagagtaaaaaagatagtaactattggtgaggttgtggagaacttggaactggcagggatgcaaaatggtacagctgctttgg

SEQ ID NO: 256423 - DNA, 580 bp, Homo sapiens
tgggcacctttatgggctacttccttctattcattattttaggatgattgacaaactctgatgtgaagatagtgcctaagggggtttttttgctcataaagaccaagcacagctaaaattctttgaatgctgaaaataggagaatgatacatgcattgcttcaggtaattagatgaaaaaaacaratcttttatttagaaataatactcctaatttattacgtaagaaccatgcagattgctctttgaataatcttacgctcttttgaagaagcataaaacatgagatttttttatccccaaaaaatatttgaataaagtgtttaaattacttttcttcaattagaaaattctttatatgaaacaggtagagttttaaattctaaatcagtttataccaaagcatctaaattgtgacatcctaatttgttaagtttggtctgtatgttatataagccacacttaaatcattgcttaatttccaactttatttccatacacttcttttttccctttaagttgtgatcacatttgtgactttatcatttgctaatagtgtgaatttaaggaaatatatagta

SEQ ID NO: 256424 - DNA, 542 bp, Homo sapiens
tggctgtggctgtcgttttgcacctcccagatttcaaagaattactggttttaccatgactcaaatcttaagatctgtttctactattcagttcctcaaactgaagcttattgaaaaaaaaatgtataatgttatttgttttattatagcaattatkcctaattaaagcagtatttaatgcaatttccagttatttctttggagaattttatgtcattgttccattaccttgaatgttggaaagatatgatacgtgctgcttgttcatcacaaaaatcagtaagcacaataaagtggatgccaaaccatcagacacataaatgttcccgctgtgtccctggatatggaataagcaggtataaaaaatattttaattatagttttgttataaatataacttatgagaaaaaaatttgataggaataatactgtatattactaatttttaactatccctaaggcaaaccttatgacccacagaattttctcatatacagtattcagtgcacagaaatcttatgattggctcaagtacagtaagt

SEQ ID NO: 256425 - DNA, 642 bp, Homo sapiens
cagtttctggtctcctaataagggacagggaaacacctttacagatggaaattcatatcacctttccacagggaaatttatgtcctgccttaggcagttaggggaagggcagagaattcttcctgtatctgctgtgtctcaggtgccttcagctcaaaataatccttatgccaaagkagcatatttgggtgtggcatattctctgatctctttcaacagcatcatctatacttaacaacagcaaaagttttttttaaaaaatcatgtttcaagatttgcatgtggaagacaaatggacatgattgagataaatgaagaatatatattttttaacaaagaatgctgtatatttatgtctctgtgacattgtgttatggaggctaaggtgttaagcatgtgattactttagatgccgtatgactacctgtttttaagattaaaaaagaatcaataggcagtttatatgtcatgggagcaagttaaaaacaacacagatgtgatgaaggcgaggtgaaactggtccgcatctaattcaggccttctcctgaaagccagtgtgtgcaagataaataagtttgtttgacgaaagcagaataactagtttgtcctttgtgatgaagatagttattcagaaatcatttt

SEQ ID NO: 256426 - DNA, 506 bp, Homo sapiens
aggcaggacggcatttcagtgggaagttctaatcagggccaggatggtagctactttctttatacatgattaacatcaaataacaacatcattggtagatgrtgacctttggggacaaagccaggtgaatggagatctctcaagtaacaagtatttgaaggccagcaggaagcattacacagtagaaggagcttctctctttctgtggctgtcattgccctgtactgtaagaagtactaggtttagtactggtggaaaaaagtcacgggtgtggacagtgtgcacaactaatgctccttatgctttctttaactgagaccagacatctctacactagaacagtgtgcgaaaagataaagcaggttctgtgttcacgttaggattgctgtgtataaagtcagtgaatatgtgtttatgtgtaaatttgttactgtgaatcaccccagattactgttagtcacgaagttgtaaacttttgtgcaatgtttgccatgaaaacacagaac

SEQ ID NO: 256427 - DNA, 506 bp, Homo sapiens
aggcaggacggcatttcagtgggaagttctaatcagggccaggatggtagctactttctttatacatgattaacatcaaataacaacatcattggtagatggtgacctttggggacaaagccaggtgaatggagatctctcaagtaacaagtatttgaaggccagcaggaagcattacacagtaraaggagcttctctctttctgtggctgtcattgccctgtactgtaagaagtactaggtttagtactggtggaaaaaagtcacgggtgtggacagtgtgcacaactaatgctccttatgctttctttaactgagaccagacatctctacactagaacagtgtgcgaaaagataaagcaggttctgtgttcacgttaggattgctgtgtataaagtcagtgaatatgtgtttatgtgtaaatttgttactgtgaatcaccccagattactgttagtcacgaagttgtaaacttttgtgcaatgtttgccatgaaaacacagaac

SEQ ID NO: 256428 - DNA, 506 bp, Homo sapiens
aggcaggacggcatttcagtgggaagttctaatcagggccaggatggtagctactttctttatacatgattaacatcaaataacaacatcattggtagatggtgacctttggggacaaagccaggtgaatggagatctctcaagtaacaagtatttgaaggccagcaggaagcattacacagtagaaggagcttctctctttctgtggctgtcattgccctgtactgtaagaagyactaggtttagtactggtggaaaaaagtcacgggtgtggacagtgtgcacaactaatgctccttatgctttctttaactgagaccagacatctctacactagaacagtgtgcgaaaagataaagcaggttctgtgttcacgttaggattgctgtgtataaagtcagtgaatatgtgtttatgtgtaaatttgttactgtgaatcaccccagattactgttagtcacgaagttgtaaacttttgtgcaatgtttgccatgaaaacacagaac

SEQ ID NO: 256429 - DNA, 506 bp, Homo sapiens
aggcaggacggcatttcagtgggaagttctaatcagggccaggatggtagctactttctttatacatgattaacatcaaataacaacatcattggtagatggtgacctttggggacaaagccaggtgaatggagatctctcaagtaacaagtatttgaaggccagcaggaagcattacacagtagaaggagcttctctctttctgtggctgtcattgccctgtactgtaagaagtactaggtttagtactggtggaaaaaagtcacgggtgtggacagtgtgcacaactaatgctccttatgctttctttaactgagaccagacatctctacactagaacagtgtgcgaaaagataaagcaggttctgtgttcacgttaggattgctgtgtataaagtcagtraatatgtgtttatgtgtaaatttgttactgtgaatcaccccagattactgttagtcacgaagttgtaaacttttgtgcaatgtttgccatgaaaacacagaac

SEQ ID NO: 256430 - DNA, 601 bp, Homo sapiens
tcatctagtaacttacaaaatatattccttaggatttcctacataaacaatcatgtcattgttwtagaaataacagttttactttgtcctttttaatcttgatggcttttatttctttttcttgctaaattttctggctagacctcctagtacagccttgactagaactggtgtgagggaaatcctttccatattcctcatctttagggaaaagcactcattcttttatccattctttagttcctagccccattgcccttcctaaattttttctcatcattttccttcatcacaccttgttctttttctttgcaatcatatcatgatatgtaacgacatgtttttatttatctgtttaatgtatttcttttcctcacttgtccatgaagggaaggaccatatgtgttgttatcctttgtgcagttcctggaacataataagtatataagaaatagtttctgaattagctgtgaatgaattcatgccttcctgctgtctgtcaatgttcttttaaattaaacatctaagacagcaaataataccacatgagttattaacctgagaaataatcgttttatttataaatgactgagttgaaagc

SEQ ID NO: 256431 - DNA, 529 bp, Homo sapiens
gggcatagtcaaagcacaggtgcacgacacagttgatttagcgtccccaagggaaaaaaaagacccacccagcccccttcaactatagtataacttttccaygcacacccaaattcccccacacaagcacgcccacaatgtgtaataaaatggcacgtgtgcaggctggacgcacccaacgcagattccccacgatacctcacgtggggccgagaactccatgcattactcactgtggttttttgcttattctctgcagtgtcatgtaaaaatattactgaaaatgtcgaaaaggcctgcagatccccctatgtgtaacagtgatcagaaaaagaggaataatttatgtttatcaatagcacaaacagtcaacttgttggaggaactgaacagcagtataagtgtgaagcgtcttacagaagagtatggtgttgggatgaccaccatacatgacctgaagaaacagaaggatacgcttttgaagttctatgctgaatgtgatgagcagaagttaatgaaaaatagaaaa

SEQ ID NO: 256432 - DNA, 583 bp, Homo sapiens
agcaaatgaagctaaaagggcagcagtatcataagaacagggcaatcttccagtaagaatgtcttgtgaaatttgtaaaaatactagtagtgggctatccatggaatcatcagccgcctgtaaatcaacatagtcttgcccagtaaaatcaggatgsttgcagactacatctaacagaacttgccactgatcatgtttattcgcactgaaagcttacacagtgttttccagaaggatgttacaagcctctgtatgctgtctgtctcacgtcaactctggtgctcgtacgttgtagactgtgggttctgccagcaggaaattggaaatgtgaggtcacgactgtacacacaagaccttcatatcacagctgcgtcctctcagctgaagaaagcaagcatcaaagccaggcagtgacggggagcggcatgtctgctctaccacccacagcaaccacgtcatgctgtggaactgccatggcctgtgccacccaagaaggccacaaagttctttctcatacactcagcatgcatgtgtcttttggtactgcccttattttacatcctgtcttttggtactgttctta

SEQ ID NO: 256433 - DNA, 565 bp, Homo sapiens
cactctttccactcccctaaccatcatttctcacctggatgactacattaccttccaagctggcccttttacagagctccacacaaatgtcacttgctcagtaagattttccaaacccctacctctcacccaccaggctaaacaacctggcatggcacagtaaattttcattttcttgttattgtttgtcttcccacactagaatgtgacctccataatggcaggtacattgtctatcaaacattgtaycccttggtacccaggacagcacctggaacaatgtacacacgggaatattgcaggaattaagggatctgggttctagagatcccttactgaaaagtcattacttactattgaatggtccaaccactaacatcaacctctagttaagaaaccataataaaatgagaaaatagtaaaggaaaagttaacttctgattccacttgagaagcatcagctccacaaaatcagacaaatatacaaaagagggaaagtaaactaggtatatacggagtgctgttttcccgtgccttccatcgtaatggcacagaggtatcccca

SEQ ID NO: 256434 - DNA, 645 bp, Homo sapiens
taaagagtgtattcattctttttgtaagtgatgtttgtagaagtagcattggtgggtcgaagtgtgtatacattttacatttttgatygctaagctgcagaaaagctgtattggtatgtaagtactcgtttccttactatgctcgtcatttctagtgtctgctcttcctttccttcttcaaatgggtttggtttaattctagttgctactgttccatcagaggaattgcagagaactggtcttcaaaatagtgcagtatatactttaggtgaagatacttctaaaaacctttgtattttgaggtaattctagagtcccaagaatttgcaaaaagagtacattgtcagcaatatttttcccaatggtgacatcttaatataactgtagcacagtagcagaatcaggaaattgtcattgggtaaggtactttttaattctccaaataattcagccctccaaaaaaatcccacttcttatgttttcaaacctgtagctacttttgatgcgtacttcctaaattgcatttttattactttaaaaaatataatacctagaagctcaaagctggaaacagcctgatcaatatagtactcttaagctaaaaacaacctgatcaatatagtactcttagggaaatcacttatg

SEQ ID NO: 256435 - DNA, 572 bp, Homo sapiens
gagaacagccgtgcaaaactctgtctctacaaaatatacaaaaattagcctggtgtggtggcgtgtgcctgtcgtcctagctactcaggtggctgaggcatgagaattgcttgaatctcagaggtagaggttgcagtgagccaagatcatgccactaccctccagcgtgggtgacagagcaagactctgtctcaaaaaaaaagagaaagaaacccttcctttctgaccacagaaaaacaagtcaagagtgcaggggatgggaagtccctatttacgwttcttttcttcctttttttctattttggtccagccacaagggcagctcaccttgcacagctatactactgtggtgatgatgggggcagctgaaaccccaagataaaactatcattatgatccgaggaaccaggaaaaggggctcctgggagtcagaccatgtgggggacatctcagagagaagtgcattggagaagggcaccccctaattatgtgtatgaatctagccaactctcgagctcatccagagctgtgagtgcacagaacagacccagagaagcataagaaaagcctgg

SEQ ID NO: 256436 - DNA, 572 bp, Homo sapiens
gagaacagccgtgcaaaactctgtctctacaaaatatacaaaaattagcctggtgtggtggcgtgtgcctgtcgtcctagctactcaggtggctgaggcatgagaattgcttgaatctcagaggtagaggttgcagtgagccaagatcatgccactaccctccagcgtgggtgacagagcaagactctgtctcaaaaaaaaagagaaagaaacccttcctttctgaccacagaaaaacaagtcaagagtgcaggggatgggaagtccctatttacgattcttttcttcctttttttctattttggtccagccacaagggcagctcaccttgcacagctatactactgtggtgatgatgggggcagctgaaaccccaagataaaactatcattatgatcmgaggaaccaggaaaaggggctcctgggagtcagaccatgtgggggacatctcagagagaagtgcattggagaagggcaccccctaattatgtgtatgaatctagccaactctcgagctcatccagagctgtgagtgcacagaacagacccagagaagcataagaaaagcctgg

SEQ ID NO: 256437 - DNA, 572 bp, Homo sapiens
gagaacagccgtgcaaaactctgtctctacaaaatatacaaaaattagcctggtgtggtggcgtgtgcctgtcgtcctagctactcaggtggctgaggcatgagaattgcttgaatctcagaggtagaggttgcagtgagccaagatcatgccactaccctccagcgtgggtgacagagcaagactctgtctcaaaaaaaaagagaaagaaacccttcctttctgaccacagaaaaacaagtcaagagtgcaggggatgggaagtccctatttacgattcttttcttcctttttttctattttggtccagccacaagggcagctcaccttgcacagctatactactgtggtgatgatgggggcagctgaaaccccaagataaaactatcattatgatccgaggaaccaggaaaaggggctyctgggagtcagaccatgtgggggacatctcagagagaagtgcattggagaagggcaccccctaattatgtgtatgaatctagccaactctcgagctcatccagagctgtgagtgcacagaacagacccagagaagcataagaaaagcctgg

SEQ ID NO: 256438 - DNA, 612 bp, Homo sapiens
ttactgagacagttcgctcatttattgttacttcatttctgtcatttgaggaccaagaacacatagtgcttgcatttaagtatctgataaagcaatgtggacaggaaatttgttttatgaattgtaggatggaaagaaattaacacatgttgaatgcctcctttgtgctaggtactttcatattcccatttaattttatttaaaaaattctatactacaaagtagtattctttataccataaaaaattaggaaaccaaggctctgagaggttaagcagagggcccagtgtatctcagctagaggtgatggagctggtgtttgaacttggtctctggactcccagtacctggctttttacattatcttactctgcaggagataaaagtgcttgtaacattaagccacaccatgccycggtttcctagtgcactgtaggcatagggacctggccattctgctgtggctactcctggagtacatgtatctcagttgcctgtctcatttcatgagagctttataacaagtaaatgtaagctatgttaagtaaaaataagaggctatacacatgagtttgagaaattgctgatatatttaaggtttaagaaatttag

SEQ ID NO: 256439 - DNA, 436 bp, Homo sapiens
tactatggtagagcaggagagagagaataaagggggaagtgccacacacttttaaatcatcggatttcatgagaactcactcactatcgtgagaatggcaagggggaaatctgtcccygtgatccaatcacctcccatgaggttcccccccagcattgggaattacaatgcaatatgatatttgggtgggaacatggagccaaaccatacaaatggtgatctgctgaaacctcaacgtcctcctcaatgtcctcctgtacaaaataacattcataacattagatatcacttggcctcacattggtattcacgaaaagtaaagacaaaggcaagcacaagtgtgaaatattttcagcagcaaaataccatcaataactaacagtttatctggagttagtgttggtgtcactaaattaaagtcaaaacaaattctgtc

SEQ ID NO: 256440 - DNA, 571 bp, Homo sapiens
accttttctgcaatatgactccacagctccttccatgagaaggtggagtatatttctcaggccctcagggctgaagttagccatgtgatttgttttgaccaatgagacattagaaaacttgctgcaagcagaggcttcacaaagtgcttgtgcatttgcttcctgttttgccttctgcacttcactgtgtgaacatgtctgggctagcccactaaaggatgaaacatataggacccagtcgcacacatcaccccagcccacagccagcagaccaccagacatgaaaatgagtgcagctaaaactataaaaagtactcagcttaaatcacaactacagattcatgagctaaataaatgtttgttttaagccatacttccttagtgtggtttccatgaggaaaataaktcctatagaaaaatcatttgtgtctattttctcaattctcccaagatagtacatagttaattcattatatataataaatgccttacagcattagattttaactatctcctggaaccctgttagctattgcattttgggtggttgttatgaagcataattatagcc

SEQ ID NO: 256441 - DNA, 668 bp, Homo sapiens
gtggaaagttaaaattcttgcttggtgactagaaaatgctatacagttggtttaaaagtgactaaaccagctactcaattgattgttttgtctgtgtccaaggacctcaaagtgctgtctgatgagcaggtggcccacaggctggtggagcccaagggaaagaagtagccccaggtatgwctgggcagtcctggaagttgaaaaggcaagaaatggatcacatattcagagtgaatttcccagtcagagaggagagactcacaagctttggagtttgcatgtttgacatttactagggtgggtctgtgtctcttgacttgtcatttccttactgtgtccctttaaaatttttcccattggtatgtcaacgtgaagagggagattgtaagaaactaagaagatgttatttataggttattttatttcccatacatagtttgtaggctcagaaaagaatagagaaaagaaggaaaaatgttgacttacatgactctagataattgtctcactgatattgtctcaattggtgacttcagagtcacctagcaaaacaagatttttgatcttcattttggataacttattttttaaattcttcagtagtaattattgagaagtgcttctaggaaatggcattttatatctagaagaaaatgtactctttgtgg

SEQ ID NO: 256442 - DNA, 585 bp, Homo sapiens
aatcattttttcttgtgcctactttgtgtctctccagctttgatatttacttcttctgaacrttgaaaaccccaaacttaatatacctaatttatgtcctttcaacaagtacctaaaattaggagctaataaatttctgagtccttaattatatctgtatataggtgcatatgtgtttgtttacatacacacccacacatatacatatgtgtttgtgcataacatacatacactttttattaataaatatttatgacctgtgatttgagaaagagctcatcgtttaaagttcagtactcttttgatttcttacatgcaaaagcaaaataaatatattgtgttctctacagattttgtctgtcctttttattcctaatactgcattccattttatggtaacagttataaagacatgcactctaagaacacagcatagtcttgacttgaaaagagattgaaacaaaataaccaatttttaaatcactaactagtctcatcatttatatctagggtttctagtttctttgatattataccatgcttcccaaaaggtttctccattaatattaacagctttatgaatct

SEQ ID NO: 256443 - DNA, 394 bp, Homo sapiens
cagtaaataaatctaaaacaataggtgtggatgsggaagcagtcacagctgaccaaaagagcagttgtaatgcaacccacagaaagcttggtgccagaagtaattgacatagtcgtcaaatcaatttcctagggtgcagacactcaagcactcaatctgattctgtatgctgcacaacatttggattatacagctgcctctaattcagatagccttagctcaatgtgaatccaattcaaggaactgtctggaagtgaatggtaattatttaggcttcctttctgcaggtttactgttttctagttaaattaccctcttttggaattacatacatttcacattaattttttaacatttagcttatttttttttctctccttgtgtcatctacctc

SEQ ID NO: 256444 - DNA, 551 bp, Homo sapiens
tctttctcttgtgtactttactgttttcacatctaatggatagcacgttctgtcccatcactctctaaactcattgaggtctttgctgagagcttttacttgatgcatctatgttcccaccatgtgttttctgcctgtgctctcacgacaccagttgtaaagaactccattgggttaccatagtttcctctcatgattcagcagaagatggctccatgctctctaaacaggctctgctgggcttccatcaagggcccaagtggtccagacaggaggaagaactgtctttgggttggatttcaagtattcaaacagggcatataagcagggccatttgcctttcacagtgttagagctattttgttttctttatatgcaatgactaaaaagaactaaatgttgcatagaacatgaatatgtaggamcaaatatttgaaggaaaggtacttatgataaaaaatacctgcgtcagttgcacagcagactgtagaagccacactttaggactttgtctaaaggacatcaaaatgtcacccaaaggtgattcacat

SEQ ID NO: 256445 - DNA, 570 bp, Homo sapiens
agtccataggtgggcctgagtgctgaaatgccaaatctgcagagaaaaaagcttcacagtgacagttttgagagagaaaacccttttactaagtgtataaaggtttttgcagaacgaatacaattcacctaatgattaataccataaaaaatcggcatattgatccctttgtcagtgaaataaattgatcaggtgctcacatcacgccagtggrtcaattttactgcatccgatgagccgacagcattcttcattggatagtgtgttaacaccttaattgatatatttcataattttattgtggcttatagtcacaggattgcttctggggataataatttatttttttattggcaagaggttcagagcagaatttgtgtggtatttctcaaaagtggttaaaactgagacatgtgtaacaactggaaaactcctctggtctttggatccaaacgagacagttcctgatcagtggtgttcacgtgggaatgagcatctgcatccacaagtttggaaaggcccagtaaataccaggtggtcctgtaatctcagcattttgggaggctgaga

SEQ ID NO: 256446 - DNA, 589 bp, Homo sapiens
tgtgaagcaatgtgttttctgaaacttgtcaggcttgaatggagcagaagcatgggcctggaaagcaagacccataacagcctttgggatgaggatgtgatgataacagcttccatcactttgcttttgcatggctgtttatgaagcattttcctttaaccttccaagagtcctggaaggcaggagttttgtcctccaccctrcaggtgaggagacctaggcagactcctggtccagagctttctcctcactctgggcccagacggacctgtgccacttacatttgttctttggagcccactgatgcttcccaaagacttctggagcctgcagtttttcaaagggccagatgcaaaatgaggtaggctgagattccagggcagctgcaggctgcacaaacatacttcaagcattggttaaaaggaaacggagaagcagaatggtcattaagcacctcagaggggaatttgccataaattctcagccttttcaatagcttggctttattagggcatgagccagtgatatttttcttcatttcctaacttagtgctcacacaaggattattactttgtaatatttagtttt

SEQ ID NO: 256447 - DNA, 589 bp, Homo sapiens
tgtgaagcaatgtgttttctgaaacttgtcaggcttgaatggagcagaagcatgggcctggaaagcaagacccataacagcctttgggatgaggatgtgatgataacagcttccatcactttgcttttgcatggctgtttatgaagcattttcctttaaccttccaagagtcctggaaggcaggagttttgtcctccaccctacaggtgaggagacctaggcagactcctggtccagagctttctcctcactctgggcccagacggacctgtgccacttacatttgttctttggagcccactgatgcttcccaaagacttctggagcctgcagtttttcaaagggccagatgcaaartgaggtaggctgagattccagggcagctgcaggctgcacaaacatacttcaagcattggttaaaaggaaacggagaagcagaatggtcattaagcacctcagaggggaatttgccataaattctcagccttttcaatagcttggctttattagggcatgagccagtgatatttttcttcatttcctaacttagtgctcacacaaggattattactttgtaatatttagtttt

SEQ ID NO: 256448 - DNA, 635 bp, Homo sapiens
ctcagcaaaatacttgaaaaagactcaaaacaaatagcaaatgaactagactgggaagaaaatgaagtggagaggaaacagtattgagcaaagaaccttgctctctgtagatcctgaaccagtaagcagtctgcatccctggagctggaagtgtaggagcagagaggagaccaagacttggagaaagaatttccaatgaaaataggccgcaaaactaaacaggttcttaactcagatttatctaatagttaaagaaagatagttgcaatgttaaataaacttttctatatcgtgaaaaamtgaagaagatgttaattcactttataatagagtccatcttattttaatactcagctctaataaagtataattgaaaatttaaaaactataaatcaatctaacttaagagtactgatgcaaaaaataaaataaacagcagatagaatctagtggagttttaaaagaatactgtactgtgatctaataagatttattttagaaatgcaagaaaagatggatataaatatctgtatcagtataactctaacgaacaaatggaaagagattaaaagagctaactgaaacagaaaaattacaaaattacattagtagattttggaaaggcattttataaa

SEQ ID NO: 256449 - DNA, 552 bp, Homo sapiens
ggtctcaatatacctaaatagaasggtattagttacatttaggtcttacattttggtttttgctccactttgagctgttttgtttggtgtaagaaagtgtccaacttcattcttttgcatgtgaatctgaagttgttcaaacatgatttgctaaacagactattcttttctcacttagtagttgtgttatccttgtcaaaaatcaactagtcataaatatagaggtttatttctagatgattctattccatcccatttttatttttagacaattttattcaattctattccattgttctatatgtctgtccttatgccaataccacactgtcttaaaattatagcttcgtagtaagttttgaattggaaagtgtaagtgcaccaaactatttttctctttcaaaattgtttggactattctgagtcccttgtatttccatatgattttggaattagcttgcaaatttctgaaataaggttgcttgaattttttataaagattgtgttgaatctgtaggtcaatttgaataatattaccatcttaccaatatt

SEQ ID NO: 256450 - DNA, 524 bp, Homo sapiens
gttgggttcatatatatttacaattgtatatcctcttggtgagttgactcctttattgttatatgatgaccttctttgtctcttcttttagtttttgtcttaaaatctattttgtctgatataaatgtagctactcctgctctttttggctttcattttcattttttaattttcagattgtgtctttataggttaagtgtgtttcttgtaggcaacagatcattcagtctggtttttccccctccattcagccattctayatcttttgattggagagtttagtccatctacattcaatattattattgataaataaggacttactcctgccattttgttacttattttctggttgttgtgtggtcttgttctttctttctttctttctttctttctttctttctttctttctttctttctttcttttctctctctttctttctttccttctctctctctctctttctttctttcctgtcttcctttgagcaaaggagattttctttgtgatatgattttgtttc

SEQ ID NO: 256451 - DNA, 434 bp, Homo sapiens
tagaaatatgagatagacggggaggtgggagatagaggggagaggagatgggactgggcataaaaatgagatgctggaggagataagagtgaatgggatcaagagcagttagaagtattagtcttggcagaaaagcaggacacttctcagatatgacagtgaaagaagttctggagatattttaatgagagctaggaaagctgagggaatttgcattaaattgtrtaagcttcatagtgaaagtaaaattacctatagaaagtgaggtggcacattggaattaagtgataaggaaacaggagtggctgctatgggcagtgccattcacagacactgccaagagagctgaatgaaagagttctagcgagagggagggccctgctaggattagtatttgatcttaatagtttgtgtttgatcttacattgaaagga

SEQ ID NO: 256452 - DNA, 434 bp, Homo sapiens
tagaaatatgagatagacggggaggtgggagatagaggggagaggagatgggactgggcataaaaatgagatgctggaggagataagagtgaatgggatcaagagcagttagaagtattagtcttggcagaaaagcaggacacttctcagatatgacagtgaaagaagttctggagatattttaatgagagctaggaaagctgagggaatttgcattaaattgtgtaakcttcatagtgaaagtaaaattacctatagaaagtgaggtggcacattggaattaagtgataaggaaacaggagtggctgctatgggcagtgccattcacagacactgccaagagagctgaatgaaagagttctagcgagagggagggccctgctaggattagtatttgatcttaatagtttgtgtttgatcttacattgaaagga

SEQ ID NO: 256453 - DNA, 434 bp, Homo sapiens
tagaaatatgagatagacggggaggtgggagatagaggggagaggagatgggactgggcataaaaatgagatgctggaggagataagagtgaatgggatcaagagcagttagaagtattagtcttggcagaaaagcaggacacttctcagatatgacagtgaaagaagttctggagatattttaatgagagctaggaaagctgagggaatttgcattaaattgtgtaagcttcatagtgaaagtaaaattacctatagaaagtgaggtggcacattggaattaagtgataaggaaacaggagtggctgctatgggcagtgccattcacagacactgccaagagagctgaatgaaagagttctagcragagggagggccctgctaggattagtatttgatcttaatagtttgtgtttgatcttacattgaaagga

SEQ ID NO: 256454 - DNA, 563 bp, Homo sapiens
ttctttttcctttacttcattgacacatataaatattcagcatgagtaacacttttgtttctccacatggaaaagacactgtcagttggaactaggcaatggagagccagatttagtggagaatgacagaatctggggtcaatagttccccctcagggagggctgacagggttttaaagagtttttacttctgccttctttctcagttcagtgcatagctgcaatagaatttaaactaccttcgaccctctaaaattatcagaattgttatctccagcactgagatttcaaaagggttctgatgtggattcaacccagtttagttagcatgactaraagagaacttgcttataatatggtttcagggacaaagaaaattatgtgactttgggtttcttttaatgagctttaagaatacccccatgaatagtttatttatcctcaaaaacagagctgtgaaacaggggaccagctaatctacccgcagtacagaagtagttggggccagatgtccaaactccatttaaggatctaggctttcatgtgctatttttgatgacagg

SEQ ID NO: 256455 - DNA, 402 bp, Homo sapiens
ttatcagtctttggttcacctgatttcttaacttagcattccaaaggaaagaagaaaaagcaagagattgaaaagctgctcagacagtctaataaagggagtgtgctttcttccagcagccccttgtccttgcttttgtgaaatttctgaataggctgtacagtgatgtcaatcccctattttgtaatttaacacatacaaacttgcacaccccwaattgtacatgaagaaatgcagctgccacagaagttatgagctctgaaatgaggcatatgccactttctggccgcacagtctcttgttcagagtcaggcttacagaatcccccataatttcagttgccgttttataacttaattattggaactgtctgccccagcatccttggaagtttagtgctca

SEQ ID NO: 256456 - DNA, 568 bp, Homo sapiens
ggatatgagtcctgggtggtactctcttaattcggaagctgtagttttccaaatgatcgggattacaagacaacactaccagaaygcacctctggtcttttatgtttgaaatcttccaaatttgtaacatagtccttgcttccattgcgcagcagcacccaaattcttccttggtaatatagagactctcttttctattggttcaaggataggtgctcataatggccagaagtaggctcagcttgtaatttattagaaccatggctgtggtctctagaggaagcattctatccctgggcattaggtccttcaaacccattgaaccaaaggacacaggaaacagaggcaacaatttttaagttggtcatttcttaaaatagtgagaggggacacttttacctctacccctggttttccagacttgtgcattctctggatacaggagatggtaccacatgttggctgttagccatatactgcagactgtagggtagcacccaaacctcacagggtgttgcctgccagaagcatagctgaggctttagcaggctattgtgcttttatttct

SEQ ID NO: 256457 - DNA, 598 bp, Homo sapiens
gctaattagaaaagtataaagagtaaagggcaagaagacactggtatctgggggtgtcagagcagaatcagaagaggacacaatgagaygaaggtgggaacagagagaagcttgacagttggtcacgggggtgtagaaagaaccatggagatggtggagtttattttaggatttgcactgaattttgttattgcttcaacagtgcaaaaggaaacagacctaaatccatccagcttaccgttatttattggctctgtgtcaggtgctgtgctaagaactaacaaaagcactgggatcaagatagatgagaccttcaacttgcaggcacttacattctagtgggggagaaaaataaggcagaaagaagcagattgatttagcaattctgatactgataagcagtgtgaataaaagatgctatgggataggcagggattcttaaactttccctgtaaaggccagatggtaaatattttcagctttgtgggccatccatctctcttgcggccactcatacatggaactcaactctgctgttgtagcccaaaagtagccatagaaaatgtgtaaataaatgagaatagatttgacccaagac

SEQ ID NO: 256458 - DNA, 602 bp, Homo sapiens
tctcataattcaacaggtcagctgggtgattctgctgatcttggctgtacttaccttgtgctgtggccaattagtgaagtgacagggaacaactggtctagaatggccttggctgaatgtggctctcttccgtgtgcctctgacttccttccagcagactagcctgggcatggtctcatgatgagggcagagcttaaggagggcaagcagaaatgaacaagtgtttttcaagcttctgttggaggttaaagcaagttacrtgactaaaccaagaatcagtgtgggagggtactaccaaatgggtggcctcaggggagaatgaaaaactggggctgttaatgcaatcaacttacctcaccatgaaagggaatgttaacttcattagtgcgaaacatttgaagtagacccagtccctctcttatgatggggaaagtttgaagccagtgacaatcatgcttcagatgaatgtctcaagatcaatagcaatgtcacaagacctatcgcaagccctcagttgaatctctctggtagggagccatcttcggccttggtcagtctgacaggtgtccctctagagcctcagcagaaaaaaacaagaatga

SEQ ID NO: 256459 - DNA, 624 bp, Homo sapiens
taataaacaagtgcctttaagagctgaggtgtgaaacccattttatacagagagcaagttctaaagattgtggttatataaaatatatttatgaggtgatgttatactgagatcaaaatcaatttttcatgtttttatggttggaatggattctgaggaacagaatgcaatttttaaaaaattgaactgataggaaatcagaattggcttcattcatgacagttgtgcaagacctgcttagattggaaagarggagtcactagaggccatttggtccaggaccagagctggctacataatggtgggacctaagtgcaaagtgaaaatgaggcctagccatggcagataagttagtttctccttcccacagcctgtctctcctcagtctatctacagtgcccctaccaagggattgcaacctccacaccaggacacacctgtaacctggataggagtgggtgagaaggccccatccagttgccttccaaatataccaccgtgctgtcagcccagggtagggacaacaccgccatgctctttcccaggatgccatggtgtgcatacccagcagagcctctccccacacctgctcccaggcccctgcagagggtgtgggcagaatgt

SEQ ID NO: 256460 - DNA, 624 bp, Homo sapiens
taataaacaagtgcctttaagagctgaggtgtgaaacccattttatacagagagcaagttctaaagattgtggttatataaaatatatttatgaggtgatgttatactgagatcaaaatcaatttttcatgtttttatggttggaatggattctgaggaacagaatgcaatttttaaaaaattgaactgataggaaatcagaattggcttcattcatgacagttgtgcaagacctgcttagattggaaagaaggagtcactagaggccatttggtccaggaccagagctggctacataatggtgggacctaagtgcaaagtgaaaatgaggcctagccatggcagataagttagtttctccttcccacagcctgtctctcctcagtctatctacagtgcccctaccaagggattgcaacctccacaccaggacacacctgtaacctggataggagtgggtgagaaggccccatccagttgccttccaaatataccaccgtgctgtcagcccagggtagggacaacaccgccatgctctttcccaggatgccatggtgtgcatacccagcagagcctctccccacamctgctcccaggcccctgcagagggtgtgggcagaatgt

SEQ ID NO: 256461 - DNA, 589 bp, Homo sapiens
ctgagcttcaaagatgagacaatgctaaggtgcaaacagctkggggctgcaaactaactgcactccttgcagctgaacagcaagttctttctcagagggagatcctcatgggtgcctccaatactgtcacagtggtggaaaggtcactagagaatgattggtagggaagaataatgaaaatcccatcagtttaatgttttgtaagtgttttttacatattgcccaagcttctaaagtcatcactgagcataatctttgcccacatcctcttcactgcaggtgaggtttatccactgtgaccacagcatacagcaagttacacagatttgacttctcttgaacctttcccaagaacatcttcacagaatatagtgctggggtgatgcctgaaaactgtgagcgtggttctcacagagtcttctgctttttatctcagagatttccatgaaacccaaaaatctccattttaatttaatgtttggaaccaggaagtgcccagcagttaatctaaacctgtttttaccacgacagcattctgtgtactgcccgggaaatgtcaatggtttgttgataccaaattaatgatgca

SEQ ID NO: 256462 - DNA, 575 bp, Homo sapiens
tgaggtgggtaatattagtatcctcattttccagatggagaaactaacacacagagaggggaagaaataaagaaacatgcccaaactcacaatgaagtagaattaaggcaaggttaagatgtgaatagccatggaccacagaacattgcttgacagagtgccagtgtctctggcaatggtgctagccatgctgcaaaccactatagagaggcaagactcctcagatgtctgtgtgtctctcctgagaaacagagaactctgtgattcaggatccactttgattcaagaagctaatactaaatggctgattgcatctctcaaacaagcctttctggctggaaataaaccaagaatgttttccgttgagccctctggtctccaataaatctcctgcatcatgtaatgaataaaatgtcccaagtgcctccctctgagcgataaatgagytcaactgaaaacactgactgtttgaggccacttttggatttggagaggagacttcccgtggtagaaatgccaccaggcctttagcacgctcattactatagggctgtgggcagcacagaggggtcatg

SEQ ID NO: 256463 - DNA, 535 bp, Homo sapiens
taacctctctgactctccacctcttccttgatgggatgacaatgcgaacctgtcagggtttatgggactattacatgaaataaggtatgtcaaacacttgatatggtgtttgacacttaataatcagagccaatgagcattgcacacttattaggtgccttatgtacttcagctaatttaattctcataaaaatgctatgaggtaggcactattgctaaacccattttagagatgaggaaactgaggcacaaagtggtgaagtcctttgcccaatgtcatccaagtgggaaagtcagsattctaacctctatgctatgttgcctcctattcaggctcctggttacaggtactatgcattctctcctggataaaccatcactgatcccaaatgccattaatctcatctatactgccccctaagcctcagatcaaggaaaatagatctctgataaaattgtccgagcacatttcaaagctttgcctagattgtagggcctgcgaggaataatagcttcttggtccaccccagttatt

SEQ ID NO: 256464 - DNA, 581 bp, Homo sapiens
ggagtcaaccacacacaaaccacttgggcagccagaagcactggtaagctctccaaattttttatttttacagtgtttatcattaaaaagccaggattctatttctgtcctctgatttgctgagctcatgtccaaaacagattgcacaactaataaatcttactgagctggttctgatcagaagtaggaagggaaaaggacaaggttttgttgttttaaagcattattgttaattggattatctatttttaaagccaggaggcacaatgggaagcttctaaccaatttctcttgtgacacaggagaaaataaaatcaaggatagccgagtatggtcctccagcaagttaaaaaacaaaacaaaacaaacaaaaaacaaaaacaaaaacacacacacacacacacaaaactcagtggttcataattgcagatttctgactcctacaccagtgctsttgctactgatctatctttcataagaggtctgagcaagctgctctcaaaaaagccacaactcactgtcttaataggacacgaagaagtcattttcttcttcatttgttcgaaggcttcaaagcccag

SEQ ID NO: 256465 - DNA, 569 bp, Homo sapiens
gaggcacaatgggaagcttctaaccaatttctcttgtgacacaggagaaaataaaatcaaggatagccgagtatggtcctccagcaagttaaaaaacaaaacaaaacaaacaaaaaacaaaaacaaaaacacacacacacacacacaaaactcagtggttcataattgcagatttctgactcctacaccagtgctcttgctactgatctatctttcataagaggtctgagcaagctgctctcaaaaaagccacaactcactgtcttaataggacacgaagaagtcattttcttcttcatttgttcgaaggcttcaaagcccagaagttttcatctgggagtctttctagctattgtgccctctgctgccccccaggcctgccagtctagaaggctggcacatcactcgcccccatctcctgatgcccatgtgatgggctsctggtgaaagggtgtattgtttagcatccacttctgaatgaggccagaatcacacttggtggccgaatcgcctttggctgcccagtgcagaccatgagtcttgagtgactcagtctctcccggaattgc

SEQ ID NO: 256466 - DNA, 493 bp, Homo sapiens
tgtgccaggctctgtgctcggtacttcacatgaactatctcgtttcaatcccacagtagtcacatgagataagtactattgcgatcattgaaacttgatacacataagaaaactgaggctgagagaggtgcaagtttgcaccagcagggggtgaggcagacaaatctcttctttctcaggggccacatgcaaatgtctctctccttgctgcaccttgactttaggagggtacagacaagaagcagaatcatgcctcttctcagatagttttaacatcttgggttagaatttgctaayaccatgcacatttagctggggggagggagctgattactactttttcctcccaggaagtagccatgagaccaaagaagacagggagaatttcatagagaaattggtcttgcactgggatttaagaggcttgagcctaaacagggctgaccctgtagggaccacagcaagaggaaaagcttgatgaatggactggatt

SEQ ID NO: 256467 - DNA, 494 bp, Homo sapiens
gaattcatctttgcctcccacagtccataagaagatgtccttagaattcagactcagtagggtagacaagggaaacttggaaggcaaaggctacaacaactgaatgacctggcttaagggataagagttccatttgggtcacaagctgggtagaattggtgtaagtgaagctacatccatcctttctgagtcttgaccagaaaaaattcaaggcaaaatccaatcagagacttacagcgctgcccagcagagtgcaactgtgatgtgtccactcccaagccctctgaacgcttgcaaggctctcctgaccccctgacatctatgccatccattgyttcacaattgctggtaactggtgattgcaaggatttaccctcattgtattgtgagattgcagtaaccatatggcttggatcggaaagatccaagaaagacttgggtccaagtcctggcttgagctcttgtgggatgttatgcatgctatgttttcttaa

SEQ ID NO: 256468 - DNA, 571 bp, Homo sapiens
aggaggaggaattcttcagatgaaactacagggacaagtaagtcatccacaggcagtacagtgtagtgacgaacagcatggattcaggagctagaacacctagatccaaaccctattatggctgcttcttagttgtgtgaccttgcctaaggcaattagctcaatttgctcaagtataaaatgggcttaataatagtatctattattactattacaattctattacttcatagaattggtgaggattaaatgactcaaaagccctgcatgtattaagccgtagatttatgtctacatatgcatgcagtaagcactttaaataagtgtttgctatcattactaaaagcaaaattgtgtttgagcatagaaaagtgaaagaacatggcttgtccagagaatagagagcaatgtgagctgatctgaacatagatcagatgaaggggctgggggaagatagcagacatgaggttacaggtatggggactacaaggtgtaagctatgccagggagtttgaacttgrccctgtaggaaataaggaggcaacgtacttagttaaaattattatcattg

SEQ ID NO: 256469 - DNA, 503 bp, Homo sapiens
tgttccttgagctaaaatctatttgctattgccacagtaggtcttgtttgggattcacttaaattgccactctctaacccaggcaaagttgccaaagttctttctcactgttggagctggcctgcttctgaactctgtctagcactgtctgagagggtgattcatgagaacttctgagtttctggggcagaaaaattggatcttctgccagtggacagtgccactgttacttgattgcctggaatctgtccgacctcatctctcactgttcttttcatgaattctcttatccaagcagacwgacccctcccctggccccaatcaagccattcttattcccccactttaaacacctggctcatgttttgcctttccctgggtttctctcctctcccctctctctgtctgtcttcttttccacattcaactcatcctcaaattccttgaagccttcacatgcaatcgagatgtctgtttttcctgtcttctgacacttggttatg

SEQ ID NO: 256470 - DNA, 503 bp, Homo sapiens
tgttccttgagctaaaatctatttgctattgccacagtaggtcttgtttgggattcacttaaattgccactctctaacccaggcaaagttgccaaagttctttctcactgttggagctggcctgcttctgaactctgtctagcactgtctgagagggtgattcatgagaacttctgagtttctggggcagaaaaattggatcttctgccagtggacagtgccactgttacttgattgcctggaatctgtccgacctcatctctcactgttcttttcatgaattctcttatccaagcagactgacccctcccctggccccaatcaagccattcttattcccccactttaaacacctggctcatgttttgcctttccctgggtttctctcctctcccctctctctgtctrtcttcttttccacattcaactcatcctcaaattccttgaagccttcacatgcaatcgagatgtctgtttttcctgtcttctgacacttggttatg

SEQ ID NO: 256471 - DNA, 603 bp, Homo sapiens
ctgtttggggtagaccaaacatgaggcctgtggtgggcagtcagccagccaagtcagccctgtcctgagcaacacagccatcaccatggttctcacttacacataaatgtatttgcaccttagcccatactgacagcatgcttccatatatatagatatcatgacttttatattctagacattcattgcagttcaacagttatgggtcaatattactgrgatctgggcccacaaaaatgaatgtgacatgatccctgttatcaggggactcccccagtgctgcagaagacaggagaagatacattggaatttgttttgttgtggttattttcccctttaaggggcatgaaagtctttagcattctttggcatcaccaattcccaccacacacatagatccttcaggcatgtacttataggcatacctgcaatgtgcatatgtccacatccagcaaacaagaatcaaacatgtggcttatcttggtacgtcacccagtggggcaattgagcaatggagaggggaggaatatgaaatacttacctccaaagtacacatgtcctgaatcaaacattaatttaattgacaccatcctagttaaggag

SEQ ID NO: 256472 - DNA, 540 bp, Homo sapiens
acttactgagtcaaggtccacctttgggaattcctggatcacctctttgagctcccctctcatccactttccattctaaagacaccctgcccacaccactggtcacacaaacccttcccaaactcttagatgcttgatatctgttgtgtgttgcaccatctttctttctaagccaaaccatgggatgtgggaaactggaaaggaaacttgaattgatttgagttgacacgagattacactatttgggaagaatccagaattcaatcagcagccttggaccragaaagtccaggtctgagcattggctttcccccttatcagaggatgacttaacctctgggagtttcggtaatcccagccacaaaacaagggtaatcagacctttcccatagtttattatgagtagtcagtgaaagaagacatcaagaccatttcctggtgtgcctgcctcatggtgggactcaatgacctctaagctacctgagaacagggacatgtccttctggggtgccagcacatactcagctctcagtccctaac

SEQ ID NO: 256473 - DNA, 541 bp, Homo sapiens
gacagggaactggctcagtcttgttcaaagaggcaggatatgggggagcatcccaagctaattctgagtcaccaagaatgattttgcagatggggaaagattaaaagaattaatcagagaaaagagagtgtctgcaggtaggaagacccaatgaaaacaaccaaagacgataatctgattgattttgctgaatatcacctatctcatttgtaacgtcatcctcaaatgagtaactcktaccccaccatatcctaaaggtactgcttggcatggacctgatagaggaataaatatgtttacacttaacataaaattttgaaaaccttcacatgctgcctattcaaggacatgaattacctagctccttttcagctacccacatttaaatctcttgctgcttctcactgagcctgggagaaccatgccagttacttgattcctagaaaagtcctggctcctccttaggttatattttccctgcccaggtgaaggtaagatggaattgactgcactattgtctgtttttgtcaatgccatttct

SEQ ID NO: 256474 - DNA, 625 bp, Homo sapiens
tcatctaaactcacatctcaataaaaaagaacaaaaataaatacaatgcaagcagaaagaaggaaataataaagagcataaattaatgaagaggaaaacagaaaacaatagagaaaatcactgaaacagtttgttctttgaaaagatcaataaaatagacaaacttctagtagaactgataaagaaaaaaatagagaagacacaaatgactggtatcagggatgaaacaagagaaatctttataaaacctgcagacttaaaaagacaataaggggccaggtacggtgggctcacgcctgtaatcccagcgctttgggaggccgaggcaggcagatcacaaggtcaggagatcaagatcatcctggctaacatgatgaaaccccatctctactaaaaatacaaaaaatgagctgggtgtggtggcargcgcctgtagtcccagctactcgggaggctgaggcaggagaatggcgtgaacccgggaggcagagcttgcagtgagctaagatcacgccactgcattcctgcctgggcaacagtgcaagactccatctcaaaataaataaataaataagacaataaggaaatactatgaacaaatctacatatataaattgaacaactt

SEQ ID NO: 256475 - DNA, 536 bp, Homo sapiens
ggaaataccccagactgggtaatttataaaggaaagaggtttaattgacttacagctctgactggttggggaggcttcaagaaacttaccatcatgttgaaaggcgaagggaaagtaagcttggaccttctcacatggcagcaggagagagaagagtgagtaagagaggacctgtcaaacacttatgaaaycatcagatctcgtgagaactcactcactatcatgagaacagcatgagagggaccacccccatgacccaatcacctcccaccagatctctccctcaacacctgggggattacaattcaagataaaatttgggtggggacacaaagcctaactacatcagaaatacctaatatgggcacatattggaatggcaaaaatttaaaaagactgaccataccaaatgttaatgaggatgtaggagagctgggattctcatatatggaactctcagatatggctggagggagtgtaaagtagtacaaacactttggaaaacagttcagctgtgtcttagaaagttaaacaca

SEQ ID NO: 256476 - DNA, 647 bp, Homo sapiens
gattactaaggggaataaggaaacttttagggtatatggatatgttcattatcttgaaggtagtgattgtttcatgggtttatacttatgtcagaatttatcagattgtatgctctaaatatgtgcagtctattgtataatgattatcccaaatacacctgttaaaaagtgtgttaataaagttttgaccattgatcacaattattacatagccatttacctcaattcaccagtatttgcggagcactggtgtaatgcaattagctataatcaaaccacaaaatggcagtaatgtaaatatctgatggttttagattttttccaaactcatcataattaaattgtaatagttgactggtttgaaggagttcagatgaytcaaaacagattcttcctaggaaggtatagagagtttcaatttacagatataatggttattgaaaatctgttataatgtaagaaaataaattaaaaacatattttttaaaatgagggaaggacatctccaaaattaaaaaatgagctctctgtatttaaaataggatttggcttacaaagccttcaattgcacttaacttttgtgagaaatatttatcccttaaaaggatgtgtagtcaaagtggtcacactgacccagaacagtagcc

SEQ ID NO: 256477 - DNA, 581 bp, Homo sapiens
taagtaaacaatacgtggctccttgagctaataggccagcatctataactaagtggaaactttttggcaagaaaggcaagatcccaggctcttctagaacagaggttaacaaactttggcctttgggccaaacatagcccgtgacctgtcacagctttacttgttgataaataacgctgtacagaagcacatgtctgttcacatgttacaatgacagaattgaggagttgtgacagatactgcagggyttgcaaagccaaaaatatactctatctagccctttgcagaaaatgtttggcaacctctgtcctagaagatggtgaggcttggaggcagtattgtgtttccaagtgatatgtttatcatggactgagggaaaccactgaaaagaaggaaatggcaaggtttaggcaggatgtcaagaccgtatctgaatagtctagagtccaagaccccaggtgtaggcagaaaccaaagcaaaagatctctcctattgattggacaaacatggggaggattaaggcaagaatgaggctcattaggcttgtgaaatccaagcgcaccttataatagatatagac

SEQ ID NO: 256478 - DNA, 583 bp, Homo sapiens
ttgtacgcaagccccttcatgaacatgggcatttttttttttaacgtctttgtatctgtgagcatctccttctcttcctatccttaagtgtattatttgtcatgaaagcaaagtgcttttaaaaaattgtgtttgattccatggttcccaacaatggctggacttcaaactcacctgtggtgcttaagattatatatctgtatacttttgtttaaaatgaatattataaaaatttatgtttaaaaatatgtgtgtatatacatacatagttacatacacccaaggcacatatgtgcatgtgtatacataacatatacacatacatacatacacgcacaccaccaccaaagccccactaaaaaaatacyggaatctctgggagtaatgggggcaaataggaggagttaatgttcaggtaaggctattatggacccattgttgagaatcacagtgggttaattacttgaaacagtacctatctaaaggacagttaaagattttggtattaaccagaaagtctttttttttttttcttaaataattttgcaggcaagatgctgctgttacaagttttctgttctga

SEQ ID NO: 256479 - DNA, 549 bp, Homo sapiens
acttcctccattctcacctagtgttgtgggtcaggggacatccagcatgggggagtcatgtctccacagacaaaccaaccaacaacaacatttccrttgcttcgcccaatggagaagccgcccctcatccagtgaacagtgcctgctccccaaatcattgcattcaacaggtgcctcctgctttctccaggatgcagaagaatgatgacgattctaccaatttcccagatatttttaacctttctcaacctccccatcctttttgtcttcttttaatttctgtttttctcccactttttctccccttctctttttctctgtcctcctcactttctcattttgcatcctctccttattttcccttcattcctatctcttgccctagttcccctcccaccagtcaaatatatgactgttttggggagttttttggtttaatttcactctttcttccccaccttggtcttgctgctgcctgccacctcctcagactgggtttgtccctttttcttcccccacccacagagtgtcagctcctagtggcctgat

SEQ ID NO: 256480 - DNA, 612 bp, Homo sapiens
ctggatagtaagttgggaaataggcattcatatccaccccacaaacagataatggcactttaaatgtgctttcttttgtggatagtggtttggcaatatctctcaaaattaaaggtagaggaaggaggaaaatcagaggagcattatcaaagaggaagtccacagggcttaaaagaagggctgtcaaataataggagcaggcaggaccccatgaasagcactggaatcagtgtccagagactgcccagcctctgcccagcaggtgccatttgcagccaacattaggaagtttaaagcaaaacatcccttgccagtggagaaaacactgaatctttccagtactgagggtctgtattacctctccttctcatgaccatcaggtaaaagcctcctacctgtcatgtgctgatcatcttgataggactgccatttacccatgccctcagattttgctaagccatctctttgacatccatattaatcagggtaggctagctaacaaacagactcaacattttaggtgttaatgtagtagtagaactttatttctttctcacacgaggttcaatgcaggtgttcttggtcaagcagctctctagagcagttttcctc

SEQ ID NO: 256481 - DNA, 685 bp, Homo sapiens
agcacttatttcttctttacttcttttctttctccttcttcttcttcttttttttttttctttttgatagagtctcactctgttacccagggtggagtacagcctcacacttttggccccaagcaactcttccacttcagcctcccgagtagctgggactacagttgcgtgctaccatacctagctaattttttaattttttgtagaggcagggtcttgctgtgttgcctagcctgctgtcaaactcctgggctcaagcaatccttcgacctcagcctctcgaagtgctgggattacaagacatgagccacagttcccaccctcactgctccagcccagagagatcccatccctttctgccttacttaacactgattgcttttgttaccatcatttgacttttggttatcatttgtattgaatttcacatcttaatgcaacaaatatctcctaagcacactttgttccagactaggggattcaaaattataaagagaagcagcctccctggaatatgccatcccrtgaaggaggcagatgagcgtgctgtagagtggatgttttggtgccatcaggtgtacacaaagcatcttggagactcaggagggcagagagtccttctgaatgaggataagttggtgcctttgaatctggactttgaagagtgtataagaccttaacaata

SEQ ID NO: 256482 - DNA, 436 bp, Homo sapiens
tggaaaatagaaatggcctgacacatagtaagcgctcagtaatggtcattattatgtctggagtaagaggacgtgtacagtagttgaaaacatgagacaccaaacagtacagatgttgtcccctttgcacacataaagttgagacttaaaaagtgatttctaatattagacaaacattttctttttaaattatttattattwatttcagttaaattttggatttatattttgttcaaatgtaacaaaataaacttattttgaaacataattttctaatagataactactagccaagtagtactatcattgcaaagagtcacttataaatggaatgcatgtcatctttctaaaactgtttggcaatgaaatccagagctgttcaaatttggctcagctcactcactctagcagttataggctcctttacatagtttt

SEQ ID NO: 256483 - DNA, 436 bp, Homo sapiens
tggaaaatagaaatggcctgacacatagtaagcgctcagtaatggtcattattatgtctggagtaagaggacgtgtacagtagttgaaaacatgagacaccaaacagtacagatgttgtcccctttgcacacataaagttgagacttaaaaagtgatttctaatattagacaaacattttctttttaaattatttattattaatttcagttaaattttggatttmtattttgttcaaatgtaacaaaataaacttattttgaaacataattttctaatagataactactagccaagtagtactatcattgcaaagagtcacttataaatggaatgcatgtcatctttctaaaactgtttggcaatgaaatccagagctgttcaaatttggctcagctcactcactctagcagttataggctcctttacatagtttt

SEQ ID NO: 256484 - DNA, 436 bp, Homo sapiens
tggaaaatagaaatggcctgacacatagtaagcgctcagtaatggtcattattatgtctggagtaagaggacgtgtacagtagttgaaaacatgagacaccaaacagtacagatgttgtcccctttgcacacataaagttgagacttaaaaagtgatttctaatattagacaaacattttctttttaaattatttattattaatttcagttaaattttggatttatattttgttcaaatgtaacaaaataaacttattttgaaacataattttctaatagataactactagccaagtagtactatcattgcaaagagtcacttataaatggaatgcatgtcatctttctaaaactgtttggcaatgaaatccagagctgttcaamtttggctcagctcactcactctagcagttataggctcctttacatagtttt

SEQ ID NO: 256485 - DNA, 633 bp, Homo sapiens
ctctatttttattttttttaatcttgttggaattccacctcttcctctgtattgcagattccctaacccttcctaaacagtaatcaatctccatctgcaaatatctttgtctcagtcttttcccatgtattactattaaagcagaggtagggtttgtctcatgctgtatttgtggacccctgggatcggagtagagtgctagtggagctggtagagtttgaataataagagtcacattttggggaaaaaaaattatacagtgtccttcactttggctgtagctgttttgttccattgattgtctaaaacaaaatagcacctatatcacaaggatttattatttcctaaaatgtttcctgatcacccacaagcatataggagaaaataagattttcttattcaagaaatktttattttatttttgctaaattcatgtattggccttctaagaaagcaccctagccctgtctctgctgatttgtttcacaaacctttcattcatttgcaaatagagataagtcaaacttgatattctaaggccaaggctagctgaatgattcttttaaaacctctaatcataaaactgcatcatttcacctttgtagacaatcttaactacttgaattagctgaa

SEQ ID NO: 256486 - DNA, 478 bp, Homo sapiens
gtcttaatgctcttgagtgaaagtccaagtaggatgaatatttgagttctaagtgatcataaatttcaatttttatgtcatagaattattgactaaattgttataattttctatcaacattttattatttttcttggtgcatttccttgcctgcttaaataatttatctgcattaaaattgtttacatttgtgagtttccatatagattatattaaacaaaaattagagaagggatttargtatatgtttgggcattgccattaacttgtagtgtaaactttgggatactagttcacttattttggctgtagtctcctaatctgtacataagaatgttaagcttgcactagttctaatattccatgtaaattattgtttcaaaatggcaactagcaatgataatatgtgtaatgattacttgataagtttatattttaaatatttatatgtagactagtaatttgagtttcagttaac

SEQ ID NO: 256487 - DNA, 605 bp, Homo sapiens
atgtcaaattatacaaaaacctaaacctacactagcttcactgctcctcttgggactattgctgcataaaaataatatttaagtgtagggtgagaaagggaagagaaggtcttaatgagtcagtaaagagaaattgcttctgacttcacaaaaatgaatttatgacaartataagttaattgtgtttataattactgattctattcaattactatgaatattattattgatgctactgtggagaaaaccactagatgtagataaatattcagtattttctctaagaataataaaagctgaaattaatgcatgggaacacagcatagcagaataaagactacatttcccaacaccccttgctgataggtttggtcaagtatcaagttcttgccaatgaagtgtacgcagtaaagattggaggaatttctcagaaacttcctgaaaatttagcagacacatgcaaggcagaacatccacaaatgagagcccaaagcaggatgaaatgattggattcattgcaaatgttatattctaaataaaacacaggaatgaaatctgttttttattgttgttcttcttgttttgttttgaacttgatattggtt

SEQ ID NO: 256488 - DNA, 605 bp, Homo sapiens
atgtcaaattatacaaaaacctaaacctacactagcttcactgctcctcttgggactattgctgcataaaaataatatttaagtgtagggtgagaaagggaagagaaggtcttaatgagtcagtaaagagaaattgcttctgacttcacaaaaatgaatttatgacaagtrtaagttaattgtgtttataattactgattctattcaattactatgaatattattattgatgctactgtggagaaaaccactagatgtagataaatattcagtattttctctaagaataataaaagctgaaattaatgcatgggaacacagcatagcagaataaagactacatttcccaacaccccttgctgataggtttggtcaagtatcaagttcttgccaatgaagtgtacgcagtaaagattggaggaatttctcagaaacttcctgaaaatttagcagacacatgcaaggcagaacatccacaaatgagagcccaaagcaggatgaaatgattggattcattgcaaatgttatattctaaataaaacacaggaatgaaatctgttttttattgttgttcttcttgttttgttttgaacttgatattggtt

SEQ ID NO: 256489 - DNA, 631 bp, Homo sapiens
tggttacttgagaaactaatgccatcctgattttacaaacagcaaaacacacacagaatgatatggtataggctgggtgcggtggctcacayctgtaaacccaacactttgggaagccaagaggagcggatcacttgaggtcaagagttgacaccttctcccaaaggctttataatctaaccaggaaacactgtccatagttgtaactaaaaatcatgcgatacaaactcaatctagttctacatgattagaagatttaatcaatttaagctgaaatcattgtttagggctttattgtagatttgcagagatgaaagcaattaaaagcattcacaaataacagtaatataaatatgtaaccaactctgacatagttaaacagtgctagatcaacttagcgatgtgtaagatttagtttctaagcaatcatttaagagcaatttatcttatgttatttgttacacaccttagtatagatatgtctgcaatatgtcaataataatattacacagaaaaattcatgggaaagcaagcagtaaactgttagtctaaaatttataagtcaccaaaaggaatattttatttagaatatgaaattccagccatgtttaaatagttaacaccactgtca

SEQ ID NO: 256490 - DNA, 631 bp, Homo sapiens
tggttacttgagaaactaatgccatcctgattttacaaacagcaaaacacacacagaatgatatggtataggctgggtgcggtggctcacatctgtaaacccaacactttgggaagccaagaggagcggatcacttgaggtcaagagttgacaccttctcccaaaggctttataatctaaccaggaaacactgtccatagttgtaactaaaaatcatgcgatacaaactcaatctagttctacatgattagaagatttaatcaatttaagctgaaatcattgtttagggctttattgtagatttgcagagatgaaagcaattaaaagcattcacaaataacagtaatataaatatgtaaccaactctgacatagttaaacagtgctagatcaacttagcgatgtgtaagatttagtttctaagcaatcatttaagagcaatttatcttatgttatttgttacacaccttagtatagatatrtctgcaatatgtcaataataatattacacagaaaaattcatgggaaagcaagcagtaaactgttagtctaaaatttataagtcaccaaaaggaatattttatttagaatatgaaattccagccatgtttaaatagttaacaccactgtca

SEQ ID NO: 256491 - DNA, 593 bp, Homo sapiens
ataagtacctcagtggcttatgataggagaaagcaaagcaatcatttgtcagaagttatatgacctagaaagcctttgctatgaaaatgcaatttcacaagatgaccatgggcacaaatattagaaacctcttttgtgaacatgagttttgatagaaagaattcacccaagaaaataatttggtcattttcttgaatctgtgttatgataattgtcatgaattattctgggttatgtactaaagttgatttgaacaaaagctacaaacaaggaaatatatgggacccatagtgtaagcaatttttgaagaactaatttttctttgtattggtgctaaaataataatcattaataataataataamcaaaatatattcaaataatatatttatttttaatatttaaatcggctgtttttaagtttttaagtatacaggtattgaaccagaggccatgccgtagagaaaatttaggagagagaagctcaggtttctagatgtaaaaaggctaaattgcttagagttatcatagaatcactaaattcccaaagttttcttgttctcaagtaatatgatatgtataagaagttttga

SEQ ID NO: 256492 - DNA, 569 bp, Homo sapiens
tacatgtgatgtgtgtttcaaaaagggacgtatacagtgttaaggaagttttggactcacaggatacaagttaggtctcttgtatgtatttgtgtgtgtctgtgtgtgtgtgtgtgtgtgtgtgtattacttattatgatctatacatttcctgtaatataaagaataatttgacaacattttaataaatgaatacaaagctcaaagcctatctctccctacactttttttcatgaatattttttcttaaataaatttctgaagcaaacctctattgaatatcyttagcttttgccttttttcttttttcaattaaaaaatagctacttagcattcataaaccatatgtctaaggccttttaaacccccacaatcataaatagagaatgtttttacacagctgtatacattttcctgagttaaaaatccaccaaaagtctctaatgtgataccatagatccacaccacaaattaactttttaactataactatatattttttcttattctgtaggcaattttcatattgtctggttgcttattgaaacagttgcacaatatcttttctg

SEQ ID NO: 256493 - DNA, 569 bp, Homo sapiens
tacatgtgatgtgtgtttcaaaaagggacgtatacagtgttaaggaagttttggactcacaggatacaagttaggtctcttgtatgtatttgtgtgtgtctgtgtgtgtgtgtgtgtgtgtgtgtattacttattatgatctatacatttcctgtaatataaagaataatttgacaacattttaataaatgaatacaaagctcaaagcctatctctccctacactttttttcatgaatattttttcttaaataaatttctgaagcaaacctctattgaatatctttagcttttgccttttttcttttttcaattaaaaaatagctacttagcattcataaaccrtatgtctaaggccttttaaacccccacaatcataaatagagaatgtttttacacagctgtatacattttcctgagttaaaaatccaccaaaagtctctaatgtgataccatagatccacaccacaaattaactttttaactataactatatattttttcttattctgtaggcaattttcatattgtctggttgcttattgaaacagttgcacaatatcttttctg

SEQ ID NO: 256494 - DNA, 609 bp, Homo sapiens
cctgtagtttatcattatactcatcacttagatttataattagcattttagtaaacaatttatctcatctctttatgcatccatcaaatataagtatattggaaagaaaaattgagatattagtatattctcttgaaacacgtcactaattagttcactatgttttgtagtctttttttaagaccaaatttacttaagttggaatgaagaaattaacatttctattgacagggtgtgacaattacatacactgaactcaaactattatcaaagtaagaatgttgtatcatcctaaatagttctctcttgtccctacttagtcagtctccatcctcagtcagtaaggctaaccattttcatttttttgtgtgtgattatttttctgctatgaattagttttacctaatggaaatgcaaatacacaatatgtactttttgtttgtgattgcacttagcatatatttttgaaatttatttttgttgtkgcatgtataatgagctccttttaattgctcagtaaaattccactgtaaatacatatcactgtttacatatcaattctcttgttgattgacaacattatttttgctttgtgactattatgagtaa

SEQ ID NO: 256495 - DNA, 609 bp, Homo sapiens
cctgtagtttatcattatactcatcacttagatttataattagcattttagtaaacaatttatctcatctctttatgcatccatcaaatataagtatattggaaagaaaaattgagatattagtatattctcttgaaacacgtcactaattagttcactatgttttgtagtctttttttaagaccaaatttacttaagttggaatgaagaaattaacatttctattgacagggtgtgacaattacatacactgaactcaaactattatcaaagtaagaatgttgtatcatcctaaatagttctctcttgtccctacttagtcagtctccatcctcagtcagtaaggctaaccattttcatttttttgtgtgtgattatttttctgctatgaattagttttacctaatggaaatgcaaatacacaatatgtactttttgtttgtgattgcacttagcatatatttttgaaatttatttttgttgtggcaygtataatgagctccttttaattgctcagtaaaattccactgtaaatacatatcactgtttacatatcaattctcttgttgattgacaacattatttttgctttgtgactattatgagtaa

SEQ ID NO: 256496 - DNA, 470 bp, Homo sapiens
gaagtgtgataaaagtgaacatcattgtcttgttccagatcttggaggaaaggatttcaaattttttttcctgttcagtacgatattagccatggctttgtcatattggtctttattattatgaggtatttccttctattacactagtttgtcgaaaaaaatttttagtcacaaagggatgttgaattttatccaatgttttcacagcttctattgaaataattgtatgttttttgttcttaaacctsttaatgtgatttgtcatgtttattgatttgtgtatgttgaacaatccttatactcctggaatgaatcacacttgatcacagagaatgatatttttaatgtgctattgaattccatttgctattattttgttgagaatttctgcatctatgtttatcattgatattaatctgcagttttctttttttgttgcatcactatctggttttggcatcagggtaatg

SEQ ID NO: 256497 - DNA, 470 bp, Homo sapiens
gaagtgtgataaaagtgaacatcattgtcttgttccagatcttggaggaaaggatttcaaattttttttcctgttcagtacgatattagccatggctttgtcatattggtctttattattatgaggtatttccttctattacactagtttgtcgaaaaaaatttttagtcacaaagggatgttgaattttatccaatgttttcacagcttctattgaaataattgtatgttttttgttcttaaacctgttaatgtgatttgtcatgtttattgatttgtgtatgttgaacaatccttatactcctggaatgaatcacacttgatcacagagaatgatatttttaatgtgctattgaattccatttgctattattttgttgagaatttctrcatctatgtttatcattgatattaatctgcagttttctttttttgttgcatcactatctggttttggcatcagggtaatg

SEQ ID NO: 256498 - DNA, 635 bp, Homo sapiens
tatatatacaaatttagggatactcattttgaattgctatcttttcctgggaaattaaacattataaacattgtaaaataatctatttctagtaatgatttttatacaaaggtctattttatcatctattaaattgtgtgtgtgtgtgtgtgtgtgygcatatttgcatgctatataattattattattattcttagagacagtcggtcacctaggttggagtgcagtgacatgatcttggctcactgcaacctctgcctcccaggttcaagcaattctcctgcctcagctttccaggtagctgggatgataggcacacaccaccatgcccagttaatttttgtatttttagaagaaacggagtttcagcatgttggcaaagctggtgcggtccatctggttcagcctaccaaaatgctgggattacaggtatttgccactgtgcctacctgctatattatttttttatttccatttcggcatttctccatccttatatttcaaccagctgtgtcccttttaatctatatagcaatttttttatgcatttaacattctttatttgtaattggaacatttaggtgccttaactaaatttaatcactgatatacctttttccatcttttttgatgga

SEQ ID NO: 256499 - DNA, 542 bp, Homo sapiens
agtttccttggtgcaggtttgctggttgcaaaacctctatttttgttttaacattcctaaaactgtattttgttcttggtgtacattttcattaaatgttaaattctaggctagcagttttgttttttaagcactttaaaggtatcatggcattatctattggactcaaccgattacgttgtaaagtcatctgcaactctactcattgctcttataaatgtattatccacttattttatcactacttttgacatttttttctttgtccttatgctcactaatayatcatagtgttgtgttttaatgtggatttatttttgtttacaatttgcattaggtttctttattttgtggattcctgtcttatatcagattctgaaagtttttgacaaatatttcttgcaatgtttttcatcttcataatcactttcccctctttccaggactcaaattgcttatgttggtcatattcattgtgtataactttctaaccattactcatctaattacgacacggtagcagtcagtgagaaaaaaactgt

SEQ ID NO: 256500 - DNA, 558 bp, Homo sapiens
aatagacatttctcagatgaagacatacaaaggctaatgagtatatgaaaaaatgtcaattgggactgtattaaaccaaaaagcatctgcccagcaaagaccacaacaaaaaaagtgaagatgcaacctgttgcatggaagaaaatatttgcaaactattagtccaatacaaaactaatattcataatttataaggaactcaattaactcaacagtaatttttaaaaatctcattaaaaagtaaaaaaatgggcaaaggacatgaatagaaatttctcagaaacagacatacaaaggctaatgagtatatgaaaaagatgtcaaatgggactgtattaaaccaaaaagcatctgctcagcaaagaacaaaaccaaaagagtgaagagacaacctgttgcagggaagaaaatatttgccaactactaatccaacataaaactaatattcataatttataagaaactcaacaacaatttttaaaaaatctcactaaaaagtaaaaagtgggcraaggacatgaatagacatttatcataaacagacatacaaagaggata

SEQ ID NO: 256501 - DNA, 581 bp, Homo sapiens
cattgaatccataaataaattaaaactagtgaacctcatgatccagaaaaaatggcatgtttctcattctatttccatgttayttggtttcttctaagcagtgtttttcagtgtgaaggtcttgcatgtaatgatgaatttattccatgttaacagttttaaaagtaccgtattatatttttaagttagttttccaaattttgtgttttaatgtacaaattgctatttattttcgtatatttatcttacatctgtcaccttaataattcactcataagctctattagtattttgtgaattccagaagattttaattttggcatctgcaaatttagatatttttgcataatccttcctgatttttatattttaatctttttttttttgctttattgcaaaaaagaaaactcctagaacaattctgggctgcaacatttaactcccacagtgcaacaaaattaagtatgactagatataggcttgtcatatttttgcattgtctgtttaagaacattttcttatatatctagttgacaaataacttgtattataaatagattttgatcattataaaatgtttt

SEQ ID NO: 256502 - DNA, 581 bp, Homo sapiens
cattgaatccataaataaattaaaactagtgaacctcatgatccagaaaaaatggcatgtttctcattctatttccatgttacttggtttcttctaagcagtgtttttcagtgtgaaggtcttgcatgtaatgatgaatttattccatgttaacagttttaaaagtaccgtattatatttttaagttagttttccaaattttgtgttttaatgtacaaattgctatttattttygtatatttatcttacatctgtcaccttaataattcactcataagctctattagtattttgtgaattccagaagattttaattttggcatctgcaaatttagatatttttgcataatccttcctgatttttatattttaatctttttttttttgctttattgcaaaaaagaaaactcctagaacaattctgggctgcaacatttaactcccacagtgcaacaaaattaagtatgactagatataggcttgtcatatttttgcattgtctgtttaagaacattttcttatatatctagttgacaaataacttgtattataaatagattttgatcattataaaatgtttt

SEQ ID NO: 256503 - DNA, 581 bp, Homo sapiens
cattgaatccataaataaattaaaactagtgaacctcatgatccagaaaaaatggcatgtttctcattctatttccatgttacttggtttcttctaagcagtgtttttcagtgtgaaggtcttgcatgtaatgatgaatttattccatgttaacagttttaaaagtaccgtattatatttttaagttagttttccaaattttgtgttttaatgtacaaattgctatttattttcgtatrtttatcttacatctgtcaccttaataattcactcataagctctattagtattttgtgaattccagaagattttaattttggcatctgcaaatttagatatttttgcataatccttcctgatttttatattttaatctttttttttttgctttattgcaaaaaagaaaactcctagaacaattctgggctgcaacatttaactcccacagtgcaacaaaattaagtatgactagatataggcttgtcatatttttgcattgtctgtttaagaacattttcttatatatctagttgacaaataacttgtattataaatagattttgatcattataaaatgtttt

SEQ ID NO: 256504 - DNA, 581 bp, Homo sapiens
cattgaatccataaataaattaaaactagtgaacctcatgatccagaaaaaatggcatgtttctcattctatttccatgttacttggtttcttctaagcagtgtttttcagtgtgaaggtcttgcatgtaatgatgaatttattccatgttaacagttttaaaagtaccgtattatatttttaagttagttttccaaattttgtgttttaatgtacaaattgctatttattttcgtatatttatcttacatctgtcaccttaataattcactcataagctctattagtattttgtgaattccagaagattttaattttggcatctgcaaatttagatatttttgcatwatccttcctgatttttatattttaatctttttttttttgctttattgcaaaaaagaaaactcctagaacaattctgggctgcaacatttaactcccacagtgcaacaaaattaagtatgactagatataggcttgtcatatttttgcattgtctgtttaagaacattttcttatatatctagttgacaaataacttgtattataaatagattttgatcattataaaatgtttt

SEQ ID NO: 256505 - DNA, 583 bp, Homo sapiens
gtgaacatactgtttacatttcaaaataatatgtactctggcgttgctgggtaaatatagagctgtatgattatcatgtaggtcaaggtagctggctttactaatatttcatcagattattttaacaattgtagtgaaacagtgtaaaattctattattggtaaaatttctctccatatgaattccacatttttgcttcawatttcttgaaactcttttattagaccaaacagttttttgctttttttgtcactgtgattaattgatcttttcaatttttgagaaatggccatctttttctttagtaatacattttttctcaaagtctatattatctgatattaatgtgccactctatcatttgattattgacctttgcattgtaaaacattttcaagcacatattttcaaatgacaatattattattgttatattacacatcttttagatagcattgaggttgacctttgcttttcttttaaacttatgttgacaaactctatctttaggtggaatgttttgtccagtgatatttactgtactcagttgtgattattaatttatgtaatcatttggctaagt

SEQ ID NO: 256506 - DNA, 583 bp, Homo sapiens
gtgaacatactgtttacatttcaaaataatatgtactctggcgttgctgggtaaatatagagctgtatgattatcatgtaggtcaaggtagctggctttactaatatttcatcagattattttaacaattgtagtgaaacagtgtaaaattctattattggtaaaatttctctccatatgaattccacatttttgcttcatatttcttgaaactcttttattagaccaaacagttttttgctttttttgtcactgtgattaattgatcttttcaatttttgagaaatggccatctttttctttagtratacattttttctcaaagtctatattatctgatattaatgtgccactctatcatttgattattgacctttgcattgtaaaacattttcaagcacatattttcaaatgacaatattattattgttatattacacatcttttagatagcattgaggttgacctttgcttttcttttaaacttatgttgacaaactctatctttaggtggaatgttttgtccagtgatatttactgtactcagttgtgattattaatttatgtaatcatttggctaagt

SEQ ID NO: 256507 - DNA, 582 bp, Homo sapiens
attttatatttactcagatttttatgtcacgctcaatgtctttatttcttaataattatgcttagcattccattattggaacacagtcttctggtatccatattttctaataagcattggacattcattggatttgtttcccctatataacatgtcatcttttctcggttggatttcaaaatattcttactgtcttattttcagcagtttgactatggcatrtattatccttctcataattttctggtcttttagaatgtgtaaacatctacctttctccatattggggaaattttgagctgcgatatcttcaaacatatgttattattttccagtctctctgatctctccttctggcactccaattacagatatgtgagaacttttgatattgtctcacagatccctgaggttctattcattatttttaatctttttatctcctgtagagaaaatggtgaggcattctcagtggatgaagcagtttgtaacaaataaggcacagaaacacacaaatgaagattgcgtgtcaagggtacataaaataaataagcctctatgcctagtgcgtaggctgtatga

SEQ ID NO: 256508 - DNA, 582 bp, Homo sapiens
attttatatttactcagatttttatgtcacgctcaatgtctttatttcttaataattatgcttagcattccattattggaacacagtcttctggtatccatattttctaataagcattggacattcattggatttgtttcccctatataacatgtcatcttttctcggttggatttcaaaatattcttactgtcttattttcagcagtttgactatggcatatattatccttctcataattttctggtcttttagaatgtgtaaacatctacctttctccatattggggaaattttgagctgcgatatcttcaaacatatgttattattttccagtctctctgatctctccttctggcactccaattacagatatgtgagaacttttgatattgtctcacagatccctgagsttctattcattatttttaatctttttatctcctgtagagaaaatggtgaggcattctcagtggatgaagcagtttgtaacaaataaggcacagaaacacacaaatgaagattgcgtgtcaagggtacataaaataaataagcctctatgcctagtgcgtaggctgtatga

SEQ ID NO: 256509 - DNA, 579 bp, Homo sapiens
cttgctggtcttgagagaggtaagaactcattggcaagggccaaagaagatactttttcttggggtgatgatgatgttcaatattttgatagttatacatgtgtactcatttttcaaaactgatcaaatagcatacttaatatttgttcatttcactaattttacctccaccaataaaaataaatatataagtatataaaactgttcattgccatacacactgaagtgtttagaagtgaggtatactgaggctataactagggttgaaatgcatccaaaatwtgaagatagaataagtccatccacaaatatcacagatgaatgaatggagaaagggctagaaggatagttatatgttaaatcaaatatagcaaagtatttattgtagattatatgtggtgtatgcatggttctttcaaatatcctatatgtctaaaggtttttattataaatctttatggaaaacagggcgataagtatgttaaaataaaggatataattatttgaaagcattcagtaatccacacagttggtttctagaaagtccttacagtatcagttttgataatgctgtgaatg

SEQ ID NO: 256510 - DNA, 605 bp, Homo sapiens
ataaaactgttcattgccatacacactgaagtgtttagaagtgaggtatactgaggctataactagggttgaaatgcatccaaaatttgaagatagaataagtccatccacaaatatcacagatgaatgaatggagaaagggctagaaggatagttatatgttaaatcaaatatagcaaagtatttattgtagattatatgtggtgtatgcatggttctttcaaatatcctatatgtctaaaggtttttattataaatytttatggaaaacagggcgataagtatgttaaaataaaggatataattatttgaaagcattcagtaatccacacagttggtttctagaaagtccttacagtatcagttttgataatgctgtgaatgttttacccaccagtattgatttgaatcagtatctgaaaggcaagaaaattgtccttcatgctaataattgttaattgtgctaataaaggagactatcagtgtccctttgggtacaaaaatttctaataaatctggttttatgaaaatagaaacacttgacacatcgttctgaataacaaggcccttcattttgcattttacaataatgatgacaaaaatgt

SEQ ID NO: 256511 - DNA, 605 bp, Homo sapiens
ataaaactgttcattgccatacacactgaagtgtttagaagtgaggtatactgaggctataactagggttgaaatgcatccaaaatttgaagatagaataagtccatccacaaatatcacagatgaatgaatggagaaagggctagaaggatagttatatgttaaatcaaatatagcaaagtatttattgtagattatatgtggtgtatgcatggttctttcaaatatcctatatgtctaaaggtttttattataaatctttatggaaaacagggcgataagtatgttaaaataaaggatataattatttgaaagcattcagtaatccacacagttggtttcyagaaagtccttacagtatcagttttgataatgctgtgaatgttttacccaccagtattgatttgaatcagtatctgaaaggcaagaaaattgtccttcatgctaataattgttaattgtgctaataaaggagactatcagtgtccctttgggtacaaaaatttctaataaatctggttttatgaaaatagaaacacttgacacatcgttctgaataacaaggcccttcattttgcattttacaataatgatgacaaaaatgt

SEQ ID NO: 256512 - DNA, 605 bp, Homo sapiens
ataaaactgttcattgccatacacactgaagtgtttagaagtgaggtatactgaggctataactagggttgaaatgcatccaaaatttgaagatagaataagtccatccacaaatatcacagatgaatgaatggagaaagggctagaaggatagttatatgttaaatcaaatatagcaaagtatttattgtagattatatgtggtgtatgcatggttctttcaaatatcctatatgtctaaaggtttttattataaatctttatggaaaacagggcgataagtatgttaaaataaaggatataattatttgaaagcattcagtaatccacacagttggtttctagaaagtccttacagtatcagttttgataatgctgtgaatgttttacccaccagtattgatttgaatcagtatctgaaaggcaagaaaattgtccttcatgctaataattgttaattgtgctaataaaggagactatcagtgtccctttgggtacaaaaatttctaataaatctggttttatgaaaatagaaacacttgacacrtcgttctgaataacaaggcccttcattttgcattttacaataatgatgacaaaaatgt

SEQ ID NO: 256513 - DNA, 529 bp, Homo sapiens
aaaaccagctccattatacctttagaattatacgaatatacaatataagacttagaaaatcttcaatattgtctagatcattgcttgtcacattcttttctgtggaaccctaaatgcgtataaagaagccccagagtttgactgaggaaacccagcccccattaaaattagagaaaattgtctttaatctggttttttatgtttatttcaatctttagaaaataaagctattctttctcaaccaatagtcaactaaagaatccccaaagcccacctatgacttatacaagcccttyccacttccccttgaatatgttctgcctttttgtgccatatcaatgtatacctttcatgtactggtttctgtctttgcctagaactcctgtcttcctaaaatgtattaaaagaactgtaacccagttgccctgggcatgctttctctggtccatggtcattcacacttgctcagaataaacctctttgaaatattttacagagtttgaattttctgttaacaattaggttcatt

SEQ ID NO: 256514 - DNA, 498 bp, Homo sapiens
aatttatgttagtttctcaagtacatatgcttagtgggtgacaaagccagaatttgaaatcctcaaccaattcaggcttaaagactaaactaagtccttttcttcctacaccaaaagttaattcctttaatttcatttaattttgagataataattccactaaagtataactcttccttcatattttaaccatggacaattagaggcactcatcattcattcaacagaggawtattgaacaggtactctataccagcaactatgccaaacctggagctttatctgtgaatgagccagacagaagatcatctgtcaggtagctgaatttgggctcaagggggatgggagcaataaacaagaaaataaacaaaaataaaataaacaataaataaagaaattagtttcagtgctaaaaagcaaataaaagacaacatgacataaaatatcatctgtcaggtagctgaatttgggctaaaaggggatgggagcaataaacaa

SEQ ID NO: 256515 - DNA, 498 bp, Homo sapiens
aatttatgttagtttctcaagtacatatgcttagtgggtgacaaagccagaatttgaaatcctcaaccaattcaggcttaaagactaaactaagtccttttcttcctacaccaaaagttaattcctttaatttcatttaattttgagataataattccactaaagtataactcttccttcatattttaaccatggacaattagaggcactcatcattcattcaacagaggattattgaacaggtactctrtaccagcaactatgccaaacctggagctttatctgtgaatgagccagacagaagatcatctgtcaggtagctgaatttgggctcaagggggatgggagcaataaacaagaaaataaacaaaaataaaataaacaataaataaagaaattagtttcagtgctaaaaagcaaataaaagacaacatgacataaaatatcatctgtcaggtagctgaatttgggctaaaaggggatgggagcaataaacaa

SEQ ID NO: 256516 - DNA, 568 bp, Homo sapiens
gaaagccaccaggaggccaaagaatcagccgactactaacagccaataccagtgccagtgtatattgtcctgtggtacaaagayaggcatacacagctcacctctgccacagctgaggcctgaagactagcctacctgacatccccatccccagcacaactttaaaacagcctccactcttaaccagaccctagcacactgagaaattcatagagaccactaatgctatttacagccaacaaaatgatacagagattacactattgcacacacacagaatcaaagtcaagtaccccacctaaccatcagcacagataaatcttcaaagaaatgtcttcttttgagaagtatctgatcatgttctttgcccactttttgatgaggttgtttttgtttttttcttataaatttgtttaagttccttgtaaattctggatattagaccaaacactgcgtgttctcacgcataagtgggaggtgaacaatgagaacacataaacatagggagggaaacaacacacactggagcctgtcgggcagtaaggggagggagagcatcagtacaaat

SEQ ID NO: 256517 - DNA, 568 bp, Homo sapiens
gaaagccaccaggaggccaaagaatcagccgactactaacagccaataccagtgccagtgtatattgtcctgtggtacaaagacaggcatacacagctcacctctgccacagctgaggcctgaagactagcctacctgacatccccatccccagcacaactttaaaacagcctccactcttaaccagaccctagcacactgagaaattcatagagaccactaatgctatttacagccaacaaaatgatacagagattacactattgcacacacacagaatcaaagtcaagtaccccacctaaccatcagcacagataaatcttcaaagaaawgtcttcttttgagaagtatctgatcatgttctttgcccactttttgatgaggttgtttttgtttttttcttataaatttgtttaagttccttgtaaattctggatattagaccaaacactgcgtgttctcacgcataagtgggaggtgaacaatgagaacacataaacatagggagggaaacaacacacactggagcctgtcgggcagtaaggggagggagagcatcagtacaaat

SEQ ID NO: 256518 - DNA, 616 bp, Homo sapiens
ctaatagaatcaaagttgtttgttcaagtattaacatgtgatcttaattaagacagctagagttaagtctagcagttctgctcaaagtattcagatggaaatgttctcatttaactgaacgaaaagatggtagggtaaaaagctagaactaacagagacaaacactgctattttgtagttagagctttcctaagaataaaaccaacatataaaagagtagtcaagagaaagagattgtgttctaagtgcataattttaatcctttaagccagtacttctttcaaataaattagcccataaatttgtagttacatgggccaatgatatttttatttctttaagtcaaattaaacttgaattctgtcatttgccagcaaaagttctgaccaatataaaggcaaaataaacacagctatcataatgcttttaaattattctatgatgttaacctaaatgtataatcctccttaaaagctayatatgaatgatttattgaacctttattatgccaggcattcttatatgggttagcaataaaaaggtgaataaaatagtttttttaaattatggaaggtcattgcaagtcattaccatacctgaatttcatttttgaaag

SEQ ID NO: 256519 - DNA, 636 bp, Homo sapiens
aaagctatatatgaatgatttattgaacctttattatgccaggcattcttatatgggttagcaataaaaaggtgaataaaatagtttttttaaattatggaaggtcattgcaagtcattaccatacctgaatttcatttttgaaagggatgactcacactgcacttagatgagatcagaattagatataaatattttgaatgactatctgtttgttgcatgtagaaaatcttagtgaaggaaaataatggaagtagttcgaactaatggtcagaccgtgttaagtcactctgctgattcatctatagcattttattagtatattatatttataattaaataamattattaaataatattaatgacttttaattttaataatttaagtacttattactgattttaattggtttacatcaatttggtgctttccatgtcttcacaattctgctgtgcctgcctttcattcttttttttaaagaagtatgctgtgatttaccttttactttatatttatatttactttttaattgagacatgatatttgtacatatgtatagggtacatgtgatattttgatacatgcgtagactgtgtaatgatcaaatcagggtatttgcagtgtccatcaactcaa

SEQ ID NO: 256520 - DNA, 554 bp, Homo sapiens
cagaaaatatttttaagtgaataaataaatatcaagggaattatgatatattcaaggtatcctcactatatataaggttgtgatatatagaacaaataaaaatgtttaaatgatttaaagaagttaaacataccaggaagaaatattgaggaggctgctagaaatgtgaagttagaccaagagggtaggtatagttctagatgtggattcatgagtcatttgcagcraagtaataaggaagtagtgaaaaaggcaagaattgctttgaggcagactctgagaaaagtcaagaaacacagtaagaggcgagaactttggtcaaattaaaagttcatcttagcgtatatattcaggtgcagtgtttagtaaagttgataaaatatcttctgtaagtcaatactgaatgctaaaaatacctttattaattctttgcataagagatgtaaaaataatgataaatgcaagatacatatttatatctcttattatggatgagaaaatggaggctcagaatgataagtaatttccccaaggttataaaagacaaaagtaga

SEQ ID NO: 256521 - DNA, 554 bp, Homo sapiens
cagaaaatatttttaagtgaataaataaatatcaagggaattatgatatattcaaggtatcctcactatatataaggttgtgatatatagaacaaataaaaatgtttaaatgatttaaagaagttaaacataccaggaagaaatattgaggaggctgctagaaatgtgaagttagaccaagagggtaggtatagttctagatgtggattcatgagtcatttgcagcaaagtaataaggaagtagtgaaaaaggcaagaatygctttgaggcagactctgagaaaagtcaagaaacacagtaagaggcgagaactttggtcaaattaaaagttcatcttagcgtatatattcaggtgcagtgtttagtaaagttgataaaatatcttctgtaagtcaatactgaatgctaaaaatacctttattaattctttgcataagagatgtaaaaataatgataaatgcaagatacatatttatatctcttattatggatgagaaaatggaggctcagaatgataagtaatttccccaaggttataaaagacaaaagtaga

SEQ ID NO: 256522 - DNA, 554 bp, Homo sapiens
cagaaaatatttttaagtgaataaataaatatcaagggaattatgatatattcaaggtatcctcactatatataaggttgtgatatatagaacaaataaaaatgtttaaatgatttaaagaagttaaacataccaggaagaaatattgaggaggctgctagaaatgtgaagttagaccaagagggtaggtatagttctagatgtggattcatgagtcatttgcagcaaagtaataaggaagtagtgaaaaaggcaagaattgctttgaggcagacwctgagaaaagtcaagaaacacagtaagaggcgagaactttggtcaaattaaaagttcatcttagcgtatatattcaggtgcagtgtttagtaaagttgataaaatatcttctgtaagtcaatactgaatgctaaaaatacctttattaattctttgcataagagatgtaaaaataatgataaatgcaagatacatatttatatctcttattatggatgagaaaatggaggctcagaatgataagtaatttccccaaggttataaaagacaaaagtaga

SEQ ID NO: 256523 - DNA, 649 bp, Homo sapiens
gaatagctttgaccaaaatgctgatagtaatatggacaaaaagtccaggctaaggtggtctcagatggagatgaggtacttcttgggaactggagtaaacatagctcttgctacacaaagagactgatggcattttgcccctgccctagagatctgtggaactttgaacttcaaagagatgatttggggcatctgacggaagaaatttctaagcagcaaagtgtccaagaggaagcagagcattaaagtgtagaaaatttgcaggctttcaatgtgatagaaaagaaaaacccattttctggggagaaatttaagcccactgcagaaattgcgtaagtaatgaggagccaaatgttaatcaccaacacaatagacaaaatgtctcccgagcatgtcagagacctcgaggcagcccctcccatcacaggcccagaggctaggagggaaaacttgttttctcagcaccccagggccccctttgctctgtgcagcctcaggacttggtgctctgcatcccagctgcttctgctccagccctggctaaaaggggccaaggtacagctcagrccgttcttcaaaggttgcaagcccaaagcctctgcagcttccatgtggtgttgggcctgtgggtacacagaagtcaagaatt

SEQ ID NO: 256524 - DNA, 570 bp, Homo sapiens
agaggattccaggaaggaatgcagaatgtgacaaaaatgatgtaactgttacaaatgtgtgaaacaatctctctgagttgagttgggggaaaagtttctgatctgagtaactttgtaaatgagtggagcctgtaagcttaaaggcaaaagaaaatgtacacaagctctgcactctacttgataaaattgttttccccaaggttataggttaataattctgatactgctctacaggtacactgtaattgaactcctaagcaaatgaatgggggctgggggaatccaggtttctcactgttggagttagaagttacagataagcaagagaaaggtgctagaatgatcaatgaggtaatgaattagacatcagtatgaattcatatttagttaaatataaatacagattatttataaatatgtatataaaagaaatatttataaatatgtatatttatgagttattatacatacatatatttccttgctctgtcaaataacaayaacaatagtaatgagtacccctagcacccagactgtggtttctaataccattctcaaaaaaaaaaaaag

SEQ ID NO: 256525 - DNA, 589 bp, Homo sapiens
atacaacgccgtagtctcataagttcatacagaccaggagcacagacccctcaaggataagggtctgggttatcccacctgtcaagccacctagaccagcagaagtgagactggtgtgggagaggaaggacgtaataaatataccttatgtccccttgaccaactgcagcagtggagagtagttcttcctattaaccctcctctaaaaacatttgcaagaaattctggctaatttggggaaactgccttgatagagtagtttttactgtgagaaacaagttgatctcagtgaataaggtatagactctaatagatgcaactgragccctgtccaggtcctctttacttggcagtgctataaatattagctactaatagctaccagtgacacccttctcttgagaattgctcttggatcaggggatccacctcacctagaaatgcctcttgttgtgggtgacacacaaaaaaatgactgatacagggacacatgaggttgcccctttgcctagagatgggatgagcctgtgctgtcaattatcccctggcatgctcttaagcctgatgcttaagctgaaaccacgcttgt

SEQ ID NO: 256526 - DNA, 589 bp, Homo sapiens
atacaacgccgtagtctcataagttcatacagaccaggagcacagacccctcaaggataagggtctgggttatcccacctgtcaagccacctagaccagcagaagtgagactggtgtgggagaggaaggacgtaataaatataccttatgtccccttgaccaactgcagcagtggagagtagttcttcctattaaccctcctctaaaaacatttgcaagaaattctggctaatttggggaaactgccttgatagagtagtttttactgtgagaaacaagttgatctcagtgaataaggtatagactctaatagatgcaactgaagccctgtccaggtcctstttacttggcagtgctataaatattagctactaatagctaccagtgacacccttctcttgagaattgctcttggatcaggggatccacctcacctagaaatgcctcttgttgtgggtgacacacaaaaaaatgactgatacagggacacatgaggttgcccctttgcctagagatgggatgagcctgtgctgtcaattatcccctggcatgctcttaagcctgatgcttaagctgaaaccacgcttgt

SEQ ID NO: 256527 - DNA, 585 bp, Homo sapiens
accaaaaagaccacgaagcagccaccatcagggctcttgctataaagccgtggagttcaaggaaggcaaatgaaatgactaaacaatataaaaatatttgctgcagcctccacttccttaactggctgtgatgtctgagctgacagtcaaagtggccctcttgcacttcccatcccatgctcttacttctgtagcatcttagctgggcggggttctcaacctgggggcataccgtgcaggattggaatgcttgttagtttgtcttactgcatcgttacagtttacttctttctttttgagacaagagtctcgctctcgcccaggcgggagtgcagtggcgcgatctcggctcactgcaagctctgcctccygggttcacgccattctcctgcctcagcctcccgagtagctgggactacacgcgctcgccaccccgcccggctaattttcttttgtattttttagtagagacggggtttcaccgtgttagccaggatggtctcgatctcctgactttgtgatccaccggcctcggcctcccaaagtgctgggattacaggtgtgagccaccgcgcccggccatcg

SEQ ID NO: 256528 - DNA, 585 bp, Homo sapiens
accaaaaagaccacgaagcagccaccatcagggctcttgctataaagccgtggagttcaaggaaggcaaatgaaatgactaaacaatataaaaatatttgctgcagcctccacttccttaactggctgtgatgtctgagctgacagtcaaagtggccctcttgcacttcccatcccatgctcttacttctgtagcatcttagctgggcggggttctcaacctgggggcataccgtgcaggattggaatgcttgttagtttgtcttactgcatcgttacagtttacttctttctttttgagacaagagtctcgctctcgcccaggcgggagtgcagtggcgcgatctcggctcactgcaagctctgcctcccgggttcacgccattctcctgcctcagcctcccgagtagctgggactacacgcgcycgccaccccgcccggctaattttcttttgtattttttagtagagacggggtttcaccgtgttagccaggatggtctcgatctcctgactttgtgatccaccggcctcggcctcccaaagtgctgggattacaggtgtgagccaccgcgcccggccatcg

SEQ ID NO: 256529 - DNA, 584 bp, Homo sapiens
ctcctgcttttattctccaacccccagccccaaacagatctgattctagaaggyagacaatctttctctgttcatgtttctgatgcagtttcctttctatgtcccaatcttctcctcaccctgggatcagcattcatgaacaaactccaagaagacttgagccacttctttttatgttgctactccccatcccttcaggccacagttatgtgctttctttggagtgggataagaaggataacacagaaaggaaaaaaatttgaaaaatatattaaaataccctgccacagaaggaaggaaagcagcagaggaaagaggaagggattcttttttgaaattaaactaccctttcctccttttctgaatgaactggctatacagtgaaagcacaagggtttgtagcaacctgcaggatatattgatcttgttctttctctcaaggttatttatttacttattttaaggggcgtgacagagactgtagaaaaggagagggactttcctttcgtgtgcagaagatggagccatgtgtttgcaatcctcttctgtagtgtgtgtgtgtgtgtgtgtgattttttttagaa

SEQ ID NO: 256530 - DNA, 563 bp, Homo sapiens
cagagagaggggaaagagaagtgagaaaagatggcactaccaggaaagaacccctctccccttttgggttagaagtctgcctagagccacagggctttgccagagcccatcaagcgtgaacatcttcctctgtggaaatacactaagccaagagagtgattgaggtttatggtctcaggaattttagcctgaaaaatgggaggggaaagaaggtggaggaataaggaaaagtgaaacattatcaagactgaggtgatcagacaggtcctcytcatacttaccaggaaaattgtttttcacagcaactatttcattgactgtactggcaagagaaagaaaacacatctgaaatgtgcctgagatttactcttgtattgggttcttatagtctgcccttcagggtccatcctgcactcttaaactggagccattccaggcccactctgtccccctaatgcctagtcacctactgggcatctctgcacctcttctctccttctaaatctcttcacctcttcggggcttctcagattcatctacccattcctataggatgcagcaca

SEQ ID NO: 256531 - DNA, 609 bp, Homo sapiens
acctgcaaggttgggctttcctgcgaagggttaggggtggggactctgtggaagttcttggaaggcataacctgctcctagggaaatcaatgactctgttatttctcttccttgcaacttggtgggragaggtaatggccaggtcaatcctgagtctgatttattccagttctaccactcaggatttttgatgccaggttctatggtcttttcactatactgtactgtaagagaatgcaaggataaagctgggctggatgggtagaattgagagtcatctacaacaagacattcattaaagctgagagaatacataagtataaatcattggaatgcagaaaggcaaaaagaaggctgaacgcagacttaaaaaatacatacctctaggaatggagaagagagggcacagaaaggttaggctcagaggcagacagagggttcccatgaggagagtaaagtttctcactgtcaatcatcctggaaagaagcagaccctagggtagaagatgtaagctgaggagggaactgttttcctttcttgaggcttcctggtggctgcaacttagactttagttgggagagagagatttaagactacttcatctggag

SEQ ID NO: 256532 - DNA, 484 bp, Homo sapiens
taagtccccatgtccagacagcttctgaatagagaatamtatgatacgggatgatgaatagatttaccatgataggtaccattcatgtttcaacaggaaacatggtatcctcttccatcacctgctcacctggtccccaggtatgtctgtttggcaggaggtgtggtctgatggaggagctcttcctcaggcaggtggagctccccgacttgatgcattttcagcctggagttctttactctgcccttgcactgcagcctggactctccccaggttgtgtgtgaggcttgctctctacctgagagtaagtgggtaggggagaaggagggatggagtgaggtgggaagttgctcagggacctcaggcttggagtgtgtcaggttcccagcaaacatcaattcttcctgtacaccatgttactattccttcagagatcctgtcctcaggttctcccaccgccctaaaaaaacagaaaaaaaagttt

SEQ ID NO: 256533 - DNA, 589 bp, Homo sapiens
aagtgaaataaacacattattaagcaataataatgccattaacaaacttgcacttattgggactaagtactatcaataaataattgttaagttgcattgatatgttagtttgaattaatcaagactggaggaaaaatgtatccattcaagaactactgtagagaagaaagaaaagatttccaatgtgatcttctttggttcctcaggcccacagagtccctacactgcagacttccttagtgcttcagcctggagttcaccaagctcaaactccaagaatcttcctccattgtcaatcttcctgaatgcatgagcattagtctagctgttctgattgaatccagagggacacagatgtgttatctttgggccaccartacctttggtacttaagaggttcataaaaaaaatcacccagagacatcaaggatgatgcacaaattcagtgccaaattctactaagagatcaattaaaatgaaacctggaaggtgacaatgtgattgaagacatagaggtcattcatgtccacagtaagaacagtaaaggagagaaggggaagccagatgaaagggaataaagagtgaattg

SEQ ID NO: 256534 - DNA, 557 bp, Homo sapiens
accatgtaagagttttgtaattcccagtgtaaggtgggaagaaaagaaaaataaaattgagtactaggcaatggtgcacttcacaatttatcttattaagtactcaggacaactccatgaagtgaatgtaaatggtatgtcacaaggatacaattcatatatgtgtgtgtgtctatatatatatatatatatatatatatatatatatatatatatataatatgcctagacttttttttttttaccttaatagcttatagcaactttgctctctgaatccccaacccacatggattggggattgagtgtgaraaaatacttgacattaccaaatacaggcggcttaatcccttctgataatttttgtgggctcatacttgtcatccctgtccaaaggttaactcttccgcccttaatttaggttacaaatactcaggtattgaaaactacttgctttctctctccctcttctatctctactcttcttgtctttcacccatagaggaatgggagggttggtggcgaacttctgattctatcagggatggtatcctgac

SEQ ID NO: 256535 - DNA, 581 bp, Homo sapiens
agcatcttgctgatgtcacccccagatcatgaattagtttatcaaatttctttcttaacaatggcagctgaagaaaatgtcactaatttctggtgcccagaggaagccctaagagctggaaaaggaaagagtccctctcatgtggtgaccctgatgtttcctgagtttctgatcactgagggctggtgtttgcagacacagaccttgagccctgagttcaaaggcagttggtcaagcctcagacttggacttctgagaagattcctgctgagttacttctttcctgggtaaagaaggttgcatttttccccactcatccgctttctactctgcttctcagagagtctgccacaaatagtatgaggtggagagaaagttgaccttggggtactgttaggttgcgtctaggcaataaacactatttcaaaggtccacattcatttccagtgtgtccctcggtcccaaattrtgtttaagactgagcaggttgtgaggtgtgcttacccagcactgggcttggtcctgaaaccctcaagccacaccttctcagacctctgcttcctcatgctgaaaatgaccac

SEQ ID NO: 256536 - DNA, 544 bp, Homo sapiens
aggatggcttgagcccaggaggcagaggccgcagtaagctgagattgtaccactgccctgaagcctaggcaacagagcaagactctatctcaaaaaaaaaaaaaaaaaaaaaaggtaaaagttattttttaagagaaaaagaccactaacaccggtaaattctaaaacacatctggattggccagaagataagagattgatgaggctttacaatcagcagtactcattatggkacttcaatacttccaagaggaaaaacaagggtaaaggggaaggagtacgacagaagtactcaaacaaaacaaaacaaaaccggagtaaaaattaccgttaaattttaacttataacacaaatgacaaatgaacagaaaactgtgaggctgaacttgccaatatctacaactgttgaacttctgacttctgctcagcttcatacatgagaaaatttgcttagccgtcctctgtattacacaacataaacaggcaaagaaaaacaaaacacgaatgagggtagcttgcaaatttggaatcaaattgtgattct

SEQ ID NO: 256537 - DNA, 536 bp, Homo sapiens
gtagttttatgttaaagctaaaagtatatgtctttgatagtctccamaactaaactccaaagtttaacattaagtatctacttactgtaaattaatttgatttgttatctagaagtacatttttctcttaatttgtcctggaaaatatcccagaaaagcaaccccaaaattctgaaacctgtctcttcctcttcatcaactctgtcaccttctgatttttaatgtttcttgattggacaatttcaacagcatttacgagtctctgtgcctctgatctgtctcctcctggctacttccagtgaacccattcagctcacacacatgtgtgagaatatgcagctgtacaccaggaacacagaacagactaccatgggggctggctttcagccctggaatttactcaggccacctcctgtgcccatgtattccaatctgatatcctttgctcttgtttcttctgggtcactgactctagtgctgatggttctttgtggacatcctacgccagttcaacctcattatctctcccaggcaca

SEQ ID NO: 256538 - DNA, 489 bp, Homo sapiens
actgtaaccgcctaatgggtccacctggcccgttgcctagacagagccgatttatcaagacaggggaactgtaatgttgaaagagtrattacacagaaccagctgtgcaagagaccaaattttattattactcaaatcagtctccccgagcactcagggatcagagtttttaaaaataatttggcgagtatgggctcggatagtgaggagtgctgattggctgggttgaagatgaaattatagggggtcgaagtgagttctttcttgctgacttctgctcctgggtgggattgcagaactggttgagccagattatttgtaggtctgggtggtgtcatcatctgctgcataagaatgcagggtctgcaaaatatctcaagcactgatcttaggttttacaacagcgatgttattcccaggagcaatttggggaagttcagactcttgcagccagaggctgtatggcatggcataatttctaattttgtg

SEQ ID NO: 256539 - DNA, 496 bp, Homo sapiens
cacagcaggtgctcagtaaacatgcattcaatgaaaaaatccacaaaatggacagagaattattttgagaacaagccctcgggataccaggtgactgagttattaaatttatttgagatatgggccatgtcctttatttttatgattctgagtccagtgccagcactcaacaaacagttggttgattgaataaaataaaaaaaatagtagaatataggcatagcatgaagacaatgaaagaagaggtggttggttatctctgggtgatggcattagagatcatttacatttttgaaactttacgttccttaaaaaatttctataatgagcatgtttttctgctacaatttaaaataatatattgaaatactaaaatgaaccagatgttaaaggcagtaaaatccatctccattaacactycttcaaggtccatacagatgaagcatttgagcctcaatttaactgttggttggctatatatataaaaaagtcttaa

SEQ ID NO: 256540 - DNA, 515 bp, Homo sapiens
gcagttaagtcctaaatacagtggtatgttgccagaattatacaactagaaggcaactgtattagtcaggattccctatagggacagaactagaaggacagatgtataaataaaggggagtttattaaggagtattgactcacatgatcacaagatgaggtcccacaataggccatctgcaagctgaggagcaaagaagccagtccaagtcccaaagctgaagaacttggagtctgatgtttgatggcaggaagcgttcagcatgggagaaagatggaggccagactaarccagtctagtctttccatgctcttctgcctgcttttattctggctgcactggcagctgattagatggtgcccacccagattgaggttgagtctgcctttcctagtccactgactcaaatattaatctcctttggcaacaccctcacagacacacccaatagcaatacattgcatccttcaatccattcaagttgacactcaatattaaccatcacagcaaccaag

SEQ ID NO: 256541 - DNA, 381 bp, Homo sapiens
attttaatgaaataagattatgttaagttytaaaacatgctgatgctaattaaatggtagaaattatcatgactttttataactgttaagtgaatgaattgcaattttatcttgattcaccccattggttctatatttctgaaaatttaagatgggaacatttgtttacaacataaatttcaagcaaaatatttaaacacctcatttaagaaaaacaagcttttcacacatatatgtttataaacaattaaggtatttatgtaaatatccttatagtcatcaaaatggatcccaaaagatctcagcttcccaatagttggtttaatttgaattactataagactttaaaaataataaaagtacaattcctttaaatggctg

SEQ ID NO: 256542 - DNA, 578 bp, Homo sapiens
tgaaataaatgggaaaaagacaactccaaccacagtatgtgtgaaaggtttgcaaaaagatataatctgacatgttacaaaatatatgtattacatagtgccatataataattgaacttaatatggcaacaagrtaagactgtcttttgtttcagatattcatggatatgctgggaaaatgtggaagaagggcctagcaatatcctataaagctaattactttggggaattcaaataaagatgaaccaacaagaaaacagcagagacgaataatccctaattttccccaaatctcaaagtaggaaagtatctttctcaaccggaggtaatccccctccaactcccaggtttcaaagagtagcaactgtcaatctgcagaaattcagctaccacacataccctatgaatatattaagactttattatgattttgcagctaaattgcatatgatcttgaactcaatatattgttactatacatggacattttagagcactgaatctgttcaaggaatttgaagatcactccattggttttgaaactcctgcagcagaataaccctctgcatgtgcacaga

SEQ ID NO: 256543 - DNA, 578 bp, Homo sapiens
tgaaataaatgggaaaaagacaactccaaccacagtatgtgtgaaaggtttgcaaaaagatataatctgacatgttacaaaatatatgtattacatagtgccatataataattgaacttaatatggcaacaagataagactgtcttttgtttcagatattcatggatatgctgggaaaatgtggaagaagggcctagcaatatcctataaagctaattactttggggaattcaaataaagatgaaccaacaagaaaacagcagagacgaataatccctaattttccccaaatctcaaagtaggaaagtatctttctcaaccggaggtaatccccctccaactcccaggtttcaaagagtagcaactgtcaatctgcagaaattcagctaccacacataccctatgaatatattaagactttattatgattttgcagctaaattgyatatgatcttgaactcaatatattgttactatacatggacattttagagcactgaatctgttcaaggaatttgaagatcactccattggttttgaaactcctgcagcagaataaccctctgcatgtgcacaga

SEQ ID NO: 256544 - DNA, 596 bp, Homo sapiens
agttaaggtcttgcttatacaggcaaaaaacaaatgtaacaggattacaacattttccatagaaggctggtttatgagttacagcaattagattaggtacagcttgtttccttttcattttccaattaaagaaactatattcaacgtttatcccagacaatgtgatagtcatgaggtctttgtgtaggagaattaagaggaaagttaatctataatgaatatcaacagtgaaaagagaatgggtctaggtcttcccttgtgccctttagtcttttacattttacaaaacaatgtaggttaaaaaaaaaaaagcctaatctgtaatcagagaacaaagataacagctgcctaggttacaggtgyctgtcatgtgactcaggtcccataatcacattcctttaaggctcaaagtaacttaaagttccaacagcttttgaattactttttttttacaagtcaactttgccaatagccaacagtgtgaccttgactgccacatcaccatgacatattcactgtgtgtctaactccttcactagattataattccctaagggcagaagacatgttttatttctttttcatctttaccagtt

SEQ ID NO: 256545 - DNA, 596 bp, Homo sapiens
agttaaggtcttgcttatacaggcaaaaaacaaatgtaacaggattacaacattttccatagaaggctggtttatgagttacagcaattagattaggtacagcttgtttccttttcattttccaattaaagaaactatattcaacgtttatcccagacaatgtgatagtcatgaggtctttgtgtaggagaattaagaggaaagttaatctataatgaatatcaacagtgaaaagagaatgggtctaggtcttcccttgtgccctttagtcttttacattttacaaaacaatgtaggttaaaaaaaaaaaagcctaatctgtaatcagagaacaaagataacagctgcctaggttacaggtgcctgtcatgtgactcaggtcccataatcacattcctttaaggctcaaagtaacttraagttccaacagcttttgaattactttttttttacaagtcaactttgccaatagccaacagtgtgaccttgactgccacatcaccatgacatattcactgtgtgtctaactccttcactagattataattccctaagggcagaagacatgttttatttctttttcatctttaccagtt

SEQ ID NO: 256546 - DNA, 622 bp, Homo sapiens
gtgtaaagtatatctgaatagtctgttttcacatggctgataaagatatacctgagactgggcaatttacaaaagaaagaggtttagtggacttacagttgcatgtagctagggaggcctcacartcatggcagaaggtgaaaggcatgtctcatgtggcagcagacaagagaagagaacttctgcaaggaaactcccctttataaaactatcagatctcatgagacgtattcattatcacaagaacagcatgggaaagacctgcccctatgatttaattacctcccactggctccctcccacaacaggtgggaattcaagatgagatttgggtggggacacagccaaaccatttcactaatcaaggtgaaattatacagtattaataataaattcagcagaggggagagaataagacaaaccaacttgtctccaaatttagtcaaagatatatttaagagttagtgaaaatttgactcacttaaaaatacttctaatggggaatggtgtataaattgtctggcaaggagccagtaaaaggaagtggttctgtggtccttggattttcttccctggggttcatccccttcctactccttaaaatcttcagaatagatttata

SEQ ID NO: 256547 - DNA, 641 bp, Homo sapiens
actatggctgtgtagtatattttgaaatgcagtagtgtgatgcctccagctttattccttttgctcagaattactttgactattcagggtcttttgtggttccatagaaattttaggactgtttactatatttttgtgaagaatgtcattggtatatrtattagtctgttctcacattgctataaagaactacctgagactgggtaatttataaagaaaagaggtttaattggctcacagttccacaggatggtgaagcctcagggaacttacaatcatagtggaaggcaagggggaaggagacacatcctacatggctggaccaggaggaagagagtgaagggggaagtgctacacaccttcaaaccaccagacctcctgagaattcactcactgtcacaagaacaagaagtgagaagtctgcccccatgatccaatcacctcccaccaggcccctcctccaacattggggattactacattttgacaactacattttgacatgagagtagggcaggaacacaaatccaaaccatatccttatgcctgtggcccctcccaaatctcatgtccttctcacattgcaaaatacaatcatcccttctcaacagtcccccaagtcttaactcatttcagcatta

SEQ ID NO: 256548 - DNA, 488 bp, Homo sapiens
acaattcaacgtgagagttggacaggaacacaaatcccaaccatatcagtatgttgatagggattgcaatgaatctgtagatcactttcggtaatayggtaattttcacaatattagttattctaatccatgaacatagaatgtcttcttgtttgtctgtgtgtgtgtatcctcttcaattttttcatcagtgtttaatagtttttcttgcagagacctttatctatttggttaattaattcctaggtattttaaaattttttacaactatattataaatgggattgttttcttgacttttttttctcttagtttgttgttggcatatataaacacaacacaactaatttttgtatgttgattttgtatcccacaactttgccgaatttgtttatcaggtatgagtttttagtggaacttctaaggtttctgtatgtaagattatgtcattggcaaacagggacaattttacttcaagacccaaaatt

SEQ ID NO: 256549 - DNA, 435 bp, Homo sapiens
tgttttattttgggtggcaatgtgcccagctaaatcttgaggttctgttattagggaaatttattaaggacagaaacaagatacaactagcattctctgtcaaaacagcagtttagattgatagtacaagacatacgcctggaaggctgaaagcctaggtttaagtcctgaaacaacatttatgtagctggcttaactatcaattaactgggtgatcttggcaatgatattcagttcagtaagctgcagtttcctcataacagagtgcctatttcatcggattactggaaggattaaaagtgctaacccaaataatctcacatagttcttgacactcagcatgtactcagtaatgtaagctattaytgtcagtaattaggaacatcagttcctcattagagcctccttctaggaaaaatactaaacagcttgagg

SEQ ID NO: 256550 - DNA, 521 bp, Homo sapiens
gtaagccatttcccaggagaccatagtattgctccccagccttcaagacatggcacacacatggtaaagggatgagactgctaagggcttggagataccttcccagagctccttctgcccagcccactccaaggtgtgtgtgaggggaggggtggatcaatatctcagcaagccttaacccaatctcagtgtcctgtctaggaagctcaagtctaggaaatgaggataggagagaaaagaattttggggtccaaatataccctgagcagtattgtgtcacccctcttactttatgtcagtgtcatcagtgcccatacaagtagcacagagtgatacttagagaaaaattagtgtgcagcatcrtgcagtggctatgaaaaagttggaagtcacacagaacagatttgagttcaaaaccccatactggggttgtataccttaggcaaatttgtatcttagaacagttatgtaacctgttaattccccatctggaaaatggaccttctgccttagatgattgc

SEQ ID NO: 256551 - DNA, 616 bp, Homo sapiens
tcaaaccgtaagtagagaaggaatttgtttttggagtggggaatagattgagctctattactgagccctgtagctggcccaagacaggacaaagagacaaaacatattctctcctcaccctctgagaaatggctttcattctgccagtccagcagcagagggagagattctgaacacctccccaggggctttccattgggaatgcacaattggccatgctgattccttgtttttttttctgagtaatgttctcttgatgttgaaattcatctgkatttcatctgtgtcatcttatggatttcaatttagaagcaaatggaaaatacaataggattcttattatatagttttaaatatcactgagcaacctcctactctctgcctggccctactctgagtctctttggaaggcaagattttatttctctgtgggtgttggaaactcatgggaacaaaagccaaggagctcccacctgcagtccatggtgaatcagtagaggggagccattctgttttcttaccccgtatttgtaactcttctcacagaagacagaacatatgccagcatgtccactctctctgaaggactggagaggaatcttgatttcattttatt

SEQ ID NO: 256552 - DNA, 264 bp, Homo sapiens
catgatttcatgtaattatctcaacaacccaacgaagcaagtgcaacttttatctgcaktttgaagatgaagaagttgaggctccatagcaatttcccaaattcccacatctagtaaggacattggatgagagtaaggggctgtggagaagagaaaaaagggtaaagaagaaggaacccagcatctctggaagtgctgggtgatctcaggcatctgtaagaaggcattgctgctagattttaaagttaaatggacctagcttag

SEQ ID NO: 256553 - DNA, 561 bp, Homo sapiens
tgacacatgttaaacaattaataaatgttagcratagtaataattgtaattactaagtggaagagctacgatgtgatcttgggactgttgttctccctaataacttatcatgaccctattctctgtgattgtatctacagctgtaactctggcagtagcagagcctctagggctcagagtttgatttgcgtctctgcagacggtatctatttagttttgtgataggtgaatcttaatgattccagtaaatgctatattttagaaactggatctttggctagcagtcagaaacttgaaagggatcttattcacctttctgcatccataatggtagaaacttgccagtcaccattaagacatcttaatgagtgagttgggaggatctcaacccgattctcacttgtcgggttgctttttttgttccctgtcaagaagtttgaaattccatggttatttatctgcgtgggtagtaaaactttggtactctcccatatagtcttttgggcttttaagatgaacatcaatcagatttataggccataaagactcatgcgttcattc

SEQ ID NO: 256554 - DNA, 561 bp, Homo sapiens
tgacacatgttaaacaattaataaatgttagcgatagtaataattgtaattactaagtggaagagctacgatgtgatcttgggactgttgttctccctaataacttatcatgaccctattctctgtgattgtatctacagctgtaactctggcagtagcagagcctctagggctcagagtttgatttgcrtctctgcagacggtatctatttagttttgtgataggtgaatcttaatgattccagtaaatgctatattttagaaactggatctttggctagcagtcagaaacttgaaagggatcttattcacctttctgcatccataatggtagaaacttgccagtcaccattaagacatcttaatgagtgagttgggaggatctcaacccgattctcacttgtcgggttgctttttttgttccctgtcaagaagtttgaaattccatggttatttatctgcgtgggtagtaaaactttggtactctcccatatagtcttttgggcttttaagatgaacatcaatcagatttataggccataaagactcatgcgttcattc

SEQ ID NO: 256555 - DNA, 654 bp, Homo sapiens
gatctctagggttctaggatgtttcttagtggccagaacagatggccatgaggttgaacagaaagaactattttaycttcccccgactcaggaatcactcagaacagttacacctttattaaatttacaaattgagattatgtgctgaattctccaggacaaaagggttctgttgctaaaaagtttaaaaaccactaaatcataatttatacattcatttctagttttaaaatggcatatagattcatgttaattacactgtggttgacaaaactcatgtgggcccccggttgccctttctgccacaaatacacttgtagtatgattttcctttgtctgttgggcatggttgattttaaccattgctcaaaatggtaaagacatcataattacaaagataattgttatccttgtaaatctatcaggttatttaacatttaaaacctgaccagatatttcaggattattcatctctcttttaggatgagggaactaaaaaatagggaaaactacttcccacatttatatttctaatgaattgtggagcttaaacatgaacaaaaccaggatcctgcatttgtttatattgagtctttgaaattgccatagttcatgctcaacaaaatttgtatttctatactacttctggttttg

SEQ ID NO: 256556 - DNA, 587 bp, Homo sapiens
aactttggcggttaatttgttagggtaacaaagtaggtatcatctactattccaatttcttcgttgtaccagaaatggaaagaagtaccactaacctttgccaaatattactgacaaggtcagaaatatttttctcagggagaaaaattgcaaaaaggctgacaattataaagtgtcaaaacactggcatcaaaatatcctgctttatccagttacacaccatttcccagagagcaagtttgaaccaagaaacattagcatcaccatggaccacctttgataactggggcttaaatgcctctttcrtcataaatgatctcttatttataaaggaatcactaaccactatcaacaataaaaaaccacacagaaaaaccacaagactgtatcatagagaattttaaaatagttatccatgagaataaaagaaaggaggctaacaaagtctgctacttcctaaacttacactgagacatgcaagaggcaaagggcttctagttctggccaagacttgctggacataagagggaggataaactgaccacttgcctggaatgatacaggggaagagaatgcacaggcttcct

SEQ ID NO: 256557 - DNA, 519 bp, Homo sapiens
gaagttggataatatatttgctttatctgagtctcagttttatcaacagtaaaatggagataaggccttactgagcaggatttgttggcatttgactgcagggcctttacatgatgcctggaacacagaagacacccaattctctactcccccttcctatacaacataagtaataaatcatttcccaaatctgtggagggaaattacatcagttatgtggtggttatcatcaaatagaaattacayatattcaatgtctttcctatgctgcatgcgtcctcaactttttcccaacacatacgagtaaaggttcttatggcaaatgacagaaactgatttttaagcactggggaatttatcggaagagtttcaggaattcagaagatgaatctatggaaggctctaagatcaaggcctaaaaaccaggcaggatctaggaatgctgcagagctcaagagcaggattgcccagcaagagttacacaacagatacaagctggtacacaggacacatttgcca

SEQ ID NO: 256558 - DNA, 443 bp, Homo sapiens
aggatctccttttattagtgaagaaaatttgttccagaagcctactagatgttcccttatgccttattaaccagarccaagccttgtagccatttctagttgcaaagggggctgaaaaagagactatttggcaaaggagaatgaagttgtcatgattgatttagagcaatcatgacttatcttttggagctgggcacattgaagcctgaacaaaatactttttttttttttttaaatctacgaagactttggggcagaaggcacaatggctataggacaggaaactaatagtgtcagttacaggtagggattgtgcctttctttcaaaaaatatctaagcctgacccaacaatctccataaatattggaataaataaaacccctttagcagataagctgagggccagagggcagaaagtatatgactttcctaagactacaca

SEQ ID NO: 256559 - DNA, 647 bp, Homo sapiens
ttaaaatataaaataatttaaatattacaaataaagttgaattctactttgtccatttctcagaatgcctctacttcccttcatggaggcattcactatcttgattttggtgtgatttaatgctttcacaatatatccatataaaaaaatgtagtcctagcttgtatttttaaaaattacatagtttgtttcatagtgtgtggtttttcaactatcttttctcactmaacattattttagatgttttcatgatgataaatcatgatccagtttgttcattttctcttgctgcattataaaaatttaacatattttatgcatctcaacactaataattagacatttgggttgtttccaaatgtttgttttgatattacaaacaataatgtgatgaacatctttgtgtcttggcacaatgtggacaaatttctctagaataactaatagaatgtgtcagaattgacactgtgccagtctgggcctaagaaagcaaggcaagctctacttttgctctttagaggaagccagtttctatgtaagagatccaagtactctgagactgccatgctgtgaggaagtacaagctagccatgtggagaggctatgaggagagagagaaagacagagagagacatccttccagcctc

SEQ ID NO: 256560 - DNA, 647 bp, Homo sapiens
ttaaaatataaaataatttaaatattacaaataaagttgaattctactttgtccatttctcagaatgcctctacttcccttcatggaggcattcactatcttgattttggtgtgatttaatgctttcacaatatatccatataaaaaaatgtagtcctagcttgtatttttaaaaattacatagtttgtttcatagtgtgtggtttttcaactatcttttctcactaaacattattttagatgttttcatgatgataaatcatgatccagtttgttcattttctcttgctgcattataaaaatttaacatattttatgcatctcaacactaataattagacatttgggttgtttccaaatgtttgttttgatattacaaacaataatgtgatgaacatctttgtgtcttggcacaatgtggacaaatttctctagaataactaatagaatgtgtcagaattgacactgtgccagtctgggcctaagaaagcaaggcaagctctacttttgctctttagaggaagccagtttctatgtaagagatccargtactctgagactgccatgctgtgaggaagtacaagctagccatgtggagaggctatgaggagagagagaaagacagagagagacatccttccagcctc

SEQ ID NO: 256561 - DNA, 523 bp, Homo sapiens
agcacttcatacatgtatagcataggaaatacactacgcatagtagcttttgccattgctatcattcaagattcttctgccttcagtaaattgaatggaaactcaacacagtcagccctccatatatgtgggtttcacatccatgaattcaactagttatggattgaaaatattcaaagaaataccacaaacttccaaaaagcaaaacttaaattggccacatgctgagtaccacattgagtccacatgaatgaagtaatgttaagcattgtattaggtattataagtaatccagagatgatttaaagaacacaggagaatgtgcatagtttatacacatagtctatgagatttaatataaggtacttargcatccatggattttggtatctggaggggtcctggaaccaatttcccacagatactgaaggatgactgtattatgacaactgggaagcttgttaaacccaatcataaaggcttcagttttcttacctggaaaatgagatagtagtattaccta

SEQ ID NO: 256562 - DNA, 533 bp, Homo sapiens
tactttggcgcaagctgacagaggcagtaccaacagaattgattatcaatacatagtgtttgtatttacactaagtgaataattagcttgtattgattggtttgttgatgggtataagaaagattgtgaatatcatcctcttaataatctgatgggttaaagtcaggcattgctgccagcatctgaaagcaggaggaaccaacctcaaagtataaaagttaacgaggataaacccacaggggatcagaaacctcacagatcatcctaaggagtatcatcacaatgagaacagttaagaactgctagctatgtaacatagttttacaaaataaasgcagctgttacatatttttaaactgtaacattttatttactgtttttcacttctaaaactgagaattattaggtagtacagaaatgtcactaaaacatttacacactgttctaccaactattataagtgaatagccttataactcaacaaagataaaaataatgcaactaaaataactccattctcctgccctttaatc

SEQ ID NO: 256563 - DNA, 648 bp, Homo sapiens
tagttatgtctcaacaaaggtaagtttagaagtacagataaaaattatagaaaatgaaaatttatcaaataatatttaatcaagttataaaataagattgtgaaagctgagcatcttaaagtgtatgttaatatagatatttaaattaatctgtacagattagaaactcaaaggaatctttctataaaaataacactagaacccagataaattatcataaacaaacttttcaaataaaatgttggtctctcaaccctataacggtaatatccaaaagtaacaaaacaaaacaaaatgatcaaccaaccaccaccatcactaccaccacaacaaatattgaaactaataagcaaatgcaaagtcaaaaattgacttatgagtaaacgtcaatattcacaccaaaggaaaaaagtagttctttttgtctctctaagagaggggaatggggtcataatacttttgtattagttctgcatacaataatatataaaccaaagtaagtccaaatagcattccgcagctcttgtttgatgcaaataactgtctctagagtaaactgttcaaaatttgagctcttaggatgccaaattttgagytactactcatcaattgttatgtatgcaaggacacaaaacaacatgaatggtt

SEQ ID NO: 256564 - DNA, 600 bp, Homo sapiens
ggatttgtctatttctcctgtcaattctatttgtttttttgtgggattttttttttgcttcaaatattttaatgctctgtttttaaatacaaacatcgtaaaacttttaagttcatcttcttggataattgaccctttatmagtataaaatgcctctcattcttgatagtttttctagttatgaagttggcttcatctgaaattaatataactattccagatttcttttgattagcgttatcattatgtgattttctccatctcttcacttttaaccttagtctttatattgtccatatgctgtaatcttccagtaaattcttactagtatcactttaaacaaacaattgtcttcaaataaatttagaataagaaacataaactaatttattttaccttcatttattctttctctgaaaatcttactttctttatgtagatctgagttttcattctgggtttcatttttattctccctggagaacttttttatttttaacatttattgcagggaaagtctgctaacaataaatttctacagtttttttgttttttatctttgtaagtctttatttctttgtcacttttgaagaatcattt

SEQ ID NO: 256565 - DNA, 600 bp, Homo sapiens
ggatttgtctatttctcctgtcaattctatttgtttttttgtgggattttttttttgcttcaaatattttaatgctctgtttttaaatacaaacatcgtaaaacttttaagttcatcttcttggataattgaccctttataagtataaaatgcctctcattcttgatagtttttctagttatgaagttggcttcatctgaaattaatataactattccagatttcttttgattagcgttatcattatgtgwttttctccatctcttcacttttaaccttagtctttatattgtccatatgctgtaatcttccagtaaattcttactagtatcactttaaacaaacaattgtcttcaaataaatttagaataagaaacataaactaatttattttaccttcatttattctttctctgaaaatcttactttctttatgtagatctgagttttcattctgggtttcatttttattctccctggagaacttttttatttttaacatttattgcagggaaagtctgctaacaataaatttctacagtttttttgttttttatctttgtaagtctttatttctttgtcacttttgaagaatcattt

SEQ ID NO: 256566 - DNA, 600 bp, Homo sapiens
ggatttgtctatttctcctgtcaattctatttgtttttttgtgggattttttttttgcttcaaatattttaatgctctgtttttaaatacaaacatcgtaaaacttttaagttcatcttcttggataattgaccctttataagtataaaatgcctctcattcttgatagtttttctagttatgaagttggcttcatctgaaattaatataactattccagatttcttttgattagcgttatcattatgtgattttctccatctcttcacttttaaccttagtctttatattgtccatatgctgtaatcttccagtaaattcttactagtatcactttaaacaaacaattgtcttcaaataaatttagaataagaaacataaactaatttattttaccttcatttattctttctctgaaaatcttrctttctttatgtagatctgagttttcattctgggtttcatttttattctccctggagaacttttttatttttaacatttattgcagggaaagtctgctaacaataaatttctacagtttttttgttttttatctttgtaagtctttatttctttgtcacttttgaagaatcattt

SEQ ID NO: 256567 - DNA, 208 bp, Homo sapiens
aacagtaaactaggaatcaggccccttcattcayatgttcattcactcaataaatatttacccagtgctttctatctgtcaggcattgtgcgaggtggtactactaacacatcctgtgacattgtgccaatcattttatcttcctgactttcagtttttataaaagcaaaaccaagagaattatatctgcccacagtgcttattgtga

SEQ ID NO: 256568 - DNA, 504 bp, Homo sapiens
accacaacacttctacagcaagtgcacagaactaggctgaggctgaaatggctaaattgacagaagtaggcttcagaaggtgggtaataataaatttcactgagctaaaggagcatgttctaactcaataaaaaatttaagaatcaaggcaaaaccaaacaggagctaataaccagaatagccagtttagagaggagcataactggcctaatagagttgaaaaacacaacatgagaacttcacaattcaatcacatgtatcaatatcrgaatagaccaacagaggaaagaatctcagagcttgaagactatctttctggaataagacaggcagtcaagaacaaaaaaaatagaatgaaaaggaatgaacaaaacttccaagatatgtgatgtatagagactgaacctatgattgattggggtacctgaaacagataggaagcatgaaaccaagctggaaaacatacttcaggatatcatccaggagaacatctccaacatagca

SEQ ID NO: 256569 - DNA, 504 bp, Homo sapiens
accacaacacttctacagcaagtgcacagaactaggctgaggctgaaatggctaaattgacagaagtaggcttcagaaggtgggtaataataaatttcactgagctaaaggagcatgttctaactcaataaaaaatttaagaatcaaggcaaaaccaaacaggagctaataaccagaatagccagtttagagaggagcataactggcctaatagagttgaaaaacacaacatgagaacttcacaattcaatcacatgtatcaatatcggaatagaccaacagaggaaagaatctcagagcttgaagactatctttctgraataagacaggcagtcaagaacaaaaaaaatagaatgaaaaggaatgaacaaaacttccaagatatgtgatgtatagagactgaacctatgattgattggggtacctgaaacagataggaagcatgaaaccaagctggaaaacatacttcaggatatcatccaggagaacatctccaacatagca

SEQ ID NO: 256570 - DNA, 593 bp, Homo sapiens
gctgctgagttaaatcctctttatactgtagtagaacaaatctttattttaggggaagaactaatgacatagtagatcattggcaaaataaataccaagccatgcggtaattagtaaaatgactattgawaataacaacgtgaattaatatttggtgaattttataaacagagcatttcaaaagaaagaaagtgtagcatcctttggagacaaaataatacctcaaagattactgttctaaaataataccctcagaaatgcctgagtctaaacaaaatagtacttgggactattaaaaaggtatacaaacaactcaaaattcatccatctcagcggtgctcacatcatctctgtgagatcaatagaaatggagaattttctctacattttggaaacagaaaaactgaaaccacctaaagaattacggctgctatggagattagaaagagctagagtttttttctaaaatattattgtccttattaaaaacaaatacacacacactagaaagaatctctgttatttgatatgataattcacattcatttgcagatacataattgccagtttggattgaatacatgtaagtaagg

SEQ ID NO: 256571 - DNA, 524 bp, Homo sapiens
gtcttagggtatgatactataccttggatctgcaaagcattaaaagggaggatattgtcagatatatgatctagccatggacacaggccagatgcattcgtaactgaaagagaaggccctcttgtctggtccactcctaacttgtttgattttgctgctatctatcagcaccttccttactaatgcaggatggctcagttaatttctttctttggtyttccagttatgctgttgagagcttgctcatggccatatataagaggtgacaacaatggcttttcagaaacaataccaagagagcaatagaaacactttatttacccacagtgtaaaatgggctgcaactaattatttacagatggggcaagctttgataaatagattgactgattaatgatttgggttatatttctgacattaactcaaactggacttgggcttagtttcaaaataaaataagcctatctagaccaacctgttggtgcgaactttaaaatggccagagacaatcagatagtgcttta

SEQ ID NO: 256572 - DNA, 549 bp, Homo sapiens
gagaaaaactcagataatttacttaaattcacttgttcttgaagcctagccttacttatctccctgggttttaggagaaattttagtatcctcattattcattgccttttttttcttttcttaagctactttgtcttttacagtaaaaaaaagctaactaatttaacactttgtaggattttgttcatggatttactgctatctttaattggatgtatcacttaagaatatttggttctcaacaaggaacattaatgatcctagtacaaaatcaggatgctgaattatatgagttctgtcatcctatgctgttctaacctataagtctatgtctctattcaaggcagattttggttttagttaaaggggaatacaaagacaagtaataaatcatttmtgtccttacagatgagtggtaagacatctacacaaatagctataaaaatccaccaactcttgatgccaactgtaagagaagctaaaaaacagaatgtgcctgctacattctggcatcactaagtaattctgagtcttcatacttatgtctga

SEQ ID NO: 256573 - DNA, 584 bp, Homo sapiens
caacaatgctcttagcagcactattcacaataagcaaagggtagaaacaacccaaatgttcattgccagatgcatggatacatgaaatgtaaatatatacaatggaatcaaaaatcattccattaaaggaaggaaattctgacacatgccacaacattgatgaacccagaaggcattatgctgcgtgaaacaaccagacaccagaagacaaacactgtatggtttcacttacataatgtacctagagtagtcaaattcttagagatagaagtagaatggctgccaagagctagggcagcaggaaatttgggattattgtctaatmagtacagaatttcgtttgaaatgctaaaaatatcctggagatgtataatcatcatgattccataataatatgaatgggctaaatgccactgagctgtgtacttaaaatgatagaaatggaaaattttatgttaggtgtatttttccacattaaaaaaaatagtgccagagatttctggtttaggaagtttagaagaaggcttatgttttttgatttcgtttttttaaatcagctttattgaggtatttttacacaccat

SEQ ID NO: 256574 - DNA, 558 bp, Homo sapiens
gtggacttttgagttcatgctgaaatgagttaagatttttggggactgttgggaagtcacgattggttttgaaatgtgaggacatgagatttgggaggggccaggggcagaatgatatggtttggccgtgtccccactcaaatctcatcttgaattcccacgtgttgtgggaggtacctggtgggaggtaattgaatcatggggtcaggtctttcctgggctgttctcatgatagtgaataagtctcatgagatctgatggttatataagggggagttttcctgcacaagctctcttctgttgtctgctgccatgtgagacgagcatttcaccttctgccatgatcgtgagcttccccagccacatggaactgtaagtccaattaaacctctttcttttgtaagttgcacagtctcaggtatgtctttatcagcagcatgaaaatgggctaatacatcccataacctgawtttataatatttgcatcacctcaaaagagttacctgtgttcacttgcagttaattaatgtccttactcctgactcaaatacttgtatg

SEQ ID NO: 256575 - DNA, 465 bp, Homo sapiens
ttgcatgtatcaggattttatttctttatgtttctcaatagcatttcactgtatgcatatattgcaaattgtttatgcattcaccagtttgacactggggttatttccaggctttggctattataaataaagtttctggaacattcatgaataagaatacgtgtagacatacgatttaatttctcttgcatgatacaggagtgcaatggctgggttatatgataagtgtgtgtttaactgtgtaagaaactgccaaattgtttcccaaattctctgtaycatttcacatctccatccacagtgtaagcaagatcttgcttttgaggttattccgttttgtttgttttcatttgaagctccacaggcatctgatgaacagctgtgtatgtcagtttgaagccagttgattaggttatttaactgttaactaaaattttgtgggataagtgtaaccactgatataaa

SEQ ID NO: 256576 - DNA, 671 bp, Homo sapiens
gctttggctattataaataaagtttctggaacattcatgaataagaatacgtgtagacatacgatttaatttctcttgcatgatacaggagtgcaatggctgggttatatgataagtgtgtgtttaactgtgtaagaaactgccaaattgtttcccaaattctctgtatcatttcacatctccatccacagtgtaagcaagatcttgcttttgaggttattccgttttgtttgttttcatttgaagctccacaggcatctgatgaacagctgtgtatgtcagtttgaagccrgttgattaggttatttaactgttaactaaaattttgtgggataagtgtaaccactgatataaaaattcttcttcctctttctgtcttttttacaaaacataactgagaaattttacaatcaattctaacagtcttttttaaaaccttttattttaagtttaagggtacatatgcaggtttgttgtataggtaaacccatatcatggaggtttaatgtatatattttttcatcacccgggtattaagactagtaccaattagttatttttcttgatcttccccctcctcccaccctccactctcaggtaggttccggtgtctgtttttcccctgtatgtgtccatgagttcttatcatttagttctcacttacaagggag

SEQ ID NO: 256577 - DNA, 599 bp, Homo sapiens
actagtaccaattagttatttttcttgatcttccccctcctcccaccctccactctcaggtaggttcyggtgtctgtttttcccctgtatgtgtccatgagttcttatcatttagttctcacttacaagggagtacatatggtatttggttttctgttcctgcattagtttgctaagggtaatggcctctagctccatccatgttcctgcagagggcacaattttgttattttttatgactgcatagtgttccatggtgtatatatggcacattttctttatccaatctaccattgataggcatttaggttaattccatgtctttgctattgtgaacagtgttgcaatgaacatatgcatgcatgtgtctttatggtagaataatttatattcctttgggcatatacccagttatgtgattgctgggttgaatggtagatctgctttttagctctttgaggaatcaccacactgctttcctcaatggttgaactaatttacacccccccactaacagtgtataagcattttttttttctacaacctccctagcatctgttactttttgactttttaataccacccattctgactggtgt

SEQ ID NO: 256578 - DNA, 599 bp, Homo sapiens
actagtaccaattagttatttttcttgatcttccccctcctcccaccctccactctcaggtaggttccggtgtctgtttttcccctgtatgtgtccatgagttcttatcatttagttctcacttacaagggagtacatatggtatttggttttctgttcctgcattagtttgctaagggtaatggcctctagctccatccatgttcctgcagagggcacaattttgttattttttatgactgcatagtgttccatggtgtatatatggcacattttctttatccaatctaccattgataggcatttaggttaattccatgtctttgctattgtgaacagtgttgcaatgaacatatgcatgcatrtgtctttatggtagaataatttatattcctttgggcatatacccagttatgtgattgctgggttgaatggtagatctgctttttagctctttgaggaatcaccacactgctttcctcaatggttgaactaatttacacccccccactaacagtgtataagcattttttttttctacaacctccctagcatctgttactttttgactttttaataccacccattctgactggtgt

SEQ ID NO: 256579 - DNA, 563 bp, Homo sapiens
atgtatttattgctcacttgtctatctacttttaagaaatgtctattcaggtactttcttcattttaaaattttgtttgtgtctttattactgagttgtaatttgtaatttgttatatattttgaataaaagtcctctattgaacacatgatttgtatatagtttctccyaatctgtgcttagaatttttattctcttgttggtatcatttgtagctcataatattataatttttatatctcacaatttacttattttttctttcatcacttgtgcttttggtgtcatacataagaaatcacttcctaatcaaagaccacaaggatttatttacatttttttctaagagttttatagctttagctgttatgtttaagtctatgctcatttttgagttaatttttgtgtatggtgtgagatagggatctaacataattcttttgtatatggacatccagttgttccagcaccagtgggtgaaaggctatttttttccctcattgaaatgtgtcttcattcttgttttaaaaatcaattgaccaaaaattcaaagggttatttct

SEQ ID NO: 256580 - DNA, 563 bp, Homo sapiens
atgtatttattgctcacttgtctatctacttttaagaaatgtctattcaggtactttcttcattttaaaattttgtttgtgtctttattactgagttgtaatttgtaatttgttatatattttgaataaaagtcctctattgaacacatgatttgtatatagtttctcctaatctgtgcttagaatttttattctcttgttggtatcatttgtagctcataatattataatttttatatctcacaatttacttattttttctttcatcacttgtgcttttggtgtcatacataagaaatcacttcctaatcaaagaccacaaggatttatttayatttttttctaagagttttatagctttagctgttatgtttaagtctatgctcatttttgagttaatttttgtgtatggtgtgagatagggatctaacataattcttttgtatatggacatccagttgttccagcaccagtgggtgaaaggctatttttttccctcattgaaatgtgtcttcattcttgttttaaaaatcaattgaccaaaaattcaaagggttatttct

SEQ ID NO: 256581 - DNA, 610 bp, Homo sapiens
aaaaagtctgttgagaaatgaataaagaaatacaataatttgtttttttcttcttcccactttcaacttgtgagaccccatcactgccttttggactcttgcttcttttctgattcatgttcctgttcaccatcacctgccccacagcaccctcacaggaaaagaaaaaaaaaagccaaaacaaaaccratctctttgttcactggatcaaaagtcttttattatagtgcattcagacattcagaatacatatatgaggcctgctattcctcacatgtttgaggggaagcaagtagtgttttttacttttattttcttttgcccttgttactaccaaaactacacacacacacacacacacacacacacacacacacacaccctgtgtgcatgaatctgcagaaactattttgtgagttccttttactattttactgagacatagcattagtctcacttgttggtggaaaatatttgtatttatcaaggaacctgacatcagaaaccagctggtcaatcttacttgctttctagttgagtcaactctatgttgttgaaaggtcataggatttggggaaaaaaaagacaaagatttaggccaaaaagacct

SEQ ID NO: 256582 - DNA, 434 bp, Homo sapiens
aactacaagacatgagccccagagcagaccaatactggtgccatattcccaacagaggccacagtcacaatggccctttcctggacagggctcagcaagagattccagctcagttgtcccacttctcccgggactcggctggcagccacagcctcctgttgtcttggcaaacacgtggacagtagggcagacaacttcataactgccactacaggtagctagggaggcaattcctgctggagctgccagtccagcagtcctactactatgtgaactcagacagagggcacaacctcctgttgtcccaggaaacatcacccagagagcagggtgggcaaccccacccacccctgcaactagtagccagrcaggcaactccttctagagcttccagctcagtgatccctcttctgccttaatgcagccagtgagga

SEQ ID NO: 256583 - DNA, 508 bp, Homo sapiens
aagagaaataaggtccttttcagacaagcaaatgctaagagaatttgttaccatcagagctgccttacaaaaggtcctcagggagtgctaaatatggaaaaaaaggaccattaccagccaccataaaaacacacttaagtgcatagatcactgacactataaggcagccacacagttaattctgttaattctgcataataaccagctaacaacacaatgacaggatcaaacctgcgcatatcaatatcaacttttaatgtaaggaggctaaataccccatttaaaaggcacagaatggcaagttgggtaaagaagtaagacccacctatatgctgtatacaagagactcatctcacatgcaatgacacccrcaggttcaaagtaaaagaatcgaaaaacatctaccaagcaaatgaaaagcagaaaaaagcagggttgcaatcctaatttcagatgaaacagactttcaaccaacaaacataaaaaaagacaagggtaatggtaaaga

SEQ ID NO: 256584 - DNA, 445 bp, Homo sapiens
caccccactcctggaaccaagttctttctatgttttgtgataataaaacagagtacctaagattaaatcatttataaaaccaggaatttattttctcatagatctggaggctggaaagtccaagatcaaagtgttagtaggttcaatgtctggcaagggctattctttctgccttcaagtcartaggatttatagtgatatctctcttaattactaatatttgtggtccatcttttctctttttcagtttgaggattttatcagttttgttggtgaaccaacttttgactgttgactttcttcattattttctattttgttgaattttgtcacctttttattattatttttatctctactacttattttggctttatttgctgtttcttctcttcctcctcatctttttccttctccttatcctgcacctccttccccttcttct

SEQ ID NO: 256585 - DNA, 598 bp, Homo sapiens
atatttctgcatctgcattatatatgttttcttacacaccttctataatttttattgttttctcattagcctgcttttctagtgctgttttctttatgatctaaaagttattaggagagtaggatttcagtttggttttggtttttgttgttcattgtttccttttagcttgaatttattgtggacagagaaggtaacmatattacttactttgggaattatatacatatttttaattgactatccacattttgtaaatgttctatgaaggcttgagaaaatgtgaatatttattttaggtacaatatgttcatctgtgcctttcaagtatattaaatttatgagaaccctatagtggcttacgtatcttaagtcaacagtactaattttaatgaaaaaaaaactattctccttaatttctatattgattccaatttttgttaaattattatcaaatattagtaaatagacatatccatagagaagtaaaacactattttaaaatatgttttcacctaattaattattctataatatggttgttttttctttgtttattgatagctattaccaaaagactgagattatgcgtactaac

SEQ ID NO: 256586 - DNA, 602 bp, Homo sapiens
tatttggttcttctattgaatttttctttctgttcctgatgttatttttagtgctttctcaatagagtcattatgcatctttacattatcaatatataccttcacatgttatattacttcacaaaaatctttcatcagcataattcctccctcatattgtattttgaaatataaaattttctttttatatttctgcatctgcattatatatgttttcttacacaccttctataatttttattgttttctcattagcctgcttttctagtgctgttttctttatgatctaaaagttattaggagagtaggatttcagtttggttttggtttttgttgttcattgtttccttttagcttgaatttattgtggacagagaaggtaaccatattacttackttgggaattatatacatatttttaattgactatccacattttgtaaatgttctatgaaggcttgagaaaatgtgaatatttattttaggtacaatatgttcatctgtgcctttcaagtatattaaatttatgagaaccctatagtggcttacgtatcttaagtcaacagtactaattttaatgaaaaaaaaactattctccttaa

SEQ ID NO: 256587 - DNA, 602 bp, Homo sapiens
tatttggttcttctattgaatttttctttctgttcctgatgttatttttagtgctttctcaatagagtcattatgcatctttacattatcaatatataccttcacatgttatattacttcacaaaaatctttcatcagcataattcctccctcatattgtattttgaaatataaaattttctttttatatttctgcatctgcattatatatgttttcttacacaccttctataatttttattgttttctcattagcctgcttttctagtgctgttttctttatgatctaaaagttattaggagagtaggatttcagtttggttttggtttttgttgttcattgtttccttttagcttgaatttattgtggacagagaaggtaaccatattacttactttgggaattatatayatatttttaattgactatccacattttgtaaatgttctatgaaggcttgagaaaatgtgaatatttattttaggtacaatatgttcatctgtgcctttcaagtatattaaatttatgagaaccctatagtggcttacgtatcttaagtcaacagtactaattttaatgaaaaaaaaactattctccttaa

SEQ ID NO: 256588 - DNA, 598 bp, Homo sapiens
atatttctgcatctgcattatatatgttttcttacacaccttctataatttttattgttttctcattagcctgcttttctagtgctgttttctttatgatctaaaagttattaggagagtaggatttcagtttggttttggtttttgttgttcattgtttccttttagcttgaatttattgtggacagagaaggtaaccatattacttactttgggaattatatacatatttttaattgactatccacattttgtaaatgttctatgaaggcttgagaaaatgtgaatatttattttaggtacaatatgttcatctgtgcctttcaagtatattaaatttatgagaaccctatagtggcttacrtatcttaagtcaacagtactaattttaatgaaaaaaaaactattctccttaatttctatattgattccaatttttgttaaattattatcaaatattagtaaatagacatatccatagagaagtaaaacactattttaaaatatgttttcacctaattaattattctataatatggttgttttttctttgtttattgatagctattaccaaaagactgagattatgcgtactaac

SEQ ID NO: 256589 - DNA, 554 bp, Homo sapiens
acagtccaataaagactataaatacttgcttttccccttgaaagcccccccttcctgatttcacctgggcacacatttaagtttggaaagaggaggatgaagtagtgatgtgatgtgggcctgtagtcttgtcaagrcgagtgctccttggagatggctctgtcggaaagagaatgtgatggttctcgggggtagatggaagaacaggaggtgtagtcctgtgagagggcccaggtgactgtacagctactgctctatttccaagggggagaaatcatcactggagaggccagttcttgtgcaacttcagcctccattttcaaatgagggcacaggggatgccctcatttgaaggcgttaggattaggggcagctggaggaggtgctccagccctcatttcttcatttccagaccatttgtcatttaatacttattcaagcaggtttctcattctgggccctaggggcattttgaaccagataattctatttcatgggaagctgtcctgtacattataggatgatgtttaggggcatgcctggtctctactcaa

SEQ ID NO: 256590 - DNA, 609 bp, Homo sapiens
atctttctcccttaccttacttcttgaaaaagaatgaagcactgttgctttgaaaagttgacagactattctaatcagtcatcctcaggtttggatttgaaggtaaattggtcaagagtaaaggtccagaacatgtttcctgaagctactataagtcaaactctaatcctaaccacagataaataaatggtttaaaccaaatagctcagaggttaaattgtaccctgaaaaatatgctttgagyttccaggagactcaaaaaatatgaacctttttccaagttactaaatcaaacacttggcccactgatttttaaaaaagtaaaaccagcataaactaaactatattacccttgtaatgggactgtgataggaaaaattataagtatcttcaagaaaactctagaactttagatgctacagatagtgctggtaagcaaataatacctatttcacaaggcaaaaatctttcaaattacattctattaaaattcataattttgattgctctgctaaactttgcagagttggctctggcttaaatattaagaattaggaaaggaggtaacaggagaagaagctaaaagccaaagacatcccgttctcataa

SEQ ID NO: 256591 - DNA, 503 bp, Homo sapiens
ggcataggcccatttggagttaaaaaggaatctatttgtgtgttatttataacagacgcaaaataaatgaaaacaaaatctaaagccacccataaaaggaaacaaggtaggtaaaattaatagcatccataatgaaataaaaggaaaaagtccatatatttctgtgttagggttctccagagaaacataatcaataagatatctctatctctatctktatctctctctatatatatatatctatgtatctatgtagagatagatgtatagacttctctttctgtatacacacacacacacacacacacacacacacggagagagagagacaggagaatatttattataagggattgactcatgtcattatgaaggtaagaagccccataatttttcctctgtaatcttgaggcccaagaaagctggtggtgtaattccatcccaaatccaaaggcctgaaaaccaggaaggcactggtataagccctggtctgagttcaaaga

SEQ ID NO: 256592 - DNA, 619 bp, Homo sapiens
cagtgggaaatgacaaagttggctggagaaagagactgatttgtattcatccacacaatgggtcattccatccactttaatgttaaaatccttctctgccaagctcaccctttggtgagcattcacatgaaatacaatatatccattattttttgcttattcatagaggtgtgcccacatctctcttccccaaattttttgtcaccaatttttccatgtgtcctttctaagtttctgatcatccagaaaaagaagaacactcgctacagaccatgaattggcaggtaatcacctctctagccatttctctttctaagaaaagtgaatcatcaggtggaatggttgaagttctgtccactgggaggattttcattcaccactgtccttcagggatatccctgagaggggctataggggtgcagttgtccctttttgtgttatgcctgcatattttgcagaatcctctgtaaaccaggctgagtcttctcytcctctgtcaactgctcatagggaattttttaatgacttcatagctgcaggctggcagagagcaggaagtgtagcaggagtggggatcatgggcatttgggccacttcttaatgtcacttacctgtgcct

SEQ ID NO: 256593 - DNA, 554 bp, Homo sapiens
agctcaatattacctcagcattcagcctccctgaaatcccccatgctcaagtaaggtctatgctgagttataataactgctgagccttgtagactctcttttggtagctgctccttccacaccatcttttatgtatcagaaaagataccttttccaacaatagtagactttttaagcacccaaaccacacacaagtttatcacaattctcycttgagaaggagaatggcaacattgctgaatatgtattttattttattttatttcttgactttccttttattttcccagattgactgcaattcactcacctacgctcttaagccattaatcatccttatgtgatattttttcgcaagaagtgatgtcatgcctgcatccattatttaaagttgcccttcatatatctgattatggacatcacattcagaaacaaatgcaagatggaggtgtcatttagctgaagtcaggagaacaccagatgtcctgatgtttgctgcccctgcaatgggtgtgaattaaactacactttcttctctagcactgagttgaggt

SEQ ID NO: 256594 - DNA, 524 bp, Homo sapiens
ccttttccaacaatagtagactttttaagcacccaaaccacacacaagtttatcacaattctctcttgagaaggagaatggcaacattgctgaatatgtattttattttattttatttcttgactttccttttattttcccagattgactgcaattcactcacctacgctcttaagccattaatcatccttatgtgatattttttcgcaagaagtgatgtcatgcctgcatccattatttaaagttgcccttcatatatctgattatggacatcacattcagaaacaaatgcaagatggaggtgtcatttagctgaagtcaggagaacaccagatgtcctgatgtttgctgcccctgcaatgggtgtgaattaaactayactttcttctctagcactgagttgaggtaatgtttttaccataccggtcactcactcagtctgttttctgtttatgcctctgtaggcattgtcttctttaagaagagactggaggatttcttttgactgaactatccaacagcct

SEQ ID NO: 256595 - DNA, 321 bp, Homo sapiens
gcagataggcataagaaaagatgttcaacatcatttgtcattagaaaaatcaacttaaaataaaaatctgataccgttgcacacctatttgaatagctacaattaaaaaaaaaacctggcaataccaaatgttatttaagatatagggcaatagaaacactcattcatttctggtgaaaatgcagagaatacagttactttggaagacagtttggcagtttcttacaaagytaaacatagccttgccatacatactatattagtctatattctgttgcttataagagaatgcctgaaactgggtaatttataaagaagaga

SEQ ID NO: 256596 - DNA, 588 bp, Homo sapiens
agcatcatgattaaataataagcaaaagatctgatcaaacacctcaccaaagaaaaatacaatggcagataggcataagaaaagatgttcaacatcatttgtcattagaaaaatcaacttaaaataaaaatctgataccgttgcacacctatttgaatagctacaattaaaaaaaaaacctggcaataccaaatgttatttaagatatagggcaatagaaacactcattcatttctggtgaaaatgcagagaatacagttactttggaagacagtttggcagtttcttacaaagctaaacatagccttgccatacatactatattagtctatattctgttgcttataagagaatgcctgaaactgggtaatttataaagaagagaaatttatttcttacagttacagargctgagaagtccaaggttgaggggctgcatctggtgagcgccttcttgctggtggggactctgcagagtactaaggtagtggagggaatcccatggtgacaggctgagtgaattaacatgtaagtcaggtctctcttcctcttcttataaagccaccagtttcatcccattataaatca

SEQ ID NO: 256597 - DNA, 625 bp, Homo sapiens
ggaccctaccaggtgaagaacacaaatcagggaagtgctaattgagggcaagagtaacctggaatgggtgtgggtgacagaagtaataaatattaatygctccctctttactagttacagaaaaggggactgagacaattacatatttctgttgtatatgcaatagccaaacatttcctttgcactcctgcatatgaggagtgttgctgctatttagttcaaagattatcagaccacatagagtcatatccacacctcaagcggggaattgtagatccgtgggacactgggtgtgaagtggatacgatgagcaagggggcttgtcttgtttggggaaggtgtgaacgtgtcttcatttatgcaactgttcgcttgtgacacagagaagaacaattttaagtacaggcaaattggcgagagcaagaagtgggtagcaaagtatatgggctgtgctgagcttgcctcgttcagaccactcttcatctttctcctcctctgcttggtcttgcagaagggctgattcctacaggctgagtgtgaaggattctgtgtcaactgcctcctgtctgagtcagtcagttaggaggcattgggggatactagaggacaggaggaaggaagagag

SEQ ID NO: 256598 - DNA, 662 bp, Homo sapiens
tctggatggagatgcttaatctactctattacaagaagggggtgaagcagaaaagtagatgtgtggcctctcccttctttctcccctccttcttcctcaatgccctgcaagaagaagccagggatctcacatcatacagtcagcggcttcttaacctgtctcagggtatgtgaagatggatggcaattaagaacattcatctgactgggctagaaacatgtctccacagcactgatcagggctcccagcttctttattgcaggtcatgaggtagtaataactttcagtcttcacagtgcagagctatatacaaactgaacaaggagaaaacgctgtagctttttaaaaacctattccttgagtcactgattcttaagaaacaatccaattttcttcctgattgttgtgttttcaaaaggattgatagtggctcatgcctatgtggagaagccttcgatgtgtcgcaactgtgtgcccactttaacaaggtggtgccacacaatagtaatattcatggttcccayatattgaaaggcatgatgcctactatactctttctttagaacccacaacttccttattatgtaggtattagtatttttctcttaaaagcaaaaaaataaaaaataaaaaaaaggaagctcagaagagatacatgttcc

SEQ ID NO: 256599 - DNA, 662 bp, Homo sapiens
tctggatggagatgcttaatctactctattacaagaagggggtgaagcagaaaagtagatgtgtggcctctcccttctttctcccctccttcttcctcaatgccctgcaagaagaagccagggatctcacatcatacagtcagcggcttcttaacctgtctcagggtatgtgaagatggatggcaattaagaacattcatctgactgggctagaaacatgtctccacagcactgatcagggctcccagcttctttattgcaggtcatgaggtagtaataactttcagtcttcacagtgcagagctatatacaaactgaacaaggagaaaacgctgtagctttttaaaaacctattccttgagtcactgattcttaagaaacaatccaattttcttcctgattgttgtgttttcaaaaggattgatagtggctcatgcctatgtggagaagccttcgatgtgtcgcaactgtgtgcccactttaacaaggtggtgccacacaatagtaatattcatggttcccacrtattgaaaggcatgatgcctactatactctttctttagaacccacaacttccttattatgtaggtattagtatttttctcttaaaagcaaaaaaataaaaaataaaaaaaaggaagctcagaagagatacatgttcc

SEQ ID NO: 256600 - DNA, 622 bp, Homo sapiens
acatttaactaaattaatatgacaaaagatggattttagggtgacaggagaatggaaacgtcatataatgatataggaaactgaaacagaaagtagtgaagagggtgggaagcaaactcagtagttgcctcrccaataagagccagcagtcaaaggacaacatacaaagtttacaaatcctctaatggaaattttagcataactaacaatacaccaagcaagataaacttaagatttaattgggtggttgagaagagagtttagaagggctagaagagggcataagccaatttcaccatggctcatagttagaattcacagatactgtccaaatcattagaaataaagctaacatatcacttataattataaagaaatataaaacttgtaaatagcagaactacacacaacatacacacacacatgcacacacacacgccatgtgtaaacatgtgcacacacaacatacccaaggcacataataaaagacttaaggaaaaaacagagaataacattacaagatataaaaaatgcagacttaacatatctgtcataaatgggcttaattcacaaaagtaaaacaaataatattttcatatttgctcataaaacaaaacccaac

SEQ ID NO: 256601 - DNA, 567 bp, Homo sapiens
ttcataattttatttaaatgaaggctatttgtgacaataggatttgcttatttctgcatttttatgtgtgaatatattttagaatttttaatactcatgcccttaataaatggtctgtactaatattattgccatttatcaaaatgtcattacttttttgatttacttttcccttacagacttctcaaaatagatgtagcatgttgaagaccccraattagtgacaggaggatttaagtgctagatctctctttaatacaatgtaaaattgtcggaaaatcatatagtttctttatagattggcttcctcatttgcacaccagatagtgctttacaacgcatagaacaaggacatctaactatgggccaacatagttgcaactctacaatttgactcaaagaataacaatgacatcttttgtttttctaatttgaaagataatagtctaatccttcacttcatgaatgtaactacttcgcaatttttgataggtggaaactattcttacaaggctttaggataaattatgatataaccataatctgtcaataacaagcaaacttgaa

SEQ ID NO: 256602 - DNA, 567 bp, Homo sapiens
ttcataattttatttaaatgaaggctatttgtgacaataggatttgcttatttctgcatttttatgtgtgaatatattttagaatttttaatactcatgcccttaataaatggtctgtactaatattattgccatttatcaaaatgtcattacttttttgatttacttttcccttacagacttctcaaaatagatgtagcatgttgaagaccccgaattagtgacaggaggatttaagtgctagatctctctttaatacaatgtaaaattgtcggaaaatcatatagtttctttatagattggcttcctcatttgcacaccagatagtgctttacaasgcatagaacaaggacatctaactatgggccaacatagttgcaactctacaatttgactcaaagaataacaatgacatcttttgtttttctaatttgaaagataatagtctaatccttcacttcatgaatgtaactacttcgcaatttttgataggtggaaactattcttacaaggctttaggataaattatgatataaccataatctgtcaataacaagcaaacttgaa

SEQ ID NO: 256603 - DNA, 622 bp, Homo sapiens
ctggtttggggtggggcagggccatgtgcatgacagagctctacacagctctcatgcccatcaggagcacacatgtgggtctgatgcatggagaggtttggttttggtgcacgtaactagaagttatagaaaataaggaattgtaggtgagggcatactgcagcctgctctgaagcctgtgtaaagaggtttaagtgtctgtcaatggattttgggaagcagagttgcatgactagacctaaactttaccaagcccctcctagatgcagagggtacatgtttagaggctgcrgaggtatcccaggtgatacatgaaaagttctcaatttagtgagtgggataatatgggactagaagtgggaaacaggcatccttctggagaggcagtttgaggttcttaagtgtccattcaccttataaacattactgtgcactgtgctatcagcaggcactgcactttcagcactgtgctaggggctgggtgtatatgcagtgaagaagctacagtggctgccttcatgatgcttacactgcattagcatcctatttactggaaaaaattgtcacacatgtgatggcttcaaacaatacaaatttatgatcttatagttctggaggttag

SEQ ID NO: 256604 - DNA, 602 bp, Homo sapiens
ttcctccttcccctttttaacatgaggacatggaagctcaggaaggaaaaaggactggctggggatggcgcastccagttctagagctgcttctcttcctgagaattgctgtactgttgccacatacactgtctttcctcctgtttccttggccacccttcctacccttgctctggaagcctcctgtcctggcggccagaggtctccccatctgcgctgtgtccagctttgcattttccctcgggcttggctggaggaggccagatgttggagtcactgcacagcctcctccctggggaagcctcatggggtttcagtgggagaagggaacgtgggattcctcctgtgcatctcatcttggtactgtgatgtcgggcagtcaggggcttgcctgaggctacaggggcacgctgaggtatgaggtccaggaccaagtttcccacgtctcatggcctacctgggtctctagatctgggacaacgctcgtgcttattcctttacagttaagatgcctggcagctgctcccagaggccctgacagaactttaaattggctaattatcccactctctgtctttgctttcttatggaagagctgcagc

SEQ ID NO: 256605 - DNA, 602 bp, Homo sapiens
ttcctccttcccctttttaacatgaggacatggaagctcaggaaggaaaaaggactggctggggatggcgcagtccagttctagagctgcttctcttcctgagaattgctgtactgttgccacatacactgtctttcctcctgtttccttggccacccttcctacccttgctctggaagcctcctgtcctggcggccagaggtctccccatctgcgctgtgwccagctttgcattttccctcgggcttggctggaggaggccagatgttggagtcactgcacagcctcctccctggggaagcctcatggggtttcagtgggagaagggaacgtgggattcctcctgtgcatctcatcttggtactgtgatgtcgggcagtcaggggcttgcctgaggctacaggggcacgctgaggtatgaggtccaggaccaagtttcccacgtctcatggcctacctgggtctctagatctgggacaacgctcgtgcttattcctttacagttaagatgcctggcagctgctcccagaggccctgacagaactttaaattggctaattatcccactctctgtctttgctttcttatggaagagctgcagc

SEQ ID NO: 256606 - DNA, 539 bp, Homo sapiens
tggttgcagagtaaatgatgtgctcggcatcttacctttagtttccatgtgggacaaagagcacagcctggcaaaaggcccatggtgcttgagttggcasgtggggaaccatcagcttggtgggtgcttacagtcagagcagcagcttggtatctgaccaggtcaagggacaggcaaatctttcacctcactcctagacatttgggtcagctgcctgggcctgctgaccacgccagtggggatccagctatgggttggtgaaatgagcctaaaagagggtcactgtgacccagaatgccagattggccctgatgactggggattaaagcctcatgtcaaagctagaacccacggctggagccacggctgcagcttccatctgctccttggcagcctctctgtatctcaggaggtggaaggcactagcacattgtcctggaggactctgagcaggaagctgcttttatgagtgtacagtggccatcctggggcaccaaacagagccctgtgttggaatgagggtccttaggcagtgtagg

SEQ ID NO: 256607 - DNA, 539 bp, Homo sapiens
tggttgcagagtaaatgatgtgctcggcatcttacctttagtttccatgtgggacaaagagcacagcctggcaaaaggcccatggtgcttgagttggcacgtggggaaccatcagcttggtgggtgcttacagtcagagcagcagcttggtatctgaccaggtcaagggacaggcaaatctttcacctcactcctagacatttgggtcagctgcctgggcctgctgaccacgccagtggggatccagctatgggttggtgaaatgagcctaaaagagggtcactgtgacccagaatgccagattggccctgatgactggggattaaagcctcatgtcaaagctagaacccacggctggagccacggctgcagcttccatctgctccttggcagcctctctgtatctcaggaggtggaaggcactagcacattgtcctggaggactctgagcaggaagctgcttttatgagtgtacagtggccatcctggggcrccaaacagagccctgtgttggaatgagggtccttaggcagtgtagg

SEQ ID NO: 256608 - DNA, 604 bp, Homo sapiens
atgcttgatttggatagctcaagaaggcagagtatgagcccatggctggaaagtagagagaggcaaatggaagcttggtttctaacagagcatcgtgatgctggatagtgggcagaatgacctggaggaaattggaatcaccatggactcgcagtcaggagccctcagtggaagaggaccttgtgctcacaggacagacatgcccatggcatgttgcctaacacctctgagtctcagtttcctgttagtacaaagggtcagtaatttgagtacgtgtattttagcrctgctgtaaaagttcagtgagggaatattcatagagctcccggcccttggccccgcttggatgccaccctgtttctcctccttcacccctttcccctttcctattccagtgtcttcgtaactggaaacactgggagtgttccatgtgagtctgggtggtgacttgacagggttatagacaagggattcacctacgtggtgaggggatgggcaagaactcagcagcaagtttttatttgtttaatttttaaagagatgaaaaacatttcttcaaaaaaaagtttaataagaaacccaatatgcagaccacaaattaaac

SEQ ID NO: 256609 - DNA, 568 bp, Homo sapiens
tttataccaactttaattctatgaaaattaaggagtagtttatgcagaaatttccaggagtagtttaagcagagatttctaggataaaggcagtaacttccgggttgttaggttgttgccatggaaaggagcggtaatttctgggtgttgccatggtgatggtaaactgacatagcacactggtggacaatcttggggaggtgcttcctccccagaactgttttagctagtcctcagtttggtccagtgtctcagtcccacatcctacctcaccaacagagcagagaggagcccaggasgtagtgtgtgtttgtgtgtgtgtgtgtgtgtgtgtgtgtgtgtgtgtgtgtgtgtgtgtgtgcatgtgagaaaaagaggaggaagccggaggagtgcgcggacatgggagggaagacatcaggggagagcaaaagaaaggggaccccagaggtgggagatggggcaccctggtctgcactggaaactgagggaggtccgctgtcccgggaaggatccccaaggagatgcgcaacccccaggttctggtcacaggtatcaacaatgtgtg

SEQ ID NO: 256610 - DNA, 466 bp, Homo sapiens
acatcttaaacatatacaataaaaagaggaaacacagtttaactgaagagcagaagcccgaactattgtggtgtgtttgcattgacaaaaccaacaatttctttattacagtgatctattttgctatgaaattgctctgggcaaaactaaagttcattaaaagaaaatagtttggaaaaatttctcatcagataatcattcagatcatttagtgggcttgggcttttaacaaggaacagaagatttctcccaagaaagattttctcagaaaaataggattgctttttcatggatgatgatgttattaagaaaatgtttagttttcaagaatgaaaaccttggagttamcaacaaccctttgaaatctagctcagaaaatctgtctggattttgattcaacatttgccaaaaatatctgacatacagatctaaccagacattgccagacatagctcaatattctgtg

SEQ ID NO: 256611 - DNA, 570 bp, Homo sapiens
ctgttaattcagcacaatgctcatctctgaggatatgcaggcaagtaaaatttcctcttgttaataagttcattaagaccsggagccatggttattaacaccaactatactgcagagttttctgtggcacttttgaaatacaaggacttcccactttaacccttagtgttggttttggacagcgctcggtatctattacttttatgccctgcagaggattctgatacccagctagtgaaaagaatcactagtcttataaacatactttgcttatcacctcttcctttatttttctaaaggtcatttatatgcaatttctcataaaactaactatgcatctttcctgtaacccagcagttttactcctaggtagtcactcaaaacaagtaaagacatatgcccacaaaaggacttgtgcaagagtgtttatgacactttattcataatagctcttgtgtccaacaataggaaagtggtggtgtggaccctctgatacactcatataatggaatgccactcattaattaaaaggactgaattattgatgcatgcaacaagattaaatcccca

SEQ ID NO: 256612 - DNA, 566 bp, Homo sapiens
tggtaagtgttgcttgttaaccctgaaaatataatgtgaagtacatgtgtaacacaagactcttaactgaaattacttgaggtttagatttctatacctaatcttggatgtattccttagggtaaaataagcatatttaatattcaaactacagtgttaaatatttcagttgaagtacttttctcccaattctgttaattcagcacaatgctcatctctgaggatatgcaggcaagtaaaatttcctcttgttaataagttcattaagacccggagccatggttattaacaccaactatactgcagagttttctgtggcacttttgaaatacaaggacttcccactttaacccttagtgttggttttggacagcgctyggtatctattacttttatgccctgcagaggattctgatacccagctagtgaaaagaatcactagtcttataaacatactttgcttatcacctcttcctttatttttctaaaggtcatttatatgcaatttctcataaaactaactatgcatctttcctgtaacccagcagttttactcctaggtagtc

SEQ ID NO: 256613 - DNA, 566 bp, Homo sapiens
tggtaagtgttgcttgttaaccctgaaaatataatgtgaagtacatgtgtaacacaagactcttaactgaaattacttgaggtttagatttctatacctaatcttggatgtattccttagggtaaaataagcatatttaatattcaaactacagtgttaaatatttcagttgaagtacttttctcccaattctgttaattcagcacaatgctcatctctgaggatatgcaggcaagtaaaatttcctcttgttaataagttcattaagacccggagccatggttattaacaccaactatactgcagagttttctgtggcacttttgaaatacaaggacttcccactttaacccttagtgttggttttggacagcgctcggtatctattacttwtatgccctgcagaggattctgatacccagctagtgaaaagaatcactagtcttataaacatactttgcttatcacctcttcctttatttttctaaaggtcatttatatgcaatttctcataaaactaactatgcatctttcctgtaacccagcagttttactcctaggtagtc

SEQ ID NO: 256614 - DNA, 566 bp, Homo sapiens
tggtaagtgttgcttgttaaccctgaaaatataatgtgaagtacatgtgtaacacaagactcttaactgaaattacttgaggtttagatttctatacctaatcttggatgtattccttagggtaaaataagcatatttaatattcaaactacagtgttaaatatttcagttgaagtacttttctcccaattctgttaattcagcacaatgctcatctctgaggatatgcaggcaagtaaaatttcctcttgttaataagttcattaagacccggagccatggttattaacaccaactatactgcagagttttctgtggcacttttgaaatacaaggacttcccactttaacccttagtgttggttttggacagcgctcggtatctattacttttatgccctgcagaggattctgatacccagctagtgaaaagaatcactagycttataaacatactttgcttatcacctcttcctttatttttctaaaggtcatttatatgcaatttctcataaaactaactatgcatctttcctgtaacccagcagttttactcctaggtagtc

SEQ ID NO: 256615 - DNA, 566 bp, Homo sapiens
tggtaagtgttgcttgttaaccctgaaaatataatgtgaagtacatgtgtaacacaagactcttaactgaaattacttgaggtttagatttctatacctaatcttggatgtattccttagggtaaaataagcatatttaatattcaaactacagtgttaaatatttcagttgaagtacttttctcccaattctgttaattcagcacaatgctcatctctgaggatatgcaggcaagtaaaatttcctcttgttaataagttcattaagacccggagccatggttattaacaccaactatactgcagagttttctgtggcacttttgaaatacaaggacttcccactttaacccttagtgttggttttggacagcgctcggtatctattacttttatgccctgcagaggattctgatacccagctagtgaaaagaatcactagtcttataaacatactttgcttatcacctcttcctttatttttctaaaggycatttatatgcaatttctcataaaactaactatgcatctttcctgtaacccagcagttttactcctaggtagtc

SEQ ID NO: 256616 - DNA, 576 bp, Homo sapiens
gagataatcagaacaatcattgtgttcagtgaggacaaagttggggrgaaggtcagtgagtgttggttgttgggaaggcaagagggaaatttctaatgtaatagtcataatctatttattaataggtgtttgatcattctattagtctgttttcacacgctgataaagacatacctgacactgggtaggtaatttataaagaaaaagacatctaatggactcacagttccacgtggctagggaggcctcacaatcatgacagaaggtgaaaggcatgtcttacatggcagcagcaagagagcatgagaaccaagcacaagggggttccccttataaaaccatcagatctcatgagacttattcactaccatgagaacagtatgggggaaactgcctccatgattcaattatctcccaccaggtccctccggccacatatgggaattatgggagctacaattcaagatgagatttgggtggggacacagccaaaccatatcagtcatactggtgcatacatttatcaaaactcattaaatactacacttaagatttgtgtattggattttttgtaat

SEQ ID NO: 256617 - DNA, 576 bp, Homo sapiens
gagataatcagaacaatcattgtgttcagtgaggacaaagttggggagaaggycagtgagtgttggttgttgggaaggcaagagggaaatttctaatgtaatagtcataatctatttattaataggtgtttgatcattctattagtctgttttcacacgctgataaagacatacctgacactgggtaggtaatttataaagaaaaagacatctaatggactcacagttccacgtggctagggaggcctcacaatcatgacagaaggtgaaaggcatgtcttacatggcagcagcaagagagcatgagaaccaagcacaagggggttccccttataaaaccatcagatctcatgagacttattcactaccatgagaacagtatgggggaaactgcctccatgattcaattatctcccaccaggtccctccggccacatatgggaattatgggagctacaattcaagatgagatttgggtggggacacagccaaaccatatcagtcatactggtgcatacatttatcaaaactcattaaatactacacttaagatttgtgtattggattttttgtaat

SEQ ID NO: 256618 - DNA, 576 bp, Homo sapiens
gagataatcagaacaatcattgtgttcagtgaggacaaagttggggagaaggtcagtgagtgttggttgttgggraggcaagagggaaatttctaatgtaatagtcataatctatttattaataggtgtttgatcattctattagtctgttttcacacgctgataaagacatacctgacactgggtaggtaatttataaagaaaaagacatctaatggactcacagttccacgtggctagggaggcctcacaatcatgacagaaggtgaaaggcatgtcttacatggcagcagcaagagagcatgagaaccaagcacaagggggttccccttataaaaccatcagatctcatgagacttattcactaccatgagaacagtatgggggaaactgcctccatgattcaattatctcccaccaggtccctccggccacatatgggaattatgggagctacaattcaagatgagatttgggtggggacacagccaaaccatatcagtcatactggtgcatacatttatcaaaactcattaaatactacacttaagatttgtgtattggattttttgtaat

SEQ ID NO: 256619 - DNA, 585 bp, Homo sapiens
taatgtgcctccctaaaattcatgtccactcagaacctcagaatgtaaacttatttagaaatagtatctttgcagatgtaatctagttaagatgaagtcacactggaatagggtgggccctaactccagtccttataagaaragaaaacagaaacaaagacacatgggagaaggctatgtgataaacaggcagcaattggagccatgtgtccatcgtttgtgaaacaccaaggattatgagcagcctccagaacctgggaagattcaaggaggaactcttcccgagaaccttcagagggagcctggccccactgacaccttgatttcagacttccagtctccaaaactgggagacaaacatttctgtccttctaagccacccagtttgcagtgcttcattatagcagccctgggaaactaatacaggaaacactatctgttaaagaggtagtgttttaaggatttattcctaagtatttgaaatcggatcaatgggaaatgcaaaatgagtctttcctcattttgttcaactttcctctgaaagagaaaaaggaacaagtgtttcctctgaggtcacagctacag

SEQ ID NO: 256620 - DNA, 532 bp, Homo sapiens
agatctgagatcatcctcattgatgaaagtgtcaaaatatagaagcatttctttgcaaaaaaagtttagaaccaggctgcagagagtgatattggcatgctacttgtcacatcaatgagcttgcactggttgtctagccttctgaagtctctatttcatcttttatgaaatggaaacaatggcaatgcctacctcaggattatttagagaggtaaacaagttaaaacctgaaaagtgtgtagaacaatagtcagctcacaaaagcacttagtcaataatagctgttattgtctaggacagtcccaaatgttccagaaggaaaagttcaatatagagattatcattgcctgggagacatttgcttcrccttctgttttcaaatgcttgcaacatagaagactggagtgaatccaagacaagtgttaatacgttgtccagatcttttatcccaactgatgtaaaaccatgaagcaagatagctatctatctctggtaaataatctatgtattcccttggcacgagcagcttcca

SEQ ID NO: 256621 - DNA, 535 bp, Homo sapiens
ttatcattgcctgggagacatttgcttcgccttctgttttcaaatgcttgcaacatagaagactggagtgaatccaagacaagtgttaatacgttgtccagatcttttatcccaactgatgtaaaaccatgaagcaagatagctatctatctctggtaaataatctatgtattcccttggcacgagcagcttccatggctttctgatarcagtgataagaaaattatttgtccattagaagaacaccttttttatctgctttctttcactgtatggacagagtgctcttgacttttagccaagacttagaatcaatttgaaatgacactgttgatagagacagcaccaagttttcctcctgtgacacagaaaattccaacttcataggcatctgaaccagcactttgtgaggctgatagatgccttcattattcagaaaacacaattatctttactgtgtgatctgtcatgaatattctgacttattgaatgtgatagttcctagtctcccacagtatgttaattctagaaaaaa

SEQ ID NO: 256622 - DNA, 558 bp, Homo sapiens
aggtcatacacatacacatctataaatttttctatatgtaattatctggatctatattaagacaaacatgaggtcatactgatgtctccaattctaatctattactacatggatgattctagttccccttgcttgtctgcaaattcctgtgcaactaggaaacctggcccgtacatctgccatccattaacctaattgctcaattccaatatacatgtgtcataatagcatgtatccatcattacagtaacaaataaattatttcgctgccctaaaaaatcccttgtgcgtcacctataatcttctctctctctccttgaacctctcattaccattgatctctttagtttcactctagttttgccttttccagaatgtcataaaatttaaatcatacaggatgcagtcttttaagagtggcttctgaaagtgagacttggaaatatgcattttggtatcatccatgtcatttcgtggyttggtagctctttttaaaaatcactgactagtattcctttatatggatatgctgcagtttatccattcacctattaaaag

SEQ ID NO: 256623 - DNA, 466 bp, Homo sapiens
tatggactctttgatgttttcttcagcttattaactttatataatttgccttgggaaatatattttaacccagtatcaaaaaagtacatatctatttatacttctgattcctaactcaaaatctcaaacagtcgaatatgttaacagattaagaagataagcatttttatctttgtttytagtgcacaaagaaactaggtctgagaactgttaaataatacattcatagtcataaaaccagtcgatggaggtgatttcgaatataaatttctctgcctcccaaaaccatgattctttaactttcttataatgttgtcagtgataatatttgcataaatttgacacagtaatatttaggaatctgagataatatgcaatgacaaatttactttttaccacaaacactttattacgatagggaaattattcatatctaagagaaattgttttctgtgtccttataaaa

SEQ ID NO: 256624 - DNA, 492 bp, Homo sapiens
ttatgaaaatggtgagaaagacactagcaaagcctgcttgagtagatatggccaggaaaactcagtgcaaccagcagctgaatcacaaaacacagaagcctaaccatacctgaacacttcaccaaaacaagtcagtagcaaagacagtgttggctcacaaagtttttactccctgtcaaaatatttgtggggtttttttggaaaggggtgggatatgggatagtgttaacatccttacttatgtttgaacaaatatttaaatgacagaatccraagaaacctcccttaaagcaaataatttttgcctgaatgttgatctaactacaaagaccctcgttctttaaaagtagcccttagaagtaaatgctgatatggaagaacaatttcaaaatgtgacttaaagaaaagccgagatctgtttttaaatttgaaaatgaagttgtggggaagctcatagaatgaaagaagacaccgcagagggtcatcgtatca

SEQ ID NO: 256625 - DNA, 492 bp, Homo sapiens
ttatgaaaatggtgagaaagacactagcaaagcctgcttgagtagatatggccaggaaaactcagtgcaaccagcagctgaatcacaaaacacagaagcctaaccatacctgaacacttcaccaaaacaagtcagtagcaaagacagtgttggctcacaaagtttttactccctgtcaaaatatttgtggggtttttttggaaaggggtgggatatgggatagtgttaacatccttacttatgtttgaacaaatatttaaatgacagaatccaaagaaacctcccttaaagcaaataatttttgcctgaatgttgatctaactacaaagaccctcgttctttaaaagtagcccttagaartaaatgctgatatggaagaacaatttcaaaatgtgacttaaagaaaagccgagatctgtttttaaatttgaaaatgaagttgtggggaagctcatagaatgaaagaagacaccgcagagggtcatcgtatca

SEQ ID NO: 256626 - DNA, 494 bp, Homo sapiens
gtaagttcatctatgtgctccaagatctctccttgacagtggatttgcagaccaaagcatgccccagggaaccctcacatctagggagtcacctcaggagagcatgtcaaaagcatgcccacttggccacttttacaacttatttctgaccaggaaggtaccaactcaactgcccagtacataactgcccagtagsagggggacaacttccctagctcatttgctcccctaccttataaaagtgcccgctttctgctcccaaagtgaagcagcacatttaaatgcaggatgctttgtgcccttccccaagctagcttctgaataaattcacatttttttttttttgtatcagacctcacactccctaactggactctgcattcagcaaacaactaaactcctttttggttacaatagaccttttagaataagctatgttgtactaaaatttgtgctgccattgcaatatattgtagttacttgcttaattgctt

SEQ ID NO: 256627 - DNA, 494 bp, Homo sapiens
gtaagttcatctatgtgctccaagatctctccttgacagtggatttgcagaccaaagcatgccccagggaaccctcacatctagggagtcacctcaggagagcatgtcaaaagcatgcccacttggccacttttacaacttatttctgaccaggaaggtaccaactcaactgcccagtacataactgcccagtaggagggggacaacttccctagctcatttgctcccctaccttataaaagtgcccgctttctgctcccaaagtgaagcagcacatttaaatgcaggatgctttgtgcccttccccaagctagcttctgaataaattcacatttttttttttttgtatcagacctcacactccctaactggactctgcattcagcaaacaactaamctcctttttggttacaatagaccttttagaataagctatgttgtactaaaatttgtgctgccattgcaatatattgtagttacttgcttaattgctt

SEQ ID NO: 256628 - DNA, 494 bp, Homo sapiens
gtaagttcatctatgtgctccaagatctctccttgacagtggatttgcagaccaaagcatgccccagggaaccctcacatctagggagtcacctcaggagagcatgtcaaaagcatgcccacttggccacttttacaacttatttctgaccaggaaggtaccaactcaactgcccagtacataactgcccagtaggagggggacaacttccctagctcatttgctcccctaccttataaaagtgcccgctttctgctcccaaagtgaagcagcacatttaaatgcaggatgctttgtgcccttccccaagctagcttctgaataaattcacatttttttttttttgtatcagacctcacactccctaactggactctgcattcagcaaacaactaaactcctttttggttacaatagaccttttagaataagctatgttgtactaaaatttgtgctgccrttgcaatatattgtagttacttgcttaattgctt

SEQ ID NO: 256629 - DNA, 559 bp, Homo sapiens
gcagtcacttttggaaaacagctggccagtttcttattaatgtaacatacaatttccatatgattcatgtagagaaatggaaacataaatccacaaaagacccacacacaaatgttcatagaagctcattcacaataggcaaaaattaaaagcaacccaaatatccatcaattggtgaatgaataaaaaaaattgtggtaaacccrtgcattcaaattctactcagcaataaaaagaatgaactgctgatccatgcaatggtatgaaggaatgtcaaatgcattgtggtacatgaaagaaatcagacagaaaagactatatgttgtatgatttcatttatatgacattgtagaaagagcaaaactaaagggacagagacacatcagcatttgaaataaaagcaattgattgaaaaggagcactagaaaactttgagttgataaatatgttctgtacctcaattgtggtagaagttacagaattgtacccttttgtcaaaacttatcaagtatacttcaaaatgatgaattttatttcatgtaaactataccataataaa

SEQ ID NO: 256630 - DNA, 554 bp, Homo sapiens
gtatacacttattattacggatacattactacagatattatcatcatttatttaccaattataagggaccagatcctttgctaagaattttgcatttgaaagctcatgtatgcttcacaacaaatttatggtaagtattactattcccattttacaaatagaaataaaagagagattaagaaagattcccaaagccatctagcttgctaaattgtggagtcaagatttcaacccaagtctctctccctgctctatctgcctctgcacccctctattccactttctcttctgtttcastggacatacaatactgcaggtccagcctactcattgtcttggttcctccagttacaattctccttcccatatccccaacatttactttccattctaccaaatcattcttgccaatatccaatttgtacatttttagcaggtcaatacacaacatatttatattttatatggatccaagtatggaatctattgagatagacttgattgaaatagggtaatagaaataagattttcatcattcttactgaaaatccact

SEQ ID NO: 256631 - DNA, 523 bp, Homo sapiens
aaatgcatattattatgaattaataacattatttgtgtatacatttaatattttgattattttttcctaaatgctgatattcaattaatcccagagtcaatagcattttcctttcttttctttagtattcataatcttctttagtacagtgattacttaatacaaataataaatgataggcacatccataggaccaactaaacagcaagggaactggctgagacagcaactagactaaggcttgacagtcttagctgtactaacaaaaaactagttttcgtttgttcattgtttgtttttyaatctgtgcatcaagttttatttggtcaacgacatttttcaatcaaggaaactgtgtcattagttttggctctaaacacactttgcgttagaatagacctgagttcaagttcttactagttgtttgacttcagtttcctcatctttaaaatgggtataataatatctactttcaagtttgctatatggatgaaataagtccattagtataaaccttttttct

SEQ ID NO: 256632 - DNA, 523 bp, Homo sapiens
aaatgcatattattatgaattaataacattatttgtgtatacatttaatattttgattattttttcctaaatgctgatattcaattaatcccagagtcaatagcattttcctttcttttctttagtattcataatcttctttagtacagtgattacttaatacaaataataaatgataggcacatccataggaccaactaaacagcaagggaactggctgagacagcaactagactaaggcttgacagtcttagctgtactaacaaaaaactagttttcgtttgttcattgtttgtttttcaatctgtgcatcaagttttatttggtcaacgacatttttcaatcaaggaaactgtgtcattagttttggctctaaacacactttgcgttaraatagacctgagttcaagttcttactagttgtttgacttcagtttcctcatctttaaaatgggtataataatatctactttcaagtttgctatatggatgaaataagtccattagtataaaccttttttct

SEQ ID NO: 256633 - DNA, 581 bp, Homo sapiens
ttcaaaagcacaagcaacaacagcaaaaatagacaaacagaattaaattaagttaaaaatcttctgcatagcaaaagaaacaatccacaaaattaagaaggtgaggtgcagtggctcacacctgtaatcccaacactttaggaggctgaggcaggtggattgctggagcctaggagttcgagaccagcctgagcaacatggcaaaacctcgtctctccaaaaaatagccaggcatggtggtgcaagcctgtagtctcagctactcaggaggctgtggtgggaggatcagttgagtctggggaggttgaggctgcagtgacctgtgactgcaccactgcaccccagcccgggcaacagagtgagaccttgactcaaacaaacaaacaaacaagctaacaaagtgaagagacaatttaagaatgggagaaaaaagttaccaaccattaatccaaccaggaattaagaaccagagtataaaaggaactcaaaaytcaatagcaaaataattatcataataatcaaattttaaaacgggtgaaagacttgaatagacatttctcaaaagaagatgtacaaatggc

SEQ ID NO: 256634 - DNA, 574 bp, Homo sapiens
tttccgagagcttactagtcaagttgcccttgtttattccctaggggatgcgtggtggtattgtggtggaccactgttgggtactctgtcaaagtaaatggagaagcacttgcgctctagtccaattggccatcccttttaccctggcatttcatcaacaaaacaggaaggaaaatcacaaaaaaagaggtgcccctcctggggtcttttgacyttcatggttatgtagatgccattggagttccacgaggggtgccaaatgaatttaaagcccaaaatcaaatagccgcaggatttgaatctgcattgtgctggtgaccaactataaacaagaatgtagattggataaattatatttactgtaatcaacagtgatttttcaattacacaagagatgccattaaaggaataactgaacaattaggccctaccagccaaatggcctggaagaataggatagcccttaacatcttgacatgatattagctgaaaaaggtggagtatgtatcatgattgggacccaatgctgtacttgcatccctaataacactgcacccgatggaaccataacaaa

SEQ ID NO: 256635 - DNA, 576 bp, Homo sapiens
aaaactagcaagagggttgggcatcttaaaaaattaacattcatataggtagttaatttttaaactaattttcaaacacataggcactaagtgagatgaaaaccatgtgttcattccataaatcaggcatatatacacagcattayacgcaagcaatggagatgttttaaagattataatatacagtccctaacttccagttttcatccacaaaacaaaacaaaatgatttactacatgatagcttttaaaatttttaaatcttttgttatactcaagattactgttggcatgttgaccacagttcgacaatgaggactcagctttatggaatgtgaagataataaaggatcctgattgagcttttcagagttttataaaagaactgggtcactctgtccttaaaaattcacacataaaattaatatgaactcaagtaaataacatttctatagtaatttattaagaaaatagtgatgatatttttataagcccaaaaacctgaaattagggagttgtacaagaagttgcagttctacatcaatcttagcatcaaattaatttagttttttctatt

SEQ ID NO: 256636 - DNA, 576 bp, Homo sapiens
aaaactagcaagagggttgggcatcttaaaaaattaacattcatataggtagttaatttttaaactaattttcaaacacataggcactaagtgagatgaaaaccatgtgttcattccataaatcaggcatatatacacagcattatacgcaagcaatggagatgttttaaagattataatatacagtccctaacttccagttttcatccacaaaacaaaacaaaatgatttactacatgatagcttttaaaatttttaaatcttttgttatactcaagattactgttggcatgttgaccacagttcgacaatgaggactcagctttatggaatgtgaagataataaaggatcctgattgagcttttcagagttttataaaagaactgggtcactctgtccttaaaaattcacacataaaattaatatgaactcaagtaaataacatttctatagtaatttattaagaaaatagtgatgatatttttatmagcccaaaaacctgaaattagggagttgtacaagaagttgcagttctacatcaatcttagcatcaaattaatttagttttttctatt

SEQ ID NO: 256637 - DNA, 627 bp, Homo sapiens
gctaattacctgacaaagaacttggtgccgaatggcatagctgaatgccagttaccagtgggagagtgtcaatgaggcagactggatcaatatagcacaaataactcaacccagaatttaaaaccaagacttggcagcatttctcatcatccttggaaacttaaaaacactagacatctacttttcagaaaaattrgacatatagacaaaatttcgttttacagttttagagatacataggtcccaggctcattactcttaatttagaaaaattaacctgtggcataatttatactgcgtgactggtacttccatgatgataaaataagaaaaatgagttgtttggtaaatgaacctgattttttgaaattgagtttcaaaacggtacatacttcaagcagttctacaaaaaatatcaatcatttagtcaacctatccaactgttctttgcatatccacggttctaggcgaaggtacaacagaattgattaacacatgatccctagttgttccagaaaaggaggagggccacctggacctgaaggatgagggaatctccagggtagagatgtgtgtgaagtacagagaaaacgttccagataccagacagatccagcagtgaaccat

SEQ ID NO: 256638 - DNA, 569 bp, Homo sapiens
ttcttagacagttagcaagaaataacaaaatctatccttactcttcaatcccaaatagactctggcagcagtgactctccaaaaatgccgaggcctagacctcctcactactgagaaaagaggactctgcaccttcttaggggaagaatgttgcttttacactaaccagtcagggatagtatgagactccayccagcatttacaggaaaaggcttctgaaatcagacaatgcctttcaaactcttataccaacctctggagttgggcggcatggcttcacccctttctaggtcccatgacagccatcttgctattactcacctttggaccttgtatttttaaactccttgtcaaatttgtttcctccaggatcaaggccatcaagctacagatggccttacaaatggaactccaaatgagctcaactaacaacttctgctgaggacccctggatcgacccactggctctttgactggcctagaaagttcccctctggaggaaactacactgcagagccccttcttcacccctatccagtaggaagtagctagagtggtcatcgcccaat

SEQ ID NO: 256639 - DNA, 569 bp, Homo sapiens
ttcttagacagttagcaagaaataacaaaatctatccttactcttcaatcccaaatagactctggcagcagtgactctccaaaaatgccgaggcctagacctcctcactactgagaaaagaggactctgcaccttcttaggggaagaatgttgcttttacactaaccagtcagggatagtatgagactccatccagcatttacaggaaaaggcttctgaaatcagacaatgcctttcaaactcttataccaacctctggagttgggcggcatggcttcacccctttctaggtcccatgacagccatcttgctattactcacctttggaccttgtatttttaaactccttgtcaaatttgtttcctccaggatcaaggccatcaagctacagatggccttacaaatggaactccaaatgagctcaactaacaacttctgctgaggacccctggatcgacccactggctctttgactggcctagaaagttcccctctggaggamactacactgcagagccccttcttcacccctatccagtaggaagtagctagagtggtcatcgcccaat

SEQ ID NO: 256640 - DNA, 409 bp, Homo sapiens
cactaattggtgctctgtggctagctagaggtttgtaaaatgcatgaatcagtgctctgtaaawacacactaattggcgctctgtggctagctagaggtttgtaaaatagaccaatcagcactctgtaaaatggaccaatcagcactctgtaaagtggaccaatcagcaggatgtgggtgtggacaaataagggaataaaagctggcccagccagcagtggcaacccgctcaggtccccttccatgctttggaagtttgttctttcgctcttcacaataaatcttgctgctgctcactctttgggtctgcaccacctttaagagctgtaacactcactgcaaaggtctgcagcttcattcctgaagtcaatgagaccacaaatccaccagaaggaacaaactctgggca

SEQ ID NO: 256641 - DNA, 409 bp, Homo sapiens
cactaattggtgctctgtggctagctagaggtttgtaaaatgcatgaatcagtgctctgtaaaaacacactaattggcgctctgtggctagctagaggtttgtaaaatagaccaatcagcactctgtaaaatggaccaatcagcactctgtaaagtggaccaatcagcaggatgtgggtgtggacaaataagggaataaaagctggcccagccagcagtggcaacccgctcaggtccccttccatgctttggaagtttgttstttcgctcttcacaataaatcttgctgctgctcactctttgggtctgcaccacctttaagagctgtaacactcactgcaaaggtctgcagcttcattcctgaagtcaatgagaccacaaatccaccagaaggaacaaactctgggca

SEQ ID NO: 256642 - DNA, 611 bp, Homo sapiens
gcctcatttatgaaatacatggagacagacatatgtcattggtcccatctgagctcttaatcactttttagtcttttgtacacaaagatttctccccacatttgctcttctcaaattctttcccatctctgttgaaagcagctcatccttcctgttgtttactccaaatccttggatgcatttttaaatcctgccttcatctyattctatctgccaggaaatcctcttggatctaccctcaaaatatttcctgagtctaacctgcttatgatctttatgactatcaccttttccacaccaccagcatctctcagtagactattgtaatatgtttccaagtagtgttcatgtttctaccctcatctcctcccaccctcttaggatgatttccatacagcacttatggctatctttttagaacataagctgggttatgttgcttttctattcaaactttccaaaggatttccattttgtttattgtctgttcataatttttaaaaacattagtttgatgagagcagagattgtggggttttttagttacctgaggcatcccacgttcccagaacagttcctggcccatggttggttctcaataatatttactc

SEQ ID NO: 256643 - DNA, 611 bp, Homo sapiens
gcctcatttatgaaatacatggagacagacatatgtcattggtcccatctgagctcttaatcactttttagtcttttgtacacaaagatttctccccacatttgctcttctcaaattctttcccatctctgttgaaagcagctcatccttcctgttgtttactccaaatccttggatgcatttttaaatcctgccttcatctcattctatctgccaggaaatcctcttggatctaccctcaaaatatttcctgagtctaacctgcttatgatctttatgrctatcaccttttccacaccaccagcatctctcagtagactattgtaatatgtttccaagtagtgttcatgtttctaccctcatctcctcccaccctcttaggatgatttccatacagcacttatggctatctttttagaacataagctgggttatgttgcttttctattcaaactttccaaaggatttccattttgtttattgtctgttcataatttttaaaaacattagtttgatgagagcagagattgtggggttttttagttacctgaggcatcccacgttcccagaacagttcctggcccatggttggttctcaataatatttactc

SEQ ID NO: 256644 - DNA, 611 bp, Homo sapiens
gcctcatttatgaaatacatggagacagacatatgtcattggtcccatctgagctcttaatcactttttagtcttttgtacacaaagatttctccccacatttgctcttctcaaattctttcccatctctgttgaaagcagctcatccttcctgttgtttactccaaatccttggatgcatttttaaatcctgccttcatctcattctatctgccaggaaatcctcttggatctaccctcaaaatatttcctgagtctaacctgcttatgatctttatgactatcaccttttccacaccaccagcatctctcagtagactattgtaatatgtttccaagtagtgttcatgtttctaccctcatctcctcccaccctcttaggatgatttccatacagcacttatggctatctttttagaacataagctgggttatgttgcttttctattcaaactttccaaaggatttccattttgtttattgtctgttcataatttttaaaaacattagtttgatgagagcagagattgtggggttttttagttacctgaggcatcccacgttcccagaacagttcctsgcccatggttggttctcaataatatttactc

SEQ ID NO: 256645 - DNA, 586 bp, Homo sapiens
atctacaaaatagactttgcctgtttcataggtcctaagattagcatgaagtcatggattctgttgtagggggagcgttgcataggaaaaagggattgaagcattagaattgtccaaaatcagtaacacctcctctcagaaatgctttgggaagaagcctggaaggttccgggttggtggtggggtggggcagaaaattctggaagtagaggagataggaatgggtggggcaagaagaccacattcagagsccaaaagctgaaagaaaccatggcatttatgatgaattcagggtaattcagaatggaagtagagtaggagtaggagactggtgagagaagctagagtgataaacagggtgtagagcaagacgttctctcaccccaagatgtgaaatttggactttatcttggagataatagggttaattaagcacaatatgtattagctagggtaaagattagtttgttgtaacaaagacatccaaagatacagtagctgaataagatagagaatttttctctcaaagaaagtctaagtaggcagctcagaagtagtatggctggaagcaacctgatgatattgg

SEQ ID NO: 256646 - DNA, 544 bp, Homo sapiens
cccagggcctagccctacaacaattattgggtctattcactgtaagttttaatttcaggctccactgaaagagtaagctaagattcctggcactttctgtctctctcacagttggctcagaaatgagaactggccaggccaggcatggtggcttacacctggaatcccagcactttgggaggccgaagtgggagggtcacttgaggccaggagttcaggaccagcctaggcaacaaagtgagataccccctgaccccttctctacaaaaataaattttaaaaattagccaaatgtggtggtgtatacttacagtcccagctactcaggaggctgaggcagggggattgcttgagcccaggaattcaaggctgcagtgagctatgatttcaccactgcacttctggctgggcaacagagcragaccctgtctcaaagcaaaaagaaaaagaaactagaactagcctaagtttgtgggaggaggtcatcatcgtctttagccgtgaatggttattatagaggacagaaattgacattagcccaaaa

SEQ ID NO: 256647 - DNA, 615 bp, Homo sapiens
tgcagttaaattagtttgggaatcaagccaaaagaatcttaaaccaaagaatttgattgaaaatttttcaggatttaaaaatcaaggatatgatatttctaatatttaatatttgcatttttctatcttaagtttttcaccttttaaaatagagatttctagtttggcaaaatgtatacaggatccaaaaacatcttaaagcagtttaattttccatttacaatcatcaacttaccccttctcattttttctcttaaatgtatggaatcagtttggattcccatcagattttgtttcattctttgaatgcttccttttattctaaatttggtaatatggtaagagtgtgagagggtgaactggaatttctcctcaatgcatttcatggccatctgaattaactgattttttttcacttggtccttttctgctrcatgaagaacatcaggattgtaggcaacatcaatgactgtgtaagcatctgtgtgtgtaattgaaagggtatgaaatgaagaaaaattgttgcactaatgatactgtcaggcaatatattaaaccatattcctgataaagctagagaatattcctgtatttttcagaggtaatcacagtagt

SEQ ID NO: 256648 - DNA, 613 bp, Homo sapiens
ggacttgtgagccagaatgcctagattccggtcttagttctatctctcactagctctgtgaccttgagcaattaatgttctgttcaaaatgaagacgataatacctctaccataggattattgcgagattaagtaagctaatagagaggctgggacacttctctacgtcttcagataaatctccttagcctcttctcccattggagaggtgtcccacagcatctttagaatgaggaaaagaggtttagattcttcaattactgtgtaagggttatgctaaacgggaaacttaactaacggataatcattccataggtctgcaaacccacctcttctctcagttctaacgggtaatcattctataggttggcaaacccacctcttctctcagttccttgacaaaccgcgacgcctgttaccagggtaaccagcctgggtacaacawctaattgggtccggggaacttcagggagaaaagtctcttcatatctagttccggaatgtcccccttctggtgccaggcttgcttttcagttgggcctgacccacttctcttccaggaaagcgcccgccttccttctgcacccgtcaacctctggagtgtcctgaaaac

SEQ ID NO: 256649 - DNA, 493 bp, Homo sapiens
caagctggtaattccctaactatgtagtaaatgataatgaatggagttaggatgttgattatcaggaggatgccattggtgctcctcctatctgtgaaatttttaatcaaaataataytccttctccctcaaaattcttaagattttaatcaccagtgaagattttccagacatggtgattctataagctctctcttatttctcaggtttgatctgggtaaaacatattgaaagttctggaatattgcctcactttatccaaaatttaacgtaagttctttctagaggtgtttagagacctttttatggaagctgactaaataccacacctgtatatggcaggggcagatttctctcacgaattagtcatgaagaatatggaccacatcttcaccccaggacatgatgcttctccatgaatgcttggctgtatggaatagaaggtggtaagaattctaaatttttaaaaaaaaagattaatagaagttagaaa

SEQ ID NO: 256650 - DNA, 542 bp, Homo sapiens
gtctgttcaggatatctaattcttcctgatttaagctaggagggttgtatcttgccagaaatttattcatttcctctaggttttttagtttatgtgcataaagatgttcatagtagccttgaatgatcttttgtatttctgaggtatyggttataatatctcctctttcatttctaattgagcttatttgcattttctcttttcttggttaatcttgctaatggtctatcaatttcatatatcttttcaaagaaccagctttttttttttcatttatcttttgtatttcttttgtttcaatttcatttagttctgctctgatcttggctatttcctttattctgctggttttgagtttggtttgttcttctttctctagttccttgaagtgtgatcttacattgtctatatgtgctcttttggacttttcaatgtaggaatttagggctatgaactttcctcttagccctgcctttcctgtatcccaggggtttttataggttgtgtcactattatcattccatttgaaaaatttttaaatt

SEQ ID NO: 256651 - DNA, 498 bp, Homo sapiens
gtagaactcatttcacagaaaagaagtaaagcaatcagctgacgcttgtgaaaggaactactcctattattttcataccatggataagtagtcagccttatacaatgataacttgacctattgaaaacttatttgcactttccctcaattaaccatactagactgaagatctgcyttgtcttattttgtgtggtatatgatctgtgacaataatttatatagaatgctgcctcttccatagctaaatgcataggtctagaaattgaggaggaggaagagtagtagcttttaaaatcttacctgatattacgatttttgaataattctattttaatcccttcattctgagaccttaggcatgaaagtgacagtatccaaaggaggcagacatattttatataaaatatgaaaaaggttttaccaaattgccacctgtggttagcatctgtcaatcttggactactcatgtcatgataatagcgaaaagaatcattacca

SEQ ID NO: 256652 - DNA, 564 bp, Homo sapiens
gtaacaatcctggacaatgtatttgcaaaaatattacaaagatattttgcaaaaatacatttgcaaaaatattacaaagttataatgtctttmacattttaaaaaggaaagtaaaacactcagactccattctgggtttaatcatcactcccatggcccccccaacaaaaagatatgttgaagccctaacccctattaactgagaatgtgaccttgtttgaaaacaatctttacagagtaaataaattaaaattagatcattagggtatgccctaatccaatgttacaggagcatttatgaaaaaaagggaaagttagatacaaacatgtacacaaggaagactccatgtgaacacgtaggcacagatggaggagtggaggtggtgatgtatcttcaagccaaggaacaccaaagattgccagcaaatctctgaaaactaggagggagaggtgtggaacagatctttctttcacggccctgggaaggaaccaaacctgcttacaacttgatcttagacctgaagccttcagaactgtgaaacaacaaagttctctggtttaggc

SEQ ID NO: 256653 - DNA, 564 bp, Homo sapiens
gtaacaatcctggacaatgtatttgcaaaaatattacaaagatattttgcaaaaatacatttgcaaaaatattacaaagttataatgtctttaacattttaaaaaggaaagtaaaacactcagactccattctgggtttaatcatcactcccatggcccccccaacaaaaagatatgttgaagccctaacccctattaactgagaatgtgaccttgtttgaaaacaatctttacagagtaaataaattaaaattagatcattagggtatgccctaatccaatgttacaggagcatttatgaaaaaaagggaaagttagatacaaacatgtacacaaggaagactccatgtgaacacgtaggcacagatggaggagtggaggtggtgatgtatcttcaagccaaggaacaccaaagattgccagcaaatctctgaaaactaggagrgagaggtgtggaacagatctttctttcacggccctgggaaggaaccaaacctgcttacaacttgatcttagacctgaagccttcagaactgtgaaacaacaaagttctctggtttaggc

SEQ ID NO: 256654 - DNA, 284 bp, Homo sapiens
actcagtatatgtgaaaacattttgccagcagtggattactactcttacataagttaataaaatatagagaggaagcaattgaaaaaacaaggtcaaaaaggatactggatgacatcaagggatataaatagaagttgrgagcagcattgtaaagaaagatgactattttctctgggactggagggtaatttgagaatgtaagagtagaaatggagacattgctatcctcatctattctagagcacattcaggttcgttatgtggaatttgaacatatctgcca

SEQ ID NO: 256655 - DNA, 590 bp, Homo sapiens
tactaataaaaatcaatgaatctaattatatattatttgagctgccattcttttgcattataaataactgtttaagtgccttatatttattttcctattttagacttgtgaattttcatagatttaactkgttctatttaattaggtttttcattgtggctggacatttgacaatctgatatagctcctttacaatttgagcaatacccccaaaacccatgaaataattcttgctttttctcaagctagtttagcctgccttgaatgttccttgctatgagatacaaaataagcttctttccttgttctcctcttttagaggtgttagggtgcacataagatggtcttagtcatattgctggtagccaaaatgatgctgtgccagggtacgttagtgagagaggtgcaaaagagattttttttctaaaatcatgaatgcacaatgtttctaacttagtagtgatctccctgtatctctcattgttccaatatgtattttatttgcattttttaacaaaatacctatttaactgattaactcctcaaacaagcttttattacatttcctttttatactcctttgaggcctc

SEQ ID NO: 256656 - DNA, 621 bp, Homo sapiens
catacctatttaatattctaaatgaactttaacattttctataataaaatcctattgggatatagaattgaattaaatttaactaaactagaaaagtaatttgtgaagaatcaacatttttacaatattgtcttccctccagcaattgtatattctttttaattatctgacttcagyagagttttacatcattcttttcttcattatatgttctctatttcatgaattgttacctaagtatttatccttatttctgttataaataaccttttaaaagataacttcaactttagacagggaaaaaaagaacactaaatactatattacaagcttcaactatttttaaaccctataattttttaacatttgttctcagttgctttactacatatttatcaactccaattttacttatttccttagattttgtaagtataaaataacataacctgcatgtgctaatttggtttccctacctctaatagctttgtgttattttgttttcaagccttattgcattgctattaaacatgatgaaaattgacattttaatcctgattctaagtctatagcaattctacacaattaaattatgaatttacactgaatttttaactgttt

SEQ ID NO: 256657 - DNA, 589 bp, Homo sapiens
gccaaatcttggataacttgagcatataataaataatattttttaaatataactcaccaaataagaattcataagtccacctagatagaaagaatagatggaagggaggaagagaggaagggaagaagggagggagggaagaagggagagaggggasgtaggtaaaatcttttgttacagtacaatggcaaaaagtaaatgtgaaaaagcatagaattaaaaatcaccatttagcaaacataatcatctattcaggcaaggatcatcagccagattgtttaattagattgaaagtttgaaaagtaacagggatttacataatctcaaagtatcttcccacaaggttcttattagttacaaaaggagtagtaataccattatagtagaaataactggcaaacattatctaaaccaagtgatcaaagtgaacatcaccagtaaatgggataaatcagcatcatttgcctcttgatagcatgcaataatatcagatcacttttgtgggatacctgccaaacgcctgatgctactcatgaggaaacatcagacaaattgaaattgaagtacattctacaaaattactggcctg

SEQ ID NO: 256658 - DNA, 511 bp, Homo sapiens
ttatttgctgtcagggtcctggtaagaaacagatggtacatcacgagacgagggcgtcattgaagaatgaacaagggatgagaaaacagcatctgggctagcccaaggccatatggagcaaggaaaggaagtagttaccgaaatctggcatgagcagtgactataggaagtctccccaacctgggccactgacggccttaggtatgggagcatgaggaatgtcaagcctcagctcagcagatatgttcttggggggacaagtttcctcaatttctttctcctttcactctgtgaattctgccattggccaaatccaatgggaagagagatggctagggtgtctgatactgtctataatgatcagccttcctggatggataaaggaggaaagtagattgggaaggccaggaatatccaatatattctaccacaatccttttcytatacatttaaaaatgcaacttaaaaaaataccattcagaccttgtgaatcaaatacttaaaacacctg

SEQ ID NO: 256659 - DNA, 581 bp, Homo sapiens
gtgtatatgtgtgtgtatgattttaaagcttcatagttatatacgtatacataaaacatacacatttatatatttatatataaagaaggaatattgtgttaatggttttattttttacataattcatacttcagaaattatgcagttgacatttaattttagttataattgagctgtttagacaaacaaaaaaccctgttgtgtaaatgagcttgaatttagttatgttgaatagaaattaatgattcataatacttttttrttactcaaaataacctcaagaatttcagtataataatcacaagatccttgttatcgaaattacatatggaatcattagttatattgacaataaatggtaaataatttcaatcttcttcttattattttatgaccaatttttttctgataatataattacaactaacttttgaatttttcagtacacaataacatatttatcctttttaaaaatttatttattggccaggcacagtggctcccacctgtattccagcactttgggagacagagtggggcagattgctttgagctcaagagttcgagactagcctgggcaa

SEQ ID NO: 256660 - DNA, 589 bp, Homo sapiens
acaaggcatttttatcaaattaaaacaaaattttctgatgatttgtattactaaaaagaggtcaaactgcctcttctgcttatgttcaaccagaggctttgggatcacttaccatggatgctggaaaaggagtctgtgttggtgtgaagatttgaatccatgtccattaatatccttcgcaaaacaaaagtctatgatgactcctgcggctttcagtgtacttagtattgtttctagtttaaatctctaacatgtttccaacatatactgctgcttagaattaaaaataaataaaaatttttaacacatgcccatctgaatctttacacaatgcagttatgtatgtatcaaccacactgccaaatatttttgtggtggttgtcagtaacatttgtttttcaagaaaataaaatatacccaagaagaaacttaattttagttttcttaccacttccttgaagaatctttcttcccttagtatgactttattcatctttttttctttttcttgctttttcatttataaacctttttaaytttttttcttttttttttttgcttgagggcatttgctataatcacaaaagtt

SEQ ID NO: 256661 - DNA, 608 bp, Homo sapiens
tgagacacttcaaatcaacatatgaacaacattatcttttgctatcattttctatgataattaatgccattatcatcccgcagttaaccaagatagaaatcccaacatcatcttaggcagcctcccacctccaccttctttggcctattatccaattaatcatctctcaattcccactcgaactgccttaggtcaagtaattatcatctcacctctaactattacaatcactacttagcaagaattgccgcaccctccgaaaacagttctcaaatgtacaatgtatactcattagttccagaatcattattctaaaacaataataagatatttttcccactttctgaaatattttcatggttctttttttttaataagtcaataggaacactttattatgaaacttaaaattaaagctctcattaatttttggtgggaggtggggagtatgtgaactatcatggwcacttttcagtttttgacattgccagagaaatatatggtcaaatatatttaaatatttttagtattcataatacatttctaaaataaaagaatccggctattggaaattatgaagtggcaaaacttctaaaaaaatgtactaa

SEQ ID NO: 256662 - DNA, 592 bp, Homo sapiens
tgcatgttcttgacactgttgtcgaaaataagttcactatagccgtgtggatttgtttctgggttctccattctgtttcattggtttatatgtctgttttcatgtcagtactatgctgtttcggttctattgttctatagtgtaatttgatgtcaagtaatgtgatttttttctgytttgttctttttgcttaggatagctttggcttttctgggtcttttgtgctttcatataaattttatgattcttttttctatttctatgaagaatgtcattggtgtttcaataaggattgcattgaatcttgctttgagtagatcacttcgggttgtatggacattttaataatgatgattcttccagtccatgaacatgaaatatgtttccatttcttggtatcttcttaaatttctttcactggtattttatagtttttattatagaaatttttcacttctttgattaattcctaggtatttagtttcatctgtggctattgtaaatgagattactttttaaatttatttttcacattattcactgttggcatatagaaatgctattgattttctgtgttaattttgtatcctgc

SEQ ID NO: 256663 - DNA, 545 bp, Homo sapiens
aaatagcctgtcttcaagctcactaattctttcttgtgcttgatcaattcttctcttaaaggattctgatacatttttcaactccagaatttctgcttgattcttttaaattatttcaatatcgttgtttatttttttctgatagaattctgaattccttctgtgtgttatcttgaatttttttgagtttcctcaacacaggtattttgaattctgtgttgaaaagattacattttctgtttctccaggrttgattactagtggcttatttagttcatgttgtgaggtcattttcctggctggtgttgatgctagtagatgttctttggtgaatggacattgacaagttaggaatttactgcagtcttcgctgtttgggcttgtttgtacctgtatctcttaacgctttccatatattctaaaaaacttgggtgttgtgatctgagctgcatctgctttagggagtaccgcaagcctggtaacactggttcttgcagacttgtagaggtactgctttgatgttcttggacaagattcaggagaat

SEQ ID NO: 256664 - DNA, 545 bp, Homo sapiens
aaatagcctgtcttcaagctcactaattctttcttgtgcttgatcaattcttctcttaaaggattctgatacatttttcaactccagaatttctgcttgattcttttaaattatttcaatatcgttgtttatttttttctgatagaattctgaattccttctgtgtgttatcttgaatttttttgagtttcctcaacacaggtattttgaattctgtgttgaaaagattacattttctgtttctccagggttgattactagtggcttatttagttcatgttgtgaggtcattttcctggctggtgttgatgctagtagatgttctttggtgaatggacattgacaagttaggratttactgcagtcttcgctgtttgggcttgtttgtacctgtatctcttaacgctttccatatattctaaaaaacttgggtgttgtgatctgagctgcatctgctttagggagtaccgcaagcctggtaacactggttcttgcagacttgtagaggtactgctttgatgttcttggacaagattcaggagaat

SEQ ID NO: 256665 - DNA, 612 bp, Homo sapiens
tatataatattctaaatcctttatatataatataggatattataaatattatatatcctttatatataatataggatattataatattctaaatcctatgttgtcatttcaatgatgtccaagtcatcactgggagtagattccatctcaaaaaaacaaaaacaaaaacgaaaacaaaactttctttgctcatccgtaagaagcaattcctcattcattcaagttttatctatcattagattgcagaaattcagtcacattcttgggatccacctttaattctagttcttttgctattttcaatatatcygcagttatttcctccataaaagtcttgaacccatcaaagttatctatgtggttggaatcaacttcttccaggctcctattaatgttgatatttttacctcctctcatgagttacaaatactcttaatggcatctagaatggtgaatccttttcaggttttcaactgacttttcccaaatccatcagacgaagtactatctatggcagctatagccttacaaaatgtatttattaaataataaaacttgaaagttgaaattacttctttttttgaaattacttcttgattcatgggttgcaga

SEQ ID NO: 256666 - DNA, 542 bp, Homo sapiens
tttaagcagtcctatgaccccacaaaagccttgctcagacattgtccaagtagccctatccacccaagtatgggataggataaacacccatttatgcccacagaggcaracctacagatcttggattcagcagctttgtaactgaaacagccctgtaattcagatcctgtcctcttcaaccatactcctgagccaatcttgcctggccagagttccaaacagtgaatgagcaggagccttccaagagacccagatggtataacatttatccacaggaaacaggcccatcatctattgacccaactgcatatcctgaagtggacctttatcccagaaccacccctactaaccaaagtcctggaggcagtttcatctgaccaggagtcaatcaggatccatgccttcctctgtaatagtactgccaaacactgaccccataatgaaccacactgtggatccacatgtaaagatgtcatgtgacctggttgtgaccctgcttggctataagcctagaggcaatcccatcattctagagaccagac

SEQ ID NO: 256667 - DNA, 577 bp, Homo sapiens
tacactgggtcagacctgaagctagcacagcactgggttttgcccaaggcccactgtaactactacctggctagcacttatgtttactcaaggccctagggctctataatcagcagggagtgaagccagctaggcttgtgttttcctcttcagggtggcaagttcccctggtcccaggtgagtccagtgacgctgtccaggaaacaggacaaggaatcagaaaccatatcaatctacctggtgatctattttactgtggctgagatggcacccaagccatgagacaaagtccttcccactcttcccttccttttccccaggcagaggagtctctccccacgtctgccaccactacaggcccatggggagtactgccagggtaccactgatgttcacttagggctcaagatctcttcagtcaacttgtgtaaatgctgccatgcctgggactcacttttcaggatagcaggcktctctctggcccaaggtagtcccagaaacgctgtaagagccaagggaagaatcagggacctcaggggcctgcttggtgctcttcctcactgtgacaaagctggta

SEQ ID NO: 256668 - DNA, 527 bp, Homo sapiens
ggacctcaggggcctgcttggtgctcttcctcactgtgacaaagctggtacctctgctgcagaacaaagtctcctttattcttctctctgcttttctcaagcagaagggaactttctctgtagctgtcacagctgggactgtgctgggtcatacctgaagccagcatgactcagagtttcatccaaggcccacagtatgtactaccrgcttactcctgcagaatatttagagcctaagggctctttagtcagcaggtgataaatctttctttttttttaaattttattattattatactttaagttttagggtacatgtgcacaacgtgcaggtttgttacacatgtatacatgtgccatgttggtgtgctgcacccattaactcgtcatttagctaggacttggtccttccctttaaggaaacaggttctctgctgtcccaaggtctgtccagaaatttcatccaggagctagggcctgaaataggggcctcatgactctccctccttccctgccctactgtggtt

SEQ ID NO: 256669 - DNA, 527 bp, Homo sapiens
ggacctcaggggcctgcttggtgctcttcctcactgtgacaaagctggtacctctgctgcagaacaaagtctcctttattcttctctctgcttttctcaagcagaagggaactttctctgtagctgtcacagctgggactgtgctgggtcatacctgaagccagcatgactcagagtttcatccaaggcccacagtatgtactaccggcttactcctgcagaatatttagagcctaagggctctttagtcagcaggtgataaatctttctttttttttaaattttattattattatactttaagttttagggtacatgtgcacaacgtgcaggtttgttacacatgtatacatgtgccatgttggtgtgctgcacccattaactcgtcatttagctaggacttggtccttccctttaaggaaacaggttctctgctgtcccaaggtctgtccagaaatktcatccaggagctagggcctgaaataggggcctcatgactctccctccttccctgccctactgtggtt

SEQ ID NO: 256670 - DNA, 605 bp, Homo sapiens
tataggttctaggctgggcgcggtggctcacacctataatcctagcactttgggaggcgaaggcaggcagatcacctgaggkcaggagttggagaccagcctggccaacatggtgaaaccctgtctctactaaaaataaaaaaaattagctgggtgtggtggcatgtgcctgtaatctcagctacctgggaggctgaggcaggagaattgctggaacttgggaggcagaggctgcagtgagccgagatcacattactgcactccagcctgggtgacagagtgagactccatctcaaaaaaaaaaaaaaaagaaggaaaaaagagttacaggttctacctgcaatcaatgagaagggggttacacaaaagtgtggatcccagaaagcagaaatcacagggggcatcttataattctgcctatcgctgtggaataataacaatacatacctcttagggttgatttttttaaaagcttatttgcataaagtaagtggaatatttcatgatgcataataaatattacttattactctttttagtttgatagtcatttttgcagaagctttgagtgactaaaatggtggtgttattgggagagaatataa

SEQ ID NO: 256671 - DNA, 605 bp, Homo sapiens
tataggttctaggctgggcgcggtggctcacacctataatcctagcactttgggaggcgaaggcaggcagatcacctgagggcaggagttggagaccagcctggccaacatggtgaaaccctgtctctactaaaaataaaaaaaattagctgggtgtggtggcatgtgcctgtaatctcagctacctgggaggctgaggcaggagaattgctggaacttgggaggcagaggctgcagtgagccgagatcacattactgcactccagcctgggtgacagagtgagactccatctcaaaaaaaaaaaaaaaagaaggaaaaaaragttacaggttctacctgcaatcaatgagaagggggttacacaaaagtgtggatcccagaaagcagaaatcacagggggcatcttataattctgcctatcgctgtggaataataacaatacatacctcttagggttgatttttttaaaagcttatttgcataaagtaagtggaatatttcatgatgcataataaatattacttattactctttttagtttgatagtcatttttgcagaagctttgagtgactaaaatggtggtgttattgggagagaatataa

SEQ ID NO: 256672 - DNA, 609 bp, Homo sapiens
ttgcaaatcaagcaagcttggggtcacttatgaacctaagtagctttgtctgctcagatcttcaggtctggtctccattttattgtactgtaacacatacaatagcagaattcaaagatacttccaatgaataaaaagaagaattaatgccataaaaatttaaacatttgatgtgaaagtcaaacttcaaaatgatagaaccagaaaaatatggtattcatgtgaagtagaaaacactggctcaaacccaagtcctcccagatcttctcactatgcccgctggaattcatgctctgtaaccaacatcttccctatatttagtccttattgaaatatgtcctgaggattaygctttttttttgtttgtttgttttcaataggcaggacagacatctctttattgtatttttttttttttaacttttattttaagttcaggaatacatgtgcaggtttgttttataggtaaacttctgttatgggggtttggtgttccaattattacccaggtattaagcctgagtgataacccattaattatttttccttttcgtcttcctaatcccaccctccaccctccgataggccccagtgtctgttgttcccctc

SEQ ID NO: 256673 - DNA, 540 bp, Homo sapiens
tctgtaaccaacatcttccctatatttagtccttattgaaatatgtcctgaggattatgctttttttttgtttgtttgttttcaataggcaggacagacatctctttattgtattttwttttttttaacttttattttaagttcaggaatacatgtgcaggtttgttttataggtaaacttctgttatgggggtttggtgttccaattattacccaggtattaagcctgagtgataacccattaattatttttccttttcgtcttcctaatcccaccctccaccctccgataggccccagtgtctgttgttcccctctatgtgtccatgagttctgatcctttagctcctacttataagtgagaacgtgtatttgattttctgttcctgcattcgtttgctgaggataatggcctccagcttcaaccatgtccctgcaaaggacatgaactaattcttttttatggctgcatagtatttcatggtgtatatgtaccacattttctttgtcaatctatcattgatgggaatttagcttgat

SEQ ID NO: 256674 - DNA, 643 bp, Homo sapiens
ctataatgaggggcatttttctagagcctcttcccacaccaatgcttaaattggattgtcatgaaatcagaggctgagatratgacttggtgcaggtagtttatttgggagatagtcccaggaaacagaagtgagacagtgaggagaataagacaagaaagagagaaaagccaataaatcttactgtgttggttgctgctgagaataactggaactcaatgctacttgcaaacttcgaagtttatagaatgtgcctcagaataatcttgctaaagaactcgagactggtctgtttacataaacactactgtttagcatggtttgagtgttgtccccatggttattaaccctccgcacttctgagctgcaccttgcatctactgagtgaccttccaagacttcagataaatctttaaagcaaacaaaacaaaacaaaaaccacagagatgtcatacctgcagagagtcgctgatagtatgcatggaattgtttatgtcagctgcactgaaatcagatggactgagtagaaatggctttgggcactaccagtgtctatcatacctacatttataatggaaggaaatgctaaatttcagtttgaggttagaatggaatttctttccatctaagctaacagaacttt

SEQ ID NO: 256675 - DNA, 600 bp, Homo sapiens
cgtgtgatctcttccctggcaacattgagggcatatcatttccctgatccaagttacaaaagactgtgatttccatcttgctagttgactctccctgttgatttctccacataatgctttaatgaagcaaggtgccaggttgaagaggtccctttagcaaggaattgatggtagcctctggtcaatagccagtgaggaactgagaccttcagttcaaaagcctgttggctgctaacaactaagtgagcttggaagtggatccttccccatccagccttcagatgagaccccagctttgtgaacacagccaaggagagaccttaagacaggccccaactagacgtgcacagattccttagacatacacagattcctaatccatacaaactgtgagataatacatatgttttgtcctcagctgccaagtttgtggtttatttatttattgcacagcaatatataactaatacaagctcaatcccttmtcccagcccaaatccatttcagattttaacttcactggggtgaagattgagcccaaagtgaggcttaagcagttctgtattaccccaaaggtataataagtatgtatttaaagat

SEQ ID NO: 256676 - DNA, 600 bp, Homo sapiens
cgtgtgatctcttccctggcaacattgagggcatatcatttccctgatccaagttacaaaagactgtgatttccatcttgctagttgactctccctgttgatttctccacataatgctttaatgaagcaaggtgccaggttgaagaggtccctttagcaaggaattgatggtagcctctggtcaatagccagtgaggaactgagaccttcagttcaaaagcctgttggctgctaacaactaagtgagcttggaagtggatccttccccatccagccttcagatgagaccccagctttgtgaacacagccaaggagagaccttaagacaggccccaactagacgtgcacagattccttagacatacacagattcctaatccatacaaactgtgagataatacatatgttttgtcctcagctgccaagtttgtggtttatttatttattgcacagcaatatataactaatacaagctcaatcccttatcccagcccaaatccatttcagattttaacttcactggggtgaagattgagccyaaagtgaggcttaagcagttctgtattaccccaaaggtataataagtatgtatttaaagat

SEQ ID NO: 256677 - DNA, 571 bp, Homo sapiens
aagtctagtggtagaggcaggtaagttatagaaaatattgagggtaagtattaagtgctttaagaaagtatgcttgggctgcagggagcattgtagggttctcagaggaaatgatccttgctcctttttggaatcattccaagcagarggaacagcaagttcatgtgtatataatgggggaaggataggagataaggttgtaatgtggctctatctaatggacctttatgccatactaaagagtttgtactttatcctatacaaattaggtaagggcaaaggaattaggtaagggcaaggtaaatttagttaatagaatataactagaagatttttagtaattaggtatgggagattaggggaagggacaagttaagtgtgcttcccaggtctctgattttaataacccaatgaataatagagtggagttgggtgggatacaaaagagcagccattggggaagagcgaatatgatgaatttggtatttatatatctctattagtatatttatctataattgtgtgtgagtgtatctctcatagtactttttaaccttagctatctctcggg

SEQ ID NO: 256678 - DNA, 571 bp, Homo sapiens
aagtctagtggtagaggcaggtaagttatagaaaatattgagggtaagtattaagtgctttaagaaagtatgcttgggctgcagggagcattgtagggttctcagaggaaatgatccttgctcctttttggaatcattccaagcagaaggaacagcaagttcatgtgtatataatgggggaaggataggagataaggttgtaatgtggctctatctaatggacctttatgccatactaaagagtttgtactttatcctatacaaattaggtaagggcaaaggaattaggtaagggcaaggtaaatttagttaatagaatataactagaagatttttagtaattaggtatgggagattaggggaagggacaagttaagtgtgcttcccaggtctctgattttaataacccaatgaataatagagtggagttgggtgggatacaaaagagcagccattggggaagagygaatatgatgaatttggtatttatatatctctattagtatatttatctataattgtgtgtgagtgtatctctcatagtactttttaaccttagctatctctcggg

SEQ ID NO: 256679 - DNA, 416 bp, Homo sapiens
aaatgcacatacaaaagtatacaacacgtaagtcttggttatgtatacatttgtgatatcatccccacaatcaggacagtgaacatatacccatcaccctaaaagtgtcctcaacttctactgtcactgcttttcagcaaactgatggttctctgcatgtactctgaggcacartgctcactcccactgttatgccctccttcaggtggctttctttcccttaagctaccacctggcccttttgatctctccaaatcctgcccatccttcaagtctacgctttagccctccccaccacccaatgtctaaagggtcctttaaagttatcctttgagaataattcagcccacacttgctacttccttctctactcctaatgtacttacagacaacctctcattgtggtctttctttat

SEQ ID NO: 256680 - DNA, 589 bp, Homo sapiens
cttttaacagcaaaaactacaactctcactgtgtccacagtagtgggcttgtggatggagctcagatatttgttgggcttatgatcaagggaccattccagtgaatcagaaagttcctgtgaccacttaacatattacacgcttgcttgtgtactgctcttagatgatataaaaacaaatcaaattcccaaaccaaaaagctgcactcttttgtctgggtaaatacagctatgacatgtctatttccatggtttagaatatcaccagtgggaatctactgtggaaaattgagtacaacactatcatcatatgatttgttttgctcatatttggctgtgccattggctgcggagccaggcagygaactccacacaatgaggagcctgtgaaaacgcagagaaggcaagaaaggatgcaaacatttagtgagtatctacctcagtgggtgtgtcagagtcagttgtatcagcttgtaagagatgattgttaaatttgcaggagttttgtgagccagttattaaacaccatcattataaaaaatatatacactttaattaaataaattaaagacaaaggcaataaataatta

SEQ ID NO: 256681 - DNA, 522 bp, Homo sapiens
tcttcactaagcttaatcatttctagcttaaagggagagatgtgtgacttttccttttacttgccacttagaggctattgtggagttattaattgggctacgttcaatattgttgtgtctcaggaaatagagaagcctgaggagacggagagagatgggggaacagctggttggtggagcagtcagcacacacacaacgtttattgattatcttcacatttttgtatgggtgcrgttgtggtgccctgaaacaaatacaatagcaacatcaaaggtcactgatcacagactaccataacaggtataatagcaatgaagaactttgaaatattgcaaggattaccaaaatgtgacacagagacatgaagtaagcacacgctgttggaaaaatggtaccaataggcttgcttgatgcaaggttgccacaaaccttcaatttgtaaaatatgcgataactgcaaagtacaataaaatgtagcacaataaaacaagatatgcccatagttaagttctacaaataac

SEQ ID NO: 256682 - DNA, 466 bp, Homo sapiens
gagatcatggacttttcttctggagtctcaacctcagtccccagatgacctagaaactcagaacgacagtatttgattccttgggtgtaatgcagagctcaatatactcaaaaactgcactgtagaccaaactgtttctacctgtcagtggggagataagtacaaayattgaaggtgtttaaaaacttggatagtgccatgacattcaagcacatattgtattttgtagatttcccccatttcatttttctgttaatcaatctatgatagactgggaagaagaagaagaaaaaaaccaactggttccttaaccacagaaagtttgaaaattggtatagtgactttcgagtcagaaaaagctgagatttattacagttcaatattttactggctggttgaccttaattaagttgcataatctccctgtgccttggttccttctgcaaaataagcataacagtgctca

SEQ ID NO: 256683 - DNA, 521 bp, Homo sapiens
caattggctatcccttcccagagcttcctgcggtgcatcttctcagcataatgttttcatgatcattttttcctgatgaataaaatatcctactttcaagtcaatcatctttgacttcccagtgccaacttcagagaatggcacatagcaggcactgggcagataatggagatgaatacatgttttaaatcaccagctgatatactaatgtgaagaataattagtgttgctgttattattacagtgaaggagcataagatataacatttcctatttcaatgagccacttgctcatttaggttggctaagaacttttgcaaaactttgtttctttttgagaataargtgtgagtccaatgtgctgcatagggtttagtttttatttgtcacatcaaatgcctgtagggtgggaggaggagtgcaaagagagtggaagagactggttaagggcaagcactgtctgcaaaaaggtttctagaagaccctctaaccctgcacacataaactggatacttttcttt

SEQ ID NO: 256684 - DNA, 580 bp, Homo sapiens
actttgccatgtattttccactgttccaggggaaggggccattgatttctggcctcatttcccagaccctgcactgaccaagatagcaccacccctgttgactgccctgggaaggctcattggaaaacctcagttttaatgcctggttttaggaaggaaaataggtcaagtaaagtgggagatattctctgggtggcatagtggggtggaacactgttcgattttatttaattgggaagccctgagcagaaatcagagcaacaagtgagaagcttctggagagtccaaaggacccacaaagagaaagggaagctgagagaattaggaacaaaacttccttacataccttacctttcctctgagaaaggaaaygctggagcgaaaatgagggctcagacatcagcccagctgcacactagctttgtaacttaggcctccatttccttgcttgattggggtcattatgttattaacacacttaagcagttgtgaaatagtacacagaagtgagttagcactgttgttcacttctatggcaccaggaacatgtgcctatttcagtggtaaatagatctttcct

SEQ ID NO: 256685 - DNA, 580 bp, Homo sapiens
actttgccatgtattttccactgttccaggggaaggggccattgatttctggcctcatttcccagaccctgcactgaccaagatagcaccacccctgttgactgccctgggaaggctcattggaaaacctcagttttaatgcctggttttaggaaggaaaataggtcaagtaaagtgggagatattctctgggtggcatagtggggtggaacactgttcgattttatttaattgggaagccctgagcagaaatcagagcaacaagtgagaagcttctggagagtccaaaggacccacaaagagaaagggaagctgagagaattaggaacaaaacttccttacataccttacctttcctctgagaaaggaaacgctggagcgaaaatgagggctcagacatcagcccagctgcacactagctttgtaacttargcctccatttccttgcttgattggggtcattatgttattaacacacttaagcagttgtgaaatagtacacagaagtgagttagcactgttgttcacttctatggcaccaggaacatgtgcctatttcagtggtaaatagatctttcct

SEQ ID NO: 256686 - DNA, 562 bp, Homo sapiens
ttttttttactttaattattcttttagtttcaagacaatcttaaactggggttactagtattgtaaatctttataaaactcttccacaactcttaagcagtcaacattagtaaagagtacaygatcattaaatatatcatttttctatttctttcaatagttccatacacttgtggtttacaacatgtacatactgaatgatttttaacagctgtgtccgtgatacttttcattaaaaaaaatttagcacaaatattttcagtgtgtgtcacacaatggagtgaagcaataagggaaaaatctgtctcttgttttaaaattctgataaatctagatttttgacctaacatagcagggccatcatctgtcttgttgataaaactggattttttttcttatctagttgaaactcttctttgacatatctaaaatatttaaagctatctacacattgagttgatttttttctttaggtcggagacaccatttctaagtaaatttgaaagtgtttttaaacaaaaatgtaaccaaaggtgtcccgtattaactgggcacagtctct

SEQ ID NO: 256687 - DNA, 605 bp, Homo sapiens
aggaaggcatgacagtatgagagagatttgtagcagtggaacctttatgcagtttacacaacacttccgatgaactaggtatagttsccgagaaaaaatcaaagttcatttctgatagcttcatcttgctcaatcattattttttagggctacttcaactcttaaactgcaaaaagccaaagaggagaaaaacaactttgaactctaggatttgagattttctaggatttgagattccaacctttcattcacttggcagatggatcctgaaacatgctaggtgtcaggctttgctccctccctgtctttgggaggtggcctgatggtttcagtaagagtaagttgggagtggtagcacatgtcttagcttaactttatttaacatttttctctttcaaactgtagattcagatctgactatacattgcacatttctgtttttgttttgtttttgtttttgagagagggtctcgctttgtcatccagtctggagtgcactggcatgatctcaggtcactgcaaactctgcctcctgagctcaagcaatcctcgtatctcagcctctccagtagctaggactctaggtgcctgccactatgccagct

SEQ ID NO: 256688 - DNA, 605 bp, Homo sapiens
aggaaggcatgacagtatgagagagatttgtagcagtggaacctttatgcagtttacacaacacttccgatgaactaggtatagttgccgagaaraaatcaaagttcatttctgatagcttcatcttgctcaatcattattttttagggctacttcaactcttaaactgcaaaaagccaaagaggagaaaaacaactttgaactctaggatttgagattttctaggatttgagattccaacctttcattcacttggcagatggatcctgaaacatgctaggtgtcaggctttgctccctccctgtctttgggaggtggcctgatggtttcagtaagagtaagttgggagtggtagcacatgtcttagcttaactttatttaacatttttctctttcaaactgtagattcagatctgactatacattgcacatttctgtttttgttttgtttttgtttttgagagagggtctcgctttgtcatccagtctggagtgcactggcatgatctcaggtcactgcaaactctgcctcctgagctcaagcaatcctcgtatctcagcctctccagtagctaggactctaggtgcctgccactatgccagct

SEQ ID NO: 256689 - DNA, 605 bp, Homo sapiens
aggaaggcatgacagtatgagagagatttgtagcagtggaacctttatgcagtttacacaacacttccgatgaactaggtatagttgccgagaaaaaatcaaagttcatttctgatagcttcatcttgctcaatcattattttttagggctacttcaactcttaaactgcaaaaagccaaagaggagaaaaacaactttgaactctaggatttgagattttctaggatttgagattccaacctttcattcacttggcagatggatcctgaaacatgctaggtgtcaggctttgctccctccctgtctttgggaggtggcctgatggtttcagtaagagtaagttgggagtggtagcacatgtcttagcttaactttatttaacatttttctctttcaaactgtagattcagatctgactatacattgcacatttctgtttttgttttgtttttgtttttgagagagggtctcgctttgtcatccagtctggagtgcactggcatgatctcagstcactgcaaactctgcctcctgagctcaagcaatcctcgtatctcagcctctccagtagctaggactctaggtgcctgccactatgccagct

SEQ ID NO: 256690 - DNA, 605 bp, Homo sapiens
aggaaggcatgacagtatgagagagatttgtagcagtggaacctttatgcagtttacacaacacttccgatgaactaggtatagttgccgagaaaaaatcaaagttcatttctgatagcttcatcttgctcaatcattattttttagggctacttcaactcttaaactgcaaaaagccaaagaggagaaaaacaactttgaactctaggatttgagattttctaggatttgagattccaacctttcattcacttggcagatggatcctgaaacatgctaggtgtcaggctttgctccctccctgtctttgggaggtggcctgatggtttcagtaagagtaagttgggagtggtagcacatgtcttagcttaactttatttaacatttttctctttcaaactgtagattcagatctgactatacattgcacatttctgtttttgttttgtttttgtttttgagagagggtctcgctttgtcatccagtctggagtgcactggcatgatctcaggtcactgcaaactctgcctcctgagctcaagsaatcctcgtatctcagcctctccagtagctaggactctaggtgcctgccactatgccagct

SEQ ID NO: 256691 - DNA, 555 bp, Homo sapiens
aacagaaaagcccaaaacgttagtggctcaaaacmattttattacctcagtttttgtggttcgagaatctggaggtagctcagctagattctctggctcagagtttctcacaaggctgaaatcaagctattggccagcgttgttgtcatctcaaggctttattggagataatctgccagtataatgtgaacagaagtggtcagagcggacatattgagtcctatctgatattgggaataattcagtctgtcatcattagtgtgatgttagtagtgggattttttgcaggttgcctttatcaggtttggtttaacatgttggaaagctaaatattgagagtaaaattttagaaagtcatcttttcctataaaactaaaataaaggttcacaatcctctttctaagactgacggccctgctatatttaggaattgagaattttcaaagtttagaatgataatgcagttcacatagtatttatttttattcttattactattattattgttttccctgcagttcagtcagatgaaacctctgtgttgtgtgtttagat

SEQ ID NO: 256692 - DNA, 549 bp, Homo sapiens
gaatgaataacatccaacagtgtgaaaatacaactgtgatctaggggtgggggctgttaattttttgtctgattcccgtatgtgcctggttaaacaatgttagagatttttgtaaaccttgcaatgaccaaaaaatatttaccaccttttcaggcctattgtcctgagtatataaaataaatccaaatgcccatcttttgtactttattagagataaagtacagaagactaacaggtatttccagaatcttctgggttaagggctrtgagatcagtgttagaagtttgtgtgtggattttcaagctgactgtgaagtccctgagggaaaaatgttgggtgggcttctatcaataggtagcagagagcgatggtgggggcaacatctagagacctaccagggaagatgtgagatccattggtatgccctgattgtcaacgtaagatgatatgccttatgttggtatttcctaaattgtattttgggatacattggtctttattcttttcagcaaaaattccacaatcaaataaatatgggaaatgcctca

SEQ ID NO: 256693 - DNA, 538 bp, Homo sapiens
tttggatttacgcaaaacaagaagggggctgcctcaggttgtactttctggagctctggctatttacaatggaggcttctacagatgctctggccaaggcacaggtcctgcacccactctgaatggtgggcaccctaggggtaaatgagttgtcaaagtctttcctcataaggttatccatggctggagccactggaaaatcagaagagggagcagtggggtggcrtcaccaacagtaaggtcttcattcttgggcgcattcctgagtggaaaatgccctctgctctctgccactgagttggaagtaaaggcagcttccccaaccctgtaaaatgttgggaagcagaaagaggagctgcaagttggtcctctgccttggatgccagaggagcagctgacaaaagcctgtggcagggctctctgtgaatagcctgtatgatgctggttgggaagcctcagagctgagacccccctcaacagtgtgctggctgtttcaaaaggctgtttccgcactggcccagcccacagctgtatatgg

SEQ ID NO: 256694 - DNA, 538 bp, Homo sapiens
tttggatttacgcaaaacaagaagggggctgcctcaggttgtactttctggagctctggctatttacaatggaggcttctacagatgctctggccaaggcacaggtcctgcacccactctgaatggtgggcaccctaggggtaaatgagttgtcaaagtctttcctcataaggttatccatggctggagccactggaaaatcagaagagggagcagtggggtggcgtcaccarcagtaaggtcttcattcttgggcgcattcctgagtggaaaatgccctctgctctctgccactgagttggaagtaaaggcagcttccccaaccctgtaaaatgttgggaagcagaaagaggagctgcaagttggtcctctgccttggatgccagaggagcagctgacaaaagcctgtggcagggctctctgtgaatagcctgtatgatgctggttgggaagcctcagagctgagacccccctcaacagtgtgctggctgtttcaaaaggctgtttccgcactggcccagcccacagctgtatatgg

SEQ ID NO: 256695 - DNA, 667 bp, Homo sapiens
tctaaagttaattaatatcttaacccaattatgcctggtgttccactattggaacgctaaacttgtgtgagttatttgtatcctactgctgaaggtcatcgccaaggtctgatttttcacacaaaaaatttgcaacctccagcataaatgggttaaccacctttctaaataatacaagaacactttgatcagactgctacctttcaatgctataacattcttgctcagaatttagatgctctttttaaccccgttaattatatattgttattttgatatggataaacaactgtacagtttaccaatatttttgatcatcttttcttctttcatctcagaccttttatcttagagaattttccttcttcctaaagaatattttttagaggtttctttaataaaagtttgttggtggtaaactctcaccatttctgtttctatttttaaaataaaaaaatgtttaatttgccctcattcttaaaagakgaggataattttaaaacttaaaagatagctttgttgggtacagaattgtaggcagatatttactttttgctcagctatttgaggtaattataattcaccatctcttggcttccattgttgctgttcatctaattgttattgtttggaggtgctctggcttttctctcttgctgcttgtaag

SEQ ID NO: 256696 - DNA, 667 bp, Homo sapiens
tctaaagttaattaatatcttaacccaattatgcctggtgttccactattggaacgctaaacttgtgtgagttatttgtatcctactgctgaaggtcatcgccaaggtctgatttttcacacaaaaaatttgcaacctccagcataaatgggttaaccacctttctaaataatacaagaacactttgatcagactgctacctttcaatgctataacattcttgctcagaatttagatgctctttttaaccccgttaattatatattgttattttgatatggataaacaactgtacagtttaccaatatttttgatcatcttttcttctttcatctcagaccttttatcttagagaattttccttcttcctaaagaatattttttagaggtttctttaataaaagtttgttggtggtaaactctcaccatttctgtttctatttttaaaataaaaaaatgtttaatttgccctcattcttaaaagatgaggataattttaaaacttamaagatagctttgttgggtacagaattgtaggcagatatttactttttgctcagctatttgaggtaattataattcaccatctcttggcttccattgttgctgttcatctaattgttattgtttggaggtgctctggcttttctctcttgctgcttgtaag

SEQ ID NO: 256697 - DNA, 528 bp, Homo sapiens
ggtctccccagccatgcctcctgtacagcctgtaaaactgtgagtcaattaaacctgttttctttgtaaactgcccagtttcacgtagttgtttatagcaatgtgagaatggactaatacatatggatataccacaacttgttatccattttcctgttgatgaatgtttgacttgtttctagtttttgaccattattctctctctctctctctctctgtttttgttttgtttgtctgtttgttttgtttttgagacagagtctggctctgttgcccaggctggaatgcagtggtgtgatcttggctcactgtaacctctgcctcccagactcaagtgatcttcccaccttagcctcctgagyagctgggactaaaggtgcatgccaccatatccagctaatttcttgtactttttgtagagacagggttttgccatgttgcccaggctcgtttcaaactcctgagctcaagcaattcaccaacctctggcctctcaaagtgcttggattacaggcatgagctgggccc

SEQ ID NO: 256698 - DNA, 528 bp, Homo sapiens
ggtctccccagccatgcctcctgtacagcctgtaaaactgtgagtcaattaaacctgttttctttgtaaactgcccagtttcacgtagttgtttatagcaatgtgagaatggactaatacatatggatataccacaacttgttatccattttcctgttgatgaatgtttgacttgtttctagtttttgaccattattctctctctctctctctctctgtttttgttttgtttgtctgtttgttttgtttttgagacagagtctggctctgttgcccaggctggaatgcagtggtgtgatcttggctcactgtaacctctgcctcccagactcaagtgatcttcccaccttagcctcctgagtagctgggactaaaggtgcatgccaccatatccagctaatttcttgtactttttgtagagacagggttttgccrtgttgcccaggctcgtttcaaactcctgagctcaagcaattcaccaacctctggcctctcaaagtgcttggattacaggcatgagctgggccc

SEQ ID NO: 256699 - DNA, 558 bp, Homo sapiens
gaaataataaatatttattgtttgagccactaagttttggtgtaatttgttacatggcaatagataaatattgtacttttgaaaaaacatggaaaatcatatctcaaaatattagcaatcaatgtatggaagtggtacagtgagattatagattttatactttcctatactgtctttatgtttttaataaacatatatactgtttatagggggaaatacttcattttgaaaaatattctttcttttggggaaagaggtgaaactggtctagaactttatatcctggtcaaaggttccaaatactatgggtgagcagtagtgagattagggaaagtggctataattgccaccttctggcaaatgtgccagaggatgaagggcaggaagacagttttstgtcactgaaattgaaaaagcaagtctaacaaaggttttccaccatcttcccagcaagtatagtgactggctagttaagacagctaaaaaacagcagatctatggaaacaataaaatgcttgcatagatacatgcacattttatatgtcgtgaatgagttgg

SEQ ID NO: 256700 - DNA, 558 bp, Homo sapiens
gaaataataaatatttattgtttgagccactaagttttggtgtaatttgttacatggcaatagataaatattgtacttttgaaaaaacatggaaaatcatatctcaaaatattagcaatcaatgtatggaagtggtacagtgagattatagattttatactttcctatactgtctttatgtttttaataaacatatatactgtttatagggggaaatacttcattttgaaaaatattctttcttttggggaaagaggtgaaactggtctagaactttatatcctggtcaaaggttccaaatactatgggtgagcagtagtgagattagggaaagtggctataattgccaccttctggcaaatgtgccagaggatgaagggcaggaagacagttttgtgtcactgaaattgaaaaagcaagtctaacaaaggttttccaccatyttcccagcaagtatagtgactggctagttaagacagctaaaaaacagcagatctatggaaacaataaaatgcttgcatagatacatgcacattttatatgtcgtgaatgagttgg

SEQ ID NO: 256701 - DNA, 459 bp, Homo sapiens
gaattatcagacatggactttaaaataagtagaaaaaaatatgttaaagtgtctagtgaaaaacatgtrtgaatagatagggaatgtaagcagacagccaaaaactattaaaaagaaccaaatgaaaatcttacaaataaaaaaattgatattggaagcaaagaatttatttaatgtgtttaacagcaaactggacatggcaaaggaaaagtgggtcaatagaagcgcaatacctgtagaagtgcaaaacatactgaatgttgccaagagaaataaaaaagacctaaataataaagatgtatatatacacacacacccacaccttgttaatgctttgcacaactcagtactgtttagatgctcattcaccctaacctaatctatagattgatggtagattcagcacaaatccaacaaatcctctaagtctcacttcttgtcccagccataactgtagag

SEQ ID NO: 256702 - DNA, 551 bp, Homo sapiens
ccagaccccaagagagggttcttggattccctcacaagaaagaatttgggatgggtccatagagtaaagtaaaagcaagtttattaagaaagtaaagaaatgaaagaatggctactccataggcagagcagcactgagggctgctggttggttatttttatgcttatttcttgattatatgctaaacaaggagtggattattcatgagttttccagaaaaggggcaggaatttcccagaactaagggctcctcctctttttagaccatatatggtaacttcccaaagctgccatgacatttgtaactgtcatggcattggtgggagtgtctttcagcatgctaatgcattataactagcatgtaatgagcagtgaggaygaccagaggtcactttcatcatcatcttagctttggtgggtttgggccagcttctttaccacatcctgttttatcagcagggtctttagaacctgtatcttgtgataccagtcctgccagtttcctgtctcatcatgtgactaagaatgcctaacctactgggaatgcagcc

SEQ ID NO: 256703 - DNA, 553 bp, Homo sapiens
tgatcctcctgcctccgccttccagagtgctggcattacagatgtgagccaccktgcccaactacacccagataattttttgtattttttatagagatgaggtcttgctgtgttgtccaggctggtcttgaactcctgggctcaaatgatcctcctgtctctgcctcccaaagtgctgaaattataggcatgagccatgctgccagtcttgatcatcactgataatatttttgatctgcctactctgggcccagtgctaaataaacattttacacatattgtctcatttaaattttataaaaaattttataagaaccaatggagttgatgttatcattatccctattctacagagaagaaaactgaggctcagccaggctgaatatgatgcccaacatcacaagttggtaaatagcagggcttggactcacacccaggtgcttctgactccagagcccacagatttgagccctctgctttctgttatttgtttgtttttttttgagacggagtcccgctttgttgcccaggcctgagtgcagtagtgcgatct

SEQ ID NO: 256704 - DNA, 546 bp, Homo sapiens
tggggagggggtattggtgcttaaaagctcctaatccaactgggggaaaagaacaaggtgctcaacctttaggagcagctcttaggtgcagccctgccacaatgcaagggaggaatctggtgatacctaaatgtttctcttgcaactttacctgtttatgccagatcctgcctgtaaccaaccctaccccacatattaggtggtcaccaacagactttccttgacagataagrgtcaagggaatctggtgtgtttttcagctgctgcctgagcttcattgggtttgccctaaaattccctttcaatcaatgtcctctgaggacctgagcattccaaaagaagcaccctggcttcctgcaggagtggcctctcccatgccaacaggtgatataaaagagtcttcctaagctgaaatccagaggaagagataactggggagttacctcagttgtcaaacccaaggtagcaggactatcttgcaaatcatacagaaccacgactatcaatggccctcatctcctgccaggtgaagggtctcagacctat

SEQ ID NO: 256705 - DNA, 546 bp, Homo sapiens
tggggagggggtattggtgcttaaaagctcctaatccaactgggggaaaagaacaaggtgctcaacctttaggagcagctcttaggtgcagccctgccacaatgcaagggaggaatctggtgatacctaaatgtttctcttgcaactttacctgtttatgccagatcctgcctgtaaccaaccctaccccacatattaggtggtcaccaacagactttccttgacagataagagtcaagggaatctggtgtgtttttcagctgctgcctgagcttcattgggtttgccctaaaattccctttcaatcaatgtcctctgaggacctgrgcattccaaaagaagcaccctggcttcctgcaggagtggcctctcccatgccaacaggtgatataaaagagtcttcctaagctgaaatccagaggaagagataactggggagttacctcagttgtcaaacccaaggtagcaggactatcttgcaaatcatacagaaccacgactatcaatggccctcatctcctgccaggtgaagggtctcagacctat

SEQ ID NO: 256706 - DNA, 390 bp, Homo sapiens
tggaatgagttacgcgccaaaaccctggtcagtaatccagcgtgagtggtggcttctgaagggatgrgtggcccccacaccctccgctgcctacgaccacgcctacctatcctccggcccaagtgagccacggcaaagccctcccataggtaaaggggtttatcacccccaacccaactccttagtttttacttcagccagcgatctcaatgctctcctcccacaggcaaaataaaccttttactaaggggtagacggaggccctgagagacctctctttatctggaaagcagtgtcctcagtcaggatgggcactgctgtgaccattttagcttcttagtatccagagacatggggtgaaatgtctggcttaggatccctcttgggcta

SEQ ID NO: 256707 - DNA, 390 bp, Homo sapiens
tggaatgagttacgcgccaaaaccctggtcagtaatccagcgtgagtggtggcttctgaagggatgagtggcccccacaccctccgctgcctacgaccacgcctacctatcctccggcccaagtgagccacggcaaagccctcccataggtaaaggggtttatcacccccaacccaactccttagtttttacttcagccagcgatctcaatgctcycctcccacaggcaaaataaaccttttactaaggggtagacggaggccctgagagacctctctttatctggaaagcagtgtcctcagtcaggatgggcactgctgtgaccattttagcttcttagtatccagagacatggggtgaaatgtctggcttaggatccctcttgggcta

SEQ ID NO: 256708 - DNA, 184 bp, Homo sapiens
gtatgtagggcaatgaaatgtcatgactgcaaatttctacggtggtcaggatcaccaaagagaggtcaaaaagggtagtctcccgggcttgatcagcaagggtcccttgaggatggtgggggatgaaggcagtacattgggccggtgrcatccctttggtccttagcatgggtcatctgaatgt

SEQ ID NO: 256709 - DNA, 603 bp, Homo sapiens
gttgcagtgagacgaaatcatgccactgtactccagcctgggccacagaagtgagactctgtctcaaaaaaagaagcaaaagagccactaaattcttggtcaaagcaagtcacctaagaataagccccttcctttgacacatgagaggataaagctaatgtagcatacacrtaaaatggaatattagccttaaaataagaagggaatcctgtcacatgctacaacatgaatttgaggaccttatgctgaataaaactaagccagtctcaaaaggacaaacaccatatgattccacttataagacgcctagattagtcaaagcatggaaacaaaaaataagatggtggctgtcgggggctgaggaaagggggcaatgttgggagttgttcaatggacgtggagtttctgttttgcaagataaagttctagagatctgttacacaacaatgtaaatataattaacactactgaactgtaaagtactgaaattataaagagggtatattttatattgtgtggggttttgtttaaccacaatttaaatttttttttctaaaggtcttgggttattgggtatttataaggttgaaaaaaaaatgtcat

SEQ ID NO: 256710 - DNA, 603 bp, Homo sapiens
gttgcagtgagacgaaatcatgccactgtactccagcctgggccacagaagtgagactctgtctcaaaaaaagaagcaaaagagccactaaattcttggtcaaagcaagtcacctaagaataagccccttcctttgacacatgagaggataaagctaatgtagcatacacataaaatggaatattagccttaaaataagaagggaatcctgtcacatgctacaacatgaatttgaggaccttatgctgaataaaactaagccagtctcaaaaggacaaacaccatatgattccacttataagacgcctagattagtcaaagcatggaaacaaaaaataagatggtggctgtcgggggctgaggaaagggggcaatgttgggagttgttcaatggacgtggagtttctgttttgcaagataaagttctagagatctgttacacaacaatgtaaatataattaacactactgaactgtaaagtactgaaattataaagagggtatattttatattgtgtggggttttgtttaaccacaatttaaatttttttttctaaaggtcttggrttattgggtatttataaggttgaaaaaaaaatgtcat

SEQ ID NO: 256711 - DNA, 651 bp, Homo sapiens
aataacatatttttttttaaaaaaaaagataaatttagggcttctcacactagyatgaaagagactgcgtgcaaaatcttaagcagcagtgaatatgcatctgtcaatgaatgtgtgcatgggaaattgtggaaagagaaagtaaagtcctcttgcaactgcaactaacaattgttgagcgtcctgtctacatcataagatttatatccttcatctcatttaattcaatcctatcaagttggtgctactgtcctcactttactgatggttagtgaagagactgctcaaggcagacagacctggtcttcctgggtctgtaagccatgttctttccactccacttcgctgccttccagcaagtcttcccacccagacccctttcttcccttgaaaggctatagttggccccctaagacttctgcaagtcacagaagctcagagatcaatgacgggctggtgtctttacactcatgtcatattattagattacccaggcctatgattatgggagaggcagctgcaaaggtgatatgtatcttaccaaagtacctaatgcattctttagccttctccattataaaaccctagatcctactgcaatgataaaagaagcatatggagcagagtggaaagaacttgggtatcagttca

SEQ ID NO: 256712 - DNA, 651 bp, Homo sapiens
aataacatatttttttttaaaaaaaaagataaatttagggcttctcacactagcatgaaagagactgcgtgcaaaatcttaagcagcagtgaatatgcatctgtcaatgaatgtgtgcatgggaaattgtggaaagagaaagtaaagtcctcttgcaactgcaactaacaattgttgagcgtyctgtctacatcataagatttatatccttcatctcatttaattcaatcctatcaagttggtgctactgtcctcactttactgatggttagtgaagagactgctcaaggcagacagacctggtcttcctgggtctgtaagccatgttctttccactccacttcgctgccttccagcaagtcttcccacccagacccctttcttcccttgaaaggctatagttggccccctaagacttctgcaagtcacagaagctcagagatcaatgacgggctggtgtctttacactcatgtcatattattagattacccaggcctatgattatgggagaggcagctgcaaaggtgatatgtatcttaccaaagtacctaatgcattctttagccttctccattataaaaccctagatcctactgcaatgataaaagaagcatatggagcagagtggaaagaacttgggtatcagttca

SEQ ID NO: 256713 - DNA, 651 bp, Homo sapiens
aataacatatttttttttaaaaaaaaagataaatttagggcttctcacactagcatgaaagagactgcgtgcaaaatcttaagcagcagtgaatatgcatctgtcaatgaatgtgtgcatgggaaattgtggaaagagaaagtaaagtcctcttgcaactgcaactaacaattgttgagcgtcctgtctacatcataagmtttatatccttcatctcatttaattcaatcctatcaagttggtgctactgtcctcactttactgatggttagtgaagagactgctcaaggcagacagacctggtcttcctgggtctgtaagccatgttctttccactccacttcgctgccttccagcaagtcttcccacccagacccctttcttcccttgaaaggctatagttggccccctaagacttctgcaagtcacagaagctcagagatcaatgacgggctggtgtctttacactcatgtcatattattagattacccaggcctatgattatgggagaggcagctgcaaaggtgatatgtatcttaccaaagtacctaatgcattctttagccttctccattataaaaccctagatcctactgcaatgataaaagaagcatatggagcagagtggaaagaacttgggtatcagttca

SEQ ID NO: 256714 - DNA, 651 bp, Homo sapiens
aataacatatttttttttaaaaaaaaagataaatttagggcttctcacactagcatgaaagagactgcgtgcaaaatcttaagcagcagtgaatatgcatctgtcaatgaatgtgtgcatgggaaattgtggaaagagaaagtaaagtcctcttgcaactgcaactaacaattgttgagcgtcctgtctacatcataagatttatatccttcatctcatttaattcaatcctatcaagttggtgctactgtcctcactttactgatggttagtgaagagactgctcaaggcagacagacctggtcttcctgggtctgtaagccatgttctttccactccacttcgctgccttccagcaagtcttcccacccagacccctttcttcccttgaaaggctatagttggccccctaagacttctgcaagtcacagaagctcagagatcaatgacgggctggtgtctttacactcatgtcatattattagattacccaggcctatgattatgggagaggcagctgcaaaggtgatatgtatcttaccaaagtacctaatgcattctttagccttctccwttataaaaccctagatcctactgcaatgataaaagaagcatatggagcagagtggaaagaacttgggtatcagttca

SEQ ID NO: 256715 - DNA, 547 bp, Homo sapiens
tttcaagatggcagatagaacaccaaatcaaagttacagtgacaccatataggaatacaccaactttgttaaaggaaaaaaaaaagcaattccttcacaaagaattgtgaaacacacaggcaataaagacaaagccctaayctgttctttagcttccagccaagttcatgaatcccagctgggtcatggcaagactttctgggtcagaaagcaagaaaatacatcagcaccaaatcgacatcttgtgacagctgagctggacatgagtggtctgtggaggtgtgttcagatggcaaccactccacctgaatgcttcttagcacaaatctcatttgtgccctgcagtctccacctggttggtccctttcacctagtccaggtgaggttctcagaacgtccccttagcattctgtgcatgggctcctaaatgtcattcttctcagcacatctagtgtcaacactgatgttccaggcttctattaaaacaactttcctaaccctccctaatttcacatttctgagatgcacctatagaggtaatagagat

SEQ ID NO: 256716 - DNA, 548 bp, Homo sapiens
ggatgctgcattttgagggcccatttaaaggcagtctcatggaaggccaccctgtcaacacaacccaggagttctctcagatgtgggcaggttctgatcccgagagggaagccttcatcaaaagccactggactaagagcgggttgggcatcactagtctttgaggcagaggctagacatgtctctcagacaggaaacagcaacctatggggcagccccaagtggacggaggctttgaaacaggaagaggtaaggagattgcttctgaccacaggagggagaaacacctcctaacaaagtcttcgtcatccttgggaagtctcaaaaccataggtgaagaagccaagctttgcgcacaagtggaaaarcaagtcctactgataggctacttaggagagagcttcccaaggagatatcttgggtactcatgatgctgagggactaatgtgcttctgagatcaaataatacgctgtggaattggtgtcccaaggaacccacagtgggaaaacactatgctcatgaagatgccatgggtaagattgaaaaa

SEQ ID NO: 256717 - DNA, 536 bp, Homo sapiens
catgtgaaatcttctcttgtaaaacagtgctttctgcttatcagggtaccgctctctttgttccccaattccaaaccccataatattctgtacaaaatccacaaaatattttattcctatatttcagcaactaaaatattaattcacactgacttgttaacaaagggtcatttctacaagcattgcctttaacatgtatttacattttacatacagagaggcaactcttgagaacaaacctttaatgatgaayattagacattgtaaggatctttcagaggaactcacacactgtttttcaaatcaattctgtattgggtctagctctgcaaaaagaatgaaaaggaaaaaggctgcaatttaagagagatttcagcatattttaccttgtacaaaaggaacagccacaggaaaacagacacatgcatacctacaaatcattagtatggagaaatctgaaaaaattaagtaatccacaaagtccttactgaattcaattttctacagataaatggctttaatgctgaagatacatt

SEQ ID NO: 256718 - DNA, 512 bp, Homo sapiens
ctgtactccagcctgggcaacagagtgagactctgtctagaaaaaaaaaaaaagcctgtccaggtacattgtcctgggctctcytgagatacgagttcatcttctctagttagtgtagattccaaggagggggtctaagacaattgcatttcttctggagaaacttcccttaatcagataaaggaagtttagagaaagtccctcccttcctgtaggtgggtgagggtggtggggtgaggcaagagaaaatcagacagtccttggttctgagatttatttctgagccctttcaatttccttgttaaaggcacacagcatgccaaagtgccacatgttggggcatcattttctaagctccaacacttggtatgtggggaaatcaccaatctccacttatctggtcacagaaatgtgctgtattgaatgtgagaatagagtggaaactatttttttcattacatcccctcccatacacacacattgcaccccgactatgctagccttgcaattct

SEQ ID NO: 256719 - DNA, 561 bp, Homo sapiens
taatgtccagttcacagaaaaactggatgatacctttttaactttagccagtgtgtttacacacagaatttcctttataattaatgttttcaaacttgcttaaaccttcaaaacaaagtttttttttcaccttttaatgtaggtaaaaatccacattcttatgcctctttataattcttttactaaaagtatattttactttccttatacaccttgcacataaactgtttcgtcaatagttttacattcaggacgcctaattactgttacattatacaacatttcttgcataaattcccttttataacacattttttttcacgctttacaatatcttatttttccttcctctggttgatgaaatgccagacaattctttgacatgcctcaactttctgacttgttgcaaatgtccctttctttaaacamacaatttattttaggacaagaatttaccatataacattctttttacataaattctcctcccccatcctttttttttccccaaagatgataaccattcttttccaaagcgaacttccttcgggtctgtggatt

SEQ ID NO: 256720 - DNA, 510 bp, Homo sapiens
atggttctgcaagctgtacgttcatggctctggcatctgcttagcttctaggaaggcttcagggagtttttattcatggtggaagactaaacaggagttgcacttcacatgcaaaagcaagagccagagggagtagggaggtgccacactttaaaacaaccagatctcccgagaactcacaatcactaggacagcaccaagaggatggtgttaaaccattcatgagaaatcgcccccatgatccaatcaactctccccagrctccacataagatctggacagggacaaatatacaaactatatcataatctcaaaagtttatacgggttcagtcagaaaagaattaaagtttctggaaaaatagatatataattctgtgttgcttttatggagggagtcattggcctagttaataggtcattacttcaactgaccataatttacgtgctaatttctcggaagatggtataatccaaaagggaaggctcgggaagccagtaggtaagtaac

SEQ ID NO: 256721 - DNA, 535 bp, Homo sapiens
atgtgtccattaacatgatgatgacatgtgaaaatgtttatggatgaattttaaattaaaatgtcaagctataaaattttatatggagtaagatctcatcttggttggaagaaaaacacattctggaggaactaaaaataaaaggtaatttgtcaagatgcaaaaggtgctaatctctaagtgtgagatattatggatgatatttattttcattatatttttatgtatttgcatcacccccagtttttattatgaaaacagggagaaaatgcaaatacataaaaacatacagaaaatttgaaagattaatacaatgaacatccatataccctccaattagattcaataattgttaatgttttcccatatatagttttttaacagcccagatatccccaagwtctcatactttctctatcatctatgtattaattatctatctatctatctatctatctatctatctatcttctatccatccatccactcatctgtccatattaggagttgacaaatcatggttcaaggccaaatt

SEQ ID NO: 256722 - DNA, 548 bp, Homo sapiens
gtaattttgtgtggaagagcaaaatacttgtatgttgtccttaaacaatgaagtatatattcaaacacaggttgactatttagggttcttgccacatttcttttaacagagtagggatctgtaataaaaaaaagaaagaaagaaaaatccatctcttcatatgttactatatttcatgttttaaaaattagcctgctgcagataaaaacagacaacaaacaatggtaaaatttatcttgcattttatagacttaaaaaaaaactgggggtggggagtaagaaaacagagtttaagaacaaaaagcagtattttctgaaacatcggctctatgaagggaacccattctgttcagaaccagtaccccttctccctattgtgctctgtgactgtggaggtagaaaagatgttatyagcgtggctctcaggcccttgggaagggaagatcttcccaccaggctctgctgctgctgagtgctctgcctccccactcagccaggccctgtggtttatcgagcttacctccactcttctgccctgggaagcccca

SEQ ID NO: 256723 - DNA, 588 bp, Homo sapiens
actgattatatttcatatggacctgcatatgcatctgaaaataatactgcaccacaaccttctgtttattcttaaatccagtgatgacccattgagcacctctcatgggccaggcacatgctaggcactggggggtctgcccacaatgaacaacacagttcctgtcctcaagaggcttgagctgcagctggtggtctctccctggctgcaaccttgacactggttgccatgaaacgggcatgctccatccttctctgcctgggcwaacctctgcagttcttttctcccctctaacctgaaacttgcattcttttgattgtccacgccagtggtaaaagaaacatttctctttggaactttataggttattgtgtcatgtaaatgacatgggaatttgggggcttttataaatatcaaggtgaagactgtcagaaaattaccaacaactgaagcccactaaatgatagccagggtagctagggtgaattttttccacatccccaactcccaaaatgggggtatgggttttactgcacaagagttttgttgggttttgtttttgtttttgttttttttggataatgaggg

SEQ ID NO: 256724 - DNA, 488 bp, Homo sapiens
ctttctgggctgtgaatgtggataagattccatgagcatgaatgctcacttcctgttgactccaacccctacttgttgtggggggataaatccamtttcttgcaacgtcttgcaaatcctctaatcttgcagcttccttctcagtggaacacttcatcttacctgccctcctgaatcagtcaaggctgccactcactgctggcttctgtcactctgggttctactctgcagcctggtttctgctgcctaagacaggctggcatggctgccctcccaccctgcatgggcctctggggcaccaagccttgcctgctgagccgcagagcagtgctgacttggcctgtcccaaaattttcagttctcttggtgctgctttatggggccagccttccctgttagcaccaggacatgtgtgtgctgccaggggagctggcagggctgggttcaacgtccgcccatacctcatcactgcaccatctctagaccct

SEQ ID NO: 256725 - DNA, 488 bp, Homo sapiens
ctttctgggctgtgaatgtggataagattccatgagcatgaatgctcacttcctgttgactccaacccctacttgttgtggggggataaatccaatttcttgcaacgtcttgcaaatcctctaatcttgcagcttccttctcagtggaacacttcatcttacctgccctcctgaatcagtcaaggctgccactcactgctggcttctgtcactctgggttctactctgcagcctggtttctgctgcctaagacaggctggcatggctgccctcccaccctgcatgggcctctggggcaccaagccttgcctgctgagccgcagagcagtgctgacttggcctgtcccaaaattttcagttctcttggtgctgctttatggggccagccttccctgttagcaccaggacatgtgtgtgctgccaggggagctggcagggctgggttcaacgtccgcccataccycatcactgcaccatctctagaccct

SEQ ID NO: 256726 - DNA, 459 bp, Homo sapiens
aactaaaactatcttcacataatgagttgtactctaatgctcactgcagctttattcacaatagccccgagctggaaacaactcaaatgtattttgtcagctgaatgaataaactgcgatatattcatacaatggaataccactctgcaacaaaagggaatgcatacaayttagatgcgcctcaaatcattatgctgagtgaaagaagctggacagagaagagggcatgctatatgattccatttctagaaatgcaaatcatacagtggattcccactaaatggaaatctatagtgaccaaaagtgataaaaagtgactcaccatctacagaaaaaaaagatcaagaattgcctagggatgaatggaaagctgggttgcaaactgaaacagaatctttggtggggtgatagaaattctctctatcttgattgtagtggttatttcatgggtataaacac

SEQ ID NO: 256727 - DNA, 509 bp, Homo sapiens
cattggttattatttctttctgaagtggaaatcttaacaataccctctctgaaataattgctgttttgcaatattagaaatatttcaacagtgacagcttggaaatgttttaacttttaaatacttaaaccaaataataaataaacccttgtgattaatgtttccagaagggacgagtaacattatccttacagctgttcatgatataatatcaaaatgaaaaacatgcacgagaaaaacagcaagcccatgctgacttcatgtcactttttttgcaaatagctctaatgcgaagacatccttagtaagactcaaccaaygatatttcatctgatcatcatttagccaaaccacaacagtactcctgaggcctcttcagtttcactgacagcatctgtcatttcagttactgcaaatgtgatctcttgcaatgatgctagctgggtcactctgtggcccgaaaggaaaatgaatctctttttaataaaaattttaatgttttatttttg

SEQ ID NO: 256728 - DNA, 509 bp, Homo sapiens
cattggttattatttctttctgaagtggaaatcttaacaataccctctctgaaataattgctgttttgcaatattagaaatatttcaacagtgacagcttggaaatgttttaacttttaaatacttaaaccaaataataaataaacccttgtgattaatgtttccagaagggacgagtaacattatccttacagctgttcatgatataatatcaaaatgaaaaacatgcacgagaaaaacagcaagcccatgctgacttcatgtcactttttttgcaaatagctctaatgcgaagacatccttagtaagactcaaccaatgatatttcatctgatcatcatttagccaaaccacaacartactcctgaggcctcttcagtttcactgacagcatctgtcatttcagttactgcaaatgtgatctcttgcaatgatgctagctgggtcactctgtggcccgaaaggaaaatgaatctctttttaataaaaattttaatgttttatttttg

SEQ ID NO: 256729 - DNA, 559 bp, Homo sapiens
atgcgaagacatccttagtaagactcaaccaatgatatttcatctgatcatcatttagccaaaccacaacagtactcctgaggcctcttcagtttcactgacagcatctgtcatttcagttactgcaaatgtgatctcttgcaatgatgctagctgggtcactctgtggcccgaaaggaaaatgaatctctttttaataaaaattttaatgttttatttttgagggaggacataatagtagcttagaaagagaggtttttgatgggtttgtttagaaggcttagaaaataaaaccaaaacatgaatgtgcaaaaatgcatatgttactgatttaactatgtacctgagcttctaaattgttagaattcctgtttacatcaaaggtagttttaaagaacagaaggcagaactataacttaaaaratccctaatcttagtagtcaataatttattagcagaattctccagcaacttataattttatgagcataataataactaccatatgtggcaggcttgctctgtgccagagggtctgtgccacagggtgtgttaggtg

SEQ ID NO: 256730 - DNA, 583 bp, Homo sapiens
catctgctccagccatcagaaaacctgtgcactgttggtctctgcaggaccttctagcatgtatattccataagtctaattctagaaactcacaatttttgaacataatgaaaagaatgaatcaaaacttggagtttcatcatctagctcttttgctgtcaccctctttgtatgataaagcgtatcccctggagggcagagtctattttctccgtatttacataaatatattgaaggagaccaccttgtcttttttttttycccctcaaatgggaagtagcattatacattttccctattataaaggaaattttgaaatacaactcttacataagaaaattcacaaatacataaaagaagcaatccatctataacattaggaaactactatttttacgtcgttacattttttcctgtgcccatatacacaggtgagtaaatatttgtattttataaaaataaacttattcacatgattttgaaggctgctgtttttatttaaatatatggcaaatatcttcatttcaatgaatggggtctaacacacatctcaatatctgtgtaggggcatgattgttttatc

SEQ ID NO: 256731 - DNA, 574 bp, Homo sapiens
ccataaaaatttccctttaggtaataaatttcattctgtgataaaattttctcagtttatttaaaatgtaattctattgataaagaacactagatactctaatatctttaggcactagccactgagggaccactctgagcctgccatgcctccctatctccaagcaactgagataatgacttactgatagttcctgggtgagctgtcgaatcttctgtctcatctcatcatagtctccatacattcgctttctcaccttttccaaagtggctctcacctgtagcccacaaagatactagttagagatcaagccataacattttcatacaagatttctaaaacttttaagaaactctaaagaaagaaggaccccrgccaggtgcggtggctcaagcctgtaatcccagcactttgggaggccgaggcaggcggatcacaaggtcaggagatcgagaccaccctggctgacatggtgaaaccccgtctctactaaaaatacaaaaattagttggggggtgtggtggtgggcacctgtagtcccagctactcgggaggctgaggcagaagaattacg

SEQ ID NO: 256732 - DNA, 554 bp, Homo sapiens
ggagggtggtaattccaggtctttggcacrtgtctttggtacatgtcatccacagctcaggattagccaacatctcctcctgcctttgtcttgggcaatgtgggactctggactctgtttagaaggttactaagggaggagccatacctccggagcatttaagtgaggaaggtctatgtatttccttgagaaaaaaatagaagaaaattaaaatgtctgagctattcttaataggaaattcaggaattgaatattctgaatggttaaaaattatgtctggaggccgggcacagtgatttacacctgtaatcccagaactttgggaaactgaggtgggaggttcacttaagtccaggagtttgagaccagtctgggtctctacaaaaaattatctgggtgtagtggtgcgcacctgcagtcccagctgcttgggaagctgaggcaggaggatcacttgagggtggggaagtagaagctgcaataagctgtgattgtgtcgccacagtgagctgtgattgtgccactgcactccagcctggatgacagagtgagac

SEQ ID NO: 256733 - DNA, 632 bp, Homo sapiens
gttttctgtgaggatgaaaataaaaacaaaaccagatccggtggcgtgaaaacacatgggctgcaccacatgctggggcatccccttatcattaagcactggggtagctgtcctaggctacagcaactgccagtctgggaccctgtgctgtgagggactgtgggtctcccatggtggccaagaggtctgcccctgtagcttggagggactgaaaacctctcccataccatcccatagctgctgccaacaccacttgccactgcttaggayggatggaaatggattaaaatggagtccttccaaggaaaagtattataatacatcatttcacatgggaaaaaaaacagcttttgaaaatagtaagtatagtataatcccattttgaaaaatatgtataagcattggttcaaatatatgtttatgcactggggggaaaaagaccaggaggaaatctgaatgatagttttcactatgtgatagggctatggatatctattttcttatttattttttctgtatttcccaaattgccacaatgaaatcagaaaacaaaatacgagctttatagaatagagatattcctctttttattctttttctttttttttttttttttttgtttttgagacaga

SEQ ID NO: 256734 - DNA, 502 bp, Homo sapiens
tggagaccattctacttctgaccttcttgttatatgacatggtaaatttctaaattgtttcagccagtattacattaaacttttctgttacttgcaataaaatactttaagtgatgtaacttcctttaaacatgctaccctctaaaaacaataaagtatgtcagtgaagagagaacaaaaaaagaattttaccaaaaaaaaaaaaaaaaacctactctgcttcttataaagcagaactactgaatggacatatttgcatttgagatatgcttttcattaattggctccctcaaggcatcccagatgtctggaggctgatgaggtggatagaggcccctgctcagttcatgcatagcccaagcacagcttggacaggaagagccacagagaccagaacttaccagaagaattaggaaagttaacatctgcacaatccctttaragtcaggatcttggttctgctaggtgagagtatcgtgtaccctagaaacagtggagaact

SEQ ID NO: 256735 - DNA, 548 bp, Homo sapiens
tgccagcctataagactcacgtccagcctcaccctcccaggatgaacctttcaggttgctgcaggcaaaggactgctgggccctatggcctgctagtaggacctggcttgtacaatccctgctcatgttcacctaaaggtgaaattctctttgttaaattatcacacagctgagtttgatgayagtctccaactttgaggatgagcaaaagagaaagagtgattcattatgggacatagctatacatctaaaatatttatcaatgacaataaaagagtccctgggacgcaggcaattaaagaaacagtaacacatatggcatttaccatgagccaggtacttttctaatcacttaagtattaacatatttaatcatcataacaactctatggagaggatgccacttcacagagagagttcctatttaccaataagccaactaaggcataggacagttaattaacttgctcaatatcacatcactactaagtggcagagctgagatttgtactcaggtagtctgagtctggagtctgcaattgcactct

SEQ ID NO: 256736 - DNA, 548 bp, Homo sapiens
tgccagcctataagactcacgtccagcctcaccctcccaggatgaacctttcaggttgctgcaggcaaaggactgctgggccctatggcctgctagtaggacctggcttgtacaatccctgctcatgttcacctaaaggtgaaattctctttgttaaattatcacacagctgagtttgatgatagtctccaactttgaggatgagcaaaagagaaagagtgattcattatgggacatagctatamatctaaaatatttatcaatgacaataaaagagtccctgggacgcaggcaattaaagaaacagtaacacatatggcatttaccatgagccaggtacttttctaatcacttaagtattaacatatttaatcatcataacaactctatggagaggatgccacttcacagagagagttcctatttaccaataagccaactaaggcataggacagttaattaacttgctcaatatcacatcactactaagtggcagagctgagatttgtactcaggtagtctgagtctggagtctgcaattgcactct

SEQ ID NO: 256737 - DNA, 548 bp, Homo sapiens
tgccagcctataagactcacgtccagcctcaccctcccaggatgaacctttcaggttgctgcaggcaaaggactgctgggccctatggcctgctagtaggacctggcttgtacaatccctgctcatgttcacctaaaggtgaaattctctttgttaaattatcacacagctgagtttgatgatagtctccaactttgaggatgagcaaaagagaaagagtgattcattatgggacatagctatacatctaaaatatttatcaatgacaayaaaagagtccctgggacgcaggcaattaaagaaacagtaacacatatggcatttaccatgagccaggtacttttctaatcacttaagtattaacatatttaatcatcataacaactctatggagaggatgccacttcacagagagagttcctatttaccaataagccaactaaggcataggacagttaattaacttgctcaatatcacatcactactaagtggcagagctgagatttgtactcaggtagtctgagtctggagtctgcaattgcactct

SEQ ID NO: 256738 - DNA, 548 bp, Homo sapiens
tgccagcctataagactcacgtccagcctcaccctcccaggatgaacctttcaggttgctgcaggcaaaggactgctgggccctatggcctgctagtaggacctggcttgtacaatccctgctcatgttcacctaaaggtgaaattctctttgttaaattatcacacagctgagtttgatgatagtctccaactttgaggatgagcaaaagagaaagagtgattcattatgggacatagctatacatctaaaatatttatcaatgacaataaaagagtccctgggacscaggcaattaaagaaacagtaacacatatggcatttaccatgagccaggtacttttctaatcacttaagtattaacatatttaatcatcataacaactctatggagaggatgccacttcacagagagagttcctatttaccaataagccaactaaggcataggacagttaattaacttgctcaatatcacatcactactaagtggcagagctgagatttgtactcaggtagtctgagtctggagtctgcaattgcactct

SEQ ID NO: 256739 - DNA, 457 bp, Homo sapiens
tgtctctaaatacacacctttttctagctcatctgacaatttgccagcatctaagcaaaccctgggcttgcccgcarctgtgccctccctccctccatttggttctctctacctgaaatttcctccttccctatctttgatcttgcctaagctccctaaaagccttaaatgccactctctccatgcctggagtctcttccagtcatggagccagaaccattatctgtccttaggaagctcactcactctctctctgcttttactttggaattcttttatacctgccattagagtggggctgtgcgtctcacatcttggcttttccaggagattataagttcctgaaggcggggactccatgtctggctcatctgtgtccgtagaggcttaatacatgttctgatgattgactgggttttcttgttagtaatgagctgatgtattgcattatgggaga

SEQ ID NO: 256740 - DNA, 457 bp, Homo sapiens
tgtctctaaatacacacctttttctagctcatctgacaatttgccagcatctaagcaaaccctgggcttgcccgcaactgtgccctccctccctccatttggttctctctacctgaaatttcctccttccctatctttgatcttgcctaagctccctaaaagccttaaatgccactctctccatgcctggagtctcttccagtcatggagccagaascattatctgtccttaggaagctcactcactctctctctgcttttactttggaattcttttatacctgccattagagtggggctgtgcgtctcacatcttggcttttccaggagattataagttcctgaaggcggggactccatgtctggctcatctgtgtccgtagaggcttaatacatgttctgatgattgactgggttttcttgttagtaatgagctgatgtattgcattatgggaga

SEQ ID NO: 256741 - DNA, 537 bp, Homo sapiens
gttctaggtctaatatatctcaaatatatcatatttatttaaaatatcttcctggctaaatcattgacygcatgagaagtcatatcattaacacagacgatggtgtgtgtattggggcttatttaaagatatttacaggaactagataaatcaaaaccagcaatgtatttctgaagaatttttccaaacattgttcttacaacttttgttccaaggatatcattctacaaaacaactgctgcatatcattagcactataaaattatagatatattccctactttataagagaagtagatttcatttacctacacatgtttaaggcaatcataaaaattactacagcatacaataattagcacagctgtgaaatctgagtcatggaccatacatctacatgtattacttttcaaacaagctctataccactgcctttgactcctaattacaatttgctgaagctactttgccaaccctcaaatctagcacttcccaccatctaatgttccgatgtctttacttaaatccccaaattcc

SEQ ID NO: 256742 - DNA, 537 bp, Homo sapiens
gttctaggtctaatatatctcaaatatatcatatttatttaaaatatcttcctggctaaatcattgaccgcatgagaagtcatatcattaacacagacgatggtgtgtgtattggggcttatttaaagatatttacaggaactagataaatcaaaaccagcaatgtatttctgaagaatttttccaaacattgttcttacaacttttgttccaaggatatcattctacaaaacaactgctgcatatcattagcactataaaattatagatatattccctactttataagagaagtagatttcatttacctayacatgtttaaggcaatcataaaaattactacagcatacaataattagcacagctgtgaaatctgagtcatggaccatacatctacatgtattacttttcaaacaagctctataccactgcctttgactcctaattacaatttgctgaagctactttgccaaccctcaaatctagcacttcccaccatctaatgttccgatgtctttacttaaatccccaaattcc

SEQ ID NO: 256743 - DNA, 577 bp, Homo sapiens
ccatcaatgatagattggataaagaaaacctggtacatatacaccgtggaacactaggcagccataaaaaggaatgagattatgtcctttgcagagacatggatgaagctggaagccatcattgtcagcaaactaacacaggaacagaaaaccaaacaccacatgttctcactcataagagggagttgaacaatgacaacacatggacacagagaggggaacaacatacactggggcctgttgtggggtgggggacaaggagagcaaacctgatgatgagttaataggtgcagcaaactaccatggcacatgtatacctatgtaacaaacctgcacattctgtatgtataccactgaacataaagtaaaatttaaaaagtaagaataaaataagttttatgactgtggggaaactggggatatagattcagattagtttaataagtaaatgaatayaaaggtataaagtggcagttcaaataaaatgaacacttagtcagaacaaggctctttcctcaggttctatgacctgaaaggcagacagagaactaggccagacaacgactcatacatgcta

SEQ ID NO: 256744 - DNA, 659 bp, Homo sapiens
ttttatgtattacatactgtattcttacaataacataagctagagaaaagaaaattatattaagaaaatcataagaaggagaaaatatgtttactatttattcagtggaagtggatcatcataaagatcttcatcctcatcttcctctttagcaagctgaggaggaggacaagaggttcatcttgttaatttaggaatggagagacagaagaaaatctgcacataagtgaactcatgcagttcaaacccatgttcaaggatcgactgtagttataagaaggactctcctagttacatactctaagaacaaaagtgataaaattccaaagaaatgatgcacatataaatagattcatagactcataagagctgaaagagaccttagaaggaatcaatacaactactacatcactcagttctcaaagagaaaaacagatgaccwcgaggattatgtatcaatgcctgaaggatagaggctggtttactttgaaagttacattgatattacaacataattttaaatgtataaaaatatttttgttttaaaatgaaaatcaaagaaagtaaatttactctgataagatacaaagataagaaagtgacgaagaatttggtgtataccaacaattaattcagtgtatgacattacatcacccgag

SEQ ID NO: 256745 - DNA, 598 bp, Homo sapiens
ggcatggtacaattacggatattatttacattgcatttataaaataagagtttcacattttaagatgaaaatataaaaatgaaagcagattttttttcttactgcaatgcaatatccaaaaaggaattttaagttctccaacacttatttcagtaacatcctccatttcactgaattaaagcaattttatctctggattgtataaattagagagtttccaatttcaccctcaggcaccatttcaattggagaatgatagaccactaaagtagatggataaaagtaaacaaaaatttaggttacaggaaacaggcttgactagatatctggaatagcctcacttctcaacaactgccattaaccttgttcaaaatatgaaattactacaatcaattctaagagatttccccatgttcctcttcacacacttacacacacacacacacacacaaacacacacacacayacccccacatctttttagacatcttttttgggtgacaacccaaaaaagaaaatttggccaggttttcatcaagttagaatgtgcatattctataaaggatctcattcatgtgctgtctgtctaaatgatgag

SEQ ID NO: 256746 - DNA, 612 bp, Homo sapiens
caatgtagggacacaagaaacatgaaaaagcaaggaaatgtgatatccccaaaagaatgtaatcagtcttcaatgacagatcacaaagaaaacgacttttacagaatgcctaaaaagaaaatctaaataatgatcttaaggaaactgagcaagatacagcagaaaacaaacaattcaataacattacaaaacaatttatgatctgggtgagaaattcaaaaaatagatagatatcacaaaaaagaaccaaagtgaaatgttgaaggtgaagaactcaatgaatgaaataaatgatataattgagagtttcaatagcaggctagagcaagcagaataagtaatttctgaacttgaagacaggtctgttgaartaactcagtctgagaaaaaaattaagaatacaaaaatgagcaaagcctttgagtcttatagaacatcgttaaacaaagaaatattcacattataggaataccagtgggaaaagatatggagaaaagcaaagaaaatctatttaacaaaaaatagctgaaaatttgccaagtaattgagagagatatgaacatctagattcaggaagcccaaaggttcccaattatattccacccaaaaaga

SEQ ID NO: 256747 - DNA, 563 bp, Homo sapiens
atggctcaggaacatataatagattaaaaaaataaattaaggcaacacaaatataaattgttgggaggaggggggagtctagaatatttttatgagaccaaaggcgatttgctttcaggtttaaacaatccgttattaactayaaaactctttatgttagccccatgataatgacaaagaaagaaagtatagcaaatggacaaataagaaagtagggggaaaaaaaagcttagcaccacagaaaaccaccaaaccacagaggtaaaaaaacaaaaatgcatctttgaagaaataattttaagactgagatgaagagaaaaaagaaaataaaaacaaaacaaaacaagaaaaaaagaaataagcaagagatttacaaaacaaccagaaaacaattaagagaactgtaggagtaagtccttatccatcagtaataatcttcaatataaatggattaaattctctgactaaaacatatagagtggctgaattgagtaaagaaacaagattcaactctatgctgcctacatgagactcgcctcacagttaaagacaaatatagactg

SEQ ID NO: 256748 - DNA, 563 bp, Homo sapiens
atggctcaggaacatataatagattaaaaaaataaattaaggcaacacaaatataaattgttgggaggaggggggagtctagaatatttttatgagaccaaaggcgatttgctttcaggtttaaacaatccgttattaactacaaaactctttatgttagccccatgataatgacaaagaaagaaagtatagcaaatggacaaataagaaagtagggggaaaaaaaagcttagcaccacagaaaaccaccaaaccacagaggtaaaaaaacaaaaatgcatctttgaakaaataattttaagactgagatgaagagaaaaaagaaaataaaaacaaaacaaaacaagaaaaaaagaaataagcaagagatttacaaaacaaccagaaaacaattaagagaactgtaggagtaagtccttatccatcagtaataatcttcaatataaatggattaaattctctgactaaaacatatagagtggctgaattgagtaaagaaacaagattcaactctatgctgcctacatgagactcgcctcacagttaaagacaaatatagactg

SEQ ID NO: 256749 - DNA, 636 bp, Homo sapiens
aaacccccacttcaacatacatatccagaatgtaaaaatttggaacttgtttgagaacactttatttgtcttgttcactagggctgtgaacagtgcctgacacatagtaggtacttagtaaatatttgttgaatgaataagaccacaacagcacagtatctaatgccattggtgcatgccaatttgactgcaaaggtaactggagatttaatggaactaactctatcttgttgactgctatgttgccaaggcctagcataatacctagcatacagctgctctcaaaaaaataatgtttgactgattaataaattggaargcactggcaagatcaatgacaggaaattattggcaagaacaagaagtcactagaagctcatagtcacaacctcttcctgaaagcaaaacaaacaaacaaacaaaaaaaaacttaattggaacatcataaaaatgattctttaaggttaaaaatatagactgacaagtgtttgtatgttagaaaaccaaaaagaaatcaaataaactatctggattccttgaccatagacttcacatagcagtataaaataaagctgatgttttttagcaaattgaagtccaacactagttaggaaatcaaaggatccagttactaac

SEQ ID NO: 256750 - DNA, 597 bp, Homo sapiens
caaattgaagtccaacactagttaggaaatcaaaggatccagttactaaccttcacagagctggttaaaaaaaatccaacaatatttgtttcattgtttacacagctgaggattcatagtctaatcactaatcattcatcactaacacaaagtgataggaacccatcccttcgccaaataatggcccattttgttttcaccagctgtttcaagtaaagaaggaagcattaataaagactgagtaacccatttataataataatacttgatattgttataattgcacagcaattgcatttataacacctcatctaatcttttttaattttttttcctttttggagatagtctggctatattgaggaggaaggattcgaacctctgagctcaagggatcctcctgcctcaaatagctgggactataagcctgcaccactgtacccagttctatcacctcatttaatctgatgacaaccctgtacagtaggtatattctcaggaattttaaaackaagcagaaatgaagaggtttaacaagtcatgcctacaaccacagagatagtaaacggcttcctgctctaaggccccccttcctat

SEQ ID NO: 256751 - DNA, 597 bp, Homo sapiens
caaattgaagtccaacactagttaggaaatcaaaggatccagttactaaccttcacagagctggttaaaaaaaatccaacaatatttgtttcattgtttacacagctgaggattcatagtctaatcactaatcattcatcactaacacaaagtgataggaacccatcccttcgccaaataatggcccattttgttttcaccagctgtttcaagtaaagaaggaagcattaataaagactgagtaacccatttataataataatacttgatattgttataattgcacagcaattgcatttataacacctcatctaatcttttttaattttttttcctttttggagatagtctggctatattgaggaggaaggattcgaacctctgagctcaagggatcctcctgcctcaaatagctgggactataagcctgcaccactgtacccagttctatcacctcatttaatctgatgacaaccctgtacagtaggtatattctcaggaattttaaaactaagcagaaatgaagaggtttaacaagtcatgcctacaacmacagagatagtaaacggcttcctgctctaaggccccccttcctat

SEQ ID NO: 256752 - DNA, 625 bp, Homo sapiens
gcatctgcaaagtcccatcagccatatcactaacatattcacaggtttgagaaatgagaacatgaacatctttgaagtgccattatttggcctaccacatttaccaaagttgactgatataatcagagatattgaagagctctagatgttggtcttattctcagacaactctataaatatagtgacgagtaatacaaaatggttggaaatattgaaccactattttaagggtrtgtttcactgaatcagtgtaaagaacatcagggtatcacttatttaacatgatgaagatagcacatactttacctcacgagtcagctaggaatataagaagaattcttatttgttagttacatgcaaggtgcctaacttattatattatctgatcatccaaacaaccaacaggttagttacattatctacatttatagatctggaaactgaggctgagcagataaataatttgttcaaggtcacacaattataaataacagggcaaaaatttgaactcagatgcaacattgatagcaaaagcaaagtggaagtaatatttattcaggatcatgttaatcactgcatatatgtgacttagtatcaatacacagaataatatttaaatatttac

SEQ ID NO: 256753 - DNA, 625 bp, Homo sapiens
gcatctgcaaagtcccatcagccatatcactaacatattcacaggtttgagaaatgagaacatgaacatctttgaagtgccattatttggcctaccacatttaccaaagttgactgatataatcagagatattgaagagctctagatgttggtcttattctcagacaactctataaatatagtgacgagtaatacaaaatggttggaaatattgaaccactattttaagggtatgtttcactgaatcagtgtaaagaacatcagggtatcacttatttaacatgatgaagatagcacatactttacctcacgagtcagctaggaatataagaagaattcttatttgttagttacatgcaaggtgcctaacttattatattatctgatcatccaaacaaccaamaggttagttacattatctacatttatagatctggaaactgaggctgagcagataaataatttgttcaaggtcacacaattataaataacagggcaaaaatttgaactcagatgcaacattgatagcaaaagcaaagtggaagtaatatttattcaggatcatgttaatcactgcatatatgtgacttagtatcaatacacagaataatatttaaatatttac

SEQ ID NO: 256754 - DNA, 571 bp, Homo sapiens
ctctacacacagtcatcccttggtattcatggggattagttccaggacctggataccaaaatctaaggattctcaagttctttatatcaatggtgcagtatttgcatacagcctaggtacatcctcccatatactttaaataatccctagataacttatacttaattgaatgtaaatgctatgtaaatagttgttatgcatcagacactattctaggaagtgattgttatcagttatgttgtgttgtttagggaataatgaccaaataaagatctgtacatgttcagtacaaatgtaaccatccattttttttctaacaatttttgatccatggttggctgaatccatggatgtggaacccatggatacagaaagcctactatgttcataaattaggcctttgtctatgtgtggaaaattttgtttctggtctatcatttgtctttcaattttttcctttaataataacacttctactagtattccctttagcatgatttatgatttagcttatgccatacatayaaaaccttgcagcaaatattatcaaggaagacagaagagagtccta

SEQ ID NO: 256755 - DNA, 520 bp, Homo sapiens
taataagttagatattcatctattcaagcaaatatctactttttacattaaaaaataatattattttttaaaggaacaaatttctgttaattttgtttagataggctgccttagtaattatatttcatgtgctatttccagaaataaggtaacaagctcattaaaatcagtaaaatttattgacagcatgctatcattggctactaataactaacctatattggtgaggttttgttattatcttataatgatatttaattatttaaaattttgcatgttcacatttttatgacatgtcaagctcccaagtactccagaaatatatgatccctagcacattgagtattacttgctcttaggagaaaaamaaaaacaaaaaatcttctagcccccaaatcttctctaattggctcttcctacttatcctctctttgagcactttccacatttcacagtatcagatgattgtcagtccactccattagactttaagcttcttaaggacaaggagcaggcctat

SEQ ID NO: 256756 - DNA, 520 bp, Homo sapiens
taataagttagatattcatctattcaagcaaatatctactttttacattaaaaaataatattattttttaaaggaacaaatttctgttaattttgtttagataggctgccttagtaattatatttcatgtgctatttccagaaataaggtaacaagctcattaaaatcagtaaaatttattgacagcatgctatcattggctactaataactaacctatattggtgaggttttgttattatcttataatgatatttaattatttaaaattttgcatgttcacatttttatgacatgtcaagctcccaagtactccagaaatatatgatccctagcacattgagtattacttgctcttaggagaaaaacaaaaacaaaaaatcttctagcccccaaatcttctctaattggctcttcctacttatcctctctttgagcactttccacayttcacagtatcagatgattgtcagtccactccattagactttaagcttcttaaggacaaggagcaggcctat

SEQ ID NO: 256757 - DNA, 591 bp, Homo sapiens
tatgtattggacactcaaccaatatataatgaatatttgtgacagttttttttttttttttctgagatggagtcttgctctgtcacccagggtggaatgcagtggtgccatctcggctcactgcagcctctacctcctgggttcaagcgattctcccgcctcagcctttcaggtagctgggtctacaggcacgcgccaccatgcctggctaatttttgtacttttcgtagagatggggttttgccatgttggccaggctggtctcgaattcctgacttcaagtgatccgtccacctcggcctccyaaattgctgtgattacaggcgtgagccactgcgcctggactgtgacagttttttttaaactataaattatattacagttttttaaactataaattatttttacaaatattggggcaggtgttattctttacttcctgttaattaaccaggcacttcaaaacggaaaacaatatatttaattcctacttgaaaaacttatacctgatttatgttatttaagctgtattgtttgacatattttctttgtactgttaatagctataataataagttggagttatttaag

SEQ ID NO: 256758 - DNA, 627 bp, Homo sapiens
agaagctctgtgcccagaacccagcacagagacaacatgtttcttactatttctaagtttaaacatttgatttttcatttcctcactgccctcattattctagtacatggtttccaaagtttggcttattaaccacacacatagaaatccccagaattttataattggaataacttgaaacacctgttaatgtatattttttgggtggggggtgggtccacaccttcagaatcaaaacctctgaggctaggattctagacacctacattgtyattaagcatccatttcaacatgcctatgaattcttcatattcttttacataactggatgtaggctaaagactaatgtgtactgaactagttttggatggctgcctttacatactctgcccagatcacatagcaccttgctttagaatagaatagagcattacctgacacctcttatactcaacctttgatgtttctgtcaaaactcagaggcagtaggaaaagtcttgtttaacatcctgttacacttaatttaattcatttttgttccacctttgtaagatttctaaatattaatgaatacatgattagttaatttaggcataattagcttcatcacattttagttttttctta

SEQ ID NO: 256759 - DNA, 574 bp, Homo sapiens
tcttgaatataattcacataacatataattcacctatttttargtgtttaatgtttttcagtatattcacgatttttgcatccgtcaccacaatctaattttaaaacattttcgttctccctaaaagacatcttggacttgacatctattcctctgcctctgtctgcccgcctccccagcctttatagatttgcccattctggacatttcatataaatggactcatataatatgtggcctactgtgattgatttttttcacttagcataatgttttctgagttaattcaggttgtagcatgctttagtaattcatttctttttgttgccaaataatattccattgtatggaaacatcacctttttaatacatttatcagttaatggcattttatttctttccactattttggctactatgaataatgttgctatgaatattggtatggaagtttttgtgtgtatgtatgttttcatttttcataggtatataactaggagtggaattgctgggccgtatgaaaagtccacatttaacattttgaggactagccaagctgtttccccttcacatt

SEQ ID NO: 256760 - DNA, 631 bp, Homo sapiens
cccactcccactgtgcccacccccaacagccctgagtccgtttgcaggtgagggcgagatggacttgaaaatttgcctgaggctatctgcctcccagctgtgacagaaaagggctttagttcttcccctacctgtgaagtctgcaagccagattctcaccctccctggagttctggccaggaggcttcttgccctgttcaaatttttacgaagttcagctagagatttccttctccctgtggagttttactccttgctcctctggccaccctcgcaatggatccctgtggtgccaggcaggaatggctgcttggggagccagcaagctcccagggcctttctgctgcttcctgtacccctgtatttcactcggctctctaacttgactcagctccaagtaaagttggaaacttctcccgcaaacagaccttcagcttctccactgaaggtgtgtgtttgggrgaggagggtctccctttcccactttcgcagttgaggcactcacagtatttggggtgtctcttgggccctgcaggagcagtccacttccttcagagggtctgcgggtcctcttgggattgctggtttattcatgcagtcgatctagagctaaaattcacaatgctaacct

SEQ ID NO: 256761 - DNA, 398 bp, Homo sapiens
gaatatcatatcattcttgaacctttctgatgttttttgttgttccataggaaytttatcttaatttttaaaggctgtaaatctataatttctgactcctttccctttgtctctttaaaaataatactgaaatgtaccaagtgcctaccatgttgttggcgaggacttcattttgcacttattaccatatgaatttaggtattaatattatccataatttacaaattagtgactgagaatgtagtgaaggttgttcaaggtcaaagagctagtaagtggaacaatcaggatctgaaacagttgaaacttagagcatgacctcttaaatatcattgtgcatattacattttaaagcattacattttggtaacattgcctattgcatttaaataattctt

SEQ ID NO: 256762 - DNA, 514 bp, Homo sapiens
aagctttgaagccaggcattgacttctcctctttagctatgaacgtcctagatggcctcttcttctaagaaaaggctgttttgaatacgttaaaawatcagatcagactttggcttaagggaatgttgtgactggtttgatcttctatgcagaccattacaactttttccatttcagcaataaggctattccacttatcattcctgtgttcactggaatagcatttttaatttcctttaagaacttttcctttgcatttacaacctggctaactggcataagaggtctagcttttgacctattttggctttcaacatgccttcctcactaagcttaatcatttctagcttttcatttaaaatgagagatatgtgatttttcctttcaccttaacactttgaggccattgtagggttattagttggctggatttcaatattgttgtgtctcagaatagtgaggactgaggagagggagagagacagagcaaaggctggtggatggagcagttgga

SEQ ID NO: 256763 - DNA, 644 bp, Homo sapiens
cctccccttgctctcaacaatttctcttttaggcaaaaagacaactatgtaagaaaataaattttcattatakgtgataaatatatgaaatgcctaccatacaccatttaaacataataccgagcaggaggaattagttatctacactggggaggaggaggtggtcaaggagatgttcctggagctaacatgtgaggaactattcagcggtgaacaatggttgaccaggtagacaaggaggtaggtatgagatgacttcaaaggacattccaatcagagggagtagagaaagcagacatgtgagaggcaactgtgcctgtaggtggtgggaagggtctaaaaatgtcacacaaacaggatctattttcccaattttctatttctcctcttcagtttgagcttgtcttagttctgaagaaaaggcccatttcatcaaagtaaacaaatatgggctgaaattgaccttcttttgcatatatatctagatttcttttatttatctaacaatttttgttcagcacctactacaggtgctagcaatacttaaggaattcttgtgaaaagacatacagaaatacagacattagtaagacagatctgctaatggaaggttgtacccaggtcctggatgtgaaaacagggca

SEQ ID NO: 256764 - DNA, 553 bp, Homo sapiens
caggtggaagttgttcttccatgaggagaaaatgaatccacaggagaggattcaatcaggccccaggaagaggccttggtggaaacagcagcagccagacctccaatttctggcctctccttgggactgagaaatcaactctttgttgggagggctgggaaagagagggaaggaaaggaaccaacatgtcctgagtgcctaccatgtgctagtggtggatatgatctcacctgacccccatgatagccctgagatctggcaattacccattccacagatgaggaaactgaggctcggggtggaaaaggcagtggctctgtccttgcactgcagttgagaaactgcagaaggagtgagagcagggcttccccaagttccatgtgtggcagagtgagctgcctggaccgcctgaygggcaaggcttgtagtggcctggaaatgaaggtgctcaacccctgcagtcagaaccaacatcgtaagagggagttctaatgaaatataaagagcaaggcaaatatttgcctggtgcaactgactctccggtggcctgtgg

SEQ ID NO: 256765 - DNA, 563 bp, Homo sapiens
ctcttttccttccttttttctcttctgcaaaacttttttccacccagccaatgcccccttccttgcctcaccaggtgaactgttggtgttcagccattcagatgccattcgaaaccctacactgctggaaacagttccttggtgtctcctgcctggattactgggttgcactcttcgtctgtgctcccctaagtgaggcttgttacattaatatcatgctgtgattgtcccttttcttgcctacttttgcatctttacggtccagtacactgtttacaactagtaggagttgaacattatttttaaaccaatatcagctaaataaataagcaacccarcttttttcttagcttaagaaagcaacagaagacatttattttttactcattacatgtttactgagtgtgggattgctatgtaaatctttctatcagcaattggctaagattctataaaatataatgaaactacatatgtatttaggtttttgctgacttttctcccctcatcacaacttaatttgcctttttcctcaagccataactgtaaaacgcacagaatat

SEQ ID NO: 256766 - DNA, 563 bp, Homo sapiens
ctcttttccttccttttttctcttctgcaaaacttttttccacccagccaatgcccccttccttgcctcaccaggtgaactgttggtgttcagccattcagatgccattcgaaaccctacactgctggaaacagttccttggtgtctcctgcctggattactgggttgcactcttcgtctgtgctcccctaagtgaggcttgttacattaatatcatgctgtgattgtcccttttcttgcctacttttgcatctttacggtccagtacactgtttacaactagtaggagttgaacattatttttaaaccaatatcagctaaataaataagcaacccaacttttttcttagcttaagaaagcaacagaagacatttattttttactcattacatgtttactgagtgtgggattgctatgtaaatctttctatcagcaattggctamgattctataaaatataatgaaactacatatgtatttaggtttttgctgacttttctcccctcatcacaacttaatttgcctttttcctcaagccataactgtaaaacgcacagaatat

SEQ ID NO: 256767 - DNA, 585 bp, Homo sapiens
gtgttattttcttttctaattttctggaagagtttaagaaagattggtgttacttcttttttaaatgcttcatagtatttagsgtgaaaccatctttagtactttactttttaaaaatggtaactatggacagttaaacctaaagtatcagaattcaaatggaaatgttttaaatttggcaataacaaaaaattataagttcaaaacatatctgcccaaacaatgactaataccacttccaaaattatctacttaatagatagtgaagggatataacattgtttttatattatttcaagatggggcaaaagttaacttctgttaagtaaagtctacacctatacaaaatgttgctcaatatgttcttgtgtttgatagcatggtagggtgaatatattgaacaatatattgtatttttcaaaatagctagaagagaagatttgaaatgttactgacagaaagaaatgataagtgtttgaggtgatggacatcctaaataccctgacctgatcattacacactccgtgcatgtatcaaaatatgtaccccatcaatatgtgtaagtattatgtatcagtaaagaat

SEQ ID NO: 256768 - DNA, 585 bp, Homo sapiens
gatcattacacactccgtgcatgtatcaaaatatgtaccccatcaatatgtgtaagtattatgtatcagtaaagaataaaatatgttgaaaaatggagacaattacccaaataaataggaatatgattgagacatgggttggtattctaatgtattcagactattatcttaattctccattttactttacccatataaaaataatctcagttactcttagttggaaatttgtttcaactagaaatagaggaatatctccaaataattttacaactttattttctctcttagactcattgttttttccacaacatcaggttaatggtttaaaaagctttgcacaacttctgtttggttaagattttttattttatatacatagacacacayacatatctattagtcgatcattcagatatacaactaactagatttaaaaatagtaagccatggtttatacatcacatataaatgacctagataccagtagtgacattatcatcatgaatattagttccagaaagtatagatcagagaatatttgggaagagagatccaaaacaatgtctgacaagtttttgagga

SEQ ID NO: 256769 - DNA, 501 bp, Homo sapiens
acctgaagctgagtcaaccaggaaaattgtactgtctaaattctttttccttttctcttgtcacccatggtgaatttttccaatgatataatcaattgatttttaccttatgacagtgggagaggacaggtaataaatgtaggaaaaccaggaaccaaatatgatttaacatacttggagttcacagatagcagtgatagaaagttgaactttaaaagcaaaacttaaagaaatccctttattttgttaaagaaagaaaatatatacactggaggatcataagtaaaatattccaagtacagttaccagccccaatgagtgagatccatgcttagagacagtcgtgattcttatttaacattaataaccacaaaytgtgcaccagatgctatgaactcaagtccaaggtagatgatataatcaatatcatcatcactacagaatatattaaaatattattttactttagaagttgcctttcaagttaactagtatttgagc

SEQ ID NO: 256770 - DNA, 514 bp, Homo sapiens
tacggtaaatgatggagaaagaatacattctacttgggaaaaaaatggtaaatacatttcccaagaagagaaaaagaaataataatcagtgcatggagaaagttatttgttatagaatcaggacaaatatgccaagagaatgaaaccacaaagattatgctataaaatagtgtcaggcaagctggcctggcagcacactgtgaagggtgctgtggagaacatctgctttcagcaaagaaagcaagtgtcatggcaccaacaattccaggcatgctaccaagaagtctctttrctcaagtgaattcatgctagatgcacatttccagttgctgctggaattctatgcagcttgttgatttggtcagcaaacggatggcatgacagttgggatacaatcagactaatttttatccactgtgcatacttaggaaggtggattactctacaggcctgaagggatgctcctggctgcatttcaaaactacacacagcaggtagagaatggctgtaagac

SEQ ID NO: 256771 - DNA, 514 bp, Homo sapiens
tacggtaaatgatggagaaagaatacattctacttgggaaaaaaatggtaaatacatttcccaagaagagaaaaagaaataataatcagtgcatggagaaagttatttgttatagaatcaggacaaatatgccaagagaatgaaaccacaaagattatgctataaaatagtgtcaggcaagctggcctggcagcacactgtgaagggtgctgtggagaacatctgctttcagcaaagaaagcaagtgtcatggcaccaacaattccaggcatgctaccaagaagtctctttactcaagtgaattcatgctagatgcacatttccagttgctgctggaattctatgcagcttgttgatttggtcagcaaacggatggcatgacagttgggatacaatcagactaatttttatccactgtgcatacttaggaaggtggattactctacaggcytgaagggatgctcctggctgcatttcaaaactacacacagcaggtagagaatggctgtaagac

SEQ ID NO: 256772 - DNA, 551 bp, Homo sapiens
tgatggcttttacaggaagaagcaagatatatgataaagacatcaattttttgttttttttcttaaattagttaataaatatttactgatgtgatatagtttggatgtttgtcccctccaaatctcaggttgaactgtgatcccccgtgttggaggtggggcctggtgggaggtgtttgggtcacgggggcagatcccctatgaaaggcatggtgccctccccacggtaatgagtgaattctccctccatcagttctgacaagatctggttgtttaaaagagtctggcacctcctcatctctctggttctctctcttgctccccttcaccttccaccatgagttaaagcttcctgaggcctcaccagaagctgagcagatgctggcaccatgcttccwgtataacctgcaagaccttgagccaaataaacctctttcctttgtaaattgcccaggctcaggtactcctttacagcaatgcaaaacagactagcacctgatacataatggatgcaccgttgtctggggatatcatcacatacaagttgcaca

SEQ ID NO: 256773 - DNA, 412 bp, Homo sapiens
ttggttctatttttggttatgacatttcttctaaaactaactctttcatatccacaaaacgtgggatccaatatgcaatggagagttacttatgcttcttgctgtatagccaagacatcttaataagaaagaaaacttaataaataatcaagtttctttagatatagcctatacttgagataaactgagatctttctaatgtgctccttactgaattgaagtcttttaaaaactagttgaaaataaaattttttaaacttcatttgcaaagtagttttctaatggatttggtcctatcattaagatcacctcacttaacgactttaagccagtcatayatatatatttttccaccaaaaaagtaaatttcacctggttttttgtgtaaattcctgtccacaggaacatcttg

SEQ ID NO: 256774 - DNA, 545 bp, Homo sapiens
aaatgttctgagtttttattctaagggccattgatgcatttagaaacttagtttttaaatttgaaagacataattaatgtggtggattttcagaattaaatcagattccaaggtaccatagttcttagaagcttttttgaacttgacaggtatcttgattagaattacttattgtttttgtgattttatttcccacatttgcacatatcataaactaatttgtaatttcattagctaccacattcatctctagattatctgcttttacaagcagrtacatttttatatacttcaatgatccagcacactgccttgcatctaatagaaacacattaaattactttgtcaattcaatcaacaatttaatgtgaattatttggctgtagttatctctcattttctgaaatacctgtaatttttaaaaaaattgtttttaaagtatttctataaaacaccacttttctccattgcaaaagtcaagactttcttgtgaggtaaagtctacaattgattttgttgaacatttttagacacaccaactcata

SEQ ID NO: 256775 - DNA, 609 bp, Homo sapiens
ggaacatcctagctcagattcagttagggcaatgaccaagaagatgcttcactgaaccacagagaaagcggcagaattagacatttactttacctcccactgcaaattgttaaatactttcaaaatttaactgggyattaaatgcatgtataattaactttaaaatattccttgtttcaaaatattcccataaccagccaaatgggaagcatatgtgttgttttaatcacaactgttctactggaggccgaaggcattgaaacttaaaaaatctcagcaagtttatttaatataacataataatattaaaaataatcctttgtattttcatctgcacatgtcaacgaattttggaaacatcaattccgtaatcttcaccaatgcattcaatttagatgacgataaatccactccaaagcgaactcttttccacattgtatgttttccttcatgatagaaaagaggctgccttttgcccctcaatttcaaatattgacagcctagacctttcacttcttattggaaaggtaagccataggtcttaaagaaagaagtttgtgactttcagttacaggagattcactagagaaatagaaaatgacagcaagc

SEQ ID NO: 256776 - DNA, 546 bp, Homo sapiens
tgacacaagttacatttgcaatagaaacctatcttgtatatgagaaatgcaatccagtattgattcgacacatctgggttgaattcctgacttgtccacagccagcgatatgcccttggacaagctactttatcccattgagactctgttctcacctctacgaggagagtgtcagaggcatttggaccagagcgactccatcttgaataggggctgggtaaaatgatgctgagacctagtgggctgcattcccaggagttaaggcgttcttagtcacaagatgagacataggtcagcataaaatacaggtcataaagaccttgctgataaaacaggttacagtaaagaagccagccaatacccaccaaaaccaagatggtgaaagagtgacatctggtcctcttcactgctcattatacgctgattataaggcattagcatgctaagasacactcctgccagtgccatggcagtttacaaatgccatggcaaccaacgtcaggaagctaccctatgtggtctaaaaaccggtctaaaaagggcagg

SEQ ID NO: 256777 - DNA, 585 bp, Homo sapiens
tgtccaatcagctctagccagggacagccagagacaggcatgttaacttggctcacatctccagcaaggttgtgaatgatgggcagcccctgtaaaaaggcatgtcttgggcaggcgcccctaaatttgagtacattgcaacaagcagagcctttattaccctctcactccccaacctttcagcctgatttctgcctgtagctctccctttccataccacagtcccgcagtgtcctgggttcccgatgcatttccactcttgtttacatgcacatgtgctatttatctgcttagaatgctttctcctctctccaaagctacccttgaaccccaggaaccatatacttggcaaactactagttgtccttcaaaattctgcgtaaatgtcaccttctctttgaacatccttaaaatccacccccctagaattagacgttccatctcaaggatcccgtcatgctttaaacatcttccagtagtacttaaatgcactrtactgacatctttcatttccatctctcttcttaacaaagagcatccccttttaaaaatattttcttttataattttaattggcacataatg

SEQ ID NO: 256778 - DNA, 572 bp, Homo sapiens
attttgccaaatccctttgagaccatattaaatggaaagatattttaagcattcattttgatgaatggagcataggtaaagaccttgttcaatccacagggtctagtatacaatgaaagcattgaccaacagataatttattacagtgcggtggaattaattyttggtacattgaatatttattttcctcagtgtgttttaaatttcagttttagaaaatttttgtgtgattatgaaattaatacatgttcagtgtagaaaattaggagaatatagaagaaaagataagggaaaaatcaaaagaaaatccaattctcaaaaatacccactatttttattttggtataaatatgcatacaattaatattttatcactcttgtcaatcatttcaaagatgttattcaaagatatttctacaatgttatttgcagttgaataatctaaatgaccatcaacaggactttgatgtactggcatgaaaagaggttgacaagaacctgtcaagggaaaaaagcaagaactagaaaacttttataataaagcctcatttttttgtatcaaaaattttaga

SEQ ID NO: 256779 - DNA, 608 bp, Homo sapiens
tcaaattcaaatgatggcgatccactggcgtgattgtaatgacacagtttaatcaaaggccgtcaaggtacgtacaattgactagaaccaacttgatcatagttaactgaagaatgttgtggtggctgtgttctttgtcttccgaagttgacttatgaaatcaaaacagtattctcctggacatatttaataatgcattcaagcaggcattttgccaaatccctttgagaccatattaaatggaaagatattttaagcattcattttgatgaatggagcataggtaaagaccttgttcaatccacagggtctagtatacaatgaaagcattgaccaacagataatttattacagtgcggtggaattaatttttggtacattgaatatttattttcctcagtgtgttttaaatttcarttttagaaaatttttgtgtgattatgaaattaatacatgttcagtgtagaaaattaggagaatatagaagaaaagataagggaaaaatcaaaagaaaatccaattctcaaaaatacccactatttttattttggtataaatatgcatacaattaatattttatcactcttgtcaatcatttcaaagatgtt

SEQ ID NO: 256780 - DNA, 572 bp, Homo sapiens
attttgccaaatccctttgagaccatattaaatggaaagatattttaagcattcattttgatgaatggagcataggtaaagaccttgttcaatccacagggtctagtatacaatgaaagcattgaccaacagataatttattacagtgcggtggaattaatttttggtacattgaatatttattttcctcagtgtgttttaaatttcagttttagaaaatttttgtgtgattatgaaattaatacatgttcagtgtagaaaattaggagaatatagaagaaaagataagggaaaaatcaaaagaaaatccaattctcaaaaatacccactatttttattttggtataaatatgcatayaattaatattttatcactcttgtcaatcatttcaaagatgttattcaaagatatttctacaatgttatttgcagttgaataatctaaatgaccatcaacaggactttgatgtactggcatgaaaagaggttgacaagaacctgtcaagggaaaaaagcaagaactagaaaacttttataataaagcctcatttttttgtatcaaaaattttaga

SEQ ID NO: 256781 - DNA, 586 bp, Homo sapiens
actaaatagtggttaataatggtaactatctcatgagtcatttgtaagaattacatttgtttataagtataaagcattttgaatcatgctagaaayatgagtgccacaatagtatctgcttaaacggagaggaaacaagcataagcatgttcttctgattggtaaagcaataccttttgcaaaagtcctgatttgcagcattatttttacctcactttggccaaaattgagtcacatggttttaatggggtacaattccacattcaggagtatcaaagccttaacagcaaggaaaaagaaaaaaatggacactggatgggcagccatggttatgtcctgaaaaacgtattgaaagcccatgtgaccatatactaggaattctgaacctagcctgaggacctacaatacataatgtaagctagaaatatttagcaagaatttataatacatatttgtgacataatttttgatattgatagagtacttaggagtaatattaggggataaccataataaactttgaagactaaagtaacaatgcatttgctcatttaagccattacgtgtgtatataaacatttttttc

SEQ ID NO: 256782 - DNA, 586 bp, Homo sapiens
actaaatagtggttaataatggtaactatctcatgagtcatttgtaagaattacatttgtttataagtataaagcattttgaatcatgctagaaatatgagtgccacaatagtatctgcttaaacggagaggaaacaagcataagcatgttcttctgattggtaaarcaataccttttgcaaaagtcctgatttgcagcattatttttacctcactttggccaaaattgagtcacatggttttaatggggtacaattccacattcaggagtatcaaagccttaacagcaaggaaaaagaaaaaaatggacactggatgggcagccatggttatgtcctgaaaaacgtattgaaagcccatgtgaccatatactaggaattctgaacctagcctgaggacctacaatacataatgtaagctagaaatatttagcaagaatttataatacatatttgtgacataatttttgatattgatagagtacttaggagtaatattaggggataaccataataaactttgaagactaaagtaacaatgcatttgctcatttaagccattacgtgtgtatataaacatttttttc

SEQ ID NO: 256783 - DNA, 577 bp, Homo sapiens
cttctggtttttacccaaatgatttgaaatcagtttctcaaagatatgtctgtagtcacatgttctttcgagcactattcacaataattagtaaatggaatctaccagagtggatgtcaacaaatgaatggataaagaaaatgcagtgtatgtgcacaatggaatagtattcggctataaatacaaaaaataaaataaaattcgcagatctggcaagatggccaaataggaacacttctggtctgcagctccaagygagaccaatgcagaaggtgggtgatttctgcatttccaactgagatacccagtttatgtcactgggactggttagacagtgtgtgcagcccacggagggcaagcagaagcagggtggggtgttgcctcacccaggaagtgcaaggggccagggacctccctcccttagccaagggaagccatgagggactgtgctatctgactcagatactatacttttcccacagtttttgcaacctgtagaccagaagatttccttgtgtgctgtaccaccacagccctgggtttcaagcacaagactggacggctgtttgggcagaca

SEQ ID NO: 256784 - DNA, 645 bp, Homo sapiens
gtatgcattctttatggctatcaagaggctgctgaatgcttctagattacatcagtttgttttgaagagtaccatgttcattycctccaatctcaactgtgctctcagttatttctatgtcttcagtcaactgcacctctcattccacagagcaaacattttaaacttctaaatattttctccaagaaaactgaattaatgtaaactctacacaaaaaggccacattagtcattctataaatatattgtcagaattaatgaatgaacacgtagatcttacttcatatttagcacctatattttaattcattcttgcccgctctatatttcttacaagtatgtattttttcaatgattcaggtatgcagtaggtaaatttcgtattacagaatactttgttcatttttccctacttccttcagtaagctttaactgtgaaacagcttaattgctactgacaattatttcttagatgtataaaagtcccctttagaccaatgtcaatgtttgttaatctaacattacttttttgaaggaaaattactgctattaaatgtatactcgtggaaggaagtaatattgtaatcagttctggggattcaattaactagggtgtaataatactgtttgcttgaaagaaaacaa

SEQ ID NO: 256785 - DNA, 569 bp, Homo sapiens
accataacaataccgagagaagctttccttcactaactgccttagtccattcacacactgctataaagaaataagtaaaactgggtaaattataaagaaaagaggtttaatccattcagttccacactctgtacaagcagcatgactggggaagactcgggaaacttgtaatcatggcggaaggcaaaggggaagcaggcacatcttatgtggccagagaaggaggaaaagcaccaaggggagatgttacacacttttaaacaaccagatctcrtaagaactcactatcatgagtacagcaagggagaaatctgcccccatgatctaataatctactaccaagtccctccccatcaatggggatcacaattcaacatgaaatttaggtggggatacagagccaaaccttatcagtaatcaccactctaggtttgttttgtttttgttggtcttatttgcaagaagttggtttattctcctaccttcagctgccttggccaagtctttgaaataactccttttatcattgataagttaagcagtgaattcagtaaaacaacaatttagca

SEQ ID NO: 256786 - DNA, 338 bp, Homo sapiens
ataagctataaaccaaaattacaagcaagatgagtttacatactttagttaccatttatttttgcaaccaccctggttataaaactagttctgtgaaaataaataaataaatggtcactcaacattgtgaytgagagaaaactactaaattataccttgaaaattcgaagcccatcaactcctagtaggttgtaaaaagtccaccaaggaagaaaaaaaactgaaatgaaataatgcatagagtaagcagcaaaacaaaaccttaaaaggagaacatcaaaagtcagaaagaaaataactccagtcccaaaccttgcaatgttccctttgcctcactg

SEQ ID NO: 256787 - DNA, 599 bp, Homo sapiens
tgggtaatttacaaaggaaagagatttaactgactcacagttctgcatggctggggaggcctcaggaaacttacaatcaaggcataaggggaagcaggcacttcttacatggtggcagatgagagagagagcatgcacaagaaaaactgccacttttaaaaccatcagatctcctgagactcactcactatcaggagaaaagaatgggggaaaccactcccataatttaatcacctcccaccaggatcytcccttgacacaaagggattacaattccaaatgaaatttgggtggggacacagagccaaaccatatcagttggccaaaaatgtgtgtaacctcactctttcttttctttctttcaaacaaaacattcataatcatagccaggatttttattaggttatgatttgtatgaaaatattagggtcctttaacatgcaaacatgattttacatattcccactttttgacctgctctaaatatttaataccttgaatataatcacctacttttctgtggtgtggttataacatgtgacagatataatattttataacatattccattccaaattaaaacattcatatttacctga

SEQ ID NO: 256788 - DNA, 612 bp, Homo sapiens
aaaaacaagttattcttattttttaagaaatacaatttggggttcctccatttattaaaatttgcaatatccttaggtacacataaaacttcacagtagcatgctatattcttaaattcaaaacaattattatgaatcctgatatttataaagcaatcaacagccaaatctctgtgtgartcagcaatgaagtcatgtatgtaagtgctcattacattccctgaggttgacagacaaaaatgtttccaaatgttgccaaatatcgcctggatggatagagggagtaaaatgaccgtaacagagaaataacgtcttatagaaaatttaaataatatttaagttgtcaaaacctttcatgtacactcaaaggacagtgggtcagaaagagactctgaagaacaattaatttattcactgttaccagacaggttaatactgtaatctatcaaaatgaagaaagtgatacactgttgcaaataatattagcacaaattatcattgggtctaaattctgtgtaatcaaaagaatcttgttggagaattactatttctttccaggtaacagcataacatgaaataagatgattatatccaacaattgttcacttactt

SEQ ID NO: 256789 - DNA, 612 bp, Homo sapiens
aaaaacaagttattcttattttttaagaaatacaatttggggttcctccatttattaaaatttgcaatatccttaggtacacataaaacttcacagtagcatgctatattcttaaattcaaaacaattattatgaatcctgatatttataaagcaatcaacagccaaatctctgtgtgagtcagcaatgaagtcatgtatgtaagtgctcattacattccctgaggttgacagacaaaaatgtttccaaatgttgccaaatatcgcctggatggatagagggagtaaaatgaccgtaacagagaaataacgtcttatagaaaakttaaataatatttaagttgtcaaaacctttcatgtacactcaaaggacagtgggtcagaaagagactctgaagaacaattaatttattcactgttaccagacaggttaatactgtaatctatcaaaatgaagaaagtgatacactgttgcaaataatattagcacaaattatcattgggtctaaattctgtgtaatcaaaagaatcttgttggagaattactatttctttccaggtaacagcataacatgaaataagatgattatatccaacaattgttcacttactt

SEQ ID NO: 256790 - DNA, 595 bp, Homo sapiens
aaattgcttttgcatctttttcagaatcaactgagcatgtgtgggtctatttgcaggtgctctgttcagtttcattgatctgtcttcattaccatagctatatggtaatctttaatatcaggtagattaaagtctcactttaatcttccttcttgggattcttttagtttttctagagcctaggcctttctatgaaaatttcagagtgagcttggcaatctctatagaatcacttactggagatttgataggaagtgcattaaacatatataaatgtgaagagarttgatacctttactatattgagttttcgagttcaatgagcatggtatgtttctccaagtatttaaatcatctttgactgatttcattagcatttttaattttcagcatacagatactgtattttattttcttcggagcaattttaaatataattgttttaaattttagttttcatattgtcattgttagtatacagagattggcttttatacatttatgttgtgtcctgccaccttcctccacgtacttattggtcccaggagtttattatagattccttaggattttgtatgtagataattatgccatg

SEQ ID NO: 256791 - DNA, 534 bp, Homo sapiens
tcctacttgtttttggtgtctatttgcaaggaattctttttccatctctttaccttaagtttatgtgagtccttatgtgttaggtgagcctcccagaaacttggttggtgaattcttatccattctgccattctatgtcttttaagtggaagatttaggccatttgcattcaatgttattattgagatttgaggtacttttctattcatcatgctatttgttgctggaatgcattttttattgtgttattgttatgtaggtctgtgagaattatgctttaaggaggttctattttggtgtattttgaggatttatttcaagatttagagcccctattggcagttattttagtgttggatggtagtggcaaattctctcagtttttttkgggctggaaaagactaccattccttcatttacgaagtttactttcactggatacaaaattcttggctgataattgttttgtttaaggaggtcaaaaataggaccccaattccttctagcgtgtagagtttctgagaaatctcctgt

SEQ ID NO: 256792 - DNA, 500 bp, Homo sapiens
tcctgttaacctgatacgttttcatttataggttatctaatgcttttgcctcacagcttgtttttttattagtattatactttaacttctggggtacrtgtgcagaacatgcaggtttgttacataggtatacacgtgccatggtggtttgctacacccatcaaccacatcacagcttttaagatcatttcctttgtcttgacgttagataacctgatggctatgtacctaggccatgatcttttggcaatgaatttcccaggtatcttcagagcttcttgtactggggatgtctagatgtctagcaaggcagggggagttttccttgattattccctcaaatatgttttccaaacttttaaatttctcttctttcttgggaacgccaattattcttagatttgcatgtttaacatagtcccaaacttcttggaggctttgttagttttttaaattcttttttcttcatctttgatggattgaattaattcagaagcctt

SEQ ID NO: 256793 - DNA, 500 bp, Homo sapiens
tcctgttaacctgatacgttttcatttataggttatctaatgcttttgcctcacagcttgtttttttattagtattatactttaacttctggggtacatgtgcagaacatgcaggtttgttacataggtatacacgtgccatggtggtttgctacacccatcaaccacatcacagcttttaagatcatttcctttgtcttgacgttagataacctgatggctatgtacctaggccatgatcttttggcaatgaatttcccaggtatcttsagagcttcttgtactggggatgtctagatgtctagcaaggcagggggagttttccttgattattccctcaaatatgttttccaaacttttaaatttctcttctttcttgggaacgccaattattcttagatttgcatgtttaacatagtcccaaacttcttggaggctttgttagttttttaaattcttttttcttcatctttgatggattgaattaattcagaagcctt

SEQ ID NO: 256794 - DNA, 452 bp, Homo sapiens
tttcctttctatgtataacagaagcatgaaaagcatgttaatataatcatctatcctgttttttattaaaatagatattgatgatttttctctgataagaagttatgacattccattttcaaaacatacaaaaagaactagtatcattacagttcattaagtakgtatcaatttactaaatatatcacatttctcaaaaaattttccagtgtacttggagtggtttcacctgcttatatctgttgtgatttttagcttttattcatattttaaaataaataaatatgtttgcgatttttaagcaatagtatagcaatgtaggacttcatgtacatattaaaatttgaccctgttaatcatctgcccaaagtacctggcacagagactttggttatttgaatagaaactgatttcttatcctcaaatgcaatgtagtaggctgacagaacaaa

SEQ ID NO: 256795 - DNA, 452 bp, Homo sapiens
tttcctttctatgtataacagaagcatgaaaagcatgttaatataatcatctatcctgttttttattaaaatagatattgatgatttttctctgataagaagttatgacattccattttcaaaacatacaaaaagaactagtatcattacagttcattaagtatgtatcaatttactaaatatatcacatttctcaaaaaattttccagtgtacttggagtggtttcacctgcttatatctgttgtgatttttagcttttattcatattttaaaataaataaatatgtttgcgatttttaagcaayagtatagcaatgtaggacttcatgtacatattaaaatttgaccctgttaatcatctgcccaaagtacctggcacagagactttggttatttgaatagaaactgatttcttatcctcaaatgcaatgtagtaggctgacagaacaaa

SEQ ID NO: 256796 - DNA, 452 bp, Homo sapiens
tttcctttctatgtataacagaagcatgaaaagcatgttaatataatcatctatcctgttttttattaaaatagatattgatgatttttctctgataagaagttatgacattccattttcaaaacatacaaaaagaactagtatcattacagttcattaagtatgtatcaatttactaaatatatcacatttctcaaaaaattttccagtgtacttggagtggtttcacctgcttatatctgttgtgatttttagcttttattcatattttaaaataaataaatatgtttgcgatttttaagcaatagtatagcaatgtaggacttcatgtacatattaaaatttgaccctgttaatcatctgcccaaagtacctggcacagagactttggttatttkaatagaaactgatttcttatcctcaaatgcaatgtagtaggctgacagaacaaa

SEQ ID NO: 256797 - DNA, 616 bp, Homo sapiens
ttctttccacttcaaccccttcttagttaacagacaggaagtaacagatgtcttaaaaatatatattgttaatccctaaatatattattaatggcccagaatagagattctaaaaactgcaatccatgcatygattaacagtggggatacattctgagaaataaatcattagggaattttatcattgtgcaagcatcatagagtgtactcagacaaacctagatggtgaagcttgccacacaactaggctacatggtatagtctattgctcctaggctacaaacctggacaatatattactactgaatattgtagacaatggtcacacaatggtaagtgtgtgtatttaaatataaaaaagtacagtaaaaatatggtatcataattttatgagaccatcatcatattataatcttataggaccaccttcatatatgtgatctgtcactgaccaaaatgtcatatggtttatgactgtagatcttttcagcttgccttggaagtacctaatttatcatgctaaatagatttagattatttgttgtggccatatataaagttaatattctttcttctttaagcccctatctttacctaaggagtagctatgcaatag

SEQ ID NO: 256798 - DNA, 616 bp, Homo sapiens
ttctttccacttcaaccccttcttagttaacagacaggaagtaacagatgtcttaaaaatatatattgttaatccctaaatatattattaatggcccagaatagagattctaaaaactgcaatccatgcatcgattaacagtggggatacattctgagaaataaatcattagggaattttatcattgtgcaagcatcatagagtgtactcagacaaacctagatggtgaagcttgccacacaactaggctacatggtatagtctattgctcctaggctacaaacctggacaatatattactactgaatattgtagacaatggtcacacaatggtaagtgtgtgtatytaaatataaaaaagtacagtaaaaatatggtatcataattttatgagaccatcatcatattataatcttataggaccaccttcatatatgtgatctgtcactgaccaaaatgtcatatggtttatgactgtagatcttttcagcttgccttggaagtacctaatttatcatgctaaatagatttagattatttgttgtggccatatataaagttaatattctttcttctttaagcccctatctttacctaaggagtagctatgcaatag

SEQ ID NO: 256799 - DNA, 617 bp, Homo sapiens
ggatttctgaactagaatcatctttcagttacatctcctcattaccactgttatttctttgtaggggtagaatgacctccctgttatatattccccattcaatataggcatcatcytacattgtagtggaaaatttttgagaagcaccattagatatacaagaatgttggacctaaataaaacatgaaatttatgtccaataaaagctaaaaattaccttgaacaagccattaaaacttattgttaaactgcctctgcatctgaaaatgaagacgtttaactctgacctctaatgtcctttcaaaaaattataacacctaaattatatcattaaattttagtatcttgtatagcagtttattgaaatggctttcttttctttggttgaaaattcatagcaggccagaatttagataatagtatttaatagaggttactctctagtatggaaaaaagtatggcagacagaactgtactttaatggtcaaataataaaatataactttgtatgtatctctacctattctctaatattacataaggaatcacattatttttgacaggtgcctaactcagagtgcaatccttgcttatgtctcagtctgactcaaagcctt

SEQ ID NO: 256800 - DNA, 617 bp, Homo sapiens
ggatttctgaactagaatcatctttcagttacatctcctcattaccactgttatttctttgtaggggtagaatgacctccctgttatatattccccattcaatataggcatcatcctacattgtagtggaaaatttttgagaagcaccattagatatacaagaatgttggacctaaataaaacatgaaatttatgtccaataaaagctaaaaattaccttgaacaagccattaaaacttattgttmaactgcctctgcatctgaaaatgaagacgtttaactctgacctctaatgtcctttcaaaaaattataacacctaaattatatcattaaattttagtatcttgtatagcagtttattgaaatggctttcttttctttggttgaaaattcatagcaggccagaatttagataatagtatttaatagaggttactctctagtatggaaaaaagtatggcagacagaactgtactttaatggtcaaataataaaatataactttgtatgtatctctacctattctctaatattacataaggaatcacattatttttgacaggtgcctaactcagagtgcaatccttgcttatgtctcagtctgactcaaagcctt

SEQ ID NO: 256801 - DNA, 575 bp, Homo sapiens
tgaagaaagataactttcattattttggcatgagacactcttagaatgccctatgtcgagaataattagaatttcactcttcagcttctctcctgcagtatattgactgtctaaaagagcctcactgtctggtgcctgataaatgtgttcttgagtgtatgaactgaagtgaatctgagccakaccagttagagctgtccatgtgaaagcctagataaaggtgtaaaaatgtacatgttgagacattcattaatttactgcatgactattccatttattaaacagaggctactgtgacagactagctcagatgttgtgtctatagagaataagaaaataaattcaactacacagttaccatggcacttgcaaattgagttttaacagttactttcatttcattaaaacaaagcctagattagtactggtcctaaactctttcaaaagacttctgcaaactgtggtggggggacaaaagaaatttcatatgaaatactggtagaaacaaagacagaaagtaggggcaaagcaattatttcatttaaaatcacaatcaaactctgcctcatgtctta

SEQ ID NO: 256802 - DNA, 557 bp, Homo sapiens
aagacagaaagtaggggcaaagcaattatttcatttaaaatcacaatcaaactctgcctcatgtcttaactcacactgcttttctagagccacctgccatttcacaagtgaatactttgtgcctctgcctagaagactttgtgctgtctctctttccacaaaattgaataatctcttctcccttgtaacattcaaagacttcagagattgttctttcatagcatttttgccataccgtaattgtgatatttatcacattgcattttaatattgtatttgttttcttgcccaattagatgtaagaatttaaaatacagtgacawcttgtttatatatgtatataggggtatatatatgtgtgtgtatatatatatacatatacatatatatacacacacatatataagtatctaagtatatatgtgcattctaaagggtttgatacaaagttgatgctcataaaatggctaatgaatcagtgggtaaacaaatgaaagaatgaatgaagagagaaaaatacgaccagtcacatgttttcaacactggatagaatgaaa

SEQ ID NO: 256803 - DNA, 580 bp, Homo sapiens
tcattttaagatgtcatatttcaatgtatagaagtagagtttattaagttgttgttgattgtgaatagcttaagaaagaagaaaaaggtcttccttacatatctggagaatggaaccttaaaaatacatcaacaatattccaagtaaccacagtgtaatttccttcagcgtttattcagtcctacgtaattagttttttttctgctggatcctggcttwtccatccatttgcctgcagctgacttacactacactaaaatgagtcctggaaatcctaactcagtcaacaggtatggtatggaagttatctaagtgatgtttggtcagaaacctatacccatgggtccactcttttaacggtcagtagttagacatgtctggtacaatacttttctacaaaactctgagactatgtttatttgttgaatatacaatgactggctcgtagcagaaccttctagcaagtgtaacagtaaaatcaaaactacccacagatgagagaggattaatttctggctgtggttaatttattactataatcagtatatcaggaaggaagatggtaaaattctctattgca

SEQ ID NO: 256804 - DNA, 580 bp, Homo sapiens
tcattttaagatgtcatatttcaatgtatagaagtagagtttattaagttgttgttgattgtgaatagcttaagaaagaagaaaaaggtcttccttacatatctggagaatggaaccttaaaaatacatcaacaatattccaagtaaccacagtgtaatttccttcagcgtttattcagtcctacgtaattagttttttttctgctggatcctggcttatccatccatttgcctgcagctgacttacactacactaaaatgagtcctggaaatcctaactcagtcaacaggtatggtmtggaagttatctaagtgatgtttggtcagaaacctatacccatgggtccactcttttaacggtcagtagttagacatgtctggtacaatacttttctacaaaactctgagactatgtttatttgttgaatatacaatgactggctcgtagcagaaccttctagcaagtgtaacagtaaaatcaaaactacccacagatgagagaggattaatttctggctgtggttaatttattactataatcagtatatcaggaaggaagatggtaaaattctctattgca

SEQ ID NO: 256805 - DNA, 580 bp, Homo sapiens
tcattttaagatgtcatatttcaatgtatagaagtagagtttattaagttgttgttgattgtgaatagcttaagaaagaagaaaaaggtcttccttacatatctggagaatggaaccttaaaaatacatcaacaatattccaagtaaccacagtgtaatttccttcagcgtttattcagtcctacgtaattagttttttttctgctggatcctggcttatccatccatttgcctgcagctgacttacactacactaaaatgagtcctggaaatcctaactcagtcaacaggtatggtatggaagttatctaagtgatgtttggtcagaaacctatacccatgggtccactcttttaacggtcagtagttagacatgtctggtacaatacttttctacaaaactctgagactatgtttatttgttgaatatacaatgactggctygtagcagaaccttctagcaagtgtaacagtaaaatcaaaactacccacagatgagagaggattaatttctggctgtggttaatttattactataatcagtatatcaggaaggaagatggtaaaattctctattgca

SEQ ID NO: 256806 - DNA, 573 bp, Homo sapiens
cttacactacactaaaatgagtcctggaaatcctaactcagtcaacaggtatggtatggaagttatctaagtgatgtttggtcagaaacctatacccatgggtccactcttttaacggtcagtagttagacatgtctggtacaatacttttctacaaaactctgagactatgtttatttgttgaatatacaatgactggctcgtagcagaaccttctagcaagtgtaacagtaaaatcaaaactacccacagatgagagaggattaatttctggctgtggttaatttattactataatcagtatatcaggaaggaagatggtaaaattctctattgcaatatagtacattctttccctaaagagttttgatcagtgcttttcccaagggtaagtacatattatagatattaagcacattgacaaaactccagagttttcccataaagcagaaatatttattttrataacattttacctatacaaatttaatttagaggaagttgagcatatcttctgatgtgacaattttctatgcaactcttacaatagtaacacagaaaacaaacctaatt

SEQ ID NO: 256807 - DNA, 554 bp, Homo sapiens
attatgcatgggtaatttcaccttatttaaacagcagacctgtataaatttgagaaaacaaacctaagtagaataaagtgtatgcttttactctactcaacacaaattaatcatggaagagacacagctaccttttttaacacaaaaattattcaactagtcttatttgtcaatgtttattctaattatgtgaatttagtatcttcaaaaagtcttcagactttttttataagaaatttctttaagttgagaacatttttaaactattcattttttaatttccttyatttctgggactttggatcatttagtttacgtatttatttatctctataagccaattggaacatagcttataatttaagataaatataggttatttataccctctagaaagagtaaaacatttcacactaacacaatcagaggtaaaggcctttctgaattacagaaacatagacacaaagatacatagagtacttatagcttcacatttttaacttcacccataggtcaagagtaaatacacagatacggatcagactgagtttgtt

SEQ ID NO: 256808 - DNA, 591 bp, Homo sapiens
atttaagataaatataggttatttataccctctagaaagagtaaaacatttcacactaacacartcagaggtaaaggcctttctgaattacagaaacatagacacaaagatacatagagtacttatagcttcacatttttaacttcacccataggtcaagagtaaatacacagatacggatcagactgagtttgtttccttcacgtgggcaccatattttgaactgagaattttataaaaacaatcaaaaaaagaataaaaacctcattccctgtcatcttttacccaacagaaaacagattctataatccaacagcaatgatcaacaaataaccagatcattaagccgaattttcaaacattgctctcaccaatggagaataacttgcacacagtaagaacaatagaaacttcaacaaagcacaaaattattgggaaaaatacaagaaatacaaaatcaacatttaactaaagttctattgtcacttgtgtttccctctgggagcaagaaaatagcagcagaccagcagtatgatttgcatttatttaactcattcattaaagaaggcaccaatgagatactataaaaca

SEQ ID NO: 256809 - DNA, 313 bp, Homo sapiens
tacaagaaatacaaaatcaacatttaactaaagttctattgtcacttgtgtttccctctgggagcaagaaaatagcagcagaccagcagtatgatttgcatttatttaactcattcattaaagaaggcaccaatgagataytataaaacagttcaaaggagaactgaaagagagacatatattaaattatcaggaatgttgaaatgaatttgattaatagatggaaaattaacttatttgggaaagagaaggaaatcaatagtacctccaatggaggaaattcattttgcattgcctatgagaaaaatgattt

SEQ ID NO: 256810 - DNA, 598 bp, Homo sapiens
tttagactacaatcttaagtattataagcctacaatttcacatgccgctgctttcacattgttgaaccttgtggggcacaaaaggcctaaaggtgagtctccttgctctcaacagacatactctgacccagctagttggatcaggtgaggcagctgctcgccatctggtcctcaacctaacaggttttttatgcctgccacctcaaacaagttattagaacaagttcrtatctttctcaggtacttcaccctctcattactaccaagcctgcctcccacagcccttgcttgttcagctttgtcccctgtgcaccctctgcatggccttgtgtcatgcctgatactactctggagctatgggtatgttttaacaataaacttgtttgatttcatttgtgcaatattggtcatcatatatttgttttttttttcatattaggtaaaggagacgatatcttcctcaccagcaggataaataataggtgatcaaaagaccccagagcatggtgcaaaaaaaaaatatgaaacaaactaattttcctcgatctacattttggaaaaccactgttatatttttcagctcccagtgggagttttt

SEQ ID NO: 256811 - DNA, 569 bp, Homo sapiens
tttagatatttctgtaattaaaatccttcagtcttgtaatgttgagcataaaataatactttcttaattcgtctcttaattttctaattcctgcttaactttctggttttataccacatggtttgcagttcccagaactgttcatattccttcacattttgataatttgctcttttctatctacacctttggcatccacttaccaacgcttttacctaaccccagtttagttgtcactttgaagaacactagtaaggtcctacatccagactgggtaaggttttctatcctatgtgctccttgatatgatgtgagcacccatgtacagcttatattgatctatatacctatctgtgcatcttatctgttttaaacattgtgagamcttgtgctttttatccttcaagtcttgttaaaatgcctggtgctcattcaatattgaaaaacaaaataaaagagaaaagaaaaaaactggtgatggaaaaggggaggaaggaaaaacaaagcagtggttattaggaactttgatgataatgtctaattatccaaaacagataactgtggatagt

SEQ ID NO: 256812 - DNA, 596 bp, Homo sapiens
ttactataatgtatctgcataggcttttttgtattgtcatgatgtaattgtgtctttcatcactkttgaggaatttttagctattatctcttcaaatgttgtttctgtctcattctatctctcctctggttcaggataaatgtatatttgagcacctcattgtataatgtaggtttctcactttcttgtctgtattatttactgctttttctctctgtacttctttctgaatattttgttctgacctaaattctagtttattaactcttgcctcgtttgtttctcacttcctgttaaatacaaccatttcattttaatgaaaattattttatttcaaaattttgtttttatataaattgtctatgctgtggttttctgtaatttctattttttgctaaatacttaatcttgtttttatgaccttgaaaaatagacacttagcagttataaagtctagtagaaagtcctgatatttcaggcccctctaggtctgttgttaatttttattggtgtttttttttctgtttctcttgtatgttgacatctcttttcatgtacccggttattttatattgtatgccagaatttccatttga

SEQ ID NO: 256813 - DNA, 596 bp, Homo sapiens
ttactataatgtatctgcataggcttttttgtattgtcatgatgtaattgtgtctttcatcactgttgaggaatttttagctattatctcttcaaatgttgtttctgtctcattctatctctcctctggttcaggataaatgtatatttgagcacctcattgtataatgtaggtttctcactttcttgtctgtattatttactgctttttctctctgtacttctttctgaatattttgttctgacctaaattctagtttattaactcttgcctcgtttgtttctcacttcctgttaaatacaaccatttcattttaatgaaaattattttatttcaaaattttgtttttatataaattgtctatgctgtggttttctgtaatttctattttttgctaaatacttaatcttgtttttatgaccttgaaaaatagacacttagcagttataaagtctagtagaaagtcctgatatttcaggcccctctaggtctgttgttaatttttattggtgtttttttttctgtttctcttgtatgttgayatctcttttcatgtacccggttattttatattgtatgccagaatttccatttga

SEQ ID NO: 256814 - DNA, 524 bp, Homo sapiens
gctcctgcctgtttcttcttatactggctaacacccccaagtgaaaagtggccccagaaatctagtgaatttttctttgtttttctcctctaacattttcatcaaatctttcttcattagtttattgcatccccaaggctttgataacaaatgaagcaaatattttcaaatttttctggttacccaataagaaaaatcatgtgactttccacayctgccatcattggaagtgacaaaactctagatacttgggtcattgttatcatttgtctatcttccttggtatgctctattcttcgttgtggagtaataaatatagacagccctcttggtggattcttcccctgaaaatgctcttgtttttctgtgtcagttggccaggttgtgcattttccaaatgtctatgctctcttttccttttaattataatttcaactttaagtcattcctttgctctttcatctgagctcagaatgttagaaggagccaggccacctcttgaagactgcttctttttttttttt

SEQ ID NO: 256815 - DNA, 574 bp, Homo sapiens
agtcttaagttcagccttccatgaagtcctaggacatggacacagtgcagccagtttctttgctagggggtgacaagagtgatctttgctctagttcccaataaatttctcatttttatctgaagctttggcaatgtggccttcattgtccgtatttctttcagcattttggttacaaacacttaacccgtctgtaagaaattccaaactttcccttgtctccctgtcttcttctgagccctccaaattcttccggcctctgtgtattacccagttccaaagccatttccacattttaggtatctttatagcaacatcccattccttggtaccaattttctgtattagtctgatttkcattgcattaaaggaatatctgagactgggtgatttttaaagaaaaaatgtttatttggcttatggttttgcaggctgtacaagcatagcacccagcatctatcaagcttctggcaaggcctcaggaagcaagagagacagagggaagttggttgcagagtcttttttaacaaccagctcttacataaacatattacaatgaaaagggacaccaagc

SEQ ID NO: 256816 - DNA, 574 bp, Homo sapiens
agtcttaagttcagccttccatgaagtcctaggacatggacacagtgcagccagtttctttgctagggggtgacaagagtgatctttgctctagttcccaataaatttctcatttttatctgaagctttggcaatgtggccttcattgtccgtatttctttcagcattttggttacaaacacttaacccgtctgtaagaaattccaaactttcccttgtctccctgtcttcttctgagccctccaaattcttccggcctctgtgtattacccagttccaaagccatttccacattttaggtatctttatagcaacatcccattccttggtaccaattttctgtattagtctgattttcattgcattaaaggaatatctgagactgggtgatttttaaagaaaaaatgtttatttggcttatggttttgcaggctgtacaagcatagcacccagcatctatcaagcttctggcaaggcytcaggaagcaagagagacagagggaagttggttgcagagtcttttttaacaaccagctcttacataaacatattacaatgaaaagggacaccaagc

SEQ ID NO: 256817 - DNA, 482 bp, Homo sapiens
tttgaatctccttgtgtactcctcagattgcttctttcctgtatttatccacctaagagatgaagctccccaatttggtgtttattttttccatgcacagatcctcatgtttgctatatatttatatatccatagtgcacacatacatatacacacgtattttttatctattcagtcaacaaatattaagtggtatatactattacattaagtgcatgtattattctagctactagaaataggacaaaggacaaaacacagaccaaaatccttcttctcataawgatagcattttagtaagttaggcagtgagcaaaataaatttctaaaatatataatatgttagatgagggtaagagataaaaggaaaatgtcgtccgtgtcaagtttcacagacaatgtattgtttcttgagtaagtagttaaaggaaatgaaggattgaaaatatactggatatatataaagaacagtaaaaaaataa

SEQ ID NO: 256818 - DNA, 554 bp, Homo sapiens
aatccttcttctcataatgatagcattttagtaagttaggcagtgagcaaaataaatttctaaaatatataatatgttagatgagggtaagagataaaaggaaaatgtcgtccgtgtcaagtttcacagacaatgtattgtttcttgagtaagtagttaaaggaaatgaaggattgaaaatatactggatatatakaaagaacagtaaaaaaataaatatagaaaggaggagaggagcagaaaatgaaatcagagagacaaaagagtctagaggagtgtacagatttggactggctggaggcattcataataacttattaacaactctttgtcagatggtaaccagttggtagaattttatgcagagaataggcatgatatcattgatattttaatcaaaaaatcctggtatgttgaaaatagactagatttattttgtttttgttttgtttttcagtggtgggcttgatagaaggcaggaagttcacttgtgaggctgttaaaataatccaggtgaaagataatgatggcataggtcaagattttagttctga

SEQ ID NO: 256819 - DNA, 554 bp, Homo sapiens
aatccttcttctcataatgatagcattttagtaagttaggcagtgagcaaaataaatttctaaaatatataatatgttagatgagggtaagagataaaaggaaaatgtcgtccgtgtcaagtttcacagacaatgtattgtttcttgagtaagtagttaaaggaaatgaaggattgaaaatatactggatatatataaagaacagtaaamaaataaatatagaaaggaggagaggagcagaaaatgaaatcagagagacaaaagagtctagaggagtgtacagatttggactggctggaggcattcataataacttattaacaactctttgtcagatggtaaccagttggtagaattttatgcagagaataggcatgatatcattgatattttaatcaaaaaatcctggtatgttgaaaatagactagatttattttgtttttgttttgtttttcagtggtgggcttgatagaaggcaggaagttcacttgtgaggctgttaaaataatccaggtgaaagataatgatggcataggtcaagattttagttctga

SEQ ID NO: 256820 - DNA, 613 bp, Homo sapiens
gtccaaatacagtcatgcatcattaaataaggatacactctgagaaatgcatccttaggctattttgttgttgtgtgaacatcacacagggttcttaaacaaagctagattgtatagcctactgctygactaggttgtatgatatagcctgttgctcctaggctaaaaacctattgcagcatgttactgcactgaatactgtaggtaattgtattacaatggtaagtatttgtgtatctaaatatagcaaaggtaatgggttgcacaatgacattgtggtggttacggtgtcactagatgataggaatttttcagctccattataattttatgtgtccatcattttatgtacagcccattattgatcaaaatgtcattataaggtgcactaactcccagtgagcaacaacaatgggattgtgagatgaggagaaaccagttatgggattgagattatcctttgagaaagaaggaaaaccaggagagtgtgatgtcctcagagtaacaaatacgacaaatgctaacagatcaagtaaaataggactgagaaataaccatggaattctcttattggaagtcattggtgacctcgataagaaccattttggttagg

SEQ ID NO: 256821 - DNA, 617 bp, Homo sapiens
tatttcaaataaaatgttgttattttatcaaagctaatatttcccgtatttaaataggtagatttawatttagatttagttcaaccatcttattttgtgctttgtatttctggtcctcatggtttcttttccttgtttttaattccatttttacttctctaaaattactagaaattttttatataatttttttcactttacaatttaaaatgttacatttcatatttttgtacttataagcttttttaacctttttatagaaatatattattctcccttgtaccgcttcacaaattttcagaatgtgaccatgctcacggaatctgtcccaagataaagaagcagaatatcatgaatatcccaggaaacgctttgtgtgccctacagttactaacaccatctgtttaaatttctctgtagtatgtaaggtagttttcttagagccacctctcaggtcactaattctctggttagctcttcctaatcttcttagtctgctcattgagtatgacagacaatggtatgcatctatgtgaatgctccatggggtgcctagattaaacattttccctgggtatgtttgtgagggtgtttgcaaatgaaattagaatttaagt

SEQ ID NO: 256822 - DNA, 523 bp, Homo sapiens
aaaggatatctacactttcatgttcattgcaacactatacacaggagccaagatataaaaataaacaaattgtccatcaaggaatgaatggattttttaaatgtgttatatatccacaatgaaatattattcagccttaaaaacagaaaattctgttgtttgcagcaatataaatgaacccagagaacattatactaastagaataagccaggtacagagaaacaaataccatatgataacacttatatgtgaagtctaaaaatgtcaaattcatggaagtagagagtaaatggtgattactagaggtggggaatgtgaacggggaaaggggagatgttggtcaaatggtataaagatttagttggacaggaggaataagttttggggatctactgcacaatatgttgaatatagttaatgatcatgtattctatttttaaaaacagctaaaaaggaagattttaaatagtcttactacaaaaaatgatatatatttgaagtgatggatatgctaattagcct

SEQ ID NO: 256823 - DNA, 527 bp, Homo sapiens
tgcaacactatacacaggagccaagatataaaaataaacaaattgtccatcaaggaatgaatggattttttaaatgtgttatatatccacaatgaaatattattcagccttaaaaacagaaaattctgttgtttgcagcaatataaatgaacccagagaacattatactaagtagaataagccaggtacagagaaacaaataccatatgataacacttatatgtgaagtctaaaaatgtcaaattcatggaagtagagagtaaatggtgattactagaggtggggaatgtgaacggggaaaggggagatgttggtcaaatggtataaagatttagttggacaggaggaataagttttggggatctactgcacaatatgttgaatatagttaatgatcatgtattmtatttttaaaaacagctaaaaaggaagattttaaatagtcttactacaaaaaatgatatatatttgaagtgatggatatgctaattagcctgatttgatcattatatatgtatgtactgaaa

SEQ ID NO: 256824 - DNA, 556 bp, Homo sapiens
ttgataaaattgcatctggaatttcatcattaggtttaggctggaataatttaaatatgttattgtaaaactaaatgtcaagttgattgagccaggataacacaatagcttctctgagcatgttggtgcacaccttaggcaactggcagtctcttgacacagatacgaacatgtcttatagaaaacattggtggaaagtaagtgaacasaataatagccaaatatatccaacttacctaccaaatccattcatctgagacttagatgagcttcaaaagtcacaaaccagatttaaagctgttcaccatactgtttattctatgagacactccaaccgttaacaatgtaaatgactgcaatactcaatacaattttctaacacaattacttgggtcacaggtgtgacaatttttgagctattgaaactaacatgtttgagcttctgaaacaaacagctctacagtcaacttaaaatcaataacagtatttgatttttgtcatatttgttgccttctagaattctgataggtagcataattctgtagtattgatcaat

SEQ ID NO: 256825 - DNA, 580 bp, Homo sapiens
tagaagaactcaaagtgatttacagtctagaattatttgcaaaacttttagagtaagatcaacttttagaaggctgatgctcaatacatattttaaagttctaaagtattttgtcaaactaaaaaagtacactggcaaactgggcagtcagtttacttaagcttgaaaattccatttcactcaaattggatacagtagttaagtaaaacaatggggcttctattttctgctacatattatttttttwaaaaaaagtatacaagagctgtcacatgagcagcctgtttgcctactcagtgcaaagttttatgtttctgaaaggccaccgcccacatctcttaatgctgaaaataaatcagtttcatctgttggttgttttatttctagtgttttttttttctttcttcctgcttccttttaggccagttttcacaaagccatatggcagctgagagaagcaaagcaacacgctgtattttcagttcttaacaaaaggggctgtggtatcacagcagcccatgaatacatgaggcatggtcatgtatagaaggacctccagccctgtcagtgaaggctgcaa

SEQ ID NO: 256826 - DNA, 580 bp, Homo sapiens
tagaagaactcaaagtgatttacagtctagaattatttgcaaaacttttagagtaagatcaacttttagaaggctgatgctcaatacatattttaaagttctaaagtattttgtcaaactaaaaaagtacactggcaaactgggcagtcagtttacttaagcttgaaaattccatttcactcaaattggatacagtagttaagtaaaacaatggggcttctattttctgctacatattatttttttaaaaaaaagtatacaagagctgtcacatgagcagcctgtttgcctactcagtgcaaagttttatgtttctgaaaggccmccgcccacatctcttaatgctgaaaataaatcagtttcatctgttggttgttttatttctagtgttttttttttctttcttcctgcttccttttaggccagttttcacaaagccatatggcagctgagagaagcaaagcaacacgctgtattttcagttcttaacaaaaggggctgtggtatcacagcagcccatgaatacatgaggcatggtcatgtatagaaggacctccagccctgtcagtgaaggctgcaa

SEQ ID NO: 256827 - DNA, 487 bp, Homo sapiens
tgctttccttgcacatatcattggcatttgcctgcctccacatttatttcatcccttcccagacagtttgatgccaaaatcccattagctatattaatgacatatggctggaggtagaagtatgtgaccagacaagaaaagcacaaattgagcattctttctattcatttctgatatttctacttaaagacacaagattcccaacaaagattgtgtcagtcatgtttttagagctcagaatgcactacagaaaagagggtgtaaaacacaataacttgacttkcacctactactccagcttaactcctttgttctctagtcagataatattaaaaatttaaataacagatcatattcttagcctttgaatcataaattttgattcagagatgttcacaaattcccaatcacactgactcttcaaacattcatgcacacacacccatgtgtgcacacacacatacacatctatcctttgtatatttag

SEQ ID NO: 256828 - DNA, 551 bp, Homo sapiens
atattaaaaatttaaataacagatcatattcttagcctttgaatcataaattttgatwcagagatgttcacaaattcccaatcacactgactcttcaaacattcatgcacacacacccatgtgtgcacacacacatacacatctatcctttgtatatttagactaaatctatgtttaaatattaaagctgcaaaactttgactgttatgtttcaaacctttttagatgtatgaaacaatcacacatcataagataaactagaaaaatttttggtcatcatttggaataacatatcataatgtatatgaagacaatgatcaaaaagtttcaaaaggagtacataagtaaatatgctttttcctctcacaccattgcttatttggaatgttatctttacatcggcagaggattagcaagatggaaaaatgtagggtatgcacaataagtatctgtcctaacatgaaaactggagtggaaaggaagatataaggaatagcttttaccctttaatttttattcctttaaaatctctccctccccaccatggctag

SEQ ID NO: 256829 - DNA, 551 bp, Homo sapiens
atattaaaaatttaaataacagatcatattcttagcctttgaatcataaattttgattcagagatgttcacaaattcccaatcacactgactcttcaaacattcatgcacacacacccatgtgtgcasacacacatacacatctatcctttgtatatttagactaaatctatgtttaaatattaaagctgcaaaactttgactgttatgtttcaaacctttttagatgtatgaaacaatcacacatcataagataaactagaaaaatttttggtcatcatttggaataacatatcataatgtatatgaagacaatgatcaaaaagtttcaaaaggagtacataagtaaatatgctttttcctctcacaccattgcttatttggaatgttatctttacatcggcagaggattagcaagatggaaaaatgtagggtatgcacaataagtatctgtcctaacatgaaaactggagtggaaaggaagatataaggaatagcttttaccctttaatttttattcctttaaaatctctccctccccaccatggctag

SEQ ID NO: 256830 - DNA, 565 bp, Homo sapiens
ttaatatataattaggaaaaagaaaaaaatggagtaaaataattgaggacacttacagaatttagtttattcaaataaagttgataattagactataaccacaagttcatagttagacaaacaagtagaggcactttagaaaaatgctgtagacgtgctcattgataatgaaggtccttcttttaaataagaggatattatagcygcatatcatgtacataaagtaatattaagtaaatcattctgaaactaatatagtatttagctgggcaaaatcgttattgcaagtgaaaatctgaaaaaagtgacaaataacagaaaacattataaaatgttatcctcagatattaacccataaagttttacaatggtcacacctttatatacatattggtctcataatacctttccttttttcaactctatttatttattaatataaatggtactcaaaatgctcataaatattattatgcagattttttctacaatcaccatttccaaagacatcaaggagaagggggtataatttaagcaatttaatctgtttgccacacactgcctt

SEQ ID NO: 256831 - DNA, 559 bp, Homo sapiens
attttctttttatatgacatccacttaggtagtattttattaaattctataaatttaacttgaaaatgcttcttgcatctataaatttcttttctgtatgactcctccctattcagaggaattcaagtctattttaataaatcctcttcttcttttatacttctctgaactcagacacatcctacattagtttgagattaaatatagcatactcatatcaaaatagtgcccaattcataattgaacaccrgttctcatttgcccctcagaggacttggccaatcttctatctatccatatatatcatccttctacattacaccacagcaaaaaacaaaaacaaaaacaaaaaaacttcctctctacctgagcatgctttttttttatatttaaacttttaatcatgttattcatttttttagaacatattttctttcttgtcatttatgtcttgagattccacctatcacttaaggataaactcaaatatcgcaccacttagaggctgcttctgatactcataagtcatgggggtgtagcttgctttgatagatcctcc

SEQ ID NO: 256832 - DNA, 577 bp, Homo sapiens
caggcgcccaccaccatgcctggctaatttttgtatttttagtagagtgggggtttcaccatgttggccaggctagtcttgaacttctgacctcagatgatccacctacctcgtctccccaaagtgctgggattatagacgtgagccactgtgcccagactaccttgttttkacatctgctatttgtgtatttctgaattttttgcatttgcctagttctctgttttgacttggtaaaactgtctatatattccttgacttttgtatgttggctattgtcttttttccttacctaaaggggggtaaatgtcttcctctgatttcttacttcacatcttctctgaaatgccatgttgatttcttatatggagattgttgaatcttccatttctctctgctctcttattttatgagctcttggttctgggccatcttctgtataagttggttgacggttctaatagggagccctatattgttttctgttcctagtctggtttccaactctgtttccacagcgtgtgagattacacaggaccccatattaagcaagctgttttttctgtcaggaatatcc

SEQ ID NO: 256833 - DNA, 577 bp, Homo sapiens
caggcgcccaccaccatgcctggctaatttttgtatttttagtagagtgggggtttcaccatgttggccaggctagtcttgaacttctgacctcagatgatccacctacctcgtctccccaaagtgctgggattatagacgtgagccactgtgcccagactaccttgttttgacatctgctatttgtgtatttctgaattttttgcatttgcctagttctctgttttgacttggtaaaactgtctatatattccttgacttttgtatgttggctattgtcttttttccttacctaaagggrggtaaatgtcttcctctgatttcttacttcacatcttctctgaaatgccatgttgatttcttatatggagattgttgaatcttccatttctctctgctctcttattttatgagctcttggttctgggccatcttctgtataagttggttgacggttctaatagggagccctatattgttttctgttcctagtctggtttccaactctgtttccacagcgtgtgagattacacaggaccccatattaagcaagctgttttttctgtcaggaatatcc

SEQ ID NO: 256834 - DNA, 580 bp, Homo sapiens
gtagtaccctacagtgaagaggaatttatctgtctcatatgcagtatttttaataccacttttatttctgtatttagattgcacaaaatatttctactcaagaatgtaataatgtgctgctgatttgctaatgagtaatttacttagaggactttcacatccagaaattagtaatgctgaaacagtagaagtgtaagtgaagtaagtaccttccattcctttcccattttctttcttgtgtcctttctcttaaatacatcaactttaagaagtcaaaccctgaatttacaaaatagggaaaggagcagtcaacatcagatgaggcaacagagaattattccaccatatcttyctccttttaaacttattctattggttgatattccattcttttctttatatacgtatagtcgttgtagcacaaactttgagtaaagagaagtctctctaattggttattatcttatgatctgttttctctcgatttgagttttacaaaattctatacacaagcagatgtaacaatgctaatattcctaatgatgaatttgcctttacttttttttttgagagaaggagt

SEQ ID NO: 256835 - DNA, 573 bp, Homo sapiens
atgttttttataggtttattaaggtataatcaatataaaaacctgcacatatttaatgtatacaatttgatgcatttgttcacacacatacacccacaataccatcaccacaatctaggtaaaactattaccacaaaattttctttgtaaccctttgctctgttgtgtgtaggtatgtgcagtaagaacacttgacatgagatctattctcttaacaaatttaagtggacaacaaagtattaactataggactaaactttaggtataaataacaaattgtgtttttaaaaaatgtgaaaatattgctcttgaaatatgttttctgaatgagtatttacttttagaagtagtttaaagcaaagagatttaggccatatcctacaacttattaaagtattaaaatatatgagtagaataaagattactaggtacaaaagctatatatcatcttgtcattttttttcagtaaataataacakgttcttattcattcagactgaagccctttaaacacatgtttctacacacaaaaggaaaccctgaattgttgaattgttctggtataaactggct

SEQ ID NO: 256836 - DNA, 576 bp, Homo sapiens
caattgaacctctttccaggagattcccaggcaagatggtcaaataggaacagctctgatctgcagctcccagtgacaccaatgcagaaggctggtgatttctgcatttccaactcagatacctggttcatctcactgggactggtgagacagtggatgcagcacaaggagggtgggcagaagcagggtagggtgtcacctcacccaggaagcacaaggggtcagaatacaycctcccatagctaagggaagctgtgaggggtggtgctgtctggcccacatactaggcttgtcccacggtcttcacaacccgcagaccaggagattcccttgggtgcctacaccaccagggccctggatttcaagcacaaaactgggcagctgttggggcagacactgagccagctgcaggagttttatttcatgccccagtggcacctggaatgccagcgagaaagaaccattcactcccctaaaaagggggctgaagccagggagccaagtggtcttgctcagtggatcccacccccacgaagaccaacaagctaagatccactggcttgacatcctcgctgc

SEQ ID NO: 256837 - DNA, 590 bp, Homo sapiens
ggtctgacctcaaattcaccaaggtgggattttttccccaccctaataagcctgagggtactgcaggagaccagggcgtatttcagtccttatttcaaccacataagacagacactcccagagcggccgtttatagactgccccccaggaatgccattcttttcctagggtcttaatgtttaatattcctttctaggagaaaaatgtagtgatatctctcctacttgcatgtctgtttataggctctctgcaagaagaaaaatgtggctctattctgcctgaccccacaggcagtcaaaccttatggttgtctccccttgttccctaaaatcactgttattctgttctttttcaagatgcactgatttcatattgttcaaacacatgttttacaatcaatttgtacaatagtggtcctgaggtgatgtacatcctcagcttaygaagatagcaggattaagagattaaagtaagacaggtgtaagaaattataagagtattattagggaattgataattgtccatattaaaatgaaatcttcacaatttatgttcagagattgcagtaaagacaggcataagaaattata

SEQ ID NO: 256838 - DNA, 145 bp, Homo sapiens
aaaattttattctagtatgtggacccttactggcattccagagaacaagtcaatgcatttgcgtaaatttcasaggaaaagaagaaaaaaaatacactcggaacaatttgaaagagagatactcattcattgcttcatttaactt

SEQ ID NO: 256839 - DNA, 514 bp, Homo sapiens
tagtagtgcaaattttattaaagatgaccccactgccttgagaactaaggaaatgaagtgacccaaattcaatgtaagaagacttattcagtcctcatgctctaacatctgctcactctgactgggcaaaacaaattttagtagatttgattctgtttgttttcatatatatctgtaagttagaactttcagaaattttgccttaaaaaaagcaaatattcataatcaacttgagttcaaagatgacttaaatgtttctatgtcaaagtccactccactaaaccaaacaacaaacagtcttattttggaaagaaactactgaaaagaaagaaaattactttttcattttatttgcacaatttggatttgtttttatttttttccactcagaagtcaccagttttttcatgataaccccgtccaaagaatrcatatgaacacatattcctaaaaagccactgaatatcttttgggcttgtttttctacacagaccaaaataatatttaccaaaaa

SEQ ID NO: 256840 - DNA, 318 bp, Homo sapiens
tgaacagaaataggaaattaacaatccataatatacatggaaatatttaatgcaggaaaacctcaatcatctctgaggtcattacccttgtttatcatggcataataattgatgtactcattgaasaaatatttattgagagcctaccttgtgttagtcttgggcacaaagaatacagcagagaagaaaacaagttcttactctggagttgtattctactgcagagaaacataaaatagacagaaaatacagactatatcagaaagcggtaagtatgagtatgtgtaaggaagttcaataaataatacctctcttcac

SEQ ID NO: 256841 - DNA, 539 bp, Homo sapiens
acatgggcatagcatatactcagccatcaatcaaatgactgatgagctattaaatgtatctgcctatcaatcacattgacataactactcacataagtctaacacattgtgcatgtttacagatgtatgggcttctgtcaaatgcacaaatagtgttgagaaaataaaaaacactaatagttttaacaagtagtggttaaggaagtaaatgtcatcaagactggattgaaaatacctttgttaataaatatgaacacatctgaaaagctctgcaaagcttcgtattaagtatgatggataaattcatgctcactcgtgaaactccactaaaatgatagtaaagtattacaacaaaaatacaaaaatgcrcaaggaccaaaagaatggaagaggaatctatagcaaaagccagaaaaagataaacaagtggtgaatgccttaatagacccaagaaagtagatagatccaagaaggaaaccatggcccccagagggctcaggactttgtggcatccagatacctctggatgagaaggtaga

SEQ ID NO: 256842 - DNA, 586 bp, Homo sapiens
ctcgtgaaactccactaaaatgatagtaaagtattacaacaaaaatacaaaaatgcacaaggaccaaaagaatggaagaggaatctatagcaaaagccagaaaaagataaacaagtggtgaatgccttaatagacccaagaaagtagatagatccaagaaggaaaccatggcccccagagggctcaggactttgtggcatccagatacctctggatgagaaggtagaggtataactaaaagcagaaatatttgctgaaaatataagaaacaattaaatcaccagatactcttcacaactctcttccacataagactgaggggttttcctctggaaagttttatctggctgaggcacaccaggcagggggcatgctagttgttggcagtgagaattacactatccagataagagtccagtttctctgaggaaattgcctgcccataagaaaaagcctaaaaatacttacattggagrttctccattaaaatgttccagctaggtcacctgacaatggaacccagatcaacaagccctatccacttacaaaaagctttcagtcagcacttcaatacttcacacaacag

SEQ ID NO: 256843 - DNA, 207 bp, Homo sapiens
aaacaaaatacacaaagcattagtaaagacaaaagttcaagaatggtaaatcactcttactttcagractgaatgccctttcaaatagttaactgcaaaaagcataaaactatgaaacacataaaaatggtatgtaacaaatagtaaagcataatggaagtttaactgttaaaagaataaaatctgctaaatgaataataggagtag

SEQ ID NO: 256844 - DNA, 619 bp, Homo sapiens
gatgaatacatatcattaatatagatgcagaaattttcaacaaattaccaagaaactgaatcttgcaacatatttaccgtgaccaagtagaatttctctcaggaatgcaagggattttttaacatccagaaatcaatcaatacataatatatatgagtaaaatcaaaacataatatatatgagtaaaaaacaaagattgcwtcatcatctccataaatgcagaataagcatttgacaaagtctaatagggtttaatgattaaaaataaataaaactcaataaagaaatagaactttctcagcctgagaaaaaggatctgtaaaaaacccagagtgaacacagccaaggcagaattaagagggattttcatagcactaaatgcccactccaaaatgttagaaagatttcaaattaacaatctaagatcacgactgaattagagaggcaagaacaaatcaaccccaaagctaacagaagacaagaaataatcaaactcagagctgaactgaagggcattgagacatgaaaaactattcaaaagatcaatgaatccagacattgcttttttgaaaaaaataataagataaaaaacccttcgaaaaatcaatgaatccaggag

SEQ ID NO: 256845 - DNA, 619 bp, Homo sapiens
gatgaatacatatcattaatatagatgcagaaattttcaacaaattaccaagaaactgaatcttgcaacatatttaccgtgaccaagtagaatttctctcaggaatgcaagggattttttaacatccagaaatcaatcaatacataatatatatgagtaaaatcaaaacataatatatatgagtaaaaaacaaagattgcatcatcatctccataaatgcagaataagcatttgacaaagtctaatagggtttaatgattaaaaataaataaaactcaataaagaaatagaactttctcagcctgagaaaaaggatctgtaaaaaacccagagtgaacacagccaaggcagaattaagagggattttcatagcactaaatgcccactccaaaatgttagaaagatttcaaattaacaatctaagatcaygactgaattagagaggcaagaacaaatcaaccccaaagctaacagaagacaagaaataatcaaactcagagctgaactgaagggcattgagacatgaaaaactattcaaaagatcaatgaatccagacattgcttttttgaaaaaaataataagataaaaaacccttcgaaaaatcaatgaatccaggag

SEQ ID NO: 256846 - DNA, 619 bp, Homo sapiens
gatgaatacatatcattaatatagatgcagaaattttcaacaaattaccaagaaactgaatcttgcaacatatttaccgtgaccaagtagaatttctctcaggaatgcaagggattttttaacatccagaaatcaatcaatacataatatatatgagtaaaatcaaaacataatatatatgagtaaaaaacaaagattgcatcatcatctccataaatgcagaataagcatttgacaaagtctaatagggtttaatgattaaaaataaataaaactcaataaagaaatagaactttctcagcctgagaaaaaggatctgtaaaaaacccagagtgaacacagccaaggcagaattaagagggattttcatagcactaaatgcccactccaaaatgttagaaagatttcaaattaacaatctaagatcacgactgaattagagaggcaagaacaaatcaaccccaaagctaacagaagacaagaaataatcaaamtcagagctgaactgaagggcattgagacatgaaaaactattcaaaagatcaatgaatccagacattgcttttttgaaaaaaataataagataaaaaacccttcgaaaaatcaatgaatccaggag

SEQ ID NO: 256847 - DNA, 619 bp, Homo sapiens
gatgaatacatatcattaatatagatgcagaaattttcaacaaattaccaagaaactgaatcttgcaacatatttaccgtgaccaagtagaatttctctcaggaatgcaagggattttttaacatccagaaatcaatcaatacataatatatatgagtaaaatcaaaacataatatatatgagtaaaaaacaaagattgcatcatcatctccataaatgcagaataagcatttgacaaagtctaatagggtttaatgattaaaaataaataaaactcaataaagaaatagaactttctcagcctgagaaaaaggatctgtaaaaaacccagagtgaacacagccaaggcagaattaagagggattttcatagcactaaatgcccactccaaaatgttagaaagatttcaaattaacaatctaagatcacgactgaattagagaggcaagaacaaatcaaccccaaagctaacagaagacaagaaataatcaaactcagagctgaactgaagggcattgagacatgaaaaactattcaaaagatcaatgaatccagacattgcttttttgaaaaaaataataagataaaaaacccttygaaaaatcaatgaatccaggag

SEQ ID NO: 256848 - DNA, 596 bp, Homo sapiens
tatatgaaaaaaatctcaatattattgatcattagagaaatgcaaatcggaaccacaatgaaatgtcatctcacaccagtcagaatggctattattaaaaagtcaaaaaatagaagatgctggtaaggttacaaagaaaagggaacacttatacaatgttggtaggagtgtaaattagttcgaccattggaaagcagtatggcrattcctcaaagagctaaaagcagaactaccactcaactcagtaatctcctcagtgggtatatacccagagaaatacaaaccattctaccattaagactcatccatgcaaatgttcactgctgcactattcacaatagcaaagacatgggatcaacctaattacacatcaatgacaggttggataaagaaaatgtggtacatataaaccatggaatactatgcagccatacaaaagaacaagatcatgtcatttgagggaacatgggtggaactggaggctattatccttagcaaactaatgaagaaacagaaaaccaaatatcacatgttctcacttataagtgtaagctaaatgatgagaacatattaatgcaaagaaggaaacaacagac

SEQ ID NO: 256849 - DNA, 564 bp, Homo sapiens
ggctttcatgatttggctttgcccctactgccctcgctattaaaaaaaattattttttttctagggagacaatagtcccagaatgagggatgtaraatggagacgaagccacactacagcaggcagcagagcttccttggctgacctgcaaacctgtgaatgaaaaaacaaatgtgtgatgttgagctatagagatttgggggattgtttgttatgcagtattgcagtgggaatctggctaatttagagagtagccagggacaagaccatataaactctggccacaaatgttggattttatcctaaattaggtctgaagccattagaaggttttgagcaaaggaatgatatgatacaacttacattataaaagcatgattctggtactgggtggagaataaagcatgggatgccaaaagtgggagcacagaacacaccttaaatttaaatgacttaaattgactaatttaagtcagtcaaaatatgttagtacaaatagatagtggtggagatagaaaaggataaattctgggaacagtttgaagcatggagcgcagcagaatt

SEQ ID NO: 256850 - DNA, 564 bp, Homo sapiens
ggctttcatgatttggctttgcccctactgccctcgctattaaaaaaaattattttttttctagggagacaatagtcccagaatgagggatgtagaatggagacgaagccacactacagcaggcagcagagcttccttggctgacctgcaaacctgtgaatgaaaaaacaaatgtgtgatgttgagctatagagatttgggggattgtttgttatgcagtattgcagtgggaatctggctaatttagagagtagccagggacaagaccatataaactctggccacaaatgttggattttatcctaaattaggtctgaagccattagaaggttttgagcaaaggaatgayatgatacaacttacattataaaagcatgattctggtactgggtggagaataaagcatgggatgccaaaagtgggagcacagaacacaccttaaatttaaatgacttaaattgactaatttaagtcagtcaaaatatgttagtacaaatagatagtggtggagatagaaaaggataaattctgggaacagtttgaagcatggagcgcagcagaatt

SEQ ID NO: 256851 - DNA, 400 bp, Homo sapiens
gaatatttcatccaaaggctgcagaatacacattcttctcctcagcacatagatcattctcaaagatagatcatatgttaagtcacaaaacaagtctttgaacatttttaaaaattgaaataatatctagcatcttctctgagaacagtggaataaaactggaaatcaataagaagaggaatttttgaagctatacaaatatatggaaattaaacaatatgctcctgaatgaccagtgggtcaatgaagaaattaagaagaaaactgaaaaagtttttggaacaaatgataatggaaacacaacayacccaaacccatgcgaaacagtgaaaacaatactaagagggaagtttatagctataagcccctacattaaaaaaaggaaaacttcaaataaatt

SEQ ID NO: 256852 - DNA, 558 bp, Homo sapiens
gtctgccctgttccacagcacagagacggggaattgctctagaagatgacatcgctgcttactgtacgttaaccctcatgctgccagtgaagatgacatcactgcttactgatacattaaccctcatgctatcagtgttcccaaattcccgctctgcttggggagttgggacactaagtactaataagggtaaatcagacattccagtggatgcaggaattctctgtttggcttcggaggaaaatattaaaattactgacaaacaagtctcctgaatccctctccctacctgaccctacgaacaccacaaatgtagatatgacatgggtatttcccaaaggagagaataaagacagtcccttaatttgtaaaacttgctctgtttctgragaaaatggagctcaaacactaccacacacacggctcttgagccaactgcctaagagatcaaccttgagaagagtattacatgtaactttgacaagttatgactgagataaatgaaataaaatgcaaaaagagaaagtgtgcaggaaacaggctaacgacatggagttc

SEQ ID NO: 256853 - DNA, 662 bp, Homo sapiens
gtgcgcaggttgtaattatgtcagctggagtgttgaacaaggggactgattaatgtgagccccggcccaggcrcggtccctatcaaaacctccgcgcaggccagcagtggggacgggttaaagcaaaaagacaaaacatgctgtatcgtccatgatagatgaattgctccaacagtcttcaggcagatgttccaggacagtataatatacaattactctgccttatcaccttcccagggacaataaagcttcctccttctatggctcatgtgagtgaaggcaaaattagttttacttttacaacacggactcacttatcatgtcgctttgattgtgcttttacagctaaggaaaacacatattccacttttaaactaaaaaaaaaaaccttaaaaataaaactgaaaccttgtgttgactcttttttacagaacaacatacagtgttttaaaagattgttttgttaaaaagagatgcaaggaaggtaataatatatgtgtgcatgtgtagttaaagcaagtgcatacacacagctcaggaagagctggattgcataatcattgcattaataacatcattgttcaaaggccacacacaagtcatgaattggaaggaacatgtaattaaaaatatatatatgctgatattgtccatatatttct

SEQ ID NO: 256854 - DNA, 539 bp, Homo sapiens
tgaaacaattttaactaaccatagaagtcaagtcctggagaataagacatatattaaactgccacagttctctagtctgagctaaatgaaattttattgcttcargttaggtaaaaagccactggatttatgtaaggaaagttaaaataatagttactaatattggactaatattactatttaaagaacaaataaagggaatttcttttaagtcatcattcttactgatatacataatttgagctaaaaagataaaatgtatttcaatccccacttacaccttcattccaaatgccttaatttcaatctttggacatttactacacaatcctaaccatcttcaaattattatagttcagctacttctctatcaaccaaccaataagaaattatgtttggggatttactgtgtgtctagcaatgatccatgctatgtagaaacctataaataaataaaatacatctattcctccccaaaaggatcctatgattcaatggtcaacactaatgtcactgaaataatgagaacatcagaaccc

SEQ ID NO: 256855 - DNA, 435 bp, Homo sapiens
agacatatattaaactgccacagttctctagtctgagctaaatgaaattttattgcttcaggttaggtaaaaagccactggatttatgtaaggaaagttaaaataatagttactaatattggactaatattactatttaaagaacaaataaagggaatttcttttaagtcatcattcttactgatatacataatttgagctaaaaagataaaatgtatttcaatccccacttacaccttcattccaaatgccttaatttcaatctttggacatttactacacaatcctaaccatcttcaaattattatagttcagctacttctctatcaaccaaccaataagaaattatgtttggggatttactgtgtgtcyagcaatgatccatgctatgtagaaacctataaataaataaaatacatctattcctccccaaaa

SEQ ID NO: 256856 - DNA, 549 bp, Homo sapiens
aaacaagttttatggttttaaagttaaactgtgatgcaactgagaataagtagttaataaaatactatcaagtttttcactgtttctgacacatgcctccactaagcaatgtctttgaggtaactggcaatgaaacacaaataaaactagagaatacacacatatgtgaggtatcattgggaaaaacytcatagagcaagcaattacatattaatttagcgtactttcactacaaaagaaatttatttttaaaattggatgtgtgcaattatgaattttttacaaaacagatttgcagatttaatctacttctcatatattctaagttattttgaaaagataaattcagatagacatcaataaatactggatatagatcatttatactaatttttcaatacctgcaacaaaaggccatgtggaataacattatcatttattatgtaccttccagcattcaaaatattaaactaagtttctttataatattattaagtgcataatcaaaactgactggaaggatgtaggtgataaaatatatttatattt

SEQ ID NO: 256857 - DNA, 572 bp, Homo sapiens
gtgtccccaggttcaccccacaaaatgctgacgcttttgtcagcattctgccttgtcagcagggtgatatgaaggatcacagacctcagagccgggcaggcccgtattcaaatcctgctctatagttcaccatcttcatgcaaattacttaagccctctgagtcctggactggacattttacatgtgtaaaatggagatgaggccaggcacagtggctcatgcctgtaatcccagcactttaggaggccaaggcgggcagatcaccttaagtcaggagttcaagaccacccgggtcaacatgacgaaaccccgtctctactaaaaatacaaaaattagccaaaggtggtggcgagcggctataatcccggctactcaggaggctgaygcaggagaatcgcttgaacccaggaggtgaaggtggcagtgagccaagatcacaccactgcactccagcctgggcaacaagagtgaaactccgtctcaaaaaataaattaaataaataaaatggaagtgagaaagcccacatttcaggattgttatgaggcttaaataagatcatttaaagtgct

SEQ ID NO: 256858 - DNA, 601 bp, Homo sapiens
agaggtctgaagatggtttgggtggttttgtgcagcagcgatatgttgaggttttatagcagcttttttgggcagtttaaggcaatctgaaattctgaaagattcagaaaatgggagtggggctgggcactgtggctcatgcctgtaatcccagcactttgggaggctgaggcaggaggattgcttgaagtcaggagttggagaccagcctgggcaacatagacagattctcatctctgtaaaaaataaaacaaaataaattagccaagcatggtggcatgtgcctgtagtcccagctactcaggaggctgacgtgggaggattgcttgagcccaggaatttgaggctgcagtgagctatgatcacaccactgcattccagcctgggtgacagaatgagaccccgactctcaagaaagaacgaaaagaaagaaaattggagtggttatayctgtcaggagagtcaatcaactccagttaggctatttggatcctcacacaggcctctaatgaatggtaacagctcagtccatacttcagagcgatttggtgctcttgccactgcctgtgctaggagtgtccaagaaatagccctcatcacc

SEQ ID NO: 256859 - DNA, 601 bp, Homo sapiens
gtgggtaggatgcttttggtgatgagaaacccattctaggtaagggaggaatgccaggaaagagtagggacttaagaatgtgcgagtatgccgggcgcggtggctcctgcctgtaatcccagcactttgggaagttgaggcggacagatcatctgagttcaggagttcgagaccagcctgaccaacatggtgaaaccccatctctcctaaaaatacaaaattacccaggcgtggtggcacatgcctgtaatcccagctacctgggaggctgaggcaggagaatcgcctgaacctgggaggcaraggttgcagtgagccaagatagggccattgcactctagcctggatgacagagcaaaactccatctcaaaaaaataaaaaaaaaaaagaatgtgcaagtttatagcagaagggctggtggcctattgggatggaaaatttaaagacaagcagtaggaatcagttgggattatgacaggcagctttgggtttgaaaaaggaagttccagatgtcaaagcagtttagactgaggggaggcttttaactttttaggataacatctgtaagtttcaatatatggaaaagatatctgcactccc

SEQ ID NO: 256860 - DNA, 601 bp, Homo sapiens
gtgggtaggatgcttttggtgatgagaaacccattctaggtaagggaggaatgccaggaaagagtagggacttaagaatgtgcgagtatgccgggcgcggtggctcctgcctgtaatcccagcactttgggaagttgaggcggacagatcatctgagttcaggagttcgagaccagcctgaccaacatggtgaaaccccatctctcctaaaaatacaaaattacccaggcgtggtggcacatgcctgtaatcccagctacctgggaggctgaggcaggagaatcgcctgaacctgggaggcaaaggttgcagtgagccaagatagggccattgcactctagcctggatgacagagcaaaactccatctcaaaaaaataaaaaaaaaaaagaatgtgcaagtttatagcagaagggctggtggcctattgggatggaaaatttaaagacaagcagtaggaatcagttgggattatgacaggcagctttgggtttgaaaaaggaagttccagatgtcaaagcagttyagactgaggggaggcttttaactttttaggataacatctgtaagtttcaatatatggaaaagatatctgcactccc

SEQ ID NO: 256861 - DNA, 601 bp, Homo sapiens
gtgggtaggatgcttttggtgatgagaaacccattctaggtaagggaggaatgccaggaaagagtagggacttaagaatgtgcgagtatgccgggcgcggtggctcctgcctgtaatcccagcactttgggaagttgaggcggacagatcatctgagttcaggagttcgagaccagcctgaccaacatggtgaaaccccatctctcctaaaaatacaaaattacccaggcgtggtggcacatgcctgtaatcccagctacctgggaggctgaggcaggagaatcgcctgaacctgggaggcaaaggttgcagtgagccaagatagggccattgcactctagcctggatgacagagcaaaactccatctcaaaaaaataaaaaaaaaaaagaatgtgcaagtttatagcagaagggctggtggcctattgggatggaaaatttaaagacaagcagtaggaatcagttgggattatgacaggcagctttgggtttgaaaaaggaagttccagatgtcaaagcagtttagactgaggggaggcttttaactttttaggataacatctrtaagtttcaatatatggaaaagatatctgcactccc

SEQ ID NO: 256862 - DNA, 538 bp, Homo sapiens
taaaccaaacttggggtcccactttggccctcaggctgcatcggtgtcttgctgggccacagcagtggtttcagcggtcagatggcatgctccatgcccacagggaagggcattagagtgctctcttagcattagaatactttctgagagcacaaaggttctcatgaagtttctctctcattctctgtggtttcagggcagcagagtgaaataggaagagatggaggctttacctccttaaagacatgctaacttttattcctgactgtggcactgcagtaccttgagaaaactgaagttgccctttatgtaaaaaataagggaaaaaacccaaatgtgcttatgattttttgtctacttccatgtctaatggtatattcagatggcaatggatgattgcaagcagattttggaccaaagarttacattattgacatttttggctgggcgcagtggctcatgcctgtaaacccagtactttgggagacggagaggggtggatcacttgagaccaggggttcaagaccagcctggccaa

SEQ ID NO: 256863 - DNA, 583 bp, Homo sapiens
ttgacttgaatatatttacaaagaccttatttccaaataaggtcacattctgaggtactgggagttaggacttcaacktatgaatttggttgggatggggacacaattccattcatatccccaggtaccaatggagctttgctccaagagagatagaccacccagctgggctcagtgactcatgcctataatcccagcactttgggaggccaaggcaggtggatcacctaaggtcaggagtttgagaccagcctgaccaacatggagaaaccctgtctctactaaaaatacgaaattagccaggcgtggtggtgcatgcctgtaatcccagctacttgggaggctgaggcaggcgaatcacttgaacccgggagacagaggttgccgtgagccaagattgcaccattgcactacagcctgggcaacaacagcgaaactccatttcaaaaaaaaaaaagagagagagagatagaccacccaagggcatcaaggtgcctctggcttgacacttcctagatgctcctactgttgaatttttatcagagtcctttgaacagcctcatgatccttggctacaggtggt

SEQ ID NO: 256864 - DNA, 566 bp, Homo sapiens
tggtttttttgagtaatgctgcaattaatatcccttatctgtgtcatttcacgcaggtgcaaatatacctgtaaaatgaatttctggaagcagcattactgactcaagggtatctacttttcattttgatagatattgccaaattgctctcacagaggtttccccaatttgtactcccaccagcaatggacaagagtgttttttctttktcacacaagtctggtgtcaaacattctgatcttgtcagtcttgattctctgagttttgttttgcatttctcttattgtgagcgaagtcgaacatattttcctatgattaggagccatgtgtaattccttttatgtgaactttttgcccatctctgtccattttctttacttattttttctattgggttatcagtctcattgatttgagaagttcttcgcatgttaaggaaagcagccctttgtctgaaatatacttgaaatatatatacatatattctggctttttgttttactttgtttatactttttaaaaagtcatgatgatcttttctttcataaagtaattcaatttattgg

SEQ ID NO: 256865 - DNA, 566 bp, Homo sapiens
tggtttttttgagtaatgctgcaattaatatcccttatctgtgtcatttcacgcaggtgcaaatatacctgtaaaatgaatttctggaagcagcattactgactcaagggtatctacttttcattttgatagatattgccaaattgctctcacagaggtttccccaatttgtactcccaccagcaatggacaagagtgttttttctttttcacacaagtctggtgtcaaacattctgatcttgtcagtcttgattctctgagttttgttttgcatttctcttattgtgagygaagtcgaacatattttcctatgattaggagccatgtgtaattccttttatgtgaactttttgcccatctctgtccattttctttacttattttttctattgggttatcagtctcattgatttgagaagttcttcgcatgttaaggaaagcagccctttgtctgaaatatacttgaaatatatatacatatattctggctttttgttttactttgtttatactttttaaaaagtcatgatgatcttttctttcataaagtaattcaatttattgg

SEQ ID NO: 256866 - DNA, 449 bp, Homo sapiens
tcagtgttggtccctaattaaaagcagcataaatcactatatggatttggggctggactataattgttttaattaatgacatggaaacagttctaaaaaatgatacagaacgtaartagaatgtatgtgattgttagtgcttcagaaagtgaatgctcaaccactcactcctcaaatactatctagcttacagatagtactgaatcctaggccaggcaccaggaaacaagggcaagcaaatgaatgctgcccctgcccctgcagagctcacagatttctggaagagacaggttctaatcagataaagacacagtgtataattacaagtggtgataaatgccatgcagagaaagaagaggctactttgtgagctcatgacagggagccctggctccctgctggagtccaagctgagaagtggcatatgttacccgagcaactgggaaggt

SEQ ID NO: 256867 - DNA, 618 bp, Homo sapiens
cacactctgccatctcatcctgtctctgaccccatccctgctcctctccctattcctcactcttctccagccatatgggcctccctgcagttcctcagacacgctgggcacaggccctactgtggacctttatacttgctcttctgtttgtgggackctccttccctcacacccttggcccacttgctcatcttcttctgtctttgttcaacatgcccttcttactgagctcgaaccccctatttaaaattgcatcctggctgggtacagtgtcccatgcctgtaatctcaacaattttggaggccaaggtgggtggattatttaagactaggagtttgagaccagcctggccaacatagtgaaactccgtctctactaaaaacacaaaaatttgccaggcatggtagcatgcacctgtactctccagcttctggagagtctgaggcatacttgaacccgggaggtagaggttgctgtgaggcaaaatagtaccactgcactgcagcctgggtgacagagtgaggctctgtctgaaaaataaatagataaataaaataaaataaaacaaaattgcatcctccctgccatcacaggctctcgacattacttctctaact

SEQ ID NO: 256868 - DNA, 618 bp, Homo sapiens
cacactctgccatctcatcctgtctctgaccccatccctgctcctctccctattcctcactcttctccagccatatgggcctccctgcagttcctcagacacgctgggcacaggccctactgtggacctttatacttgctcttctgtttgtgggactctccttccctcacacccttggcccacttgctcatcttcttctgtctttgttcaacatgcccttcttactgagctcgaaccccctatttaaaattgcatcctggctgggtacagtgtcccatgcctgtaatctcaacaattttggaggccaaggtgggtggattatttaagactaggagtttgagaccagcctggccaacatagtgaaactccgtctctactaaaaacacaaaaatttgccaggcatggtagcrtgcacctgtactctccagcttctggagagtctgaggcatacttgaacccgggaggtagaggttgctgtgaggcaaaatagtaccactgcactgcagcctgggtgacagagtgaggctctgtctgaaaaataaatagataaataaaataaaataaaacaaaattgcatcctccctgccatcacaggctctcgacattacttctctaact

SEQ ID NO: 256869 - DNA, 618 bp, Homo sapiens
cacactctgccatctcatcctgtctctgaccccatccctgctcctctccctattcctcactcttctccagccatatgggcctccctgcagttcctcagacacgctgggcacaggccctactgtggacctttatacttgctcttctgtttgtgggactctccttccctcacacccttggcccacttgctcatcttcttctgtctttgttcaacatgcccttcttactgagctcgaaccccctatttaaaattgcatcctggctgggtacagtgtcccatgcctgtaatctcaacaattttggaggccaaggtgggtggattatttaagactaggagtttgagaccagcctggccaacatagtgaaactccgtctctactaaaaacacaaaaatttgccaggcatggtagcatgcacctgtactctccagcttctggagagtctgaggcatacttgaacccgggaggtagaggttgctgtgaggcaaaatagtaccactgcactgcagcctgggtgacagagtgaggctctgtctgaaaaataaatagataaataaaataaaataaaayaaaattgcatcctccctgccatcacaggctctcgacattacttctctaact

SEQ ID NO: 256870 - DNA, 579 bp, Homo sapiens
catgaattacttgcacaataaacaggaataaagaaggaaatctattcaaagcaggcaatgacttaccaaggtcagttttaaagatcracacttggaatcagaaaatggggcttcaggaaagaacagaaaatagcatggctggataagtacaatagataggaaatattcctcctatgaacattaaggagaaagaaatctttcttcaatgtcacagccaaaatttgtccaagacaagtccattccatgtttattatttatttagctatctgtaacactgcacattagttaaatattagtaaaaggaaaacatttacattgatgcaaaaataaagtcaacaaggcttctgtgtgcatgaggccaaaaaattacatttaaaaagtctttgtattccaaacatctaaatatttgagaaagtctgcaaaacaaatgctatttggatcaacttctagggggactgatggtatcatccatgtttctctgatgtgttagcataatagagaatgcagcttccaacaatcaagccagtaactgggcacaaacacagccagctccgtctttgccatcactggaaacatgtg

SEQ ID NO: 256871 - DNA, 472 bp, Homo sapiens
tttatttagctatctgtaacactgcacattagttaaatattagtaaaaggaaaacatttacattgatgcaaaaataaagtcaacaaggcttctgtgtgcatgaggccaaaaaattacatttaaaaagtctttgtattccaaacatctaaatatttgagaaagtctgcaaaacaaatgctatttggatcaacttctagggggactgatggtatcatccatgtttctctgatgtgttagcataatagagaatgcagcttccaacaatcaagccagtaactgggcacaaacacagccagctccgtctttgccatcactggaaacatgtgctgggcaagtaacataactgactctttgatggccttctggagycaaattgtaatactctgattgttcgtattaggaaaattctgttaactttgaaactctggaagccctgatggaggcaaagcattggctctgatccaggcagagt

SEQ ID NO: 256872 - DNA, 600 bp, Homo sapiens
ctgtggagagctggccaaatggcgggaactgggccccggaggacccccacacattgcaagaacagctgcctgtctcccacatagcgtcccaggccctgcacaagcagcatggctcctgctttcttgggcttgtctcacctaccaggctacagcctccttactcagcccagyatggaaggtgttcacagcaggctgaagaagtaaggcaggctgcaggagcagaggcgacctgagccttggaatactgggcaaagagaaaaggatgccaggggcaatgataccaggggcaatgatgccagaagcatggtcacacaggccatgcaatggcctagggcaatcaggcagctcacagctattcccttgaggaagcacaggacactcatgggacacattcaaagacttaggaaagaagagatgtcatcacctcccagaaccatgctcccaacactactcactctgaaatcaggcattcatgtgtggttattccccctggaatatgaactcctgcagctggtgctacatcttactagacttggcatcactgcagctggcacagtattgaaccaagactcttcactcaataactgttggcagttagat

SEQ ID NO: 256873 - DNA, 487 bp, Homo sapiens
ccagatggcacctgtcataaatggaaaccaaggtcagattagtcctctgtttacataagaaagtcactttccaatttattagctatctctctttgttttaattctataagtaaacaagagaactgcatactaatgaaggtacttatttaattaattagtataagagaaattgcagtgaaggctacctggctatggaaacttcaaagagacagtgggcattgcttgatgtataaaatatgagtgcrtattttttattgaattgaggtaattatttcctcattctatctgcctaatagaggaaatggagagccttctcttgtggaaaataatattagcacctccataacattttatatgcaatgacgagcatacaaaaaaattatcagacatatgaagaggcgagaaaatttgatcaataatcaaagaaataaagatcgtagaaatggactcatggataatccatacattggagtggcaacaaggactt

SEQ ID NO: 256874 - DNA, 545 bp, Homo sapiens
atgtggctaggtataggcaagttgcaaattcttgcctgcagaaagtgcaggaagatacagtgcccaaacccaagacctgaactggtttaggcatagcagaaaagcactgggtctgcctgaagacccctgtgaataagatttactcagcagcccctgctgtggcaggtgcatgtgaagagcagaactatcatccctggggagagagagaggttaactcagcgctccactgggagaccttccctaagtctctgtgaagatcccatcacactcatcctaggggttaggcaacagcaagccacggaaccacccccaggcagctcccagaaaatagctcccaaggactggccctacttccacagattcattgtatcagtcacaactctcatttgtgcagtttcctgccgtttgtgattcacttgtcatatactttctttaagttctcccaatmccatcacatctgtcagtatttttatacccgtttgtcagatgaggaaactaagactcaaactggcccaaagtcatgtaagtggtttatggcaaagtca

SEQ ID NO: 256875 - DNA, 589 bp, Homo sapiens
gggcacaggagctttgatttgattaatgagtctggcacagtgcctgacacataataggtgctcaatacatacttgttgaacaaatggctgaggctctgttttgcctacaggaaaaatagcactagaggctggcactgctgcaggagagctttgactctggtgagccctctcttctgagctttgcacaggcagattctgagcttcctgtcatgtctcctggcccaccactccctcctcctaccatgtctcaggamgtaagagtagagtacagggttatcaaagagaaggaggcattctttcaattctgagaagattctggcatgactatattttactcttctccctctaagagtcattgcacgagcgatcctcaatttttcatttaccaaatgccccatcctcattcatacttccatgcctttgtgcattctgacaccctcataaattgccctctccacactcatccatctgttaaaagtcttgtacaaggataccttcttcccagttgctagtgagccccttgaagacagaatacttgtcgatttccattcctctagtagcaggtatcctatttttctttggaaaccac

SEQ ID NO: 256876 - DNA, 589 bp, Homo sapiens
gggcacaggagctttgatttgattaatgagtctggcacagtgcctgacacataataggtgctcaatacatacttgttgaacaaatggctgaggctctgttttgcctacaggaaaaatagcactagaggctggcactgctgcaggagagctttgactctggtgagccctctcttctgagctttgcacaggcagattctgagcttcctgtcatgtctcctggcccaccactccctcctcctaccatgtctcaggacgtaagagtagagtacagggttatcaaagagaaggaggcattctttcaattctgagaagattctggcatgactatattttactcttctccctctaagagtcattgcacgagcgatcctcaatttttcatttaccaaatgccccatcctcattcatayttccatgcctttgtgcattctgacaccctcataaattgccctctccacactcatccatctgttaaaagtcttgtacaaggataccttcttcccagttgctagtgagccccttgaagacagaatacttgtcgatttccattcctctagtagcaggtatcctatttttctttggaaaccac

SEQ ID NO: 256877 - DNA, 585 bp, Homo sapiens
atatttaattaaattcagcaactcggtagcagcctattgaaactctggcctttaaaagtgcaatttaacatcactctatgtcttcttgggacaaagaaaatctccctgttctattttgactgctgatctcattgcaatatcactttggtttctcgggaactgctataaggagaagcttattgtcttctaacttttggaagagcacttctaattaaagcaatattaaacagtaataactgtcttatagttttatggcaatgcccatggtcacataaataagcattttatatccaattagcattttatatttattcaatcctaaaacaatctagcatttttattaatcaaatcaaatagcatttaatagatayggttgttttagcttctgaaattagccacgtataaaatagcactgcattcaagtatgcaatatattgccccaaaagaacaatatgtgctcatcacaatttccatcaacacagcacctgtatttacccaaataagataaaaccaacattttccataattccatcatcatttgcatgatactttcatgatttctgctatagctatgtgccacctgta

SEQ ID NO: 256878 - DNA, 617 bp, Homo sapiens
aatgcagggtggggaaacaaccacagctggaaagcatgggaggaaggtgagtggaagaggaagtatagagctgtgatggctacagaaaaggggtaccctgcccctgcagtaataaggtggggtcctaggtggctgcaaagtgtcctcaaggctttgcaccaggcctgaggctaaatgggaagataaggaggctctgatagggtttgcaacatcagaggagaaaccccagcagaatcctagacccagcttgaccattttttrcctgtgagacttgggctggctgtcactgctgtaaggactgactgaataacacaagtccaagtgctccccaaattgtaaagcagattgaaggagctgtctcaggttagcgggctttccctgcccttgctgaggagggagtatggctgaactcctgttcatattacacacatgagatgacacatttctatcacactctgtccttcggcttactgggagtgactaagtaatcatgcaaatccatctgcattataagccacaaactcctaatggaatttgttcaaataaaaatttctaaaaccaggcaggatcccatcagccagcagtggacttttacttgcatggaggcaatacttacc

SEQ ID NO: 256879 - DNA, 587 bp, Homo sapiens
ttctttgtttatgagggatactgaccacctgcagcctccatgactatggatcatcctggagaatagtttctggagtaacaacctaggcttttggctaaaattggaatgtacctgttccctcagttaccacrcagtgggtgtctccactgctgtctcaaacacaaggtccctcttactctccttctcaagtcccatgatgagtatttttgaacatgccattattgcaaataacccattgcttagctgattaaagaggcagatcaatttgtggactgatgccaataagttttaccttcagttccaagagagaatgaagaatgaaagaaagaaatgtaaggaatgaagaacatttggggaggttgaatcaaattacaaatgattaagaaataatatagccttatatatttatttttagaagcattagactactgggttttaatttcatattattacaaatatgcaaagttaataatatactattgattgggtaagcttcatttaacatgtatagcactttatacaaaacaaaacaagatatacaatatctcctaaataatttggaggttgatttttttaaatgctaaaac

SEQ ID NO: 256880 - DNA, 587 bp, Homo sapiens
ttctttgtttatgagggatactgaccacctgcagcctccatgactatggatcatcctggagaatagtttctggagtaacaacctaggcttttggctaaaattggaatgtacctgttccctcagttaccacgcagtgggtgtctccactgctgtctcaaacacaagstccctcttactctccttctcaagtcccatgatgagtatttttgaacatgccattattgcaaataacccattgcttagctgattaaagaggcagatcaatttgtggactgatgccaataagttttaccttcagttccaagagagaatgaagaatgaaagaaagaaatgtaaggaatgaagaacatttggggaggttgaatcaaattacaaatgattaagaaataatatagccttatatatttatttttagaagcattagactactgggttttaatttcatattattacaaatatgcaaagttaataatatactattgattgggtaagcttcatttaacatgtatagcactttatacaaaacaaaacaagatatacaatatctcctaaataatttggaggttgatttttttaaatgctaaaac

SEQ ID NO: 256881 - DNA, 619 bp, Homo sapiens
gctcttttctctctttggagtgctttcaggcatatttctccagatgagacccacaacttcaaacttcttttctaattaagattttaatgtggttagattataytaaatcagatgaaaaccatccttcccatctttttttctttcagtccactctttttataaacagatttccacaagagtggaaattattaaaggtgagcaacacatgtataatcaaatttcgccaatcgaaatatatgaatataacatgccaaaactagccccaaatccttccagtaatagtagacaaaaaataccagattagaggaagaccttgcataggaaagagctgatctctgacgtttttatttgttgcttttgtttctaaaatatcagtgactgctttgaagtactgatcattacaaaactctcatgcacagccagattatatatatacactatatatataaagtatatatagtgtatatataatatagttcatatatatagtcatatgtgtatagtctatgtaataccctttgtaatctataatatacatatggtctctctctatatatagtctgaactaatgtctagaattggtccactatcaacatttccaacttatctcaatattatc

SEQ ID NO: 256882 - DNA, 619 bp, Homo sapiens
gctcttttctctctttggagtgctttcaggcatatttctccagatgagacccacaacttcaaacttcttttctaattaagattttaatgtggttagattatactaaatcagatgaaaaccatccttcccatctttttttctttcagtccactctttttataaacagatttccacaagagtggaaattattaaaggtgagcaacacatgtataatcaaatttcgccaatcgaaatatatgaatataacatgccaaaactagccccaaatccttccagtaatagtagacaaaaaataccagattagaggaagaccttgcataggaaagagctgatctctgacgtttttatttgttgcttttgtttctaaaatatcagtgactgctttgaagtactgatcattacaaaactctcatgcacagccagattatatatatacactatatatataaagtatatatagtgtatatataatatagytcatatatatagtcatatgtgtatagtctatgtaataccctttgtaatctataatatacatatggtctctctctatatatagtctgaactaatgtctagaattggtccactatcaacatttccaacttatctcaatattatc

SEQ ID NO: 256883 - DNA, 369 bp, Homo sapiens
ggggcgcacattctggggcatgtacaaggggatcccctgggtattatagaactatttttgaatatttcacttaaaaaaatgaataattatttgtcatcaaagttctataggcacatagttttaaaagagtcaaatcactctacagggcttgttgccaaaacatagcatttatcctgaatcttccctctgccccatgttccacttgtctgaggcaactgctttgaactattttagccaactctttcattatttgcctccacatcactaaacaacatgcttatattgctacctaatttttcacctcttggcattagstattgactttctactttggaagatgaggatttagttctggttccctctcccttc

SEQ ID NO: 256884 - DNA, 563 bp, Homo sapiens
ccatagttaacttttcctttttttgcacaagattttgtgttttccaaacttaataatcatcttgattctatcattcttmtgctctgggtactttctatgcaacaataataagactaagcaaaacctaaacgtccaaacttgaagtttacacgctcattctctcagtctctgtcccacgctctcacatatcagagagtttttaatgaggaagaagacattatccccagagcaacagttcaaaaacaagtgtatagatatcccatgagaaaacagttctaacaccaacagggttgggaaaggtctaacagggtgcctggcaataacagatacttggttttgttagactcaaattttttgaactattgcagagaggagctcaggatcccttgcttttttctgctcctggttccattaaggtaaaatgtctcttttgtttctctctcagctctgcacaagccctttctctggtgcttgtgtttggcacagggttccccagatgtgaatgttcctgcttgggggccttcctcagagccagcccctcccagtgtcgaaatgggaaatgt

SEQ ID NO: 256885 - DNA, 563 bp, Homo sapiens
ccatagttaacttttcctttttttgcacaagattttgtgttttccaaacttaataatcatcttgattctatcattcttatgctctgggtactttctatgcaacaataataagactaagcaaaacctaaacgtccaaacttgaagtttacacgctcattctctcagtctctgtcccacgctctcacatatcagagagtttttaatgaggaagaagacattatccccagagcaacagttcaaaaacaagtgtatagatatcccatgagaaaacagttctaacaccaacagggttgggaaaggyctaacagggtgcctggcaataacagatacttggttttgttagactcaaattttttgaactattgcagagaggagctcaggatcccttgcttttttctgctcctggttccattaaggtaaaatgtctcttttgtttctctctcagctctgcacaagccctttctctggtgcttgtgtttggcacagggttccccagatgtgaatgttcctgcttgggggccttcctcagagccagcccctcccagtgtcgaaatgggaaatgt

SEQ ID NO: 256886 - DNA, 563 bp, Homo sapiens
ccatagttaacttttcctttttttgcacaagattttgtgttttccaaacttaataatcatcttgattctatcattcttatgctctgggtactttctatgcaacaataataagactaagcaaaacctaaacgtccaaacttgaagtttacacgctcattctctcagtctctgtcccacgctctcacatatcagagagtttttaatgaggaagaagacattatccccagagcaacagttcaaaaacaagtgtatagatatcccatgagaaaacagttctaacaccaacagggttgggaaaggtctaacagggtgcctggcaataacagatacttggttttgttagactcaaattttttgaactattgcagagaggagctcaggatcccttgcttttttctgctcctggttccattaaggtaaaatgtctcttttgtttctctctcagctctgcacaagcyctttctctggtgcttgtgtttggcacagggttccccagatgtgaatgttcctgcttgggggccttcctcagagccagcccctcccagtgtcgaaatgggaaatgt

SEQ ID NO: 256887 - DNA, 640 bp, Homo sapiens
gaatggtgctggcacagactcagccaccctgatgccaaaatacttaatctagcaggttcctgagacattcatgagtaagggggtaaaaacagcacagttgatactgtttatggctaatgcccttattttactcaagatcaatctaggtttctggaagaacaagagaagaacagaggtcagtgtagtaagactcaggagaccatggaggcctgagcccagggatgccagccaaagagggttcctgctcatggtgttctcccaccatgaggtgcttttctctggggcctctccttccctccttctgtccattcttcctttatcccttgttccatccctgtacgaacctgcagcctgcttgcctgtgtgtctccaaagcatttcccagccagctccttggtagaagagatgtggtggggatgagagatcatctaaggacccaggaacacttgaggaaacagcgggaataacactgactcatattctcacctgcaaatcaaatgctagcactggcaggcaggatagagagtttgaggttttgtcttttctcccccactgattcctgtttgcaaatggagtgtctgcttgtcctccccagrccccaggtccaggtggcaactggctggagcaggaagaggaggca

SEQ ID NO: 256888 - DNA, 591 bp, Homo sapiens
tcctgggactatgtgagctgaagcatgagagtgaggcactcagagtgagatagcaccctcaccccacctgccccttagagccctgtaatcttggccacaccactaccatcccacctgactctcctcctccgctctcctctctaagatgaatatcctagacctctgtacagggccagggggctgccagtctgccaacaaccctcaggcctgattacccagaataaattaccatgcaaggcattaggctctttagtagggaaccagcaatggattttatatacaatttagaaagagaagaatattattgtactttgttttcctatggctattatccccataaaagctcatttctacctcttaacagggatttacttggactgatgaattagttaaaaaccttcctgcccaatttcaatttactcagtgcaacataygctgtaaaacatttagcaagagtgtaaattcagtcaatgcagctccctggaaacgttgcttttcttccagacaccccatctcccctttgctgggccctggggagatcacatgatgccctctggggaagcagggaaaggtggtccaaattagccctgg

SEQ ID NO: 256889 - DNA, 614 bp, Homo sapiens
gatcagacaaattcacttatgaaagctctactgagatgagccctccaatttttagctgggtttctatgttctggctactgacctgagccagtcactaacaagcctgtggctggaacttgatgcttgggaagaccagacaccctgccttgcttctcagccacattatgcttcccttgaatccaaggcagccatggagatgtggcttctcagtcatgaaggaaacctcacagaaatgtggggatggttcatggcagatcacgctcctgccagagcccacctagggctataggatcaagggtccctggctacaaggcctcacctcagacatctgccacgaaagccctcagagccctgctcacagtgagcaccaaataaggagcagtttcctttcccaccagtctgaycaagaacctgattatccaacatttcatccataaatgaaactgtagaagtcctttttaattttttaaggtagactaaaggagcaattaatgtgtaatagaggcacatatgcagaaaaaattctgagccaaaaatgctggagggccatttctgtctattcattcattcattcgttcatccatccagtcatgtaatactactactgagagcca

SEQ ID NO: 256890 - DNA, 622 bp, Homo sapiens
atgggggttatcattcatttttaatcttttaatgcaaaatttaaaatgttgttactatttttaagtatttcattaaagaacatattttattataaaataaataaacaatatttaagaaaatccgctaatctttcttgtcccttaaaaaggcaagcccttataaaaaaacagattgcatttcttcaatccttgccctgtgaaaatgtagaaatgtcttctctgcaaagtgccaccctataatgtgaacccatgttcctttttctactttcagacaacctggagaaccagcagatcaacatcactcattttcacctaactttgttgcatattttgttcaaacyctgcttctatctacaccttaagtgtgagcttcctgaagacagaggtgaggtctttttcttcacttaatgcctcctctgccacatccatcccaccttgccacaatacctaggaaaaagctaaggatacaaggggacacacaaacacgtgcacaatgatgacacattcataataatgctatatcatgttcttaaaacaccttcctttttgaatcaaaactccaacaaaacaatagccctgggggtggggggatgtgatacttcggacccgttttataaagaag

SEQ ID NO: 256891 - DNA, 453 bp, Homo sapiens
gcttaaactgtccttgcatgttggctgggaggacaagagtaggttattttctaactgcagagtcagggagaagaatccaaacactccaaaatgttttttctacactagatttcatgctttatcattagtgattcactcctttgggttagccattgcccttggtaggtttggaaccatcagctaaaaggtaggctgttatctgagatgcactccatttcaaagaagactggtttgtggaatatagtgtgacactgcccctaggagagtgcttgtgcatttcagaactttaaggagcagaaagagttggaaaaatgaacattcagaacctcaagtcaccaaacacatattcaatgaaastaaggaaatgtttgtagtctctgccttgagtcttctagttcttataatgcaagactgcttccatccttttcttctctctgggtgcatagttatctc

SEQ ID NO: 256892 - DNA, 540 bp, Homo sapiens
catgaagtgacatgttaagggtttcttggcagcatgagagagaaagcatggatatgtacccatgttctcaagccatataaatctggataaactgtaytgctgcagaggaaatcataaatcatacatcctaagggcaggatttcagtatttttgaagggtttcatttctcctcccttccaactttgatatatgtacttacttaacaagggtctagggagggttaattgaattaatatatgtaaagtgcttttagtttgaagagaatgtgcaatataaatggaagtgtcactaaaaaggttaatctaatttacatccaacactttcagttcatagtgttaatgaactatatgcttttagagagtgattaatttatagaaatgtgattatttttcttaatgctatatatgggtcagcttttcctattactataactaactttataggagaattcagcattttatatattaaaataataaatcaaacacctctgtaatggttatatttcattaattacaaggagacatgcattagattaacatt

SEQ ID NO: 256893 - DNA, 426 bp, Homo sapiens
aaacccctgcccctgacatatgcttacccaatgcctacccacccatcaacatcccttttactttctccataagtctttcctgacctctattgttgccaacttcttcctttcctgcaaggcttcggggggtctgtgatgcacaatctatgattttcccataagtcwccaagttctgcaatagtttgtgtgatgtgtgatgtgcagtgtttgccctagacagagtgtgaactctttgataattggaacttgcttttatctttttgttcccctcacagagaataacaggaggctgagaaatagtaattggctgaaaaggctagagaacaggacctagtgcatgtctggaagggctaactctcattctaaccattctcctctgaccaatactccctctggcctactgcttgtttctttcccaaatctcag

SEQ ID NO: 256894 - DNA, 552 bp, Homo sapiens
ccaatagcagcccatgagcccggcccgaagcccctccagatgatcccaaccaccagttattcaaggcaacagaaatcgtagagcagggataaactataaccccatgtctaaatgcccgagccacaggacctgtgagcataatcaaatggtcactgtttcgctaagttgtgcaggggtttgttaggcagcaatggataacctaaacaccagcctcttgtatgccaggtttttatatcctcaggcttactgcatctttacaacagcctcttgagccagagtttaatatacccattttagagatgagaaatctgagtcacagaggagttatgcaatttatccaacatcctgtagcttctcagtggcattgtgaggattcatacactattcacacacaatgcacgggtcagccacccagaattaagagaacttttcaaataaatcagatgttatayttcagtgactggaattgccatatatatatatatatatatatatatagcaatattgccatatatacatgtatgtgtatatatgtgtgtatatatagcaaca

SEQ ID NO: 256895 - DNA, 628 bp, Homo sapiens
gcttaattccaaatttcatctttctcccacacatcatgactttgggagaggcatgcgggataagtaagcaacaaaaaatagtttcaaatcagaaaagatagctttggggatttgatttttaaaaaacctttatctatcactacctctgattaaggaccaatttaaatagccaactgtcaccaaagtagagatacaaatctctgaatatccattacttattctggacttagtattgtggcatattcctctaaagaytttattcaaaaaatggtgaacagggccgggcgcggtggctcatgcctgtaatcccagcactttgggaggccgaggcgggcggatcacgaggtcaggagttcaagaccagcctggccaacatggtgaaaccccatctctactaaaaatacaaaaattagtcaggtgtggtggtgcgtgcctgtagtcccagctactcgggaagctgaggcaggagactcgcttgaacccgggaggcagagattgctgtgagccgagatcatgccactgcactgcagcctgggtgacagagcaagactccatctcaaaaaaaaaaaatggtgaacaggatgatgtaaagcttggtcactctaagcctcaagtctggggcaccacc

SEQ ID NO: 256896 - DNA, 612 bp, Homo sapiens
tgatttatcatttccattggacatctagggagattaagtttcaaagagattcagcaacttgctcaaagaaattaaggtgcactgctaaaaatgaagaagctggaatttgaattgtctgggtcctgtctgactctgaagccatgtttttccagccaagtgaggcaatgtgtccagcctccaccacagctgtaggtgcagggtttgtacagagaccaaaygcactaccctgactcattctggccataatcccaggttttacacagaagtcgttgtctttcagtgattctctgaagtttcccaggttggaatcctgtttccccactgtctcagttggtactggagatcttccctagagatgttcctttctcttttatttcctttctgtccctaagggcctgactcaagctccacacctcaggctgtctcctgactccatcctctcctgcaaggctttcacataaccagtggtttgatcatcaatacctagctctcctacactgctcagatactttccaagactcatcaagacttactgcagaaggccaaagttgcttaacaaaaattcaagtccctcaccagcctggcctcaacttccattgataacctgatttc

SEQ ID NO: 256897 - DNA, 488 bp, Homo sapiens
aagcccaacttgattattcctgcctgcttctctgacctctcccaccttgcctactggcctttggtcctttgaacataaccagctctttcctgcctttgctttaaactgggattgtacttccctcttacatcacatggcattcaggtttcattttaaatgtcacttctccagggaagtcattccattactctatatagcgtttcttttttaattctctgtaatcactccttgctgatattttcttgaaagtttacttgctcatttatttccagcctcctcccaatagaacctaaattgcaggagaggcragactcatgtgcctgacacatgggtgctagatagttatttactgagtgaatgaatgaatgcatgaatgaatggtttaccttctctgagcagagcacgttttgtcctgcatccctcttttttgactattgacataaacatcctattgaaaaatcacttaaatgtatattcttcttataaaa

SEQ ID NO: 256898 - DNA, 559 bp, Homo sapiens
gggatgtaagcaaaataggaacaaaatactagacaaaagtaacatgaaaactaaaatagagggatcaagattaaaatatcctaggttccatatattgttcaaaaggagagtaaagatatagaatactttcagacttttctcatgcaagtgttcttgtcaagattttaagggtgaacagttaaagattagatagagaacaaatagtttccaaaaaatcaagaagaagaggggaatgaaaggaaacccatccaataaatgatagtaaaggaataaaacgtgaagaatagaaaagyaggtttattagaacaaaataaattgatatgataagttcctatgtaccacactaaaaagggaaggattagacttatgtattaataatagagattctgaagttagatatattttaatgctatcatatgtttgcaattggcacactgaaaatataagtacacagaaaagttgaaatgtacaatgtatatgtgagtatgcatatatatttacatatgtattatattgtgtatacacatatatgtgtgtgtgtatacatatatatagatca

SEQ ID NO: 256899 - DNA, 559 bp, Homo sapiens
gggatgtaagcaaaataggaacaaaatactagacaaaagtaacatgaaaactaaaatagagggatcaagattaaaatatcctaggttccatatattgttcaaaaggagagtaaagatatagaatactttcagacttttctcatgcaagtgttcttgtcaagattttaagggtgaacagttaaagattagatagagaacaaatagtttccaaaaaatcaagaagaagaggggaatgaaaggaaacccatccaataaatgatagtaaaggaataaaacgtgaagaatagaaaagcaggtttattagaacaaaataaattgatatgataagttcctatgtaccayactaaaaagggaaggattagacttatgtattaataatagagattctgaagttagatatattttaatgctatcatatgtttgcaattggcacactgaaaatataagtacacagaaaagttgaaatgtacaatgtatatgtgagtatgcatatatatttacatatgtattatattgtgtatacacatatatgtgtgtgtgtatacatatatatagatca

SEQ ID NO: 256900 - DNA, 581 bp, Homo sapiens
acagtgaaaatactacatatcaacacttacagaatgaagctgaatggaatttagaaataatagcctttaatgcttatcttagaaaataagaaagtctggggaattttctgttgagtatcccagacaaaaagtcrtaaaatgaacaacaatagttcttaggattgtgtgatattgctaaagcaatagaaaaatagagaaatggaacagaatagataacttggaaatagaaacatacttgtataaatacttaatgtatgcttagaagtcaatgaaggaaaagatggactactctatcaatggtaataaaatcatttcaatggaacaatggcttaatctgaaaaatacaaaattataagttttagaaaaaatattagtagaatatttgtatgacttaaaagtaagaaagaatttcttaaacacaaaaggcacaaatcatgaagaaaagtattgatatattcaacacatcaaaattaagaaattttgttcatcaaaagacaccaaaaataaagggaaatagaaagccatgaggtgaagattgatatctgtgactcttgtaactaacaaaggattggtctcacata

SEQ ID NO: 256901 - DNA, 581 bp, Homo sapiens
acagtgaaaatactacatatcaacacttacagaatgaagctgaatggaatttagaaataatagcctttaatgcttatcttagaaaataagaaagtctggggaattttctgttgagtatcccagacaaaaagtcataaaatgaacaacaatagttcttaggattgtgtgatattgctaaagcaatagaaaaatagagaaatggaacagaatagataacttggaaatagaaayatacttgtataaatacttaatgtatgcttagaagtcaatgaaggaaaagatggactactctatcaatggtaataaaatcatttcaatggaacaatggcttaatctgaaaaatacaaaattataagttttagaaaaaatattagtagaatatttgtatgacttaaaagtaagaaagaatttcttaaacacaaaaggcacaaatcatgaagaaaagtattgatatattcaacacatcaaaattaagaaattttgttcatcaaaagacaccaaaaataaagggaaatagaaagccatgaggtgaagattgatatctgtgactcttgtaactaacaaaggattggtctcacata

SEQ ID NO: 256902 - DNA, 581 bp, Homo sapiens
acagtgaaaatactacatatcaacacttacagaatgaagctgaatggaatttagaaataatagcctttaatgcttatcttagaaaataagaaagtctggggaattttctgttgagtatcccagacaaaaagtcataaaatgaacaacaatagttcttaggattgtgtgatattgctaaagcaatagaaaaatagagaaatggaacagaatagataacttggaaatagaaacatacwtgtataaatacttaatgtatgcttagaagtcaatgaaggaaaagatggactactctatcaatggtaataaaatcatttcaatggaacaatggcttaatctgaaaaatacaaaattataagttttagaaaaaatattagtagaatatttgtatgacttaaaagtaagaaagaatttcttaaacacaaaaggcacaaatcatgaagaaaagtattgatatattcaacacatcaaaattaagaaattttgttcatcaaaagacaccaaaaataaagggaaatagaaagccatgaggtgaagattgatatctgtgactcttgtaactaacaaaggattggtctcacata

SEQ ID NO: 256903 - DNA, 305 bp, Homo sapiens
ctcttagacatcagacaattgcctggctcttcatggggaaagcccctgaggtgcccatgtctctaatgctcctttctcataccctacagccattccttagagaaatgcatatgaactgcagatctctggtgccattctttctcattcccctagagttttaaacatgcattttcttgtttttcccctctttcttatgcycttttaccttttatacttttttctttgccagacgaattactacttattacttaggcctcatcataaaaatccagaaccttccagaaaccttctccaatgccttcatg

SEQ ID NO: 256904 - DNA, 586 bp, Homo sapiens
tgtcaaccaggtcttctcatttcagaaatacatacatcccttagtgccctgaagttactgttgggctgaaatttttataaactcaastccaagtcaaatattacagaactaccaaatgtcactgaactacttattaaggggctataccattccccattaaatcaaaatattaaaatgcattttcatctcaaagttgctgaaactctcttaggcaatccagcctctctcttagaaacacttcaagcttatgtgaggagggggaaaaagaaagagccatgtagggattaaaacaaaaacaaaataaaaaccctcacctctataaattatccacgagaaaattaaggaataatttttatccaagagaatagcattttatctctgaaatatcagtattgaccttaataaacactctagccagtttgctggagtctaatccactggactataaacatcaaatgatgttatttttgctccctaccatgatttgtcaagctcctctttcccaaagggtggcagctgccttaaagatattccagcccaattcatagcttttcatttcttttttgttaagaagacttagtccagt

SEQ ID NO: 256905 - DNA, 586 bp, Homo sapiens
tgtcaaccaggtcttctcatttcagaaatacatacatcccttagtgccctgaagttactgttgggctgaaatttttataaactcaagtccaagtcaaatattayagaactaccaaatgtcactgaactacttattaaggggctataccattccccattaaatcaaaatattaaaatgcattttcatctcaaagttgctgaaactctcttaggcaatccagcctctctcttagaaacacttcaagcttatgtgaggagggggaaaaagaaagagccatgtagggattaaaacaaaaacaaaataaaaaccctcacctctataaattatccacgagaaaattaaggaataatttttatccaagagaatagcattttatctctgaaatatcagtattgaccttaataaacactctagccagtttgctggagtctaatccactggactataaacatcaaatgatgttatttttgctccctaccatgatttgtcaagctcctctttcccaaagggtggcagctgccttaaagatattccagcccaattcatagcttttcatttcttttttgttaagaagacttagtccagt

SEQ ID NO: 256906 - DNA, 586 bp, Homo sapiens
tgtcaaccaggtcttctcatttcagaaatacatacatcccttagtgccctgaagttactgttgggctgaaatttttataaactcaagtccaagtcaaatattacagaactaccaaatgtcactgaactacttattaaggggctataccattccccattaaatcaaaatattaaaatgcattttcatctcaaagttgctgaaactctcttaggcaatccagcctctctcttagaaacacttcaagcttatgtgaggagggggaaaaagaaagagccatgtagggattaaaacaaaaacaaaataaaaaccctcacctctwtaaattatccacgagaaaattaaggaataatttttatccaagagaatagcattttatctctgaaatatcagtattgaccttaataaacactctagccagtttgctggagtctaatccactggactataaacatcaaatgatgttatttttgctccctaccatgatttgtcaagctcctctttcccaaagggtggcagctgccttaaagatattccagcccaattcatagcttttcatttcttttttgttaagaagacttagtccagt

SEQ ID NO: 256907 - DNA, 586 bp, Homo sapiens
gctcagaaagctggtagttaagctgtaaagtayaaagagatactcagagccctggatccctggatccccaaccctactgaaggggaagtcttgattctaccctcaaaatatttgaagccagtgggaattgaaacaaattaaaagttcaagaaatctctgggcccagttgaactagactttagattaactcatcccctacactaagcagcctgagaaaagaagaatcaatcatgccttttcctggaggacaaaattatttacctcagtctctactgtgattttaacacagtgtctgaaatacagtttaaaaattatgagacacaggacaatcaagacagtgtgatgcatggtcaagagcggaaacagcaaagcactcatttatttaaaaaacaacctctaagaaaagtcaaatttgaaagtgtattagtttcctattgctgctgtaacaaacaaccatagatatagtggcttaaacaacacaaacatgatcttacagttttgagaatttgaaatcttaaacagttttcactggactcaaatcaagacattggcagggctgtgtgcctttccagaggcacaacaggag

SEQ ID NO: 256908 - DNA, 586 bp, Homo sapiens
gctcagaaagctggtagttaagctgtaaagtataaagagatactcagagccctggatccctggatccccaaccctactgaaggggaagtcttrattctaccctcaaaatatttgaagccagtgggaattgaaacaaattaaaagttcaagaaatctctgggcccagttgaactagactttagattaactcatcccctacactaagcagcctgagaaaagaagaatcaatcatgccttttcctggaggacaaaattatttacctcagtctctactgtgattttaacacagtgtctgaaatacagtttaaaaattatgagacacaggacaatcaagacagtgtgatgcatggtcaagagcggaaacagcaaagcactcatttatttaaaaaacaacctctaagaaaagtcaaatttgaaagtgtattagtttcctattgctgctgtaacaaacaaccatagatatagtggcttaaacaacacaaacatgatcttacagttttgagaatttgaaatcttaaacagttttcactggactcaaatcaagacattggcagggctgtgtgcctttccagaggcacaacaggag

SEQ ID NO: 256909 - DNA, 579 bp, Homo sapiens
tgggcccagttgaactagactttagattaactcatcccctacactaagcagcctgagaaaagaagaatcaatcatgccttttcctggaggacaaaattatttacctcagtctctactgtgattttaacacagtgtctgaaatacagtttaaaaattatgagacacaggacaatcaagacagtgtgatgcatggtcaagagcggaaacagcaaagcactcatttatttaaaaaacaacctctaagaaaagtcaaatttgaaagtgtattagtttcctattgctgctgtaacaaacaaccatagatatagtggcttaaacaacacaaacatgatcttacagttttgagartttgaaatcttaaacagttttcactggactcaaatcaagacattggcagggctgtgtgcctttccagaggcacaacaggagaatttgctctcttgcattttccagtttttacaggatatctacattcttggcacgtagccctctttctccaccttcaacaccaccaacaatggatctctctggccatttttctagtagttccatctccatctgactctcttcttttgcttc

SEQ ID NO: 256910 - DNA, 565 bp, Homo sapiens
tatttgacaaaagactcgagttcaacacattgaagtgaggagggagtgctgagaacgtctataagtcaataatgaaaagataagtaatccaagaaaaaatagggaagagactgaagagtcacttcatgaaagattacgcaataagcacaggtaaagttttcaccatcattagtcaccagggaaatgcaaattaaaacgagatacatttcatacccactagaatagcttttatctaaaagactgacaataccaaatgtcgatgagaatgtggagcaactgcaactctcagacattgctggtgaaatgtaaactgctacagtgattttttttttttgcttgtttgctttttgagacagagtctcactctgtcacccaggctggagtgcaatggcacgatcttgactcactgcaacctctgccttctgagtttaagtgattctcttgcctcagcctcccaagtacctgggattacaggtgcccaccaccacacccggctaatttttgtatttttaatagagacagtgtctcactrtgctggccaggctgtctcaaactcccgacctca

SEQ ID NO: 256911 - DNA, 567 bp, Homo sapiens
taaaatgacactgtgaatcaaagaaaatattgtttaataacagggctggcaaaactggaacacaagaaaaataaagcaggatcctaatatcattttattccaatatcctaatatttaatatcaggtatccaatgatacttgatataattttattccaaatggatacaagatctaaatgtgtaagataaatgtctataatgattaggataaaatatagaaagcataatatcactgtgacatagaggtaggaaagcacttcctaagcagtttcaaaaacacaaaacacatagcagaaaacaggtggattyaatcatatcaaaagtatttttgtatttttcagttcaatgtaagatatatggaaagagttaataggtgttaataggtgacagaatggacggaatggaagaatatatttgtggcattttatatcaacaaaaaatgtattatttataatatacaagaaacttctgcaagtcaaatggaaaatagatagcaaccctgaatttaaaatgttcaaaggatatgacttagcattttatagaaaaaaactcaaagggctaataaaca

SEQ ID NO: 256912 - DNA, 481 bp, Homo sapiens
ttttttaaaaagaagaaattgaagttcagagaaactaaacaacttgcccaaggtcacagtttgtaagaggcagtgccagaattcagacttagtatcaaaatgagtcatcacttgactgctgctgccctggaccaagccaatatcgcttctcacctggyctgttgccatagcctcatccctgacccctgtctcccaccatacccaaccaatctattccacacagcaaccagagcagccccttagaaatagaaatcaaattatgtcacttcccacctcaaaatctttcaaagctgtctcagtcccacatcactgagaattaaatccaaaatgcttgcatgtccaacaagcccccatatggcctggcccctgcctagctttccagtctcatctctgatcatgctccatctggctccttcagctcagccatattgacctcctttctgtttcttaaacactctgagaacattccagtctcagggcc

SEQ ID NO: 256913 - DNA, 546 bp, Homo sapiens
gttcctaaattcctttaacatacaatgcatctgtccacctccctttcaacatctcatgccatgtcttccatccatgatgcttcctccatcattaataaaatcctaatgagatcctggtgacctatcaaagcccagttccaatattacyaggccagatgagggctttcccttgagaatttcacccacagctacccacacagaatttcagtgctctactgcctgggatttaggaacacatcttatttccacctacctgatttgaccccttgagggcagggatactggcttagtcatctcacaaccgttcacttcacctagcatagaactctgtagacagcatgcctgagtgtttagtttttgaaatttttttttttaaatggaagcagtcatctttatctccaaatagaaggtttcaggttactaatgaaatggaccgttcatcatccatgttctactaataaggccttgcagagcgtgaacttctggaaaatttcaccagacataagcctcagaaaatcatctcttgccttagccatttgttagaaa

SEQ ID NO: 256914 - DNA, 579 bp, Homo sapiens
tagtttttgaaatttttttttttaaatggaagcagtcatctttatctccaaatagaaggtttcaggttactaatgaaatggaccgttcatcatccatgttctactaataaggccttgcagagcgtgaacttctggaaaatttcaccagacataagcctcagaaaatcatctcttgccttagccatttgttagaaatataaacattcatttccatgggttactgcagttcttgagttcctgcttaaatctctaatgttaacctagtttataggaatctatgacttggaaataaggtcagattctgataattagttgtgatccatattttgtatctgataattagcttatagccrcagtgataattgggccctacatttttgggaggtggcatattttaagaaagcaaagtgctcttcatgtgctctgatcttgtctctgctttattaaggggttgttaaagagagaactataacataggaaaaaaatgaatacatttgctctcgaggatgcaattaaaataaaatgtaaatatgactaatgaggcgattaacttttctagaaatactatgcaggaaaatc

SEQ ID NO: 256915 - DNA, 598 bp, Homo sapiens
ctaatgagtggcaaaactcgaatgtaaaaacagccatgtggttttgaaatctaagcacttcttccaacaagctttctcccaagaacacatgttcttttytacctccaaagatctgcttaaatgctgcaatctggaaagataaacataaggtgtttgctgtgtggtggtggctcaaaatcaggtgaaaatcctaggcttcctcaagggagaggcaggcccctccaggccagagtttaagcaaacaagataagcagagtaagaaaatggtttctggacactgccatccatctctggaaagtcttagataggaagcagcaggtgatgaaatggaatgaaattctgaggaaaaaaagagagatgaaaatgaaagttttacacatcactgagctgctttcctatctagaaggaaaatccaacattaataaaacagaaaaccttcaacaaaatcaaagccaattttcctgtcaagttcagaaacaacaatatataagcctgcaggcatatcccaggtgtattccataaatagtcaggtttctgagaagttgggtggaaatcaaatttgggtgaccttgtccccattaccaaaatgagggagatg

SEQ ID NO: 256916 - DNA, 490 bp, Homo sapiens
attgattccatttcacacataatgaaacaggcttatgaaggtgagctagtagcttcaccaaagcctcacagctcagggggcaggaatgaaggcagatctttggagaaggaagagaagmcagaaataagagagagaggagggagatgagggaatggggaagacagagagcagacagtcaaacgtgaaaagcaaaagtaaattcttgtcagttgagctcctgttgcgagctggctcctgggcagtcctccacacacatcccttctcttaacactcaccaccacgctgcatctggtgcctttgcagctgctgtacacttttgttaatcgtgcccaatgaaagctagtgagacagtagctgtgactctgacctctgtccccacccagctgaccagcgagtttatcctcagacacaatccagtaactccggagaaccagaattggaactagattgctttcctctaataaaatttacggtgtatacaaattcaatt

SEQ ID NO: 256917 - DNA, 643 bp, Homo sapiens
ggtgaggaatactaacatgtgcacctgtgggacattagtcactgaccttcttctctccacctcccaagcaaagaaagggcatatgagaatgcttgccaggggtgaggaatctgctcctctccataaacacaccttgtaactgttctgttaagtaatttgactatatctaacctatgcaatgcattgtctggcctgaacagattcagactattcctttctttgcacattagcaccccaggagtgttgactaaaactttagtgatgtgtttctatgataaatggcaaagaggagctagagagcacacggatagcgcagtgccatctgtttcagggtgagaattgcctcagccatatgtagggggtcattgaaagacaccaaaaaagatgagaaaagaaaggtacagctactgaaaatggctgatgtgtaaaacatgggagaatsagactgggtgaattcaaaacactatagctttagcaacttagtaaacaatgtcataaactatgtaaactcacctagtaaaatgcttggcttatagaagatggacaatgaattttactgtacagaattgtaattaatatgagagccttgatttcttaaaacgtcttaaaataaggaaagttcagatttatttaactcaaaata

SEQ ID NO: 256918 - DNA, 528 bp, Homo sapiens
gacagaactgcagatagtatggtataagtgaagtgacagcaacagggcttagtgacagcacagagcaaaggatgattaactctatttcctycactttcctggccaaagataaaataaataatctaaagttttgcttggctaaggctctacagtttcttcttttttcctaggttctgttttctggtctgttggcaggttttacccctacacaattggcataaaggatgatttacataatgaataatctcactttcaagtgaatcccttgcccttactcgcaggaaacaggttgtatctttccaggccaagataataagacagtacgaaatcatttagagttctctgaaaagcagacactaagaaggaattaggctagagatttcttggaggaaacgcttgtgaacagtaaaggggagaggaagccagagtaggctaggagaaaattcagattggggtgcaggtctgatacctttgaaaagagagtagggaggaaggagaattaagtaggataatcctcagaccagaatg

SEQ ID NO: 256919 - DNA, 573 bp, Homo sapiens
tttctaacttaatcattccttccacatttatttcttggcatgatggagttgggaaattatcagtggatgctaacaagtacaggaaaatttgatgacaaataggatgtttacataattgtaaagcgtctcctcacaaattttttactatttgcaaagagaaaaacaattttacagtggagaaggctggcaaacaccaactcaatcaaatgatcaagatttagaaaaatattgtatatattacatataagtatattaatgtatgtggagagagtgagaaaagcaaaataaatatggaattaaagattgaaagacctgacgtagcgatttttaaatcatgatctgactattatatgtgtaagtcttttgggagtccatgctgtataaataacttttttttcttattgttattctctaaaccatgcagtgtgacaactacttacatagcatttacrttgtattagatattataagcaatctagagacaatttaaagtatacaggagaatgtgaatagattatatgcaaatactacaccatttttagatcaagggacttgagcattcgcaggttttgg

SEQ ID NO: 256920 - DNA, 573 bp, Homo sapiens
tttctaacttaatcattccttccacatttatttcttggcatgatggagttgggaaattatcagtggatgctaacaagtacaggaaaatttgatgacaaataggatgtttacataattgtaaagcgtctcctcacaaattttttactatttgcaaagagaaaaacaattttacagtggagaaggctggcaaacaccaactcaatcaaatgatcaagatttagaaaaatattgtatatattacatataagtatattaatgtatgtggagagagtgagaaaagcaaaataaatatggaattaaagattgaaagacctgacgtagcgatttttaaatcatgatctgactattatatgtgtaagtcttttgggagtccatgctgtataaataacttttttttcttattgttattctctaaaccatgcagtgtgacaactacttacatagcatttacattgtattagatattataagcaatctagagacaatttaaagtatacaggagaatgtgaatagattatatgcaaatactacaccatttttagatcaagrgacttgagcattcgcaggttttgg

SEQ ID NO: 256921 - DNA, 608 bp, Homo sapiens
cctcaatagagtgttttgattatgtaagttagacagaaagtagaaggttctcttagggaaattttagtgtttttttttcatagctcctactttcaagaatgaaaaaggtaaaccagtaaaatgacactgtacttggtgctgcatctatgctgggataggcattaagagtgacctttatttaaggttctaatttgctcatgttgggcacttagaacgtcagtttgttgctttttgtgagattttggaaatggtccaattttactttttccccttgactccagactttttaacactgatctgctgctgttgaggcatatgccgttttgttaggcctcctcaagtgggagtcaggaatgctgctgtgttccagagaggttttgttcttcctgtagggctgaagcagtgcctactcaataaaaccagtcatcgtgcaaagaaatgccacctgactcaaaggcaaagccagagtgcagctwggagcaaagaaggtattttattaagaattttacataaaccataagatatattttatattactttgcgagccttcttcctgtcttgacttaattctttttgagagaattcatttcattttcatttggttggtt

SEQ ID NO: 256922 - DNA, 574 bp, Homo sapiens
ggtgtttgctgatgctttattaatttgaaatgcaagaccttagggaaaatcatacttatttcatttaaaaaatggtgtgtactgaactatctggtgaactgttttgaattacacacactgtattgtgaactacatttggttggatagtagggagcttatataataacttgaaattgagccacgtgctcctttgtgatgccatcttaattttattatttctccacaccttttagttctttagttcgttacttttaatggcaaaatctgtgaatttctttyacatcaacctatttcctgctgtgagcaattggctgtgataatttaaggagccactagaggtcattcaagcactagaaaaaaagttgtgcaagttttaagaatttgtttcaacttccggaagcaggatctgtagaggctgagcaggtacatggtaccatgtttcatctttttcctggttttttagaagtttctgctacaggatgtgtggctccattccattggtgatttttaccatttgagaggaatcagatgaatgaaaaccattatagcctctccagaaaaatgcagtcagcac

SEQ ID NO: 256923 - DNA, 574 bp, Homo sapiens
ggtgtttgctgatgctttattaatttgaaatgcaagaccttagggaaaatcatacttatttcatttaaaaaatggtgtgtactgaactatctggtgaactgttttgaattacacacactgtattgtgaactacatttggttggatagtagggagcttatataataacttgaaattgagccacgtgctcctttgtgatgccatcttaattttattatttctccacaccttttagttctttagttcgttacttttaatggcaaaatctgtgaatttcttttrcatcaacctatttcctgctgtgagcaattggctgtgataatttaaggagccactagaggtcattcaagcactagaaaaaaagttgtgcaagttttaagaatttgtttcaacttccggaagcaggatctgtagaggctgagcaggtacatggtaccatgtttcatctttttcctggttttttagaagtttctgctacaggatgtgtggctccattccattggtgatttttaccatttgagaggaatcagatgaatgaaaaccattatagcctctccagaaaaatgcagtcagcac

SEQ ID NO: 256924 - DNA, 545 bp, Homo sapiens
attaaaaaaaaaaagaagtgttgtctgggatgtggaaaacttggaaccctcatacatggctggtgggaacataaattggtgctggcaccttaaaatgtcaaacatagttatgacccagcaattccatacctacgtatatacccaagagaaatgaaaacgtatgtccatgcaaaaacatacatggatgttcacagcagcattattcataatatcccacaagtgggatattattagccatatttagttataaaatagcccaaagtggaaataacccaaatgtttataaattgatgaacggataaatataaaatgtgttctaggcaaggtgcrgtggctcatgcctgtaatgccaaaatttcggaggctgaagtgggaggattgcttgaggccaggagcttgagaccagcctgggcaatatagggagaccccatatctacaaaaaattaaaaaattagcctggtgtgatggcatgcacctgtagtcccagctactcaggaagctgcggtgggatgatcacttgagccctggaggtggaggctgtagta

SEQ ID NO: 256925 - DNA, 428 bp, Homo sapiens
tagtggttttgatttgcatttacctgatggcaaatgatgttgagtatcttttcatgtgtttattggccatttgtctgttttttttggggaaatacttattccaaaatttaacttatttttaattgggttatgtatctctttattatttakctgtaagaattttttacatattctagataggagttataaccactttcttcctttttctggattgtcttttttctttcttgatggtgtcctttgaagcagaaagattttaaattttgatatagtccaatttatcttttttcatttgtgtttttttgctccttgtgcttttggtgtaatatctaaaaaaacgttgctactccaaggtcacaaaggtttctgcctatgtttttttctatgagttttatagtttatcaatatctcttatattgagctctttt

SEQ ID NO: 256926 - DNA, 495 bp, Homo sapiens
cacagaagaaatggggcagagaggtggagcgcagccccttcccttggggcctcagagagtgcacctgttggccacaggtgaaatggtgtctgaccactggctctcggaaggggtgagggtccagagaaatcagaaggcagggaaacgaagagcataaaggggtcttggagggaccacagagaaaggtggcaaaatgggtgcagggggagtcaggctcaccatggcctccctgctctccaggtcctctgggacactcggcatgggccgaggtgcctcctccccctcactgtccagatgttctccgtgtcctgtggggggtggccagaggggtcttcagacaacccaacaagggaggtactgtgggcccacctctacctccaccctcactgtgtaaccctgagcctgcccctccccagagaggaatgagctgttgttctttatttttacttttaagaatcaagakcttgctattccgcccaggcacactcccactac

SEQ ID NO: 256927 - DNA, 533 bp, Homo sapiens
gatgtccagacctgagaggagcccagggctacccacctttaaaagtcagaggcaggaagcaagaaacaggactgccctggggggtgctgtggtcaccagcccccaggctggaagctgcctctgrcctggcacctcccctcccaagaggctgctgcccgcctcccagcccttcttggatggggtggaggtttccgtctccttcacctcgccaagcttctcctgtagctcctttacttgctgctccaactgcagtgcgttcttgttctcattgttctggacagagagaagcaatcagcagccacccactgcagctggagaccccagaacttggtgtctgcctcccatggcactgggaaggctggaggcaggttagaaaaatcactccctctctcccacagccacctggctcacaggtgcctttagaagtaacatttcatgtgagggctacactgccccattttagaggtggggaaacaaaggcccggagggctagggaggaggacaagctccccagtttgggcaacacaccggct

SEQ ID NO: 256928 - DNA, 533 bp, Homo sapiens
gatgtccagacctgagaggagcccagggctacccacctttaaaagtcagaggcaggaagcaagaaacaggactgccctggggggtgctgtggtcaccagcccccaggctggaagctgcctctgacctggyacctcccctcccaagaggctgctgcccgcctcccagcccttcttggatggggtggaggtttccgtctccttcacctcgccaagcttctcctgtagctcctttacttgctgctccaactgcagtgcgttcttgttctcattgttctggacagagagaagcaatcagcagccacccactgcagctggagaccccagaacttggtgtctgcctcccatggcactgggaaggctggaggcaggttagaaaaatcactccctctctcccacagccacctggctcacaggtgcctttagaagtaacatttcatgtgagggctacactgccccattttagaggtggggaaacaaaggcccggagggctagggaggaggacaagctccccagtttgggcaacacaccggct

SEQ ID NO: 256929 - DNA, 533 bp, Homo sapiens
gatgtccagacctgagaggagcccagggctacccacctttaaaagtcagaggcaggaagcaagaaacaggactgccctggggggtgctgtggtcaccagcccccaggctggaagctgcctctgacctggcacctcccctcccaagaggctgctgcccgcctcccagcccttcttggatggggtggaggtttccgtctccttcacctcgccaagcttctcctgtagctcctttacttgctgctccaactgcagtgcgttcttgttctcattgttctggacagagagaagcaatcagcagccacccactgcagctggagaccccagaacttggtgtctgcctcccatggcactgggaaggctggaggcaggttagaaaaatcactccctctctcccacagccacctggctcacaggtgcctttagaagtaacatttcatgtgagggctacactgccccattttagaggtggggaaacaaaggcccggagggctagggaggaggrcaagctccccagtttgggcaacacaccggct

SEQ ID NO: 256930 - DNA, 611 bp, Homo sapiens
gttccaggctgcctcactcccttacagatgttgacggtgggaaaagcctacacttcccccatgaactcaaaacrttgacagtatctctgggtggcaatgagagaatgggtttggtttggttttctcccaggcttctactttccagagagattttaacatttttttctgagttctccacctcatattctaattctccatggttctgggaccagactctccttcagtcagtggtctctgaagtgacatttgctcatcttctgtggaatagatcttgggaaactgaacttgacaccttgaatcttcctcatattatctcaaccttgggtactttgagtgccacaggataaatgtgggacatctttctgaagcatcagtttcccttgattctcttgagatcaagagaaaaaacatgaatgtacttagggatgacagtcacataggtttctaagagtataccagacctctctctgaaatgaggcttgggttgtcctctttctgataaattctgatttaagagaaaggctgccttctgccatgaggacacattgatataagagtttgagaggtactggtgcacttcttcacactaacagacgtgtgaggatgtatga

SEQ ID NO: 256931 - DNA, 582 bp, Homo sapiens
aagcacaaaccacacagttattaaaaagttccaatgaaattactgtaaaaaaataacgaggataacatgatagctaaaatcacctgaaattcctacctccaaatccctataaaaaaagggcaaaatctaggaaatgtgatactccctaaaattttttgctaacatgtttttgctgatctcaatctttagacaaagaaattgtaaatataatttcctaagtaactcaaagaagaaaaaggaaatagtatttcccaataataattctctaggtttgcataaatagacctacttggcactgaaagcactattaatattttgcttcactttggtctttcaaaaacgtccttctacacaggtttttttggttgtttttatcactaattaagttgactgatataaacccttagctggtttatttaaacctaaatatattttaaatttacttcaaatcatagattctactctagccacaatgaataattttccccaaattgagtttaacagcttaaaatataatttkttaaaaaaaaaaagtttaaggtatgtaaaaatttctgactttcaccgtaaataagattttca

SEQ ID NO: 256932 - DNA, 582 bp, Homo sapiens
aagcacaaaccacacagttattaaaaagttccaatgaaattactgtaaaaaaataacgaggataacatgatagctaaaatcacctgaaattcctacctccaaatccctataaaaaaagggcaaaatctaggaaatgtgatactccctaaaattttttgctaacatgtttttgctgatctcaatctttagacaaagaaattgtaaatataatttcctaagtaactcaaagaagaaaaaggaaatagtatttcccaataataattctctaggtttgcataaatagacctacttggcactgaaagcactattaatattttgcttcactttggtctttcaaaaacgtccttctacacaggtttttttggttgtttttatcactaattaagttgactgatataaacccttagctggtttatttaaacctaaatatattttaaatttacttcaaatcatagattctactctagccacaatgaataattttccccaaattgagtttaacagcttaaaatataatttgtwaaaaaaaaaaagtttaaggtatgtaaaaatttctgactttcaccgtaaataagattttca

SEQ ID NO: 256933 - DNA, 594 bp, Homo sapiens
tggtctttcaaaaacgtccttctacacaggtttttttggttgtttttatcactaattaagttgactgatataaacccttagctggtttatttaaacctaaatatattttaaatttacttcaaatcatagattctactctagccacaatgaataattttccccaaattgagtttaacagcttaaaatataatttgttaaaaaaaaaaagtttaaggtatgtaaaaatttctgactttcaccgtaaataagattttcattagctcaacagaaatgtaataattatcccttaagtatctccactcccacaccatctccacagtcatgaaccacctagtcccgttctcaaatgtcctggtcccgccaatagaatcccaatccttccttgttgtccccaaccctgtgcacctacacctgccataaatggtggaaattcaaccagctctatgaacggaagggaggaggccccccacscactctacaggaaaacttgcccagatctacaggaacctccccactcacaagaggacagggcagcccagactcagctgagaaatgtcaacagctggcacaaatgaattacagattatttacaat

SEQ ID NO: 256934 - DNA, 513 bp, Homo sapiens
tcagttggaaatgcagaaatcacctgtcttctgtgtcagtcatgctgggagctgcagaccggagctgttcctattgggccatcttggaatgcccccccccccttttttttttaagatggagtcttgctctgtagcccaggctggagagcagtggcatgatcttggctcattgcaagctccacctcctgggtttacascattctcctgcctcagcctcccaaatagcttggactacaggcatcttccaccacgctgtgtgtgtttttttttagtaatatgaagttaaaaccaggtaccatgaaggctcaccagattttgcttcttatgaaggtgttttttttttgttgttgttgttgttgtagaatgttgttaaatttgcattcttgcagggtggcagatgagcattggagtcttctattctgccatcttcctccaccttcttattctggcatttctgttgaaggactaattccttttatttcagaacaatattgtggctcttatcctcttcca

SEQ ID NO: 256935 - DNA, 513 bp, Homo sapiens
tcagttggaaatgcagaaatcacctgtcttctgtgtcagtcatgctgggagctgcagaccggagctgttcctattgggccatcttggaatgcccccccccccttttttttttaagatggagtcttgctctgtagcccaggctggagagcagtggcatgatcttggctcattgcaagctccacctcctgggtttacagcattctcctgcctcagcctcccaaatagcttggactacaggcatcttccaccacgctgtgtgtgtttttttttagtaatatgaagttaaaaccaggtaccatgaaggctcaccagattttgcttcttatgaaggtgttttktttttgttgttgttgttgttgtagaatgttgttaaatttgcattcttgcagggtggcagatgagcattggagtcttctattctgccatcttcctccaccttcttattctggcatttctgttgaaggactaattccttttatttcagaacaatattgtggctcttatcctcttcca

SEQ ID NO: 256936 - DNA, 513 bp, Homo sapiens
tcagttggaaatgcagaaatcacctgtcttctgtgtcagtcatgctgggagctgcagaccggagctgttcctattgggccatcttggaatgcccccccccccttttttttttaagatggagtcttgctctgtagcccaggctggagagcagtggcatgatcttggctcattgcaagctccacctcctgggtttacagcattctcctgcctcagcctcccaaatagcttggactacaggcatcttccaccacgctgtgtgtgtttttttttagtaatatgaagttaaaaccaggtaccatgaaggctcaccagattttgcttcttatgaaggtgtttttttkttgttgttgttgttgttgtagaatgttgttaaatttgcattcttgcagggtggcagatgagcattggagtcttctattctgccatcttcctccaccttcttattctggcatttctgttgaaggactaattccttttatttcagaacaatattgtggctcttatcctcttcca

SEQ ID NO: 256937 - DNA, 622 bp, Homo sapiens
tagaatgaggatttattcatttgtttaccaaatgtgtattgagcatctattatgatcatggtgctaatgggcactaagaccataggaaaggaaaagtcatagttcttatccttaagaaagccacattcagttagaaatagcaaaacaaatacatgcgtttatctacacacatacaagaaaacactgcatagcaagttcaattaagaaagaaaaataaccatacacttgaagattaattatataccattttgttataatgtttttatggaggagtcggtgctccccctgcctctggagatcattatcctaattttttaaagcagttttattgaaaacctgaaaaaatagactacacaagggatgatatagaygaatgaacacagaaggagatagccacttgggaatttactgatgaatgagatagcctttacattgtatgaatgcctctgcatgtagctcagattgctaccaatggaaggtcacaattatttaatattttggagatgacatctatattcaagagactgcttcattaaatcaggctcccataaataacaaagacatggtctgcttcagaaattgaaattgaaaactggaatatgactgtaagtggctaagagta

SEQ ID NO: 256938 - DNA, 625 bp, Homo sapiens
tttttacccatggatgctctgggtccaccagagatacagagacacaggttcaaaggagtccagacctctcatgccagagtcccaaggggctcccagaaaagatggcaagagagacaatgtttctattatcagaaaactttaaatctaatgggagaagacaaataataaaccaatgaataaaccataaaggacctgacaagtaatactgtatatttgaaatttaaacccaaattataatcaataaaactccctttcttatttgtaaggaaactaatatataattacattaaaatccttcccttatgtgagattgcattttaagtgtgaagtagggatcctgagcctctttagaccaatacttcatataactccataaacttaagtcatagttaaagggtaatcttcagaattccttagtggggatggggagtagtttaaatcaaagccgaaagaagttaactctaaactggaaaatattggtatggtggtctgttctgtgtcaacttggaaaagctgaaactacgtttcctagaatgyttatacctatgctgtatattatacagagttatattggtcaacagtgtaatttgcatagatttggatgatggaaatgaaacagtagcca

SEQ ID NO: 256939 - DNA, 525 bp, Homo sapiens
tatgccaacagtgaacaatgtgaaaaagaaaccaaaaaataatcccatttataatagccacatatgaaattaaatatctggaaaataaccaaagaaataaaagaactctataataaaaactataaaacagtggtgaaaataattaaagaggacaccaaaaaatggaaaatattcaattttcatgggtaggaagagttcatattgttaaaatatccatactacccatagcaaactatagactcaatgcaatctctatcaaaataccaataacattcttcacagaaatagaaaaaataattctaaaatttatatgaaaccacaaaagacccagaatagccaaagctatcytaagcaaaaagaacaaaagtgaaaaaatcaccattacctgacttcaaattataccacagagttgtagtaaccaaaacagcatggtactggcataaaaacagacacatagagcaatggaacagaacagaaaactcaaaaaaatccacacatctacagtgaactcattttccacaaagt

SEQ ID NO: 256940 - DNA, 558 bp, Homo sapiens
aatatcaaagataactaaacagaaagatacactgtgttcatggattggtggactcaatattgttaagatgtcagttctctccaatcaacatcctagcaaaacttttgtagaaatttatcagctgattcyaaaattagatggaaagacaatagaatgactagccaaaacaattttgagaaagaataagaatagcaatgttgaagaattaacaataactgattccaagactacagtaattaagatggtttagtgctgataaaaaatgcagacatgtaaatcaatggaaaagaagagacagtccagatgtagacccacaaattttaataaaatgaaatggagaaaggatagttttttaacaaatactgctgggataattgtaaatccatattttaaaaaagctaatcttgatccatatatcacaccatatagaaagtaatttgacagtgtctcataaagttagacatatacttataatacaacacagcaatctaggtaattacccaaacaaatgtaagcttgtgtcaaacacaaaagactatatactgaattatttcacta

SEQ ID NO: 256941 - DNA, 558 bp, Homo sapiens
aatatcaaagataactaaacagaaagatacactgtgttcatggattggtggactcaatattgttaagatgtcagttctctccaatcaacatcctagcaaaacttttgtagaaatttatcagctgattctaaaattagatggaaagacaatagaatgactagccaaaacaattttgagaaagaataagaatagcaatgttgaagaattaacaataactgattccaagactacagtaattaagatggtttagtgctgataaaaaatgcagacatgtaaatcaatggaaaagaagagasagtccagatgtagacccacaaattttaataaaatgaaatggagaaaggatagttttttaacaaatactgctgggataattgtaaatccatattttaaaaaagctaatcttgatccatatatcacaccatatagaaagtaatttgacagtgtctcataaagttagacatatacttataatacaacacagcaatctaggtaattacccaaacaaatgtaagcttgtgtcaaacacaaaagactatatactgaattatttcacta

SEQ ID NO: 256942 - DNA, 562 bp, Homo sapiens
tttttttgctatgtacctatcagcctagcagtggcattgctggtagttytatttctagttttctgaggaacctccatactgttctgcatagtggctgtactaatttacatttccaccaacagtgtacaagggttaccttttctctgcattctcaccagcatttgttattgcctggcttttgcataaaagccatcttaactggtgttatctcattgtagttttgatttgcatttctattgagcatgtttttatatgtctgtttgcaatttgtattcttttgagaaaagcctgttgacatttccttttgcccatttttaaatcagattattacatttttttctctttgagttatttgaccttcttatatattctggttagtaatcccttgtcagatagatagattgcgaatattttctaccattctatgagttgtcttttcactttgttgattccttactttgctacaagaagctttttaatttgatgtgatcccatttgtccatttttgctttgaccacctgtgctcatggggtattactcaagaaatcattgcccagtccaa

SEQ ID NO: 256943 - DNA, 562 bp, Homo sapiens
tttttttgctatgtacctatcagcctagcagtggcattgctggtagttttatttctagttttctgaggaacctccatactgttctgcatagtggctgtactaatttacatttccaccaacagtgtacaagggttaccttttctctgcattctcaccagcatttgttattgcctggcttttgcataaaagccatcttaactggtgttatctcattgtagttttgatttgcatttctattgagcatgtttttatatgtctgtttgcaatttgtattcttttgagaaaagcctgttgacatttcctttygcccatttttaaatcagattattacatttttttctctttgagttatttgaccttcttatatattctggttagtaatcccttgtcagatagatagattgcgaatattttctaccattctatgagttgtcttttcactttgttgattccttactttgctacaagaagctttttaatttgatgtgatcccatttgtccatttttgctttgaccacctgtgctcatggggtattactcaagaaatcattgcccagtccaa

SEQ ID NO: 256944 - DNA, 562 bp, Homo sapiens
tttttttgctatgtacctatcagcctagcagtggcattgctggtagttttatttctagttttctgaggaacctccatactgttctgcatagtggctgtactaatttacatttccaccaacagtgtacaagggttaccttttctctgcattctcaccagcatttgttattgcctggcttttgcataaaagccatcttaactggtgttatctcattgtagttttgatttgcatttctattgagcatgtttttatatgtctgtttgcaatttgtattcttttgagaaaagcctgttgacatttccttttgcccatttttaaatcagattattacatttttttctctttgagttatttgaccttcttatatattctggttagtaatcccttgtcagatagatagattgcgaatattttctaccattctatgagttgtcttttcactttgttgattccttactttgctacaagaagctttttaatttgatgtgatcccatttgtccatttttgctttgaccrcctgtgctcatggggtattactcaagaaatcattgcccagtccaa

SEQ ID NO: 256945 - DNA, 563 bp, Homo sapiens
ctgtacttaccgttaccattgagttttctacctttaatgatttcttattgctcactaatgtccttttctttcagattgaagaacttcctttagcatttcttgtaggacaaggctggtgctgatgaagttcctcagtttttgtttaggaaagtctttatttctctttaatgcttgaaggatattttccctggatatagtattctagggtaaaagtttttttttttttccttcagcactttaacatcattccactctctcctgggctataaggtttacactgagaagtctgctgccagatgtattgaagctcttttttatgttcttcatttttttttctcttgctgcttttagcatcctttctttatccttgascattgcgagtttgattattaaacaccttttggtagtcttcttttggttaaatctgcttgatgttgtataaccttcttatacttgaatattgatatctttctctgagtttggaaaattttctgttattcttcaaagttaataactcttatatttgcccttttgagcctattttctagatcttgtaggcatgc

SEQ ID NO: 256946 - DNA, 665 bp, Homo sapiens
gtgagtactgcctggctaccactgatgattattcagggcccagagtctctttagtcaatgggtgattaatcctgccagaactgggtcctttccttcagaagaggcagcaggttctcttctggctcagggcgtgtctagaaatgtcattttggagcaagggcctggaatgggggccttatgactctacccagtaccccattgtactgyggttgagctggtatccaagttacaagacaaagtcctctttactcttctctctcttctcctcaaatggaagtaaggggtatctcctggagcttcgagctgagctacctgggtttaggggagaggtgacacaagcattcccttggccaccccagttggtatatcgctaggtcatgtgtaccccaagtccactggctctgagcctagaacagcaccaggatttgaccaggaattctagtccttgtggcctagactgcttttcaaggttatttagggaccctgagtgttttagcccatggtggtagagctagccagaactcaggttccaaccactgggatgggcaattcccctcttgctagggcaggtctaaatgctccctccatgggcactggctactttctgcgctgtgtggcttcttctgtgacagggcagtactgagttccaatgcaaagttctacaa

SEQ ID NO: 256947 - DNA, 596 bp, Homo sapiens
tagggcaggtctaaatgctccctccatgggcactggctactttctgcgctgtgtggcttcttctgtgacagggcagtactgagttccaatgcaaagttctacaaccactatgctctcccttctccaagcacacagattctatttctgtggcacagggccattgctactgctggggcatggtggaggggtggcgtcagcaattaaagactgtctttccttctcccttcagttcttctttcactgatataatgttaaaaccaggtactgtgatcactcacctgatttttggctcttatgaaggtgctttattgggtagatggttgctcaatatggcattccttgaaggggtttggggggaacaattgctggagtattctatttggtcatcttcctacataacttttaattgtgatgcaataatttactyagataaaaaatttattcatgtaatcaataacagtaagcaattcttgtaggaacagaactaaaatatattgagaattgattgtttattggacactgtgttaagtacttttccaaataagaccgagaaagataaagcctaagagagagcctaatcttatgattggacaaca

SEQ ID NO: 256948 - DNA, 548 bp, Homo sapiens
tgtagtccacgcatgtctgtgcttcaggcctcagctccatggccactccataggggtcactcatcagtcaccagtgccactgccactgcaagtgagcccacacgccagacccagtgccaagagaaaccccctcagccacaacttcccctatgagagcaaaagaaccaggagaaccttagcagccattaattactgcttaagaactgagcaaccctcactgccactgtgaatagccacagtgttagctgcgaaggattcctgcagtcttcatcaacacaacccycagctgacagagctacacagacactacacatctggaaccctcaatggtgccagaactgctgcaccctacccagcaagtgcctttatattcccccttcttgtaggggaagatctttccacagcaaaactaacttacagagtctgaaagaggcaactgctccaccaagtgaatagacatcaacataaaacaataagaaacatgaaaaaaacaagaagacataacaccaaaagcacacaacaatctcccagtagctgactccaaagaa

SEQ ID NO: 256949 - DNA, 568 bp, Homo sapiens
aatactattcaatcttaaaaaggaaggaaaccctgtcatttgtgacaacatggatggccccagaggacattaagttaagtgaaataaggcaagcacagaagaacaaataccatatgwtctcatttatatgtagaacttttagaagttgaacttacagaaacagagagaaaatggtcactacatgagtctgatggggttatatggattgaggagatattggtcaaaagacaaaaaatttcagttaggaagaataagtttaagagatctattattcattatggtgactacagttaataacaatatattgtatatttgaaaattgctaagtatatttgaagtgttctcaccataaaaaataattatatgaggtactacgatgttaaatagctttgtttggccattctatgatgtatacatatattaaaacatcacattatacaccacaagtatatatacatatttttttcacttgtctattaaaataaataatttttttaaaaaagttaagttctttgcttttcacccaggagtcttgtgtcttctgccagcatccctgaaaccaggtcag

SEQ ID NO: 256950 - DNA, 540 bp, Homo sapiens
aaccacagaattgttcactttaaatgggtgaattgtgtattatatactccaatgatgccatattaggtaggacatcatcatatttggatatttggccaaatgtgaaattagaaaaawaatcattaggaaaacacttgcttctattatacaatgtatacaaagtctaatgagaaaatttttgtttattttcttctttttttaaaaaattaagaatacactgggaacataaaaagcagaattacaggaaagttagatctgtctttgttagcagaactgtttgcccccgtttaacacaatacctagaccccatccacaatgactgttactattaccccaactcagtctactcagtatcttcaccttgtttgtctgcttgttttgtttattgatttacttactagtttttctatctatctatctatctggatatatatatatatatatacacacacacatatatatatgtatatatatatatgtatatataatttgaattgtttgactttcttccatgcattagtgataatcttctaaatgcag

SEQ ID NO: 256951 - DNA, 592 bp, Homo sapiens
tctggtgcatccttagggatacagtcctgcttaaaatgagaaatatacagggactattattgtattctagcacgagttactttataaaacgagatagctaaacagtattatatggtggccagttgttacttgttctgttatctgtactctgagttgtgcacatctgaagcatatgaacagagtaactccctacactacctgaatcttctagaatacttctgtgtcatgtagaagagtaaaatgtctggccatccctgtaagcaagaatatgaaattataacagtatggtatctgttttgccacctgttgtcttggcattgatcattagaatgctacttcccagggacctcaatccaaaaccttttgcagttctgcttctgttggaggaaataatcactgtccgaaaggatagactaaggaagatgctaatcgctcaagtggatagatttttcaagcttcattcctgtattataataccagatagctaaacaataagataacataataactggtagggcaagccccctcataaatcgcaattacattggrtttacagattaatttgtagagaactgacttatttatgctattg

SEQ ID NO: 256952 - DNA, 535 bp, Homo sapiens
atatccttatattgtctgttggtaatataaggatagaaatgttagaatgtcrgaaatgttaatgagccatctgctgtcagctttttagataattatgctggtagactatttttctctgttgttttgaaataatgatttggtagtttagggagtactctctttaaaattctgtattttcactgtgatgtatacacaggtggatttgttttctttattcttcatgagatccatgtcttcagtttgggaaattctcagcattagctcttgaaatactgtcattctctcctcttgggatttctttttttctcttttggagacagagccttgctctgttgcccaggctggagtggcagtggcacgatcttggctcactgcaacctccgcctcccaggttcaagcgattctcattcctcagcctccccagtagctgagattacaggcatgcagcaccacacctggctaatttttgtatttttagtagagccggggtttcgctatgttggccaggctggtctcctggcctcaagtgatcctc

SEQ ID NO: 256953 - DNA, 404 bp, Homo sapiens
ctaactttccttctcccttactagtgcgtatgtggtaatgcttgtccaggagttgccagtgtgtctttactaatcatggttgcacctggcactcacaaaacctcctggaggtacacatatttccctgtcataaagagcttccctctccccctcttcacatctctccttaccccacaccaccccagcacccctgcccatacctagcagccaggggctacacttccatcaggtaataacagstcaggcaagctcatagtccatggctatgtaggctattgcaggctggcttcctccatcccaactccagatgtgtttctagtagtgcccagagcttcctggaaacccagattgggatatcttcagatcccatgcaagcagagcggtgtgctcatctgaataggttc

SEQ ID NO: 256954 - DNA, 542 bp, Homo sapiens
gccctgtcttggaactcactcctgttctccaccccgagaaagagagaggtggtgagatgctcagataatttatgtctgtctctctcttgtagaatttctggcatgttttgycctggccggtgaccttctcagtcagacatgcctatttataacaatctgtccctggctctacttcctcccctttgccacaagggattggctcgtgcattcttgaatgctgcaagtggccaaggctgggcctgtgggagggcatggggcagggaggggagccaggcacgctggccagagggcctccctggggacaggctgcaccagctcagttctccttcaggctctgcagggtcacatccaggttcacctttggtccgctactgggagggcgatagagagagtgcttatagcctggtgaaggccagggctgcctcaggggctgtctgtgccatagtcaccagtcctcattgctgggccatagctggagcagaaagacgcccagagaggctgtgctgaggggctccgaacacatcttgatgcctggagacttc

SEQ ID NO: 256955 - DNA, 542 bp, Homo sapiens
gccctgtcttggaactcactcctgttctccaccccgagaaagagagaggtggtgagatgctcagataatttatgtctgtctctctcttgtagaatttctggcatgttttgtcctggccggtgaccttctcagtcagacatgcctatttataacaatctgtccctggctctacttcctcccctttgccacaagggattggctcgtgcattcttgaatgctgcaagtggccaaggctgggcctgtgggagggcatggggcagggaggggagccaggcacgctggccagagggcctccctggggacaggctgcaccagctcagttctccttcaggctctgcagggtcacatccaggttcacctttggtccgctactgggagggcgatagagagagygcttatagcctggtgaaggccagggctgcctcaggggctgtctgtgccatagtcaccagtcctcattgctgggccatagctggagcagaaagacgcccagagaggctgtgctgaggggctccgaacacatcttgatgcctggagacttc

SEQ ID NO: 256956 - DNA, 564 bp, Homo sapiens
tcgcccacagtaagaagagacttagggtgcagctctaccccacatccctgggatagggagccagagggtcacagagcatcactaccaaacaggttgtcttggacctcagrgaactgtcagagggaagaattatgattttaaagcttgtccacatgtggacccctcactggcctgggtgtctttggagcagcagagctggttctaattggcaaggccagcctaggtggtgccctgtcctctcaaagtgacaaagcagggctttcctggggccaatgcctgtggcaactcctcctgacacacctttcccagtttgccaggggtgtagcctaggatcagaagctagttccaccctcctctgcaccttggtttctctttctataaaatgcggaataatctccacttttctgtccctactatccagtaggagtcggggaggacaagagggcatgagctggtgtttctcacgggactttgatgccttaatagaggtgatatttggataaaaatataagagcaagcatggactccggtgcttcctaagaaaaggactctagaggagaaact

SEQ ID NO: 256957 - DNA, 621 bp, Homo sapiens
atgggttttaatcctctagataatgaaatttcaggaaggggatggaaggcaattgtgttcctcttcggccatctggtttctaggtggatgagggaacttcagagaacagccttgtcctgtgttttgggagagacaagggattgagaaacaggaaggtaggaggggtagggaaggtcaagagaccttgaggcttcttctttagtccagcacgtcaaagcaccatattggggagtatcattttctgagccccaacagaggttgacacacctgggcctaagtcccagctcccccattcattagcaaggagttgaacccctcagaacgtgagttctgtctgtgcagtgaaggcatggggtgcccacatggtgggtgtagtgaggctgagtgsgataaggcccagcacagtgcctgccatgaaggaggcaccccatcattttcataatgatgatttcattgctcttttacacgcaattaaaactcactaattcagacctatcagagagggcagtcaatggctggaaagtccacattaaaaaataattttaaaataatgtagttttattgctttaaaatatattactcggtccaggctaataaagtgttgcatagcaagcccttggg

SEQ ID NO: 256958 - DNA, 588 bp, Homo sapiens
actggcgacacataagtggacaaaacagaagaagacccctgctgccatgtgtgagcataattactccatccttccactggtcaatccatctgtccatgggcagtagcccagcctgagagccctgcgaggccatccctgacccagacaaactatgagatggctgtgacttttaattgtgaggttaaaagagaatcacatcctgttagctcttgaagggagcatagccattttctcatctgatcccaaggagctggagcccatgggcagatggtgagttgcctaaagtcatgcaagaagcatgagataatgtcaaggctggaactcaacatggtcccagaactttaaagcttaactttagatcctaatgaacaccccgtacaacactttctcttacaagtcaaggagtcacacagttcctgcccttaagaaaagccaacttccttgaatagggaagacacagatgcatgaaagattagacctacatcctgttcatataagcggtctcatttcattctcacayagccctgagagtcgagcattatgatcccatttcacaggtgaggagactgagggcatgaaggtaaataa

SEQ ID NO: 256959 - DNA, 539 bp, Homo sapiens
gggtgtgggaagtatgatcttcctgctgtggcatcaatggcccttcagctccccgcagccttcctaagttctgcaggggaataggagaaaacaattttggagttggggcacccaactagtggcagaaatagtcccacttctgccactcaattgttgtgcgacctagggagtggctgaatccttttgaacctcgcttttcttatctgcaaaatggggagagcaacaaccacctctcaaggttgtttcaggatcaaggcagataacatatgtgaaagtgctttgcaaatcacaacgtatggtataaacatgaagcatcattactttccagtgttcttaacttctttgtgtagttttccctgccaaaggcttctgtcttgagctcgcatggcaatttgctcacagagccatgaacgtattgtattgtgccgaacttatattttaacatgtctrctggcttgcactgtttgtgagtgcttggagggcagggaccacacctatgtgatcttggcacctcttgccttcagccagtgtctgaagta

SEQ ID NO: 256960 - DNA, 620 bp, Homo sapiens
gagacttaactatccttctgtcaacaatttatagaatgaccagacagaaaaccagtaaggatatagaagtcatcaccgttaacaatggattctcatcacatttatagaacacctcacccaataaaagcagaatacacattgttttcaagkgcccacagaacataaaccaagatagactgtatcctaggccataaaataactctcaaatttataacaatagaaatcacacagagtattttcaccaaccaaaatggaatcaaactagaaatcactaacagaaagataacagaaaaatttccaaacacttggaaactaaaaaacatgctttcaaataatccacagatcaaagaagtctcaaaggaagctttaaaaatacatagagctgaattaaaatgaaaatagaacatataaaaatttgtgggacacagctaaaatgctgaggagaaaatttataacactacgtacatacattagaaaaaaaggaaaagtctgaagtcaataatctaagctcccgcctaagagtttcaaaaaagatgagtaaaataaaatcaaagcaagtagaagaaagataataataaaaataagagcaaaactgatgacattgaaaacaggaaaacaat

SEQ ID NO: 256961 - DNA, 620 bp, Homo sapiens
gagacttaactatccttctgtcaacaatttatagaatgaccagacagaaaaccagtaaggatatagaagtcatcaccgttaacaatggattctcatcacatttatagaacacctcacccaataaaagcagaatacacattgttttcaagggcccacagaacataaaccaagatagactgtatcctaggccataaaataactctcaaatttataacaatagaaatcacacagagtattttcaccaaccaaaatggaatcaaactagaaatcactaacagaaagataacagaaaaatttccaaacacttggaaactaaaaaacatgctttcaaataatccacagatcaaagaagtctcaaaggaagctttaaaaatacatagagctgaattaaaatgaaaatagaacatataaaaatttgtgggacacagctaaaatgctgaggagaaaatttataacactacrtacatacattagaaaaaaaggaaaagtctgaagtcaataatctaagctcccgcctaagagtttcaaaaaagatgagtaaaataaaatcaaagcaagtagaagaaagataataataaaaataagagcaaaactgatgacattgaaaacaggaaaacaat

SEQ ID NO: 256962 - DNA, 484 bp, Homo sapiens
gtgtttctttttatgtgtcagttggaacccgttatttgaacttcacagctatttgggaacacagaaaggattctctgggcccgagttggaaaatggaaccatctagaacatgtcacatttgcttctacctcctgtttttttttttttttttcttcctctatgccttgaggtcttgatatctcccaccctcactcctattctatctccactcctctgagttaggtctaccctaactttttagaccatggacrttcacagccaggagggaccttagggagcctacaaacttttcttctacaatctatagcttcttgttttaaagttagagaaactgaagcctaagagaggaaagcaatttttttttaatgaaagtaacatctgtttcaggtctattaggtacaggtttcttacatgtgttctctcattttatcctcaaaataactgagttaggaatcacattgccatttttcagatgatgaaatgg

SEQ ID NO: 256963 - DNA, 606 bp, Homo sapiens
gactatggggcttgcatctgatgaaggtaatatctgataayaaagttgtagaggttagtacggagaggaagatcattgtcagttgtatatgatgaggagcatatagcttatggcatactataccaatatggggtatgtgatatacaacaaatgtggtgagaaaatcctatctctgccctaccaaggtgcaccaggtgtatgcctgagaggcaccaggaatggatggaagttgtcatctgcccttgacttcaggtctagtgagcagtgagcaaggccaaaggaaatcagtgcagctcatctgctgggttgtactgaatgtgaatagatactcatttgaagcaaaacacctaattaaaaaaaaaaaaaagcaaatatacactacaaaacatggaaagggagccacaattctgcaggctccaaatctcaccagaccttttaaattaatctactctaagaaaaatttagaaaaccattgatttttttgtagagtataagaagccatgtcctctactgaaatgaattggaaagtaatcaacataatgagatttaaaggacacaaaaatgaaacttaaaaagcacaaaacatgaacagaagaaactagaaag

SEQ ID NO: 256964 - DNA, 471 bp, Homo sapiens
aaaactcagttaaagtgggattcgaaatcaggtctgcctgaatctagaatcaggctcacagaacttgtcctccagtcctgatctgcctggcttgacattggaggtttggtacctacttttgttattagaattatagtgcctgctatggcaactagaacccactcccataatttaagttgtgaatagcactttgaaggtcttgggggtaatgtaaagaacgtgggagaaaagaaatattttgttagaaggatcttaaaaattgtattggtcatgtaagtcctataccattcaaatcaggcaatatagttaaaaaaatttccctcwatctgcttcccctgctgtcagcatataatcaagaatgggcagaaaattttctggtgtcattttatccagaggcgttatctcatatcatacctgatatctaagagaacactacctgataattcctaacatctctgaaaaaataaatgt

SEQ ID NO: 256965 - DNA, 557 bp, Homo sapiens
gaatatggtgagtatattcatttcccagggctgccatacaaaataccacaatcttggtggcttaaaacaatagaagtttattctctcagttctggaggctggaaatataaaatcaaggtgtacgcatggccagactctccctgaacactctagagttctttcttgccggtttcagcttctagyagccacaggcctcctttggcttgttattgtgtaactccaatctctgcctttgttttcacaaggccttcttctttctgtcttctatatatctcagtatccaagtgttcctcttctttatcttataaagacaacagtcattccaagtagggcctgccctaatctagaatgacttcatcttaacttgattacatctgaaaagatcttgtttccaaataagctcagattcacaggtaccagtgattaggacttgaacatatttttgaggaggacacaattcaatccactacagggaggtaatccagacattagtaactgtagaaagcagctaccaccttaaggctaagggaacatagaggaaggggtattactatcag

SEQ ID NO: 256966 - DNA, 580 bp, Homo sapiens
aaagacactggagaacttgggaccagaaatattgttgcagttgatagctctgtgcacaaatgttctctcttcctatggtcacatggtaggattacamcttccagcccacttttaagttagacatggccaataaaatgtgagaagtaacatatgtcatgcttcagtaaaatctttgagtcagtgtcttatttatcactttctacttcccccatcctgatattcacggaagtgtgtcacatccactcctccatcagcctgggtctctgggtgactgcaattacgcagctcatctatgcagtatacgtagaatgaatgagaaaaaggaagactatgttaagtgctgaaattttgtgattgctttgctgcacaactaagtctattgtgacaaatacacatttaacttgttttacatgtttaaaaatcactttggttcagttaatactgtgagtaatgtacctatctgtctacatctcctccaaactccactaatatgagagcaaagatataacattgaacatgagtggaagtggagaaaacagcagatgacaagacatacaaatgaatgaagagtgaacaaagg

SEQ ID NO: 256967 - DNA, 593 bp, Homo sapiens
ccattaacatagcagaatcttggaaagatctagaagttggaggaccagctaccaaggaaggtgggggtggggcatgaggctatttctatattgtaaacaagtcatcctatttcctttgagccaggcagttacctcttctttattccagcaaagaataggacatatgctctgtggataaactgaagcacaagagctctgaacttgacaacaccaggcatcgcagaccctgagggagagctgctacactaaaaccaggaggattcagtaaaggcctgtagtgaaatcctcacttcccttctacccattcactcatatcctccaatccattttcaagtgcatccttcttagccatgataaacaaggaaagttccattatgagaaatattcacagacacacagacacacacacacacacacacaccacacacacacaccacacacacatgaacattmatttccagactgaaaaggcaaaaggcttaccaagtattgaactcaatgaataaaaaaggcccacacaatgacacacggtcttaaaatttcagagcattggggtaaacagattactctaagagacaccataggatgggaat

SEQ ID NO: 256968 - DNA, 637 bp, Homo sapiens
ttttgttaacaaagcacatcctgcatagccgtagatcccttaaaccttgattctatacaatgcatgtttttgcgagttccaggttggggcaaagagattggagcaaagttacagattaacagcatctcagggcaaagcaattgtttagggtacaggtcaaaatggaatttcttatgtcttccctttttacacagacacagtaacagtctgatctctctttcttttccctacaattgaataattaggtatttattgtagtcttcacagtcttggcttgtttgtatccgttcttcctgggaagaatttccaggtatctgaaaaaacttagatgttgtrattgtagctgtatctgcattagggagcgccccaagcccagtaacactgtggttcttgcaggctcatagaagtaatgccttgatggtcttagacaagatctcgaagaattctcaggcttacaagtaaaaaactcttgttctctgctcttagtttctctcaaacaaatagagtctctctctctctgttccaagctgcctagagttgggggtggagtgacaaaaacacccctgtggccgccaccactaggattgcactggttcagacctaatctatcccagcactggatctcacctaaggtctg

SEQ ID NO: 256969 - DNA, 553 bp, Homo sapiens
atcttagtatcctaaattcattgccagtataaaatagaggtgttttagaattaaatagacacatcagtcccagcagtgccrtataaggcattctgatctttaccatgtgcagtgagtgggcatctattatttgatctgcccagcccaccttttgcagaaattgcccttcctgctgacccacacagctgtggaaagaactgccatgttctatctgcatagtttaggactgggcatctaatacaaaatgaaccaaaaacccattgtccaggaattttggtactatttgtgagagaaaaatggaggtgattatgtgtgagatattggaactctagcaggttttccattttgtgtactgcaaatgagaaaaagctggtctactgagaaagagagagaatatgaagctgacaacgagagaagaaaaaagatataggaagtcttgatggtgttagagtctctggttttagttcattgttgcatttctgtcctttgagagtataatatgcttctctattcttccaataaattaagctagtagagttggttttgttcattg

SEQ ID NO: 256970 - DNA, 588 bp, Homo sapiens
acaaacaaccagtacgtcttaacggattcctataaaaagaattctactttgataaaatcaattttgygaaaagcagaaagttttcatatagtaaattagaatagtgattcttatactttttttagagcattggactactttagaaatcagatgaaagctttagaaaatctgaccagattaatgcacatttgcatacattttgatggataattttagagagatcacaggtgcccttggatctgagaaattacttttaagtagttttatatttctttagatagttcaacactctctctttgaccactgaagacaaggaaaaggggagatttgtagggacctgaatcagacttaagcaagtaactaacaatgtaactaatacatccttcactgttttggtcccactgtatctggatgaagttcacattccttgggtggcacacaaaaccatttatattctagttattgcttatctacccagctaatcttcttttagtcctatatacatatcttcttctttggccacaaaaacctgaaaaatggaagctgttttatacctttttgcctttataatgttgttacttctgtttt

SEQ ID NO: 256971 - DNA, 588 bp, Homo sapiens
acaaacaaccagtacgtcttaacggattcctataaaaagaattctactttgataaaatcaattttgtgaaaagcagaaagttttcatatagtaaattagaatagtgattcttatactttttttagagcattggactactttagaaatcagatgaaagctttagaaaatctgaccagattaatgcacatttgcatacattttgatggataattttagagagatcacaggtgcccttggatctgagaaattacttttaagtagttttatatttctttagatagttcaacactctctctttgaccactgaagacaaggaaaaggggagatttgtagggacctgaatcagacttaagcaagtaactaacaatgtaactaatacatccttcactgttttggtcccactgtatctggatgaagttcacattccttgggtggcacacaaaaccatttatattctagttmttgcttatctacccagctaatcttcttttagtcctatatacatatcttcttctttggccacaaaaacctgaaaaatggaagctgttttatacctttttgcctttataatgttgttacttctgtttt

SEQ ID NO: 256972 - DNA, 588 bp, Homo sapiens
aaataagttcaagggaaggtactatgcctggacatgcacgtaggccagatttatgcttttctccacccaaacatcccagtagagtaaagagtaacagagcagcgttgctgccaacatgtctcacctcctgccatagggtggtttttctcctatctcagmattgaacaaatgtacaatcgggttttataccgaaacattccattcccaagagtaggcaggagacagtggccttcctctatctcaactgcaagaggctttcctcttttattaatcctccccagcacagacccttcacgggtgtcaggctgggggtcggtcaggtctttctcatcccatgaggccatatttcagactatcacatggggagaaaccttggacaatacccggcttccaggggagaggtccctgcagcttttcacagtgcattgcgcccctggtttatcaagactagagaatggcaatgattttaccaagaatactgcttgtaaacattttgttaacaaggcacatcctgcacagccctagatcccttaaacattgattccatacaacatatgtttttgtgagctcaaagttggggcaaagaga

SEQ ID NO: 256973 - DNA, 596 bp, Homo sapiens
agtaaaacaggaaaatgtggactagaaggataaaagctaagctctgactagtatttctctctggaccttagaaagagaacaagagacttcaactctcatttcatttcttgctcacacctgtaatcctagcactttaggtggctgaggtgggcagatcacctatggtcaggagattgagaccagcctgaccaacacggcgaaaccccatctgtaccaaaaatacaaaaattagccgggcatggtggcatgtgcctgtagtcccagctacatgggaggctgaagcagaagaatcgcttgaacccgggaggtggaggttgcagtgagctgaactccagcctgggcgacagagcaagactctgtctcaaaaataaagaaataaaataaaatattgtaagcagaatatgtgactctatgttgagtacatgagtgtgtactatactattcctgagctatgtttcatgttttcagtctcaccatttgtgaaacccaagcaggcactcaccagatggtatgaaaggctggaacctggaggtcccacagtcttggggctttggagaggagcytaatagagcaaaccagcaaggatcggaactaag

SEQ ID NO: 256974 - DNA, 598 bp, Homo sapiens
ttgtttttgtgtttgttttaggcactgtgagaagtataaagaagcataatatactgttgttctggtcataagtctgcaaataagaatacagggcattatgaaagcaaatattaaatagatgttttagaaaacttataagtgtccgttgatcccaaatattgagactatgaggtaacagttatttttgccatttgaattctatatagtttaaaaaatataatacaaagtcaaagtcaaaaacaaaatactgtttacaacatatgtgacagaaaaataattaactcctaaatgcataaaggcttttccaaatcaatgggaaaaagatgaacagcctyatttcaataattggcaatagacctagacaggaaatagaagaaataaaaaggaacaacagatatgtgggggtatattcaacctgcaggataataaaagaaatgtaaacagtaatgagacattattttttacaaatcaaattaggaatgttttataatggagatacccagtgctggcaggtgtttagaaaaaatactcatatgatactgtgttttttaaagtatacttattgaaagccttaaaagtatatgtactttggcataag

SEQ ID NO: 256975 - DNA, 561 bp, Homo sapiens
cttctccctgtatccccacatggcagaaagagagcaagctggcttgctggcctctccttacaaaggtattggtatggtttgaatgtgtttcccaaagttcatgtgttggaagcttaatccctaatgcaacaacagccctgggagatgggacctaataggaggcgatgaggtcatagggctctgccttcttgaacgcattaatgtcattatmtcaggagtgagttcgttaccaagagagtggatttgctgtaaaaagcgggtttatctctcacccttgcctcctcttgcccttctgccttccaccacagaatgatgcagcaagaaggccctttcaagatgcctgccactgaccttgcacttctcacccctgtgaactgaagaaataaaatatctgttctttataaatgacccaatctcagatattctattatagcagcccaaaatagacttagacaggcactaattgcactcatgaggactccaccctcgtgaccaaatcccacaggcccagccttctgatgttatcacgttggcattagggtttcaacacaggaactttga

SEQ ID NO: 256976 - DNA, 618 bp, Homo sapiens
gtgatatttgaaagtaacaagatactcttagatggaatttattggataatcagtgcaccctgtctcaagatgagttttgctgctaaaatctagaggaaggcaggaaggaaaaaagccagatagtagtccattttgaacccggtcagtctttccatgtcaattgctcttactctttcgtgctcattcattagtttgtgagccttttgtggtctttgacttgaatgaccacaaaaaagtaatgttttccccagaaaatgtatccataaaagtttacctattataggtgttcgtagacctccacacacatgcatcagagcacagtgatctctttaaagggctcaaggatttcaggtcctctgtcgttcacatctgaagcatcatattcctgtgtgggtagctgaggtaaagattagggagtgagagtgagsgagggcagtaaattttggagcctctgtctcagtagctcttctgtgtacctttacctcctctccctctctgctccttattcctaccctctttcctattccttctttctcgcaggaagttctccccactttcccactgcagagtactcctcgtgggaggaagaggtaatgtgccctcccatcaccttattct

SEQ ID NO: 256977 - DNA, 618 bp, Homo sapiens
gtgatatttgaaagtaacaagatactcttagatggaatttattggataatcagtgcaccctgtctcaagatgagttttgctgctaaaatctagaggaaggcaggaaggaaaaaagccagatagtagtccattttgaacccggtcagtctttccatgtcaattgctcttactctttcgtgctcattcattagtttgtgagccttttgtggtctttgacttgaatgaccacaaaaaagtaatgttttccccagaaaatgtatccataaaagtttacctattataggtgttcgtagacctccacacacatgcatcagagcacagtgatctctttaaagggctcaaggatttcaggtcctctgtcgttcacatctgaagcatcatattcctgtgtgggtagctgaggtaaagattagggagtgagagtgagggagggcagtaaattttggagcctctgtctcagtagctcttctgtgtacctttacctcctctccctctctgcyccttattcctaccctctttcctattccttctttctcgcaggaagttctccccactttcccactgcagagtactcctcgtgggaggaagaggtaatgtgccctcccatcaccttattct

SEQ ID NO: 256978 - DNA, 555 bp, Homo sapiens
ctatcttgctcctcagaaccagtggggaagaagagggaaggcaaagaaagaaactgagcatagtaaacacagcatttttttgtaggctcttatttaaaatgtgtgtgtgtgtgtgtwtgtgtgtgtttctgagtaagtattgactgggaaaaagagagaagtcaatcaaaagtatactgtgcaattgagagaggctggcccaagatttaaaacttcctgtgggtaatctaactgtgagtagataggaatcggccatatgacgaaatgagatcaataggaaatgtgctttttgaggaaattttattttagtaccaaatgttgccagtgacaatcttcagttaagaagtaagttattctgacctaaaattcttatctctgccactttggtttaaaaacaaaaacccttatatacatggaatagttatattttaattaagcatttattttagttgttttcatccattcaagcaaaatgaataagcagcatttttcattgcacttaaaaatgtaaaatacctgcatgccactaatctgtaacattttaccagttcagat

SEQ ID NO: 256979 - DNA, 619 bp, Homo sapiens
tcatcaatgtgtgacaaggatgccctcacctactacccagcaaaatcaaaatggttatgccccctatgtctcatatcacccttgcacagaacagtggaagggaaaaactaatttccaccacagccacattcactagaatgtggtttggacttctccagaatctcatttctacgtaacgggcactgaagtggctcagcagccagagctgcccatcattcttccatttctacacctattttccagaaacaacaaccagatggcttcttgaagtgctactgcctttttctgagttttattgtctttgctttaagcagcataatgaattagaaagtacgtgatctttggtagtctgacacacataagttcaaagtcagctttcacattttgttagctatgtgactttgagtaagatacacaatttccctgctgcaattggaaagttccagatttagcraataaaaatacatgatgcctagttaaatttaaatttcagataaataatgtattatcttttatatatatcttttatatatattcatatatatgaatatgtatcatataataactggggcatacatatagtaaattttttatcatttatttgaaatttaatttagtg

SEQ ID NO: 256980 - DNA, 494 bp, Homo sapiens
gggcctgtcagcaattttatccttagaatgtaatttatgaaagctcagagagagttattctctgattgaggaaggcatagtaatatttctagtatgtattatgcatcaggtatgatggttggcatttgcatatatattctctgatcctaacaaaattggtcatacgagcagctgccaccttaccacatgtgctcacggtttgctattcaggttcctcttcgttttcaatccttgggaattttctttaggataggatggacagtgatatcatttgactgtgtccccacccaaatctcatcttgaattgtagttcccataatcctgtgtcgcgggagggacccagtgggaggtaattgaattgtgggggcgattaccctcatgctgttctcatgatagtgagtgctcataagatctgatggttatataaggggcttttccccsctttttctcattctcctcttcctgccaccatgtgaagaaggaggtgtttgctt

SEQ ID NO: 256981 - DNA, 484 bp, Homo sapiens
ctgaggaaggagcaggagctgcagtgttgctgctggcagtgtccctgctttctgcagcctcagcactgctgagtgcaacaccttgcacttgagtgcaacacctgctccagcctcctctagttctcttcttgtcaacggggttccaattctgcagtacagattgggggatacctttagggacctccaaacctctcagcwtccacagccactctgattccttcataattgctctcaacactctgagaactgtttcaaacccagtccattaaaaaccattctgtatgctggcccagttcctctcagcaaagcccagtgtggtctgatccaaatccaagcactactcctgtctgctctgccttgggaagttgccctgtactgccttggcccagagagcaacactcaggaactcagcaactacctaccagactttggccatgtgtgagactggggcagactgtctagagagaggagtacaaaggcagtc

SEQ ID NO: 256982 - DNA, 525 bp, Homo sapiens
gtcactaacattcccatcggtataaaaacaatgtgtagaaaaaaattccattttaacatgcaagaagtggcatgctttacaacacaatagaatctccttcactaagtagagaatggaaatagatcttcgtgctttgctgttgctgtttcccacagaaatcctttcctacgctgtcattaccttgtgcttctagctctgcctacctcaccaactcagggtccccttttatctgttytgtgagcccttctaaaggaacatgactaatgatacaactcctctagtaaatgtggcaattttacatgctttctccaccacatgttatcccttaacactgagctgtattaagcttgatcaaatattgaattattatatttagatacctcagtcaataaatatagacatagatgcttggagaaaagtctactacataaattcacttgccatcagcctcatcaaggaaaaaaagctgaaaaagcccatgttaataacagtaagtaggctgaaactaactagaacagggctgtt

SEQ ID NO: 256983 - DNA, 571 bp, Homo sapiens
ttatgcacactcttgaatatctgtgagctgatccttctcaatcttgttttcttctcctgccgcttaaatgctgctgctccagaggaatcagtcctcggtccttggctttttttgctagagagaagaggtcccagacttcacaaggcagagcaggtatgcagtgcacagatacacgtggagttgtgcggcacacaggcaatcacatgaccattagaagggcactgacgttgctcctctctactcatcgctgctacttggtattgcaggaccagattttctaattttcaagaccatgtaaaatacttagtttaaaaaatattgccataatgctttggctgtccagattcaacctgaaaaacccaacctaggatgacatctgctttatattctcacaaaataatcttatccaggtccatgacactcatcactatccctagtcagagtgctcccacatctctgtctttagcccatatctgagctctcrcctgtatatattaacaaagtcattgagccctctgcacaagacactgggacaccaaagatgactgatatactaggttggtgcaaaagt

SEQ ID NO: 256984 - DNA, 571 bp, Homo sapiens
ttatgcacactcttgaatatctgtgagctgatccttctcaatcttgttttcttctcctgccgcttaaatgctgctgctccagaggaatcagtcctcggtccttggctttttttgctagagagaagaggtcccagacttcacaaggcagagcaggtatgcagtgcacagatacacgtggagttgtgcggcacacaggcaatcacatgaccattagaagggcactgacgttgctcctctctactcatcgctgctacttggtattgcaggaccagattttctaattttcaagaccatgtaaaatacttagtttaaaaaatattgccataatgctttggctgtccagattcaacctgaaaaacccaacctaggatgacatctgctttatattctcacaaaataatcttatccaggtccatgacactcatcactatccctagtcagagtgctcccacatctctgtctttagcccatatctgagctctcacctgtatatattaacaargtcattgagccctctgcacaagacactgggacaccaaagatgactgatatactaggttggtgcaaaagt

SEQ ID NO: 256985 - DNA, 590 bp, Homo sapiens
tcacaaattgttgaaaaattagagagtaggacttgggtttggaatctgttttttaagtgaagatcttcagaactggcagtattcatagatctgtgataatttaatggtggcagtgttgttaccagttctttygacaaggcctttgatcgctatactgcacttccaaatagacattgtaggtgtaaaaatttaaacagaagagaaaataaaaaatagatcttatttcaagcaaaatgaaaatttaaataacgaatgactggggcttcaaatcatttgtcccaattaaggtagcatttgtattcaattattaacaacactgagtgattttaatgtaacatattaacaattaaattatcttactggcctgtctccaaagaaagtacttgggggcatttatcactcatgaagttttctggtgcctgttatcacaggttctcaccatttctgaagatgatggcttttgtaaaatcaccatggtcaaaatcttttctcgagtacttgctccctgatgctggaaggacttggagatttataagtagggaataatgctaccactgagatattttaattagttttatcacacatttgca

SEQ ID NO: 256986 - DNA, 479 bp, Homo sapiens
ggattttcacttacaaattgagagatgtccttgaagaaaacacctttgactaaggaaatatggtgtgaaattcaccacacatttcttcataagcggataacatactgtcttgcctaaactttaataatctgattttgataaataccaaactataaataaaaacatagttytgctttatcacatgaaagcataaaataacaagcaattctcatttatcctgagtatactattagctattataatttctgagaatttcaagattttctgttaatataccagattttttttctgaatattcctttattctttctgtagtatacaaacactcctaaatgcctcctataataaattcatggtatttgcacattttttgttttgcttcctagtgattacttctgcccaaggcaagctattttttcttttatttgttatgttagatttttttttttttttttttttttttttttttttttgagacg

SEQ ID NO: 256987 - DNA, 479 bp, Homo sapiens
ggattttcacttacaaattgagagatgtccttgaagaaaacacctttgactaaggaaatatggtgtgaaattcaccacacatttcttcataagcggataacatactgtcttgcctaaactttaataatctgattttgataaataccaaactataaataaaaacatagttctgctttatcacatgaaagcataaaataacaagcaattytcatttatcctgagtatactattagctattataatttctgagaatttcaagattttctgttaatataccagattttttttctgaatattcctttattctttctgtagtatacaaacactcctaaatgcctcctataataaattcatggtatttgcacattttttgttttgcttcctagtgattacttctgcccaaggcaagctattttttcttttatttgttatgttagatttttttttttttttttttttttttttttttttttgagacg

SEQ ID NO: 256988 - DNA, 577 bp, Homo sapiens
taaacgtgtaagatttgggggtgtactgaacaaaattatgaccccagtgcctgtccattcctgtgatttccagtttctctctcttacgcattcccacaactctccatcatatcagagtaccattactatccctgcatctacagcctgtgattgccaacaggaatgccttacgtatcaattatgaaagaaataatacaattacttattctataacctgagcccaacagaattaaatcataagcackgcatatttagacttaccccccctcccaagtttcagaagtgaaatttagcaacttttccttattactaatgggacctgaacttaaaatagctgtctaaacgcagttaacaaactatacagctcagcaataatctaagttggttattttgaacctttgtggttttcattttcctaagtttgaggttttattcaatgtcaggtcatacattagaaactttgttatgatttaccccataaaatttgaatttttggaaaaagggaaatccacagtaaaaatctgaaaaagcaaaagccaacatgaaaaatgtctaagtaatgcttttgttattttat

SEQ ID NO: 256989 - DNA, 539 bp, Homo sapiens
agccacccagccagcgacacttcctcttgcatctaggtggggccatgtgactggttctcatcagtggagtgtaagtattagagatgtgtgtcacttaccagcaaaggtggataggaggagactgtcttctctattctgtctctctctttctgcctgaacactgaagactccaagatatctagtaagcagcacagttccaatatggaaggaacttgggttcccagaaagctcaaaaatatctaaattggatgttatgtgagttaaaataaacytttattatgttaagctcctgaaattgtggggtttattttttatacgcattgcaaaaacctaactaacacattgatttttgctagatatatccatggacaaagtagtaccatccagatgatagtagctgctaataaatgtggcatcgagtataccaattttactattacatttttcctctatcatgttcccaggatcccagtcactggctaggctacaccaagtgcagctaaaattcagaagttcttacggccaatctaagcatgtta

SEQ ID NO: 256990 - DNA, 539 bp, Homo sapiens
agccacccagccagcgacacttcctcttgcatctaggtggggccatgtgactggttctcatcagtggagtgtaagtattagagatgtgtgtcacttaccagcaaaggtggataggaggagactgtcttctctattctgtctctctctttctgcctgaacactgaagactccaagatatctagtaagcagcacagttccaatatggaaggaacttgggttcccagaaagctcaaaaatatctaaattggatgttatgtgagttaaaataaacctttattatgttaagctcctgaaattgtggggtttattttttatacrcattgcaaaaacctaactaacacattgatttttgctagatatatccatggacaaagtagtaccatccagatgatagtagctgctaataaatgtggcatcgagtataccaattttactattacatttttcctctatcatgttcccaggatcccagtcactggctaggctacaccaagtgcagctaaaattcagaagttcttacggccaatctaagcatgtta

SEQ ID NO: 256991 - DNA, 599 bp, Homo sapiens
aagaagtattttaatttttgaaatgttaaaaatgtgaaataaaaagttcatcttagagtcaatgaaattaattacttgacagagaacatggaagatgcaacaaatatattatggaaatgtaacacaaggaaaatgaaaggaattctaaagcagaagatttcttttatgatattcacttattgttctcaatatcaactgcttatatagttatatacttttaaaagtataaagcatattccgacttttagtaatttacattgactattatgtaaatctaatggttgaaataatacagtattttatatgcctagcagctggtaaccccagctccctccagagagagaactaggaaatggaatacagcataagaaatggaatttttactgtgtcatttagtaccttttgaactgagtaccatgcacatgcattaattatgcaaatactttgaaaaaaacattaaagcagcctctataactaaaaaattagggtaggaggggatgaagcaagacaaatagaaggctccaccaatcgtccacccrcccaggaagaacaccaagataacaactatctccaaacaaaaaccaccatcataagaacca

SEQ ID NO: 256992 - DNA, 533 bp, Homo sapiens
agctaagggagtgcttgttccacctctccagcaaccccaggctgcacaggtcatgactccgaaagagacttcctccttcttcttgagtagagaagagggaagagaaaaaaggactttgtctttcacctgtataccagctcagccacagcaggatagggtaccagtgagagttgtgaggcccactttccaggytctacttgtggatgacatttctagacatattctgggccagaagagaacctacaggcttgaagggaaggagccagtcctggcaagatcatcaactgctaaataaagagcccttgggtcctgaataaccaataatgataaccagaaagtacaccatgggccttgagtaagactctgttattagctgtcttcaggtgagactaagcacattctcagctatggtgttatgaggagaatctctgcttgagaaatgcagaaagaaaagtaaagagcactttgtctatagggaactttgtcttgcacattaggtattcgttcagccacatagaaacagagcaccaagc

SEQ ID NO: 256993 - DNA, 619 bp, Homo sapiens
tcagtgtgtcacccaggctggttgtgaacttctaagctcaagagatcatcttgccttggcctcccaaagtgttaggattacaggcatgagccaccatgcctgaccaagccactatattttttggatctctttgttatggcagcttaagcctctagccaatacactgataccatttataagaaagaaaacttagttacacctaataaaagactttcagctacttttttattcctctaactacaccataaatatagtcttcaaggtaagttattagttttctattgctttgtaactaatttccgcaagcttaaaacaacaaccatttaatagctcacagtttaggtaggtgagaaatctgtgcatggtatagttaggttctctgcttaagtattacaagaccaaaattaaggtgtcagctaggctgagctctcacctggagctcagagtacctgtccaagcacattcctggtattggcagaattcaatttctcgtggctatkagtctgttttcttgctgtctgccagccaggagttgctttcaccttctaggggacagtccaaggtactttacatgtgtcccccttcattttcaagacagcagtagcatgttaaatccccc

SEQ ID NO: 256994 - DNA, 633 bp, Homo sapiens
atatcatttccctcaaatatatgatcccactatgcagggttttgtcatggctaaaccgcttagtccaaattattcactaggaatataaaaagtggttggagacctcaaagatatttatctcaatattttccttctcttcttatattacctgaggactttcatcttctgcacacctttttattttgttttgttagaactgaaaagtgcttttatctggacatcaaagataccacttcacctagaacaggttatagctaaatcataacatctctttgaagatcyttcagtagtgatcagagatcaaaaataaagtgtaatggactttgatacttaaacagcaaaacattttaagggtcaaggatttttcaacactgatattacacacactaagaatttggatgtgtatgttttgtgcagaagagaagggagtaatacccatcaattattagaaagttagtccattgtgcaactcttgactgctgtatcttccaatccaatcatttgtttaattgatgttagttacatttttagggtgcttaaatgattcaagtatatatttgttaacttccaagtggaccacttgtctggtttgagttttggtggaacaattttaaacatattatctattataat

SEQ ID NO: 256995 - DNA, 598 bp, Homo sapiens
tgttcccagagtagtcattcaataaaggctggttgaatgaatgaataaatatatctcattaaatcaagcaaactgattttttaaaacatgcattccaaaattctaattacttaagtgtgttgtcccttgaaattgtcaccttggggactctaggcttattccaattatgctattactcaaaaatatttagactctttaaagccccagtttatgagccacacaagaaattagtcttattaccttatatagtttacttttcactataaccatcatttttcaatgtgattatctattttctttattgaaatttgttccaaatggcttttagctcttttctcaagtcaaacccatcctgaaaggatgaagagttatgacaattccgtagagaattaacaayagcaaaaaatctctcattacagtcaccagaattgaagggagccccagtaacattctgtaacatctcttgcttctcaagaggaatttggctaatcacatttgacagtgttttgttttgccagcacttgctgatttaattaatttttaaaatcaagtgccactggtatagttaggacactcagcacaacaggaggcaaagcca

SEQ ID NO: 256996 - DNA, 534 bp, Homo sapiens
gtatcctaagtaagagtcaatgaactatatatgaggcctgggagtaaaatctttggctttagctgggaggttttctcattagcagttttatctagttacttttggatgagaaaagttaaaattaacaacaacaaaaaatccagtttatgaatacatttcgtatctttctacctggaaacgtggttatcatatcattttctaatactacaaaggtatcagaattagtattatgtggcattctttcaaagaaagtgaaaagaacactcgagttcaactaaatttccatttctaatgtctaaaggctataacatctaaaaatgttaccacagaaagaatayacagttgacccctgaacaacacagggttagaggcaccaaagtccacagttgaaaatccacacataacttttgactcctcaaaaacttaattactagtaacctactgttgactagaagccttatcaataacataaacagtcaataaacgcatatgttgtaatgtatactgtaatcttacagtaaagtaagcataaga

SEQ ID NO: 256997 - DNA, 584 bp, Homo sapiens
accagcaaaagaatgtcatattctattttcaaaaatcatttgtgaagtgcccataatgcatgtactatatactatgttaagttctaaggataaagagattactaagacacaacaatggttctaaaatgtgagtatgtaccagatatatcttaggattttataactatatagaagcttagcaccatccatacccagtgtatcagaatttctgargcacaactttgatttttttttcaagttccacttgtgagtctgaagcacattgaagcttgagagtcatttctctggaagatgttccatacagtgtagagataaggcaagtactatgaataaaacagaaacacaaagagggaagcatcaagttctacctagagtgatcatagagatcttctctaaaggggttaaccttgaagctgagttttagcagataagaaatttaccaagcagataagcaggcagtggtaaaccatatgcaaaagagtcaacacacctggaaatatatgaaggcgtgagaacagcatgctatgtttggggaactgcaagtagctaggtaaggatgaagggcacagatgcagaaagcccag

SEQ ID NO: 256998 - DNA, 621 bp, Homo sapiens
tagccttaagtcaagtcaaaatattgatttttattatagacgatcatggtagctaactaatgtttattcattgcttataagccrggtattgttttaatattttttttcacacattgcttctaattatctccaaaaccctgcccagtagatattattgatcctactttacaggtgaggaaactgaggcctaatgatattaagcctgtacccagggggatatagctagtatgcaacacaggcaagatctgaatctacatccattagactccaaagacagccctttctatcacaccacattacttcttaggagcatgcaaaagcttaatagactactactagctgtgaaatgcacttttagttggattgtctgagctgaagcacaaacttactaattacgtgggcttggacatgttgcttaacctctccttgtctcagtctctttctagagctgtttataaagattaaatcagttaatattttttaaatgcttagaaaagtgcctggcacatagtaagtattcaacagatgtcaattattagtaatactattaaatatttttcccaatcttcaatattcttggagtcatcaagaatgttttaggtagctgaatgtgtaaagaat

SEQ ID NO: 256999 - DNA, 574 bp, Homo sapiens
ctgtttaaattgtttagaattaatctaactctatattaagacttacccagaaagcggtgaatcctatttcaaaacttcctaagactgacttagaaaataaactacctacttgcccaaaatttcagataaaacttatcttaatattacaagcaattgctttgcttttaggataccctcttgcagctcattttgtattctttttttgttttttaacttttaggtacaggtgtacatgggcaggtttatcatatagatgaattgtgtgtcacgggggtttggtgtacagattattttgtgaccccagtaataagcatagtactggatgggtagtttttccatcctttccttcctccaccctccaccttaagtaggtcctggtgtctgttgttgccttctttgtgtcctgtgtactcaatgtttagctcccacttataagtgagaacatgttgtgtttgtttttttgttcctgtattagtttgcttagaataatggcckccagctccatctatgttgctgcaaaggacatgatctcatcatttctcattctttcaatttgtacttttaaaataatgtg

SEQ ID NO: 257000 - DNA, 586 bp, Homo sapiens
tttatgaaattaatcccagtgacaaattgacattataatcctctgtttctctccttccatggggtgcaagttctggtaaaatattaagtcagtcaaaaatacacttctcttgtaacaattttatataagccatatgttatgcattttccttgccatttttattttatggtagcagtttcaactaatggctaaaaaagattaaaaagacatcagtaaattacattctgactcctaaataatctaatttttaaaaagcaacaaattatattcctttgcctaacatgttagagagtaaaagcaattatgcagcagttaygttagtcagtttgtgttattcaaacacaagtatatctagctccttgtacttaacatatcttaaatgcaataatcatcaaatgattcctttggatgtattatctgatttaataacttttctacttaacaccttattacattccatgaaacaatgtatgtaccaaatttatgagttagctagtgggtaggagccacctcttaatccatgtttgaatatctattccctagcccagtataaggatcgctatagaaactctaatggtgagtgggt

SEQ ID NO: 257001 - DNA, 526 bp, Homo sapiens
attttttaattacacattcaagaggtacatatgcaggtttgttacatgattgtattgtataatactggtgtttgggcttctagtgaacctatyacccaaatagtgaacatagtacccaataagtagtttttcagccctcactcctctttcttcctacatatttttggagttcctgttgtctgttgttcccacctatatgaccatgtgtagctattatattgctcccacttataagtgagaacatgtggtatgtggttttctgtttcttcattagttcacttaagataattgcctctagctgcatccgtgttgctgcaaagaacatggtttcattctttttatggctgcacagtattccatgtaatatatgtacacattttccttatccaattcactgctgatggacacttaggttgattccatgcctttgctattgtaaacagtgctgtgataaacatataaatgcaggtttttttaaatatataatttatttttccttcgggtagatggccagtagtaagattgt

SEQ ID NO: 257002 - DNA, 556 bp, Homo sapiens
gcaacttatctgtcctcccttgctagaacgctgccgttctgtgtagggagtgggagttggaccctgctctttgtgtaagctgtgcttgccaatgtcagagcaggttgtggtgtatatttgtgggggatttggtggtggagtaactcaagggcagagaaaccacatgcaaggcagtggcaccacaagtgtacaatcagtatggcacctgatacctaatttcaaacctgaggggagtgcaaccatactcgtgcaaaccggccaccaagttctctgtctccaggaagttcccaaatcaccacagatagcattgccctgagtcacaaggtcagaggggttccccaacagtctggctgtccggagattgtcagagaggtgagaggagagagaagtgctctcaccaagtctttccatggggtytgagttctttgggagtcaatctatgccggattcttgctgctttccttgtttgtgccccagcttcttcccatggattctccaagaggtcctggctctcttccctcactttcccatttagaacttgtctattcacagtcac

SEQ ID NO: 257003 - DNA, 633 bp, Homo sapiens
ttgtctcctgcaactttaatgaattccattatcaattctaacagtttgggatggcatttaggggtgtgtgtgtgtgtgtgtgtgtgtgtgtgtatttgaatgcctttcatttctttctcttgcctaattgccttggctaggacttctagtactaygttgaataggggtgttgaaagtgggtatccttgtcttgtttctgatcttagaggaaaagccttcaaattttcagtgttgagcatgatgttagctatggacttgtcatatatggtgtttactgtgttgagaaacagtccttatataactaatttgttgagagcttttatcacaaaagaatgttgaattttgtcaaatgcttttcatatatccattgagattataaggtggtttttggccttgattctttgaatatggtgagccacatttattgatatgccatatcgtttttagactcttatctcactctttatacaaaaatcaactcaaaatggattaaagacttaagcataagacctgaaattgtaaaactaccagaagaaaaaaatcaaggaaagctctgtgacattggtcttggaagtgatttctttgataagaccccaaaagcagaggcaacaaaagcaaaaatagacaaatggg

SEQ ID NO: 257004 - DNA, 625 bp, Homo sapiens
gcagcttgtctctaggaaattttacctttttttgctgtttttcaagtttgtggatagccagattttttaaaaaatctttttgaattacagtaaattgattagtaaaaataataacaattcttaagctctcaaaaggctttagatagaaatactgggattgagcaaaatctaaacagatttctttgggccttcaaggcattttgcattcttgtgggtccacctccttgggaggtgaaaacaaattaaaataatgagttccttcattattttaataatgaagggtcaaggaagggrtttttttcccccaaagggaatatacttacccaggagagcattactccttaaattatgtggggataaactagagggattcaaaagaatgctgtttaaaaatcagtgtctctttccagaataatattaaaacccgaggcttcttaggaagtttcaatttttggatcctagttattggctcacatattcttttacttgaaattagaagctattcactgtgtgtatgagcctgtgtatgcacttcctccgttttgctggttgtagaatgagtgctctcattttacttaaaatgagttaattttttaatgatgtgtgcttcttctatctttgggga

SEQ ID NO: 257005 - DNA, 375 bp, Homo sapiens
taggctgacaaagccataatggggcttcttggtggagaaattcattccctatgatgcatttaaggagatgatgccaaaaagtccattagttcagatggtgtatggggacccagcataagcagasgacatgagaaatagtactttatattttatccagactatcctaaagataagtggctggcataacccattaggctaccttcccccacctcttaactattaaatgacatgttgtaccaatgcctgctctttgagaaaacctcctgctttctttatgtacactgaacatggcagcctcctttattccacccacaaacaaaacagtgtgttctgagaaacgatggaaatcctgaggtgactctaatccacatacac

SEQ ID NO: 257006 - DNA, 543 bp, Homo sapiens
gtggatgataaggcagctcctatccaagcctagcaggagggaatgtgctcagggaacattttcaagaaggtgaggctggaaatattgagggaaaattactactgaagaatggaatcacttgttgacatagctcgaaatctgaagggaaaacaagcaagcaggctaacaaaacaaaaacaaacaagaaagtccaacagtcaaaaagcaatgacaggtagctggttggcaaccaaggaagaggaaactctagtagttgaaagtgaaaaatatgggagatacgggggccaggtgcaatgactcacacctgtaatcccaacactttgggaggccgaggtggcggatcacctaaggtcaggagttcgagactagcctgaccaatatgcagaaaccccatctctactaaaaatacaaaattagccaggcatcgtggcrcatgcttgtaatcccagctactcaggacgctgaggcaggagaattgcttgaacctgggaggtggaggttacagtgagctgagattgcgccatagcactccagcctgggcaa

SEQ ID NO: 257007 - DNA, 588 bp, Homo sapiens
ttgatgttagcctttgtcactctccattgacttccattactcaaagttacaggcacagaatttcaattgtcttgtacttccaggttgtatgggcacggagccatctctctcacctcagcaggaacagagaaacttgagattagaagatgcgaagagtacagtgccatcatgaggttgtatgattttagggctgtgcctatatacatcatttgttataagtttttaagtaaagtgaaaggcaaagagtcctagaaatagctgtggccaagagaccatgagaagagtaataagaagcatctaatataagtggatataaacttaaagaggaatggaaatcctcttagtaggcaaaattatgagtaacatctgtttttttcctataattttttagcctggrtttatatagtacacattctatacaatgtaaatgcccagagaggacatctactgtggaaaagttttcactaggacaagataattcatactgttgatgtcagcatctttctcgagctctattgatatttgttctgtaggccaatgtacaaagtatccttcgctataaggctgatccagatattgtcatagcag

SEQ ID NO: 257008 - DNA, 412 bp, Homo sapiens
attaaaaaacaaagaattcacaagaaagtctgatgttaaagaggactgtgggaaagaataccaacatttgccctgagtatattccaggactactttaatattaggagattaagatagattgcaagaaaaaatggctctacaatctcaatgcttaaaataacaagcacatagtttttattcatgttacatgtctaagcaggtcagcagagagatgggaaaaggtgggggattttcacattraaaagtggctttttctgccactcagaaacctggcctgatggagcagccactgtctcaaacattggcagtaaacataccacagagaatgagcgaactgtagagtctcaatctagtgattaagagtttgtctcttatcacattttctcacaatcttctggttagaaatattcac

SEQ ID NO: 257009 - DNA, 502 bp, Homo sapiens
tttactttattcaacatttagtgtctatgatttagtggtggtttggcacagggaacaggagaacaaaaaataatgaaaatatgatgccagtaataccatccatcaatctgaaatatagagtactggcaggtctgcattcaagatcaaaagtcttagtctggaacagcccagtatgctcgaccaaataccagtatttcagagttctttcatctaaattagaaaaagaaatgtcatctgtctataacatgcaccctatggtgatctgcttcccaaagaaaaatgaagcagtccaaagttaaagggacaaacacgtcattttggargaatgctgttgcttattttcatttcccaaaagaagtaatggaatgaagggtgagtgataataattttcattgaaaagtaaaacttgctttgttgttcacattctttgtggttgttgggataaaaatatgaggacatttacaatagggcagagcttttttttctggatgtaatttgattg

SEQ ID NO: 257010 - DNA, 502 bp, Homo sapiens
tttactttattcaacatttagtgtctatgatttagtggtggtttggcacagggaacaggagaacaaaaaataatgaaaatatgatgccagtaataccatccatcaatctgaaatatagagtactggcaggtctgcattcaagatcaaaagtcttagtctggaacagcccagtatgctcgaccaaataccagtatttcagagttctttcatctaaattagaaaaagaaatgtcatctgtctataacatgcaccctatggtgatctgcttcccaaagaaaaatgaagcagtccaaagttaaagggacaaacacgtcattttggaggaatgctgttgcttattttcatttcccaaaagaagtaatggaatgaarggtgagtgataataattttcattgaaaagtaaaacttgctttgttgttcacattctttgtggttgttgggataaaaatatgaggacatttacaatagggcagagcttttttttctggatgtaatttgattg

SEQ ID NO: 257011 - DNA, 621 bp, Homo sapiens
gcagtccaaagttaaagggacaaacacgtcattttggaggaatgctgttgcttattttcatttcccaaaagaagtaatggaatgaagggtgagtgataataattttcattgaaaagtaaaacttgctttgttgttcacattctttgtggttgttgggataaaaatatgaggacatttacaatarggcagagcttttttttctggatgtaatttgattgcattgcatatatagtatattaaaaatgtgtactgcaccatgcctagtttttggctttgcaaaaatgtagtagttgtcatcaagtagtatacagtgcttgaggaatgcaaagaacatgcacaggtgtttctatttcagctaagctaactcagataaacatggagcagagaagaaaacattttttgataaaaacaattaattggtttaatgagatgttgatattggcaaggtattgttctaagattttcatatagatatcctcatttaatcctcaccacaaccctttcaggaatgtcttattattaaacctgtgacctggctgagaattctgaagcagagacagtgagttttccaaatttccaaagctagtaaggggcactgattatacgccaaaaacttcctaa

SEQ ID NO: 257012 - DNA, 621 bp, Homo sapiens
gcagtccaaagttaaagggacaaacacgtcattttggaggaatgctgttgcttattttcatttcccaaaagaagtaatggaatgaagggtgagtgataataattttcattgaaaagtaaaacttgctttgttgttcacattctttgtggttgttgggataaaaatatgaggacatttacaatagggcagagcttttttttctggatgtaatttgattgcattgcatatatagtatattaaaaatgtgtactgcaccatgcctagtttttggctttgcaaaaatrtagtagttgtcatcaagtagtatacagtgcttgaggaatgcaaagaacatgcacaggtgtttctatttcagctaagctaactcagataaacatggagcagagaagaaaacattttttgataaaaacaattaattggtttaatgagatgttgatattggcaaggtattgttctaagattttcatatagatatcctcatttaatcctcaccacaaccctttcaggaatgtcttattattaaacctgtgacctggctgagaattctgaagcagagacagtgagttttccaaatttccaaagctagtaaggggcactgattatacgccaaaaacttcctaa

SEQ ID NO: 257013 - DNA, 363 bp, Homo sapiens
ctctttacttagtgcttagtgcttagtgctggtcttataggtcatagttacacatatttctgccatgcctccattactttcttagatgctgtcatcagaacacccaaccctcattttctggccatttgcattcactttggcttgtgcaagtgcctcaccatatctttcatccacttgagatatccagcatcattaaaccaaagtgaaaatacccaatagtagcaacacatgtgtgkcaatttactgaatcatgaacaataagtaaatgaatgaatgactaaataactgaaggcatttttgcataagatgaattttttagctaaagaaattccttactctttgattaattttgcctgaatttcc

SEQ ID NO: 257014 - DNA, 643 bp, Homo sapiens
cttattatttatttgtagtgataacatccaaaatcctctcttcttgctacattgaaatatatcatacattatcatttgtatttttacattaatattgtcataattatctaagaaactgccaaagatgaaataagataaggagttgctgatgatttaaataaagactcctawgagatttccaaatatacttttgaaatattaggaaatgctaagaagttgggttttgaataatggtcaaaaatgtgtggcctcttctatcagcatgctaagtctcaccatattttagcttattcagcagatcttgataatataatttggagagcacattgacaagttcactttttaaaatatctatcaaattacaagtgttttctttttttaactcagagattacacttctggaatttatacaatttataccttcatgtacttttgagatcatattacaagttaatttcacagcattatgtattaaaacaaaatagtagaagtaatttaaatgtctatcattatggttactggttaagctgcatttacaacatggaaaacatttttaagtgtttattgtagaaaaaaaaagctagtcccttatattccatcaaaaattatctcttggtaaaacttgaattgaatttacagtcca

SEQ ID NO: 257015 - DNA, 625 bp, Homo sapiens
tctttcctgtgcttcagggatgagctgaggcatacagacaactgagggtctgaattatgatacctagtcatcttatgaactaaaggataaaccatgttagattgagaaaagaagagtcaaattttagagtaaaagtcaagtcaagtggtcagcagttttgattccatgatggagacagctagaataagcatgtctctcattctcacaacaacaacaaaatatgctgggcaaacgatttttttaaaaactgtatcagagaactgaagtcacaaggacatatgactgacccaaaatctggaaagaaatwgacacaggcaatgaaaagcagaacttaatatttgctgaccattgccactgaacgccattcaagtcataggaagaaccaactagacaattttatgaattgctaaagactaaatgtagagtgacaagaacatgtaaagctactatgggccacaggcttatgacgttcacactctttcaggcttttctttcaggtgctcaccaggaacatgtgggaggaactcaagaatgctttcccacggtactttaaggggcagaaacaggagtcactgctgactctgctcagttccaaacccacgttgttttctatgaaacaaaacac

SEQ ID NO: 257016 - DNA, 625 bp, Homo sapiens
tctttcctgtgcttcagggatgagctgaggcatacagacaactgagggtctgaattatgatacctagtcatcttatgaactaaaggataaaccatgttagattgagaaaagaagagtcaaattttagagtaaaagtcaagtcaagtggtcagcagttttgattccatgatggagacagctagaataagcatgtctctcattctcacaacaacaacaaaatatgctgggcaaacgatttttttaaaaactgtatcagagaactgaagtcacaaggacatatgactgacccaaaatctggaaagaaattgacacaggcaatgaaaagcagaacttaatatttgctgaccattgccactgaacgccattcaagtcataggaagaaccaactagacaattttatgaattgctaaagactaaatgtagagtgacaagaacatgtaaagctactatgggccacaggcttatgacgttcacactctttcaggcttttctttcaggtgctcrccaggaacatgtgggaggaactcaagaatgctttcccacggtactttaaggggcagaaacaggagtcactgctgactctgctcagttccaaacccacgttgttttctatgaaacaaaacac

SEQ ID NO: 257017 - DNA, 578 bp, Homo sapiens
tgcatgaaaattctcaaatgccaacgacacctctccccagttctgtaagtgttcccgaatttattttgttctttacagcaatctcttctgctggaaaaacaaacaaccctttgaatcagactcatgtttgtttacaccccatggagagctggagaatagatagattaaatcaaaggctgactttgcacagaaagcataaaagaaaaagaaaatgcttctacagtcagaagcastgtcatgtttagtggttctccatgagatgtgtggttcgctttcttgtttgccttctttattattgcctagaatatcatctatccccaaaactcagccatatctacctacacttcatggccagatcctctctttcaggaagtctccactgacatttttttcaatatataatactgatttccctttctggtataacctcagtgaagagaatgtctcctgatagggcacactgacttcactatgttcagtaattcaaaattggatctcactgaagcctcaggcattgatcttctgcagtgctcattggtattcagcatgcactaattgctatggctatttagtggtct

SEQ ID NO: 257018 - DNA, 590 bp, Homo sapiens
atctatccccaaaactcagccatatctacctacacttcatggccagatcctctctttcaggaagtctccactgacatttttttcaatatataatactgatttccctttctggtataacctcagtgaagagaatgtctcctgatagggcacactgacttcactatgttcagtaattcaaaattggatctcactgaagcctcargcattgatcttctgcagtgctcattggtattcagcatgcactaattgctatggctatttagtggtctccatgggtatagctctgactgtctaagtgatggcaagaaggaaatctgcagagaggaccagctatccttacactctatttgttgcttcctatgtagtctctccttctcacattttattacaatatataactttttgcttttcacattatctaagttctttcgcaggcatcaactcattgaaactgcataatagctaactacggagttcctcatcattgtcattgtcatcagaaactaaggctctgttagtgagacagagcacctcgctgaagcatgctctgctggacagtggtgaaggcaactctgtaccaaagatataaa

SEQ ID NO: 257019 - DNA, 590 bp, Homo sapiens
atctatccccaaaactcagccatatctacctacacttcatggccagatcctctctttcaggaagtctccactgacatttttttcaatatataatactgatttccctttctggtataacctcagtgaagagaatgtctcctgatagggcacactgacttcactatgttcagtaattcaaaattggatctcactgaagcctcaggcattgatcttctgcagtgctcattggtattcagcatgcactaattgctatggctatttagtggtctccatgggtatagctctgactgtctaagtgatggcaagaaggaaatctgcagagaggaccagctatccttacactctatttgttgcttcctatgtagtctctccttctcacattttattacaatatataactttttgcttttcacattatctaagttctttcgcaggcatcaactcattgaaactgcataatagctaactacggagttcctcatcattgtcattgtcatcagaaactaargctctgttagtgagacagagcacctcgctgaagcatgctctgctggacagtggtgaaggcaactctgtaccaaagatataaa

SEQ ID NO: 257020 - DNA, 607 bp, Homo sapiens
ttggtcattcagaacaattcataatattttgctaccttagtctactcaaatgatagattttaagtgagaaaatatcacaactaattataggatataayatcaagtttactggaatgaagcgagtatatacataaagttaaaacttttttaaaatattagaatctcaaaacaaatttactgtgttaactaatgaatgtttctgccatctccatcttattaagagagccactgaaaatttgtgaaggtttgtcatatagtcaagatatctttaatatgttttattaatgcatcatctcattactaatgtagaaataaattgcaaagaaaaaaatgttagacttgagtagagccttgggaatcgtctggtttagcactatcatcttagaaatgggcttttatggtgacaggggaagtccccatctttaaatatttttgaagaggctcagcattcaggatctctgaagcagagaacagatccaaatccatttcccttagtaaggctttggatttttcaggagggccaagcatcagacacctatttagaacagaataagaaatagccccattaaaataggagtgtgtgacatccacctcaccctacacattt

SEQ ID NO: 257021 - DNA, 607 bp, Homo sapiens
ttggtcattcagaacaattcataatattttgctaccttagtctactcaaatgatagattttaagtgagaaaatatcacaactaattataggatataatatcaagtttactggaatgaagcgagtatatacataaagttaaaacttttttaaaatattagaatctcaaaacaaatttactgtgttaactaatgaatgtttctgccatctccatcttattaagagagccactgaaaatttgtgaaggtttgtcatatagtcaagatatctttaatatgttttattaatgcatcatctcattactaatgtagaaataaattgcaaagaaaaaaatgttagacttgagtagagccttgggaatcgtctggtttagcactatcatcttagaaatgggcttttatggtgacaggggaagtccccatctttaaatatttttgaagaggctcagcattcaggatctctgaagcagagaacagatccaaatccatttcccttagtaaggctttggatttttcaggagggccaagcatcagacacctatttagaayagaataagaaatagccccattaaaataggagtgtgtgacatccacctcaccctacacattt

SEQ ID NO: 257022 - DNA, 462 bp, Homo sapiens
cgatgagccatctactttaatgccttgatgtccttaacccatcacaactcttagtttctttatttttcctacctctgtgatggcttcttctcaatcgactcaattgtctgcttcatcttccactgtgcaccactcaagtggaagcactacctggagtttttttgtcaggctgctgaacctctcagtaaacaaattgctaagagtgatgttatgtactttaaagactgatattgccacccataggctgatgcctctttaaatatacattcatatyggacttttaacattagttacaaaaattttgaccagactgcctactcacattatgttcttattggtgtcttattgaggcttcaaattcattgatcaaaatctgaattaattatactcccccaagatttttcatcgtcttttaatctgtattccagagccattatacatgcaggtatcaaactaaaaacc

SEQ ID NO: 257023 - DNA, 462 bp, Homo sapiens
cgatgagccatctactttaatgccttgatgtccttaacccatcacaactcttagtttctttatttttcctacctctgtgatggcttcttctcaatcgactcaattgtctgcttcatcttccactgtgcaccactcaagtggaagcactacctggagtttttttgtcaggctgctgaacctctcagtaaacaaattgctaagagtgatgttatgtactttaaagactgatattgccacccataggctgatgcctctttaaatatacattcatattggacttttaacattagttacaaaaattttgaccagactgcctactcacattatgttcttattggtgtcttattgaggcttcaaattcattratcaaaatctgaattaattatactcccccaagatttttcatcgtcttttaatctgtattccagagccattatacatgcaggtatcaaactaaaaacc

SEQ ID NO: 257024 - DNA, 638 bp, Homo sapiens
ccataatttaagttaatagtgtttatgacaatatgtaataaataccataaaaagtataagtcattctgggtgtgttagctcattaaaacaaaygcttgctagattctgtagcaagctttagaaacatggtgctaactcatgtaaattgccatgacaaatgtgctttaggaccaataaagtgtgtactgactcattaatagtcaaatccaacatctccctgttggttcccaagaaaagtcaagtggagattggtggaagagaaattgctgcctgaattctgccaaccttcaggcattctgattagcatgtgtgatttggtgcctgtcttttgtgacactgtgcacttgctatatcacccttgtgtttttgatcctgcaagttctggaaaagcctcgtagctcaacacattcttcctgccagtgcctgatgtagagtctttggatttatgcagaccccccaggttctttctggctcaaaaataaataaataaaaaataaattaaaaaaagctttaaggggctcagaagggggtttccagattaaactccacacaggtgtgtagaaatgcaaccagtcccaatggtaaacaagcatatctcctgtctcagaagcacccaggaactacaggcataaatatgc

SEQ ID NO: 257025 - DNA, 529 bp, Homo sapiens
ctccagtatatttcaatttttcttttcattcctaaagtgcacaatctcagacaaacaggaaaagctttgacagtaactttgaaaggtttttttttctttaaataaaagctttttaaaatttactgttatttccagttmtagctatcagcctgtactagtatacctatttgatgtaattgaatatttagaaaaaataaaatatgcttcataaaatgctggtgtaaaatcaactgtggcaagccgttaaaaaaaaaacactccactaagatttactagcatggaattttaaaaaatttattccacttttttttagatttatatttcaattttatgctttaatttcttattaagagactgcataaaaataagtatgcaaaggacttagttaaacaaataatgaagacaactgtgtgaatgcattatcgtaaaaatgaaatatttgctaaaaatctaggagacaaataggaagagctaatgtttactgagaccttactaagaaccaggcataaaatacacatgcattattaac

SEQ ID NO: 257026 - DNA, 529 bp, Homo sapiens
ctccagtatatttcaatttttcttttcattcctaaagtgcacaatctcagacaaacaggaaaagctttgacagtaactttgaaaggtttttttttctttaaataaaagctttttaaaatttactgttatttccagttctagctatcagcctgtactagtatacctatttgatgtaattgaatatttagaaaaaataaaatatgcttcataaaatgctggtgtaaaatcaactgtggcaagcmgttaaaaaaaaaacactccactaagatttactagcatggaattttaaaaaatttattccacttttttttagatttatatttcaattttatgctttaatttcttattaagagactgcataaaaataagtatgcaaaggacttagttaaacaaataatgaagacaactgtgtgaatgcattatcgtaaaaatgaaatatttgctaaaaatctaggagacaaataggaagagctaatgtttactgagaccttactaagaaccaggcataaaatacacatgcattattaac

SEQ ID NO: 257027 - DNA, 529 bp, Homo sapiens
ctccagtatatttcaatttttcttttcattcctaaagtgcacaatctcagacaaacaggaaaagctttgacagtaactttgaaaggtttttttttctttaaataaaagctttttaaaatttactgttatttccagttctagctatcagcctgtactagtatacctatttgatgtaattgaatatttagaaaaaataaaatatgcttcataaaatgctggtgtaaaatcaactgtggcaagccgttaaaaaaaaaacactccactaagatttactagcatggaattttwaaaaatttattccacttttttttagatttatatttcaattttatgctttaatttcttattaagagactgcataaaaataagtatgcaaaggacttagttaaacaaataatgaagacaactgtgtgaatgcattatcgtaaaaatgaaatatttgctaaaaatctaggagacaaataggaagagctaatgtttactgagaccttactaagaaccaggcataaaatacacatgcattattaac

SEQ ID NO: 257028 - DNA, 621 bp, Homo sapiens
aaaagtagtgtggaaagataaacagaaaaaaggaaaaaggcaggtgggtgaagacaactacacatattgaagaagctgaaaacagtgggttagtgggcgtgaggattatattcctctaggaagaattggactaagggagaaggtgttaacagataatcttctaatccccaataggaactggacttcaaatcactgtgacttggcttccattatttgatgcagcaggccacctaagagcgggttctctcctcctgcagctatcattttaaactttctaaggaattatttcctgacttcattatgcggcaggtgtrtgagtttcctattgctcctgtaacaaaacatcacaaagtttgtggcttaaagcagcataaatttattgtttcccagttctggagtccagaagtccaagatcaaggtgttgggagggctgatttcttccagagattctgaaggagaatctgttccaggcctctctcatagtctctgatcgctgtagatgaacaacccttggtattccttggctcgtagatgtatcactccaatctctgactctgtcttcacatggccttcctcattgtgtctgtatgtctttgtatattcacatgacagtattcctgt

SEQ ID NO: 257029 - DNA, 621 bp, Homo sapiens
aaaagtagtgtggaaagataaacagaaaaaaggaaaaaggcaggtgggtgaagacaactacacatattgaagaagctgaaaacagtgggttagtgggcgtgaggattatattcctctaggaagaattggactaagggagaaggtgttaacagataatcttctaatccccaataggaactggacttcaaatcactgtgacttggcttccattatttgatgcagcaggccacctaagagcgggttctctcctcctgcagctatcattttaaactttctaaggaattatttcctgacttcattatgcggcaggtgtgtgagtttcctattgctcctgtaacaaaacatcacaaagtttgtgrcttaaagcagcataaatttattgtttcccagttctggagtccagaagtccaagatcaaggtgttgggagggctgatttcttccagagattctgaaggagaatctgttccaggcctctctcatagtctctgatcgctgtagatgaacaacccttggtattccttggctcgtagatgtatcactccaatctctgactctgtcttcacatggccttcctcattgtgtctgtatgtctttgtatattcacatgacagtattcctgt

SEQ ID NO: 257030 - DNA, 621 bp, Homo sapiens
aaaagtagtgtggaaagataaacagaaaaaaggaaaaaggcaggtgggtgaagacaactacacatattgaagaagctgaaaacagtgggttagtgggcgtgaggattatattcctctaggaagaattggactaagggagaaggtgttaacagataatcttctaatccccaataggaactggacttcaaatcactgtgacttggcttccattatttgatgcagcaggccacctaagagcgggttctctcctcctgcagctatcattttaaactttctaaggaattatttcctgacttcattatgcggcaggtgtgtgagtttcctattgctcctgtaacaaaacatcacaaagtttgtggcttaaagcagcataaatttattgtttcccagttctggagtccagaagtcyaagatcaaggtgttgggagggctgatttcttccagagattctgaaggagaatctgttccaggcctctctcatagtctctgatcgctgtagatgaacaacccttggtattccttggctcgtagatgtatcactccaatctctgactctgtcttcacatggccttcctcattgtgtctgtatgtctttgtatattcacatgacagtattcctgt

SEQ ID NO: 257031 - DNA, 551 bp, Homo sapiens
acactgatagcaatgaaagactgcttttgataattcaaatatctcactaataattttcgcactctcctcctggtacactgtatagcacacttacctgaaaattggcttccagattcaatttctcactagaggtctgccttcacttcaccacttaatagaaagctctacaggatgccttacttttctgttctaaagcactatctttagaacagaagctatagaataaaagagatctggtgtcaaaccccagcccatttccttgctagctttgtgatcttgggtaatatatattaatctttcttaamcttggcttcttcatctataaagtaaagacaaagatagcacctgtgaggattaaatgagcaaatctatgtaaagtgttagagaataaaagctggtcaacagaatgtggtatgttattatcataagtattccatgtacttggcttgacacattgtatgtgattttacatataacgttcataccactttttgaggtaggtgctacttttatccccattttgtagacaggaactgacacagaggggctga

SEQ ID NO: 257032 - DNA, 551 bp, Homo sapiens
acactgatagcaatgaaagactgcttttgataattcaaatatctcactaataattttcgcactctcctcctggtacactgtatagcacacttacctgaaaattggcttccagattcaatttctcactagaggtctgccttcacttcaccacttaatagaaagctctacaggatgccttacttttctgttctaaagcactatctttagaacagaagctatagaataaaagagatctggtgtcaaaccccagcccatttccttgctagctttgtgatcttgggtaatatatattaatctttcttaaacttggcttcttcatctataaagtaaagacaaagatagcacctgtgaggattaaatgagcaaatctatgtaaagtgttagagaataaaagctggtcaacagaatgtggtatgttrttatcataagtattccatgtacttggcttgacacattgtatgtgattttacatataacgttcataccactttttgaggtaggtgctacttttatccccattttgtagacaggaactgacacagaggggctga

SEQ ID NO: 257033 - DNA, 580 bp, Homo sapiens
acagaagctatagaataaaagagatctggtgtcaaaccccagcccatttccttgctagctttgtgatcttgggtaatatatattaatctttcttaaacttggcttcttcatctataaagtaaagacaaagatagcacctgtgaggattaaatgagcaaatctatgtaaagtgttagagaataaaagctggtcaacagaatgtggtatgttattatcataagtattccatgtacttggcttgacacattgtatgtgattttacatataacgttcatamcactttttgaggtaggtgctacttttatccccattttgtagacaggaactgacacagaggggctgaggacctaggttaagcattcatggcttcagaggagtagtgaaagggatgggataggtcgggcttaggcctgtctgactctaaaggcttgttttttaacctcattatcctaatatgatgcattattttagggagcacaaagaaaagtgttttggtttaacaccagacagaaaacagtctgaatttaccttcacagtgtttgttcaggtattgacttctcagacacaagtagaataaaaa

SEQ ID NO: 257034 - DNA, 588 bp, Homo sapiens
acccactacctgatcagagagaatcattaaaaggattttttattttggcccatttgaaatctctcatagaatagacatgctgtaatgatcatgtaggtgctaatgtcttattgtaacttcatttccacatttgaggtgtgtctgtggacatgatgtttttagtatcatatctaataacagtacacaggacaattttggaggcactccaattataagaaagttatctcaagggatattgaataaataaaacatacatacataatatctgtatttaatcggaaatctaaattctttattcctcaaaatgaatattaaaagtgtacaaccctcaaagtcactyaagaaacagaacatcttcttaggctgcttctcctccatcccagttttgggccaatctcttcatcttctaggattcacaggcactctatcacctgactacatattcttcaatgcctgatttgctcctaggtatccttttatttgctgaagtataattataatacacaggtattaaggatgcaactcaatgcattttgacaaacacatacaagctaacaacactcagagaagatctacagcatttccagc

SEQ ID NO: 257035 - DNA, 366 bp, Homo sapiens
ggattgctcggtggaagcagctcttttaattattggagggtttgcatgaatgacatgaggaaaagtactctctttagtgttgcttttgaatgcccttggaccagctctagaactaagctcctcactctccgagtgccacattacacatgcaccatcactcccaccactgcaccgttgcttggcaacagcagtacttgttctacttggaagatgggaaagagacaaatggataaccaagaaaaccccaagccttgtaatttctcataccatttgtagaaaagtacaaagtgagtgctcagcctcaatgstatctcaaaattgcagcctgaaggtatttttttgttacaagaaaggaaccattagtat

SEQ ID NO: 257036 - DNA, 591 bp, Homo sapiens
aaaactacggtgcacgtatcttttaatcacacagatctacttctaggaacctacagtatgaaaatgcatatatgcacaaggatatgcattgaggattttttgttattacaagatatcaggaactacctcatacccatacctagaagagttagtgaaataaaatggtacatctacacagtacagtaatttgtagctataacaagacataaaggaagatctttattacctaacatgmggtgatgttcatgataattgttaaatggaaaaaggaaattacaaaggtctatctataataagctaccctttatgttagaaaggaagaaatataagaaaatatacatatacataatttgtgcaaaaggcatacaggaaagataagccaaaaactaagctgagttacgtgcaggatatgggtaagaagaggctggaaagcagcagggaattagaacaggtagtagggataaagagaaatgcttctctaagtagaacttttgtgtatctctaactcttagaatcacaggataatatggcaaacccccaaattaaataactaaaatcatcgtgaactcaagggaatgtgaaatgccatag

SEQ ID NO: 257037 - DNA, 591 bp, Homo sapiens
aaaactacggtgcacgtatcttttaatcacacagatctacttctaggaacctacagtatgaaaatgcatatatgcacaaggatatgcattgaggattttttgttattacaagatatcaggaactacctcatacccatacctagaagagttagtgaaataaaatggtacatctacacagtacagtaatttgtagctataacaagacataaaggaagatctttattacctaacatgaggtgatgttcatgataattgttaaatggaaaaaggaaattacaaaggtctatctataataagctaccctttatgttagaaaggaagaaatataagaaaatatacatatacataatttgtgcaaaaggcatacaggaaagataagccaaaaactaagmtgagttacgtgcaggatatgggtaagaagaggctggaaagcagcagggaattagaacaggtagtagggataaagagaaatgcttctctaagtagaacttttgtgtatctctaactcttagaatcacaggataatatggcaaacccccaaattaaataactaaaatcatcgtgaactcaagggaatgtgaaatgccatag

SEQ ID NO: 257038 - DNA, 566 bp, Homo sapiens
aaactttcaactaaataaggctttattgctaccaaaaccagtctaagtaaactttattaaaactcagtgcaataagyaataatgaaacaaaaggaaataagagcaaccagagagaattttaaaggaaccaggagactaaaatcccaagtagactaactcctgttgagcaaagtagttgtctaagatcagagtcagcaaagaactcgagttccagaattccctcattataatttgaaaacactttagactttcccgaaatcactgatttttttttcccaaacagggtttgaaaatagaatgcaagataaccagaaatatcatgaaaaattgtctaggaattagaaacataaaaccttttatgtttcagaaataaaggcaataaaaccaaaatatctatatatttttttaactgctcctatggatggtaatgagatatttgtagaagagaaaaagcttataaggcatctgtgcgctgccttgtttagatcaggttagattacgatgtaatgactaaccaactgcaggttttatggttaaacaaaatttcatcttatttatgtgtgtgt

SEQ ID NO: 257039 - DNA, 566 bp, Homo sapiens
aaactttcaactaaataaggctttattgctaccaaaaccagtctaagtaaactttattaaaactcagtgcaataagcaataatgaaacaaaaggaaataagagcaaccagagagaattttaaaggaaccaggagactaaaatcccaagtagactaactcctgttgagcaaagtagttgtctaagatcagagtcagcaaagaactcgagttccagaattccctcattataatttgaaaacactttagactttcccgaaatcactgatttttttttcccaaacagggtttgaaaatagaatgcaagataaccagaaatatcatgaaaaattgtctaggaattagaaacataaaaccttttatgtttcagaaataaaggcaataaaaccaaaatatctatatatttttttaactgctcctatggatggtaatgagatatttgtagaagagaaaamgcttataaggcatctgtgcgctgccttgtttagatcaggttagattacgatgtaatgactaaccaactgcaggttttatggttaaacaaaatttcatcttatttatgtgtgtgt

SEQ ID NO: 257040 - DNA, 584 bp, Homo sapiens
agtgaagtactaagtacttttgaaaacagtactttctttaaggtgatgcttaaggtaatgttggaaaatgaaggacattttatcctgatctcatatgtgtataacaaaaattatttactcaccttcaaaacagtaaagtctgcttgatccgttctttgcttattctaagaattagatcatgattgcatttgcaacttacatttttaaataagataagataaacttataatcgttagtttgatttatcatgcattttctcagtcaaacttgcttttactattttttctaaataggtatctccatttttgtgggttccctttaaataaccttttcctgtatgaattatcctgagataatgaggtgcccctctcctcccctgagttgatctcctgcttcctcagcaygtctttatttctactgctcctctagaccatatattacctccgttcagggactgttaaggtgttacatcttagcatcttaaaccttatcatccaggctaagagcatcctaaaaaacccagacctttactattgatcttgctctcagcatcggaaacctggcactaggaactaaatttcttt

SEQ ID NO: 257041 - DNA, 578 bp, Homo sapiens
aaaaaatacccccacagatttctattttttatcatttaaaattccatgaaaaagacatattcatatgggtgtgtgaaaatgttatgkcatacaaatttagtgattataatctaagtgcttttaattcccccaaatcctgaaccataatacggctaagttactagagtgactgtgggaatgtggtaatttaccagaattggctaagaaaaaagatattctgccaattagatcttgtttgcatgacaaaccgcctggacattcatcagattaaaacaatgttcaaagtgaaatcctatttgtgagacaaacaacagagcatagtcagaacacacactagtgcttaggatctggtaaaaattctgcaggaataaaaagcagcaaaggaaagtgggtaccaaatttagggtaaaacatggaggtcagagagagacataggacttttgaataaaatgagcctggtatacaagtttcagcaaaaagcattcaaaacagcatgtttatggtttttatctttataaaatgagaacaaagtctaaactaaaagaggaaagggaaggagagaaggagagaggaagaaa

SEQ ID NO: 257042 - DNA, 578 bp, Homo sapiens
aaaaaatacccccacagatttctattttttatcatttaaaattccatgaaaaagacatattcatatgggtgtgtgaaaatgttatggcatacaaatttagtrattataatctaagtgcttttaattcccccaaatcctgaaccataatacggctaagttactagagtgactgtgggaatgtggtaatttaccagaattggctaagaaaaaagatattctgccaattagatcttgtttgcatgacaaaccgcctggacattcatcagattaaaacaatgttcaaagtgaaatcctatttgtgagacaaacaacagagcatagtcagaacacacactagtgcttaggatctggtaaaaattctgcaggaataaaaagcagcaaaggaaagtgggtaccaaatttagggtaaaacatggaggtcagagagagacataggacttttgaataaaatgagcctggtatacaagtttcagcaaaaagcattcaaaacagcatgtttatggtttttatctttataaaatgagaacaaagtctaaactaaaagaggaaagggaaggagagaaggagagaggaagaaa

SEQ ID NO: 257043 - DNA, 578 bp, Homo sapiens
aaaaaatacccccacagatttctattttttatcatttaaaattccatgaaaaagacatattcatatgggtgtgtgaaaatgttatggcatacaaatttagtgattataatctaagtgcttttaattcccccaaatcctgaaccataatacggctaagttactagagtgactgtgggaatgtggtaatttaccagaattggctaagaaaaaagatattctgccaattagatcttgtttgcatgacaaaccgcctggacattcatcagattaaaacaatgttcaaagtgaaatcctatttgtgwgacaaacaacagagcatagtcagaacacacactagtgcttaggatctggtaaaaattctgcaggaataaaaagcagcaaaggaaagtgggtaccaaatttagggtaaaacatggaggtcagagagagacataggacttttgaataaaatgagcctggtatacaagtttcagcaaaaagcattcaaaacagcatgtttatggtttttatctttataaaatgagaacaaagtctaaactaaaagaggaaagggaaggagagaaggagagaggaagaaa

SEQ ID NO: 257044 - DNA, 453 bp, Homo sapiens
gggtggtatggatggcaagtcacaaagatagaaactaccaccttgagaccagtgggtacctgaaatggcattaatttgaatgtttcagttctgcctaaatgcttagtcaaagcctgcatactggaaagacggcattcagaaaaaaatgacaaaggagaccaagactacactggtgtgctgaaaccagctcacactggstcacacaggcaagcaagaccaattgaatgcagctcttcccaattccttgttcagtgacttcttgatgttagctagaaatgagccatgtgaaagtattcacaccatggagatcagtaaacatcacaaattagagggttttgttttgtcccagaaagtcagttgttaaatttttactagcacaggacttccctggctaaaggcctgaggaaagtccatgtttaaagaaccatctggctctccaaagccttagaaagg

SEQ ID NO: 257045 - DNA, 616 bp, Homo sapiens
taaaaatcaatgtttgtatttgtaaatatgatattctgtattctttacagatccttttaaagtaagaaatgttatgtggaacaacaatttccactgatgacctctccagtgtcctcggtttcccaacgtatcatatagcagcggttctcaaacagggataatttgcccctgaagggacatttgacaaagttggctattttttttttttaatttcacaacacggaggatgtgctactagcttctagtagttaggcctgatggatactgctaaacatcatacgatgtacagaacagccccacaaaataatgacttctctggcataaaataccagkgtgctgaggttgagaaaccctgacttaggatgactctcattgcagtttcccatagcagttcactgactaatgggaataagagttgggtggtagctaaagggtacttaaagaaacacttgttcttgagatacataagcacaattgcattttgttgatttctttagtcacacttgtttaaccactcaatacttcaaaggcataaggtttgttgtactcgtgtaattatctcaaccttgggaaaggagggtaccccattagatttccgaaaagtcttggttctgac

SEQ ID NO: 257046 - DNA, 622 bp, Homo sapiens
ggtttacattaaaaaaaaatgactgctctatagaaaaacactaagggggctgggtgcggtggctcacccctgtaatcccagcactttgggaggccaaggcgggtggatcacgaggtcaggagtttgagaccagcctggccaacatggtgaaaccccatctctactaaaaatagaaaaattagccaggcatgttggcaggtgccagctgagccaggagaatcgcttgaaactggaagacagaggttgcagtgagccaagatcgcaccactgcactccagtytgggccaaagagcgaactgtctcaaaaaaaaaaaaaaaaaaaaaaaagactaagggaaggtaagaaggggagttcaggcaaaaggaaattatagtaatgcaagttagagattttggtggcctagatgacatgacagtggtggcagggtgggtcaaagtagaaaaaatagagattgaaaactcttggtggatggcagcaccattaacagaaagaaaagaatgagtggcgtgatagaaacccatttaccctgatgtgattattatgcactgtatacctgtatcaacatatctcatgtaccccataaatgtatatacctactatgtacccacacacaaattttaa

SEQ ID NO: 257047 - DNA, 418 bp, Homo sapiens
aggaactaatatcctgaagcacagtgccaagggtttttcatatattwcctcttatctccctatattaggcccccacaacattttagggcaaaaaatgctctgtaaggtttactatgatctttcttagaacttttttctcttcaatcttattaaccacattttcagaaactttgttttccatgttagttcactgtcatgacttcctatcgtttcaaagacatgcattgttaacactcaaaactcagtccttggctttctcttatctctttgcactttttccttttgatggctttaatactctttcataattccaattatatcttgaaagcataagaaaggattctgagagatttagtccaacatctttttatacgtaagaaatctgagacctgcctaaatttaagactatatatcaaag

SEQ ID NO: 257048 - DNA, 548 bp, Homo sapiens
ttgggaatggtttttatgaagaaaacctacttgatacttgtttttctcatttctgtaattcatagggataaaatcacattgctctgtgggtgagtaagaataggtatataggatccatggttcctctgggaacttacttcagtgactacataacttggttgtgcatcagaaccatttgggggaactcttttccctcttccatctaataaacaatttaaaacatatacaagagtaaaatagtataacaagtagggagatttttagtgctctctctctcatatatatatatagttttgtatatatagttatatatagttatatatatagttatatatatggttatatatatagttatatatagttatatagttatatatagttatatataggtatatatgtaggtatatatataggtgtatatatatatatagttatatagttatrtctgtatatctgtataaatatataaatggggccccattataggcctactgattcagacttggggccagaatttggaaactgttcaagataaattcatacacaga

SEQ ID NO: 257049 - DNA, 618 bp, Homo sapiens
tgtaagtttcataggccagaagaatacctccactattgtcctctactatgttaagtagcacctagcagtgcttagcacaccaaaggcatttaatgaagttgtgtagtagtaacagttgttgatatttttattcgatccttcccttttttctatcctctctatcttctcttcggaatgtgaacttacaagttactgggcagccacagatgctttctgcaaatgagatataatgcttaaatctatcatttccctactaatttatagtgcaaaatcagatgtatagtacaaccttcctgaaaaattaacaacgagaactggctaatacttagcttatctaagcatttaactctaagagaaatactgagctatttttaaagaaccctgtagtaaattcctggcctcyaattactaacaatccaataacccccaacacccatctcagtaaatcttacccacatcaccatattcacactatcattcctacccagcccccataacctcgtgattacattatctcaacaagttatctctgctctcccagtctcaacaccccattttaggtccattttgtaccaaggacatttagggaaaacaatgtcccctactcaaaaaccaact

SEQ ID NO: 257050 - DNA, 574 bp, Homo sapiens
aagtatttgtctttattgcacttttgtcatggtaattttaagttaacttgagtctctggccagcactgctaatacaaattttaggtatttcatttatagatttctttgaaatatttctgtgccatagatgttgattaattcatgtctgatctagctcagtaggaaatatattttgccatagatgcagatttttttagtctacattgtaaacagatttgtaaaatttgttaaataagctgtagtaattagtgaaattgttaaagggagtttgaaatgattattgaattcagttaaacatctttgtttttactgatactgaggatttgtccttgttaagaaaaagttaaattatttgaaaacatttaagcttttacttcttatttaatattaaaaggattgactttttatgcattgaaaactgtgtagaaaatgaaagtgttaagactgcatcatcactgttactttgtaatgwtatactggaaagctctggaatggaaatatgtcatatctactttatgttctcttaatccggtgctttctgtggttgctaaagtacctgtgagaatctttcgct

SEQ ID NO: 257051 - DNA, 537 bp, Homo sapiens
agaaaaaaactcataatacacctgttgttagattgtagtcgtctctattgtttttgaggtttttattattttctgcaatttaaaatatcctgaattctttccaagctacaatttcccaaactagtgctttaacatttttttatcttccatttttcttttttaaaattcctttaaattttgtttctttttcagtcttactccttctatgtcttccattcagacatagacgcaataaaattgctgctacctttttcctgaggctctgcaagctaaagctcattccttgtaatataggcaagaaaaacctacattgcygtgtccttccttctctctaaccagagatgctttgagtctaacatctgagtagattgtgtctaacattaacctttagttttcttcagttgccataaaaatatctcatttaaaatttgtgctgggcatactgactcatgcctgtcatcccagcactttgggaggccgaggtgggaggaaatcttgagatcacgagttcaagaccatcctgggaagcatagcaag

SEQ ID NO: 257052 - DNA, 537 bp, Homo sapiens
agaaaaaaactcataatacacctgttgttagattgtagtcgtctctattgtttttgaggtttttattattttctgcaatttaaaatatcctgaattctttccaagctacaatttcccaaactagtgctttaacatttttttatcttccatttttcttttttaaaattcctttaaattttgtttctttttcagtcttactccttctatgtcttccattcagacatagacgcaataaaattgctgctacctttttcctgaggctctgcaagctaaagctcattccttgtaatataggcaagaaaaacctacattgccgtgtccttccttctctctaaccagagatgctttgagtctaacrtctgagtagattgtgtctaacattaacctttagttttcttcagttgccataaaaatatctcatttaaaatttgtgctgggcatactgactcatgcctgtcatcccagcactttgggaggccgaggtgggaggaaatcttgagatcacgagttcaagaccatcctgggaagcatagcaag

SEQ ID NO: 257053 - DNA, 558 bp, Homo sapiens
gaacttcagaatcacctctttgtttttgtttcatcttgtaatgctgaacaaggattcagagggagtgggtcaggcaaagaagctatttgaggatttaattaaaggattgcgtctcatgtccgctttaggagctgctcaggtgaagcagaaggatggtagcattgaggaggttgagaagctagttgccagttttgcaggctctgagatttcattctgtyagtttgccaaggaatgagctgtcaggctctgtctacttcacagcttctccccctgggtctgtgccttctgattctagcttcaggcttagcctcacccagactgtatggcgcatctagcctcatcgtttgagaacttgttagaaatgcagaatctcaagccccacccaaactttctgagtcagaatctacattttagcaagatcacatgtctgcatattaagctttgacaagcatgattccatggggctctagcccagcacaaaacagcatggttatcaaactttagtgagcttcaaaatcattgacaaatataagaaaatgaaaagacctggtctcctac

SEQ ID NO: 257054 - DNA, 556 bp, Homo sapiens
acaggctcaatgaaaaacaattccttttgttgtyaatctcattttttttctaatcacagtgagacaatctggtatgctgttgatgtttttgaatatacatttaagacccttgagagaatatagtgcaccaggaagattataatgatgactaccaggaggataatactgagagacttagcttcttagttaaagtccccacgaaccaaactaactaatatttctatggaagcaaaagaaaaacaaagcttaatgataagaacaaatcataaattcggtctctgagtccagagggtgattagtcaggaagatttctagatttgagctctaagcatattttcctggtttgcagtttgaatgcccctagttatggcagtgggcattttggtgaactccctgagtggtccacacatcaggcatgagggttgtcctctgaacttgtatcaggtatacatctccatcttgcagggtttcaggagcagagcagttcttgttcagagtgattccaagtcagaaaagtgggagaaaattggatggaggaacctagaagaactgagga

SEQ ID NO: 257055 - DNA, 556 bp, Homo sapiens
acaggctcaatgaaaaacaattccttttgttgtcaatctcattttttttctaatcacagtgagacaatctggtatgctgttgatgtttttgaatatacatttaagacccttgagagaatrtagtgcaccaggaagattataatgatgactaccaggaggataatactgagagacttagcttcttagttaaagtccccacgaaccaaactaactaatatttctatggaagcaaaagaaaaacaaagcttaatgataagaacaaatcataaattcggtctctgagtccagagggtgattagtcaggaagatttctagatttgagctctaagcatattttcctggtttgcagtttgaatgcccctagttatggcagtgggcattttggtgaactccctgagtggtccacacatcaggcatgagggttgtcctctgaacttgtatcaggtatacatctccatcttgcagggtttcaggagcagagcagttcttgttcagagtgattccaagtcagaaaagtgggagaaaattggatggaggaacctagaagaactgagga

SEQ ID NO: 257056 - DNA, 556 bp, Homo sapiens
acaggctcaatgaaaaacaattccttttgttgtcaatctcattttttttctaatcacagtgagacaatctggtatgctgttgatgtttttgaatatacatttaagacccttgagagaatatagtgcaccaggaagattataatgatgactaccaggaggataatactgagagacttagcttcttagttaaagtccccacgaaccaaactaactaatatttctatggaagcaaaagaaaaacaaagcttaatgataagaacaaatcataaatwcggtctctgagtccagagggtgattagtcaggaagatttctagatttgagctctaagcatattttcctggtttgcagtttgaatgcccctagttatggcagtgggcattttggtgaactccctgagtggtccacacatcaggcatgagggttgtcctctgaacttgtatcaggtatacatctccatcttgcagggtttcaggagcagagcagttcttgttcagagtgattccaagtcagaaaagtgggagaaaattggatggaggaacctagaagaactgagga

SEQ ID NO: 257057 - DNA, 556 bp, Homo sapiens
acaggctcaatgaaaaacaattccttttgttgtcaatctcattttttttctaatcacagtgagacaatctggtatgctgttgatgtttttgaatatacatttaagacccttgagagaatatagtgcaccaggaagattataatgatgactaccaggaggataatactgagagacttagcttcttagttaaagtccccacgaaccaaactaactaatatttctatggaagcaaaagaaaaacaaagcttaatgataagaacaaatcataaattcggtctctgagtccagagggtgattagtcaggaagatttctagatttgagctctaagcatattttcctggtttgcagtttgaatgcccctagttatggcagtgggcattttggtgaactccctgagtggtccacacatcaggcatgagggttgtcctctgaacttgtatcaggtrtacatctccatcttgcagggtttcaggagcagagcagttcttgttcagagtgattccaagtcagaaaagtgggagaaaattggatggaggaacctagaagaactgagga

SEQ ID NO: 257058 - DNA, 595 bp, Homo sapiens
ttgtgtcttgttataaagagaacagattctttttgaacttatgcaaatagttatattgccataaaaaaaatcttcacaagtagctttccaagttcccgaggatcaggtagagaggaaaagtaaatacttcaatctttattcacaaaagtatacttttccaaattgctgcaagcagtagatagcttaaaaggtaaaatgtttcttaaaactttaaagaaccagcaaaacttccacatataaagtcataaaaacattattttcatcagttattcagtcttatgtaattcttgttctgcatgatctcgggatagcagtttcacaaactcaccagtttctttattagcgttctgagaattcttacccactttcatggcattatcttaatttaaagttataagaaacctgtatatscagagtacttgtcagagttctttccgtgaatatctttgaagaagaagcaattttggactatagctgattgcaaatgcttttagagaaaaatcaaaacaataactgcctatggatgacaagacttaagatggccatagttaaattctaatgaggtttcattataataatgcaactgacaaaaaaa

SEQ ID NO: 257059 - DNA, 571 bp, Homo sapiens
ctaacaccattcattgactaatggcttcttcctctattgatttgaaataccactgttgtcatgtactaaattcttacattcttttcttttctctttatctgtatgttcattgccagcagctaaacctagtttaagttattgtagcttcataaaatgtaaaaatgtctggaagggctagtttgctctgattactctatttttttttctgtcagtttttttctaggtattcttgccagactatttccaaacgaacattagaatcaacttatctaggtgaaaattcaacaaaaatcatgctggcagatctttttctccttctctctcctcccccctttcccctttctgtctgtytgtctctctctctctctctctctctctctctctgtctctctctcacagttagaatttggtctgtttctttattcaataccccaatatatgttcattagggttatactgtatacactacacataacagttttgttttttgttttggatattatttgataataagaattttaccacatcattaaaaaaagtttccccaagctataatttttgataattgcac

SEQ ID NO: 257060 - DNA, 571 bp, Homo sapiens
ctaacaccattcattgactaatggcttcttcctctattgatttgaaataccactgttgtcatgtactaaattcttacattcttttcttttctctttatctgtatgttcattgccagcagctaaacctagtttaagttattgtagcttcataaaatgtaaaaatgtctggaagggctagtttgctctgattactctatttttttttctgtcagtttttttctaggtattcttgccagactatttccaaacgaacattagaatcaacttatctaggtgaaaattcaacaaaaatcatgctggcagatctttttctccttctctctcctcccccctttcccctttctgtctgtctgtctstctctctctctctctctctctctctctgtctctctctcacagttagaatttggtctgtttctttattcaataccccaatatatgttcattagggttatactgtatacactacacataacagttttgttttttgttttggatattatttgataataagaattttaccacatcattaaaaaaagtttccccaagctataatttttgataattgcac

SEQ ID NO: 257061 - DNA, 571 bp, Homo sapiens
ctaacaccattcattgactaatggcttcttcctctattgatttgaaataccactgttgtcatgtactaaattcttacattcttttcttttctctttatctgtatgttcattgccagcagctaaacctagtttaagttattgtagcttcataaaatgtaaaaatgtctggaagggctagtttgctctgattactctatttttttttctgtcagtttttttctaggtattcttgccagactatttccaaacgaacattagaatcaacttatctaggtgaaaattcaacaaaaatcatgctggcagatctttttctccttctctctcctcccccctttcccctttctgtctgtctgtctctctctctctctctctctctctctctctstctctctctcacagttagaatttggtctgtttctttattcaataccccaatatatgttcattagggttatactgtatacactacacataacagttttgttttttgttttggatattatttgataataagaattttaccacatcattaaaaaaagtttccccaagctataatttttgataattgcac

SEQ ID NO: 257062 - DNA, 613 bp, Homo sapiens
acataaaattcatttatatttcatatacaccttatacatatagcctgaaggtaaacttatacactatatttaataattttgtgcatgaaaccaagttttgacggcaacctgtcacaaggtcaggtgtggaagtctccayttgtggtgtcagctctcaaaaccttttaaattttggagcatttcagatgtcaaattttcagattagggatgctcaacctgcagcaggttctatcttctggcaccttttcactaaaccctaccttgaccacctatttaaaatcacatctatgaaatgaaatatcatctcaccccagttagaatggctattgtcaaaaagaaaaaaaaaaaaaacaagtgctggcaatgatgcagagaaaagggaattcatatacactgtttgtgagactgtaaattagtacagtaactatggaaaacagtgtggaggattctcaaaaaactaaaaatagaatgaccatatgatctaccaaccctactactatttatccaaaggaatggaaatcagtatttcaaaatgatacctgaatccccatgtttactgcagcactattcacaataactaagatatgaaataaacctaaacatccatcaaaag

SEQ ID NO: 257063 - DNA, 613 bp, Homo sapiens
acataaaattcatttatatttcatatacaccttatacatatagcctgaaggtaaacttatacactatatttaataattttgtgcatgaaaccaagttttgacggcaacctgtcacaaggtcaggtgtggaagtctccatttgtggtgtcagctctcaaaaccttttaaattttggagcatttcagatgtcaaattttcagattagggatgctcaacctgcagcaggttctatcttctggcaccttttcactaaaccctaccttraccacctatttaaaatcacatctatgaaatgaaatatcatctcaccccagttagaatggctattgtcaaaaagaaaaaaaaaaaaaacaagtgctggcaatgatgcagagaaaagggaattcatatacactgtttgtgagactgtaaattagtacagtaactatggaaaacagtgtggaggattctcaaaaaactaaaaatagaatgaccatatgatctaccaaccctactactatttatccaaaggaatggaaatcagtatttcaaaatgatacctgaatccccatgtttactgcagcactattcacaataactaagatatgaaataaacctaaacatccatcaaaag

SEQ ID NO: 257064 - DNA, 585 bp, Homo sapiens
ctctgttacttccgattccaattttgtttcaattatttggaaagaaaacatttctttaaaaagtatgagatgttcctagccctataaactgattagaaaatgtagtttaggccaggcagtggctcatacctgtaatcccagcacttyggtaggccgagggaggaggatcacttgagcccaggggttcgagaccagtctgggcaacatagtaagaccttgcctttacaaacaataaaaaaattagccaggcatggtggtgtgcgcctgtggccccagctactcaggaggcttaggtaggaagattgcttgagcccataaggtcagggctgcagtgagccatgattgcaccactgcactccagcctgggtgacagagcaagaccccatctcaaaaaaaaaaagtagtttaaatttttcttggactccagattattctcttagagacaacagatttggaacgaagcttttgtagagctctccacatccagcagagtacatctggggaagtcgtgatcattcagattatgtttcctcatatataaaatgaaaatgtaccagtcctaccttcctgcagcactgaaagact

SEQ ID NO: 257065 - DNA, 585 bp, Homo sapiens
ctctgttacttccgattccaattttgtttcaattatttggaaagaaaacatttctttaaaaagtatgagatgttcctagccctataaactgattagaaaatgtagtttaggccaggcagtggctcatacctgtaatcccagcacttcggtaggccgagggaggaggatcacttgagcccaggggttcgagaccagtctgggcaacatagtaagaccttgcctttacaaacaataaaaaaattagccaggcatggtggtgtgcgcctgtggccccagctrctcaggaggcttaggtaggaagattgcttgagcccataaggtcagggctgcagtgagccatgattgcaccactgcactccagcctgggtgacagagcaagaccccatctcaaaaaaaaaaagtagtttaaatttttcttggactccagattattctcttagagacaacagatttggaacgaagcttttgtagagctctccacatccagcagagtacatctggggaagtcgtgatcattcagattatgtttcctcatatataaaatgaaaatgtaccagtcctaccttcctgcagcactgaaagact

SEQ ID NO: 257066 - DNA, 585 bp, Homo sapiens
ctctgttacttccgattccaattttgtttcaattatttggaaagaaaacatttctttaaaaagtatgagatgttcctagccctataaactgattagaaaatgtagtttaggccaggcagtggctcatacctgtaatcccagcacttcggtaggccgagggaggaggatcacttgagcccaggggttcgagaccagtctgggcaacatagtaagaccttgcctttacaaacaataaaaaaattagccaggcatggtggtgtgcgcctgtggccccagctactcaggaggcttaggtrggaagattgcttgagcccataaggtcagggctgcagtgagccatgattgcaccactgcactccagcctgggtgacagagcaagaccccatctcaaaaaaaaaaagtagtttaaatttttcttggactccagattattctcttagagacaacagatttggaacgaagcttttgtagagctctccacatccagcagagtacatctggggaagtcgtgatcattcagattatgtttcctcatatataaaatgaaaatgtaccagtcctaccttcctgcagcactgaaagact

SEQ ID NO: 257067 - DNA, 581 bp, Homo sapiens
tttgcatttttccctctttacagaatttttgttctggtttactagtagcaagcactttccactactgtcaacatactgcttgcccttctgaaatgtgttttttaaaaactactactaacatgtgctaaggccatccatgtctcctaggctcagaatgcattagaagtaaataactggctggacacgggcggtggctcatgcctgtaattctagcactttgggaggccaaggagggtggattgcctgagctcaggagttygagaccagcctgggaaacgaggcaaaacaccatctctactaaaaatacaaaaaaaaaaaaaaaaaaaaaaaatagcccggcatggtggcacatgcctgtagtcccagctacttgggaggctgaggcacgagaattgcttgagcctgggaggcagaagttgcagtgagcctcaatcactgcactccactgcactccagcctgggcaacagagcgagactctgtctcaaaaaaaagaaaaagaaaaaaagaagtaaataactaacttcaatagaacagcactgaaaatgtgtttatgaagtatttattgagcactatatccaat

SEQ ID NO: 257068 - DNA, 613 bp, Homo sapiens
ttcaaaatagtctggctgtttcctataccccaaagtcagttcaaaatagtctggctgtttcctataccacaaagtaattttgaggattcaactttggttgtctcttcatcaataaccataagccctgggcacttactgatcctctttggactcaactcctattccaagaaaatggacataacaataaagttatttccttgaaggcaaaggaccaaaccagatgttcacttacagaagtttctagccccaattcacatgactattccataattttttgattctaggtctgtcctttgggatgggaccaggctgctgggttaaataggaagtgttcagatgtggttgtttctttctcctgacttaagctgtgacaatgcattaattcaccctcagagccattttgtggtgtagtgagaagagctctaaacttgaagggagatctctggtgagttacagttctgacatttaagaggtatttgattttcagtaggtttccttatattctttgtgtcgcagtgtcctcatttgcaagatgtcattctgtcgccccaaggttgtgaagagagtcagaatgtgagyaggtatcctcacttagatctttggcttcattaaa

SEQ ID NO: 257069 - DNA, 518 bp, Homo sapiens
tcctatgtggcccaggctggtcttaaactcctgggatcaagcaatcctcctgcctcagcctcccaaaatgctgggattacacgcaagagccaccacacctggccctaaattgtttttaagtgagattttggtggatttgatgtcaacagtgtgtggcatcacccttgacataacaacataaaacaacagttttaaagccaatatctaaaacagcctttttttaattctttaactttctgacaaaagatcaagtaaaagttttgctctctgtaacaagcactcttcagattttgctgaagagaaaatgctaaataaaagcacattctcactctggggtttggggaacrtcagttactccaatttcaagctttattctcttggattctaggaggtcatcataacccacttatattttgatacaagcaaaagcccatgcttgaagactgaagaactacaaagaaacagctgtatgccattccactttctgggccatgtttctctgttgtacagagaaaaat

SEQ ID NO: 257070 - DNA, 497 bp, Homo sapiens
tcctgtagccctagtcatccagccagcacccttggacccatcctccaggctgacctctgcaagtttggaccacaatcccaaaagatacaatccttgaatgccataatcccaaatgctgaaatatcaacaatccctaacatctaaaattttaaacatcaagccaggtgcagtggctcactcctgtaatcccagcactttgggaggccaaggtgggtggatcgcatgaggtcargagttcaagaccagcctgggcaacatagtgaaactccaactctactaaaagcacaaaaattagccagttgtggtggcacatgcctctagtcccagccactcgggagactgaggcaggagaatcgcttgaacccaggaagcggagtgagccaagatcatgccactgcactccagcctgggtgacagagcaagactctgtcacaaaaataaataaataaataaaatttcaaacatcacaatcacaggatagttgtgtcattttagat

SEQ ID NO: 257071 - DNA, 392 bp, Homo sapiens
acccccaggtttgtttcttgaatgtctgcaatggcagtgccmctcatccaaactgaggaacatggaagaaaggagcagacagagggtgggcaggagggagctgctggagtccctaatggggcctggtgagtttggggaggttgctgtgggttatccaggtgacatcctacctcattcagttctgcatctgaactctcctgtcccaagtagaattttctctttcaactgaattgggagcaccttgagggcagaaaccaggtctgactcatctttattcccctcaaggagttcctggaatcctcacagagctcctgctggctgtgagcactgcatggacttgcaaatgccactccacttctttaccttggtttcattttgcacttgaagataaa

SEQ ID NO: 257072 - DNA, 392 bp, Homo sapiens
acccccaggtttgtttcttgaatgtctgcaatggcagtgcccytcatccaaactgaggaacatggaagaaaggagcagacagagggtgggcaggagggagctgctggagtccctaatggggcctggtgagtttggggaggttgctgtgggttatccaggtgacatcctacctcattcagttctgcatctgaactctcctgtcccaagtagaattttctctttcaactgaattgggagcaccttgagggcagaaaccaggtctgactcatctttattcccctcaaggagttcctggaatcctcacagagctcctgctggctgtgagcactgcatggacttgcaaatgccactccacttctttaccttggtttcattttgcacttgaagataaa

SEQ ID NO: 257073 - DNA, 505 bp, Homo sapiens
agggagggaaagttgaaaatacctgcttctgaaactacgtactgtttatcccartaaactctccccagatcccaacaggcagggccctgcattttttcctctatagggaaacctgaaagctaagcttccagactcaggaaaagctacttggagccagaacacactacttggcatgttgcaggcatttaatattttttagatgactcagaggatggatggacaaatgaatacacttctggcctaggtgtcaggagaggaggtcttaagctctagcgagattgcagtgtgtggccctgggcaagtcttgtgctctatcctcgtcccctcctccaggaaatgaaagtgctgataatagatgcttatctcagccccaggccaaaatgtgctgtacaagttgagaatgtgagcttgaaggtgtcactggctctgctaacttccagggctctgggctggctctggttcagggagcgctgtttggagctcagatcagatgctgccaatccac

SEQ ID NO: 257074 - DNA, 505 bp, Homo sapiens
agggagggaaagttgaaaatacctgcttctgaaactacgtactgtttatcccaataaactctccccagatcccaacaggcagggccctgcattttttcctctatagggaaacctgaaagctaagctyccagactcaggaaaagctacttggagccagaacacactacttggcatgttgcaggcatttaatattttttagatgactcagaggatggatggacaaatgaatacacttctggcctaggtgtcaggagaggaggtcttaagctctagcgagattgcagtgtgtggccctgggcaagtcttgtgctctatcctcgtcccctcctccaggaaatgaaagtgctgataatagatgcttatctcagccccaggccaaaatgtgctgtacaagttgagaatgtgagcttgaaggtgtcactggctctgctaacttccagggctctgggctggctctggttcagggagcgctgtttggagctcagatcagatgctgccaatccac

SEQ ID NO: 257075 - DNA, 505 bp, Homo sapiens
agggagggaaagttgaaaatacctgcttctgaaactacgtactgtttatcccaataaactctccccagatcccaacaggcagggccctgcattttttcctctatagggaaacctgaaagctaagcttccagactcaggaaaagctacttggagccagaacacactacttggcatgttgcaggcatttaatattttttagatgactcagaggatggatggacaaatgaatacacttctgrcctaggtgtcaggagaggaggtcttaagctctagcgagattgcagtgtgtggccctgggcaagtcttgtgctctatcctcgtcccctcctccaggaaatgaaagtgctgataatagatgcttatctcagccccaggccaaaatgtgctgtacaagttgagaatgtgagcttgaaggtgtcactggctctgctaacttccagggctctgggctggctctggttcagggagcgctgtttggagctcagatcagatgctgccaatccac

SEQ ID NO: 257076 - DNA, 505 bp, Homo sapiens
agggagggaaagttgaaaatacctgcttctgaaactacgtactgtttatcccaataaactctccccagatcccaacaggcagggccctgcattttttcctctatagggaaacctgaaagctaagcttccagactcaggaaaagctacttggagccagaacacactacttggcatgttgcaggcatttaatattttttagatgactcagaggatggatggacaaatgaatacacttctggcctaggtgtcaggagaggaggtcttaagctctagygagattgcagtgtgtggccctgggcaagtcttgtgctctatcctcgtcccctcctccaggaaatgaaagtgctgataatagatgcttatctcagccccaggccaaaatgtgctgtacaagttgagaatgtgagcttgaaggtgtcactggctctgctaacttccagggctctgggctggctctggttcagggagcgctgtttggagctcagatcagatgctgccaatccac

SEQ ID NO: 257077 - DNA, 589 bp, Homo sapiens
caaacgagtatgtggtgtatgattccatttatataaaatcaaaaataaaattaaaagcaggcaaaatgaatytgtaatactgataaaagtctgaatggtggttacttcttgaatgtgggatattgatcggaaagaggttcaaggagcctcctagggtgctagaaatgttcattttcttgatctaggtagcaactacacaggtgtaaaaatacttaaaaattcatcaagctctatacttcagatatgtatgcgttttacttacatatgttatagctcaataaaaaattaattgaaaatattgcatgagatctcctaaagtaagaattaacttcttcctttcttttagcataagcatatctgagattctttgaattgagtgtttgcaaacaacattcttagtaataacaatagctaaattaaatgcttatatgtaccaggccctatgcagggagacatgaattaacgcctacataaggtagataccatccaaatctccatttcatagatgagaaaattaagggacagggaagtaaagtaacttgtccaaagtaaaacagcaaatcaaatggcagaactgacaaatcaaatt

SEQ ID NO: 257078 - DNA, 589 bp, Homo sapiens
caaacgagtatgtggtgtatgattccatttatataaaatcaaaaataaaattaaaagcaggcaaaatgaatctgtaataytgataaaagtctgaatggtggttacttcttgaatgtgggatattgatcggaaagaggttcaaggagcctcctagggtgctagaaatgttcattttcttgatctaggtagcaactacacaggtgtaaaaatacttaaaaattcatcaagctctatacttcagatatgtatgcgttttacttacatatgttatagctcaataaaaaattaattgaaaatattgcatgagatctcctaaagtaagaattaacttcttcctttcttttagcataagcatatctgagattctttgaattgagtgtttgcaaacaacattcttagtaataacaatagctaaattaaatgcttatatgtaccaggccctatgcagggagacatgaattaacgcctacataaggtagataccatccaaatctccatttcatagatgagaaaattaagggacagggaagtaaagtaacttgtccaaagtaaaacagcaaatcaaatggcagaactgacaaatcaaatt

SEQ ID NO: 257079 - DNA, 528 bp, Homo sapiens
ggaacagtgctgctatataagatcctggagtagttcttacttccctaaaagttctgaggagaaggaaaggcactgatttaagtcaggcaagtgtttccaatacattttactcaccaagatgcagtctttggttcaagactaaggagatgatacctaaaggggcttcacaaaggaataatcaagacctcrtggcattgcagactccatacctaagaagggctcccacccacacatcaattattagctctgccaccaacctcaaaccactgtgaaaagacctaactgcaagaacaccacatagaagaatcccacaatgaaactgaacaactaaatcatttgattcctgagcaggaagccataaaacagcacaaatgttctaactgcaatgttgtgcataatccaagacatgaagtttcttccatttcttccatttttagcagctgcaactcaagcataattcaaagtgtgactatatctatttctgacacttggatgatatctcatcattaccacaaatctgtttgtccc

SEQ ID NO: 257080 - DNA, 495 bp, Homo sapiens
gtctgtgacaggttgtaaaagagaggcgtctgctacttggcttagggcagaaacccaggctgtggagaagaggccagaccaggagaaggaggagggaggacgagctagctgccagcaagaggctggaaagagcccattgcggggtttctctacgtaccgggggaagtcacagggaaaggcagtttcatattcctggggcctcactttcattttgctgtcctcagggaagataaaagagaaagaagaaacagctaccttattaaatgactaygacatgccaggcatctactagatgcttggcatagtttatctaaattaatctcacatcaaccctgcacaaggaagttagtatcatctccgtttgagaaagagggaaagaaatgaggttctggaggtaaagagagctgtctaatataacagttagaatgtggcacagcccattggaaaactcattcatttcctcttcccagagccatacaggatataaaataattt

SEQ ID NO: 257081 - DNA, 453 bp, Homo sapiens
aaatgagcatgtattatctgtggaaaatcaagaaaccctaaagccctgtgcactggtcagccagcttgcaaatttagtccaagacgaggtcaatgatctccttgccaatggtgtaagtggccaccggcacagttactggcataggtattccttacctgtgatgcaatgctcagggttcaagagctgacaataggtgtcagtgtgaactctgtcaacagccatgggttccaggtctacaaacactgccctggtcacatgcttgccagtacccatctcactgaagaaggtgttgaaggatgcgtcttctctcccactggtcttgtcactggcatctggtcrtcaggcaggatgctgtgttccaggcagtagaactcccagcaggcattgccaatctggacaccagcccagcaaatgtggatggagatgtactcatgcatgatggggacttctagg

SEQ ID NO: 257082 - DNA, 634 bp, Homo sapiens
tgaaaaagaaatcaagaaagcggtcccattcacaatacctacaaataaaataaaatacctagaaataaacttaaccaaagaaatgaaagatttctacaatgaaaacgacgaaacgttgatgcaagaaattgaagaggacacaccaaaaaaaggaaaagatattccatattcatgggktggaagaatcaatatcgttaaaatgtccataataccaaaagtcatctacagattaaatgcaatccatatcaaaatatcaatgacattcttcacagaaagagaaaaaataatactaaaatttctgtggaaccacaaaagacccagaatagccaaagctatcctgaccaaaaataagaaaactggaggaatcacattacctgacttcaaattatactacagagctgtagtaaccaaaacatcatggtactgccataaaaaacagacatatagaccaaaggaatagagaacccagatataaatgcatacttctacagtgaactcattttcaacaaaggtgccaagaacgtacactggggaaaggagagtctcttcaacaaatgatgctgggaatattggatgtccatatgcagaagaataaaactagatacccatctcttgccatacacaaaaatcaaat

SEQ ID NO: 257083 - DNA, 634 bp, Homo sapiens
tgaaaaagaaatcaagaaagcggtcccattcacaatacctacaaataaaataaaatacctagaaataaacttaaccaaagaaatgaaagatttctacaatgaaaacgacgaaacgttgatgcaagaaattgaagaggacacaccaaaaaaaggaaaagatattccatattcatgggttggaagaatcaatatcgttaaaatgtccataataccaaaagtcatctacagattaaatgcaatccatatcaaaatatcaatgacattcttcacagaaagagaaaaaataatactaaaatttctgtggaaccacaaaagacccagaatagccaaagctatcctgaccaaaaataagaaaactggaggaatcacattacctgacttcaaattatactacagagctgtagtaaccaaaacatcatggtactgccataaaaaacagacatatagaccaaaggaatagagaacccagatataaatgcatacttcyacagtgaactcattttcaacaaaggtgccaagaacgtacactggggaaaggagagtctcttcaacaaatgatgctgggaatattggatgtccatatgcagaagaataaaactagatacccatctcttgccatacacaaaaatcaaat

SEQ ID NO: 257084 - DNA, 576 bp, Homo sapiens
ggacactattaaacaagtattgagccttggatgtccattcccccaatcctttctttgtattaaaattgccaccaaccttcaaaatatcttaattgttaattaactactgttaatcccttcccaagtgcttcttcatcagtatttagaaggaatattttaatcatattttaatgatcaaagtattatatgctcatttgtagtaagcctggagaatacatttaaaagaaaatttaaaacactcttaattccacaacccagtgatarccactgttatttttgctttttcatgaggtttctctttctgttcacatataaataaaattatagatttcctatgtgattctgtgacctgatcttttaacttaaggatatcatgttagcatttcctgttatttcaaaagtataagcataataaaaattagtaatattccatctcagaaatcccataatttacttggccattcccctacggtttaacatttagattgtttctggttgtcaagtattataaataataatatcaatgtatttttgcaggaagcattctttttacttagactattccctcaggaaatt

SEQ ID NO: 257085 - DNA, 575 bp, Homo sapiens
taaactgtaattataaggcacagggcatatctcatacagttcttatacatgcaggttgcttaataaagggcaactgtaatcttagccttcaaaaagaaaaagctcctcttctctagtttcaagattgaaattgcaggaattactttggatacaattctatytcacatcacagtatcatacacccagcatgatgccacattacagagattcaatcaacatttgttgagggattgatggaatgaatgactactcctttaaactactgctattatcagctcagatgtcagtctccactcaaggtattataatttttcatgagaaccatgtgttcagaattaggtttttaaatagagcatagctttatttaatgtatatttacaatatatcatagctctatttgataaatatatgtcttaatgcagtgtaaacctaacccaaagcaaaattcttagttaaaaatcttgccttttcccaattataaagaaaaatttactcaatcattttgaaatgtaaattttaaaaaccctgttagcattaaatcccagagggaagggattaagagaaggattcatcca

SEQ ID NO: 257086 - DNA, 603 bp, Homo sapiens
aactcagttctgtcacaatccctggatgaaagaaagcaagtagactttcctctccaccatctcctctcttcagtggccttttatgacttgcttttctgttcttcctcctgttttatcctttgtttattgatttccccttcccagtgctttccatcgtcccctcatggtcaacaggaccccatgtcctgaattccaactttctgctgcaactgaaaactggccttggccaggctcactgcctctcttgcaggcctcaccagtggaggctgctcatacctcacaacccaagtgctacacggctaaggtggggggttgaccttcttkgagtccctactgctacttcctggctagtcctcttctctcatctcagtgctcctcttttttggaggctcatgtcatctgtctaaaccactgatcagagcattcaccaaaacctttatgacctgatcatgacttccttccttccaaggtcatgccatgatccggggagtgttcaagaattaacacttggagcaatttctgttgagcctcctgtccctggggtcagcagtgatagctcagggcagtgactgatggcccttaaaattgcctgttccaagaaac

SEQ ID NO: 257087 - DNA, 563 bp, Homo sapiens
tgaggctgcagtgagccatgattgtaccactgcactccagcctgagtgacaaagtgtgaccttgcctcttaaaaaaaatgaaattttcttacttattaaactgatggaataaatacttttcagtttgtactaatgtaaggcaataatgtaatatatggcaataatataaggcaaagctttgctatggattttctatggggagtgcgaataaaaggattagaacttagaactttcatatactttacctctgtgtggacatcgagaaaaatgccaagactaatagaagtgatgggttagatggggtttaagagaaggctgcccagatgatatggtgttaggtgtcacttggaagttaggttagataaggaagtgttgggctgccctcttgctgcaagtgtctgmaatcctagttagctgagagccagttctggccatttctgaggtttgctgcctccctaatcccacacttgcatcctgttcctgttttgctttcctctgctgctcgtctttcactttctctttcctcacttgggaagagtgttgaaacaacatttcattatttg

SEQ ID NO: 257088 - DNA, 545 bp, Homo sapiens
accctcacacctaccaaaatggcaaaaatggaaaagatttaccataccaagtattggataggaaatggagtaactgaaattttcrtacactgctggcaatgtaaaatgacacaatgtaaatggatatgaaaaggaggataggaaaaccgatgcaaaatactcaaggcattattggcaggttttaaggtgatttggtattacagaaaatgcaaatatcactctgggctatgagagaacatagtaagaaattagtaggattaggatgctaagcgattgtaacccagtatccccatttttctaagagaaagagaattaatgttttaaaaattattatttttcttcttttctctttcctccttttccccacttcctacttaactctttataaatgcagttatgaccctttaccttcccttcttcaaacactccctacagggcaagctatctaacgatgtgcttagaagctccagagtagaaacctcttccaccagaagattgcctctagagacaagagttaacttacaacccatggtatgcccgctatg

SEQ ID NO: 257089 - DNA, 653 bp, Homo sapiens
gttcaaatctactgttttagaatttgtcacaattgcactatgttcttttttctctcctttcttgaacccttttggatcaatcaagtattttagcatgrttctatttgcccttgtgatatctgaatagttatacattgttttattttgcttttaatggtaaccttagaaattgaacgtgcatcccagacttttaaaagttgaaggtaaattgtctattttacatttttctgaacaattcaaggacatttgaacactttaaattaattttactctcttctgaattttatattattgtttctatgtttttaaagttctacatacatttaaactccagaaaacatattgcgctaaacagtatatatatataatatatacgtatatatgtatatataatatatatgtgtatatataatatgtatatatataatatatgtatatataatatatatgtgtgtatatatacatataatatatatatatatatacgctatccattgctctttcttttataatttaacctttattttaagttcagaggtacatgtgcaggcttgttatataggtaaacttttcccatgggggtttgttggacagattattttgtcacccaagtattaagtctagtactcattagttatttttcctgatcctct

SEQ ID NO: 257090 - DNA, 518 bp, Homo sapiens
aaggctacagtgaaccatgatcgcaccactgcactctagccggggcaacagagtgagaccctatctcaaaaaaaaaaaaaaagaaacaattaaaataagattaaaaataatttttttgaaagaaaaatcatgtcagaatttgtgggcgttttgtaggatgtgttattttcaaggcaaggtatgccaacaaactccaagaaaaagcacccattactgcctataaccttgggaaggatgttgaaaccaccactaaaagaaggtacaggttccatgtccaataactccctccctccccataacccaagaaggatgagccattctatccataccactgcaggagaggatgggccaggggatccaacttgtccatctgtttcttgatttccaaatatgagccctgtaagacaatggccataacgttatctccytggagaggtgggagcctacctgctttctgcttttcacagagtgactattagggtccagggcaaggtaggcaccaaaggccacacagagga

SEQ ID NO: 257091 - DNA, 502 bp, Homo sapiens
tgtaggtattcctcctgcctgattgcttgarttggattatcagtcttttccagtctttggatttgaactaaaaaaaaaattggctcttcttggatgttaagccttcaggctttcagactagaacttacaccattggctctgattttttggttttgtttttttgaggcagagtctcgctctgtcacccagcctggagtgcagtggtgcgatcctggctcactgcaacctctgcttcctgggttcaagcgattctcatgcctcagcctcccaagtagctgagattacaggtgcccaccaacatgcctggctaattttttgtattttcagtagagacagggtttcaccatgttggccaggctggtctttaactcctcactccagtcaagtgatccacccgccttggcctcccgaagtgctaggattacaggcagaagccactgcgcccagcccactctctgatttttcaagccttgggactgggactaccactgtaccactggct

SEQ ID NO: 257092 - DNA, 505 bp, Homo sapiens
tgaggcactattgctgtgctcttctcctagccaagattttgactgtccctgctgccatccattcctgatctcaatttctattgttttcctgacatagctttccctttttagtttgcctccctcttcctagtcagccttcagtacttcctcagtgcaacagctttctccctcttagcctgaggaataaccaggcatagaccatctgaggtggcatcacaggtacatagatgaggcacaaaaaacaaagacaacagcaaactgtatccacatgggagatagtgctctcttgctgagccctcagtgttttatgtctgttctcttctatcttctgtgttcagcctgtatagagcttagtctgtccttgactcctaaggaagttcattctagtttcttctrtttctttttccagcctagacagtaactttctctccgtttctccccattcctgagagctttcatgttttctcttaagctaaggaaggatggcttctgagcccaggtctga

SEQ ID NO: 257093 - DNA, 565 bp, Homo sapiens
ttaaggaagtgaactccaagcaaaagcctacatttggtctgctgaacctttttaaagtcatgatgagatggagacctctgttaatgaaatcccttgctagggtcaccactgagaaccccttcacataagtggcttttacttcccctatactgctgtctgatttctcctgttcctggtgtcttttcatattctttttattatctctctctttccctcgtctttttccacctctctccaccaccatttttgctgctatctcaggggagctgtgcagctgacctgtatcgacacccacagcttgatgcagacattgaagccgtgaaggagatctacagtgagaactctgtatccatcaggtgggactctacttcaggggtggcaggggagcaagtcacttctttctgagttgttaaaaggctagaggtttttctttttatggtatgatagtgggataaattatgaacttaatgatagaaaatgctcagaataaatgagmttggctgagagtagagagtaaggccacttttcttaggaattccctcttatcctagacccctctgggcca

SEQ ID NO: 257094 - DNA, 532 bp, Homo sapiens
acctctctccaccaccatttttgctgctatctcaggggagctgtgcagctgacctgtatcgacacccacagcttgatgcagacattgaagccgtgaaggagatctacagtgagaactctgtatccatcaggtgggactctacttcaggggtggcaggggagcaagtcacttctttctgagttgttaaaaggctagaggtttttctttttatggtatgatagtgggataaattatgaacttaatgatagaaaatgctcagaataaatgagcttggctgagagtagagagtaaggccacttttcttaggaattccctcttatcctagacccctctgggccagtagtttcacctttcaggtaagaaatgcttttggcctggaagtagatcctgatcaggtaagtggtgtaaggctrtagctaagaccctaggtacaaaactgtcatccactcttccctttcccctgtccccaggctcagttctctttccaactcagtttctattcccttctttctcccttaatgagtctcacctg

SEQ ID NO: 257095 - DNA, 591 bp, Homo sapiens
gcacaggcagccatgtttctataatgaaccacctaaacagtactttgagttgtacccacataatttttgaggttataaggaaaatcaagtagtattgctagtctgtctgaacaccaaataatacatcctgtgtaactaggcagttgtcttgcagggggtaataggtgtctgacttgctagcatttatcatgcaacctgaagttttgcttcatccacagcagcaagatggaacttattgatgataacaccgtagtcagggcacgaggtttaccatggcagtcttcagatcaagatattgcaagattcttcaaaggactcaatattgccaagttggttttcttaaatatctattttacttaacaatcccaaagggataatggattttctatcttttttttcctcactgtatttttttttctacctgcygtctgttttattattctcaaaggggaggtgcagcactttgtctgaatgctcagggtcgaaggaacggagaagctctggttaggtttgtaagtgaggagcaccgagacctagcactacagaggcacaaacatcacatggggacccggtatattgaggtatgtcctc

SEQ ID NO: 257096 - DNA, 586 bp, Homo sapiens
tccacccttcatgatccctgtcaygtggtgtttacaaaagagtctcaataagtatttggttgactctctggtatatataaattaattgacaggtataaaaaaggagccttagcagagattaagagagagaagatgggttgtaaatagattcttgaaatgtcctacagcaacagctgagataatgactacctggagccttaaaatttcagcctgaaattgctggtatgccatatatgtcattttattttattttattttttaattttttttgagacagagtttcacttttgttgctcaggctggaatgcaatgatgcaatttggctcctgcaacctctgtatgctggggtcaaacgattctcctgcctcagcctccgagtagctgggatttcaggctcgtgctgccatgcccagctaatttttgtatttttagtagagacggggtttcaccatgttgaccaggctggtctcgaactcctaacctcaggtgatctgcccacctcggcctcccaaaatgctgggattacaggtgtgagctgccgcacccagccatgtgtgtcattttaaatgttgcataaacaatatca

SEQ ID NO: 257097 - DNA, 586 bp, Homo sapiens
tccacccttcatgatccctgtcatgtggtgtttacaaaagagtctcaataagtatttggttgactctctggtatatataaattaattgacaggtataaaaaaggagccttagcagagattaagagagagaagatgggttgtaaatagattcttgaaatgtcctacagcaacagctgagataatgactacctggagccttaaaatttcagcctgaaattgctggtatgccatatatgtcattttattttattttattttttaattttttttragacagagtttcacttttgttgctcaggctggaatgcaatgatgcaatttggctcctgcaacctctgtatgctggggtcaaacgattctcctgcctcagcctccgagtagctgggatttcaggctcgtgctgccatgcccagctaatttttgtatttttagtagagacggggtttcaccatgttgaccaggctggtctcgaactcctaacctcaggtgatctgcccacctcggcctcccaaaatgctgggattacaggtgtgagctgccgcacccagccatgtgtgtcattttaaatgttgcataaacaatatca

SEQ ID NO: 257098 - DNA, 658 bp, Homo sapiens
aagtgatccacctcccttggcctcccaaagtgctgggattacaggtgtgagctattgcgcccagcccttttgagtttctgattagcctttcccaaggagtcaatcagatatgcatttatctcagtgagcagaggggtgacttcgaatagaatgggaggcaggtttgccctgagcagttcccagcttgacttttcactttagcttagtgattttgaggccccaggatttatttyccttttacaaaggctttccatgagtattcctctcgcttcctcccacttcctcctgtagattccatttctctaatcatttccatgcccttcccaaggtcatattagaagggagcagggagagaagtccaaccctctttggcagttagctgaaaaaaaggctgcttgtctacttaatgagcatgggaaatgggaatctgaggacagagataatcattttgttaaaaaaatcctccaagcgagagtcactataaggtcatggagacaaggatataggttggcccaaggctgcaggaacaagagacccataggacacaggtgaaagttggtcccaggctaacacattttcattagaacagacatgaaggcaaggttaggggtccacggaaagaccggttcattccagaaccctaaggatggacaggggg

SEQ ID NO: 257099 - DNA, 385 bp, Homo sapiens
gctgtctcagtctttgccgccgcgctggcgagcgccgcccgggaggcagcggctggaggagcggacgggccccgcggggcccgagggcaaggagcagccgcctgccttggcctcccaaagtgccgagattgcagcctctgcccggctgccaccccgtctgggaagtgaggagtgtctctgcctggccgcccatcgtctgggatgtgaggagcccctctgcctggctgcccagtctggaaagtgaggagcgtctccgcccggccgccatcccatctaggaagtgaggagcgcctcttcccagccgcsatcacatctaggaagtgaggagcgtctctgcccggccgcccatcgtctgagatgtggggagcgcctctgccccgccgcc

SEQ ID NO: 257100 - DNA, 613 bp, Homo sapiens
atcatttcattgtttgctcagaacagattgtataaccagcaaagttagaaggtcaagtttatcgattaaaacccacagcaatgaaatatctgttaagccrgggtaactgattcccatgtggcttaatccacatagaatttttccagatggagtgattttgataaaaatttgcagtactgtgagatttcaacaaaacaaaaatataaatagatgcattattattttaaaattacagtgctcacattcacaagttgaatgaatacctccacctctacattcttccttccatttctacaggatccacagtagttctcagctctcactcaaaggtggactaacacaataattttccagctggattctctttctcaagtgtttacatcataattgtgttttactcaaacaaaatatctattatgctgcttccgtcttcctccataatcaaacccaagctgatccaaaaagatgcagaagggatcaccaatataccaaggctcgttatcctgaacaatatttgaagaggacagcctcatagtaatgctagacaatgttcaatgtaatgattacctaaattcatcacactgttatacaacaacatcttttgtggataagt

SEQ ID NO: 257101 - DNA, 613 bp, Homo sapiens
atcatttcattgtttgctcagaacagattgtataaccagcaaagttagaaggtcaagtttatcgattaaaacccacagcaatgaaatatctgttaagccggggtaactgattcccatgtggcttaatccacatagaatttttccagatggagtgattttgataaaaatttgcagtactgtgagatttcaacaaaacaaaaatataaatagatgcattattattttaaaattacagtgctcacattcacaagttgaatgaatacctccacctctacattcttccttccatttctacaggatccacagtagttctcagctctcactcaaaggtggactaacacaataattttccmgctggattctctttctcaagtgtttacatcataattgtgttttactcaaacaaaatatctattatgctgcttccgtcttcctccataatcaaacccaagctgatccaaaaagatgcagaagggatcaccaatataccaaggctcgttatcctgaacaatatttgaagaggacagcctcatagtaatgctagacaatgttcaatgtaatgattacctaaattcatcacactgttatacaacaacatcttttgtggataagt

SEQ ID NO: 257102 - DNA, 592 bp, Homo sapiens
gtgactgttctgccccgaataaataattyacctggttagatattaaaaactaaagtctaatttatctgcctcaccctcaattcctccttccatctctcccttccttcctttgttttttttttttttccccataaactaagaacacactggtcatttaatatataatctgaagtcacaaagggtaatatgctattaccattctcatggaatacctaggttaaaactatggaagaagaatgcaatagaaactttaggttttactattcttaaattagtctttctatagcaaacactaatattttcatttaccatttttattagggaacaactaataatcataattctcaggggagaacatgtttagcaagttttgaattcaggaaacttcactggactaatctaagcccttttgttatagttttcaacaccttttgttcctttgtgtataattagcaactcctttgaaagcttgcaaatattagcgttcagccttgtcataaggactattaatggttgatagtcttttcccagaagtgcataagtgaaaaagctgtcgtcttttgatatagaaacttcattgcaagatttaatt

SEQ ID NO: 257103 - DNA, 585 bp, Homo sapiens
tgcagggtttcttaatttgttctactataaaataatgtgagtgttctctctagccataagtacctcaatggtttgaaatgcagaaagtgtaattaaatttgaagctgaaaaggaaggtaccttggagagtcctggctcttattagctttcaagctagggacaaacagatgccacagaccatttgagggctgtttgttggatgatgctaattgtttactgtgcttattattctgtgacatccttagaatcacccaggtggggagatgtcagactaaagttaccaatatctgtgctaagaaaaactcaacacttctatagtttaagtccattttggtcaaagmagaaggattcaaagccattctgaggtttatgaacaagattaagaaagcacctggcactgattttagcttgtaaaagtggaaccctcagaaattatttcagattatttcatacacctagaaaaaatatatagagaaaggtgtttacaagaagaaataagatcaaaaacaagtacagcctttgtccatgtgaatttaaagcaactagcaggcaactgctttgatttatttgatgcaattgcctgtt

SEQ ID NO: 257104 - DNA, 669 bp, Homo sapiens
aatgtgtatttattataaaatgtataaataatacaattaaaaccacagctaattttactctttgtctattctattttttatcawtggcagtatatttttgtcccccaaaaattcatacgttaaagtcctaaccttcagtacctcaggatgtaactgtattttcgagacaccatctttaaaaagataattacggttagatcatgagagtgggtcatagtccagtaagactggtgttcttattagaggaggaaatcaggtcagacacaaacacagagggaagaatatgtgaagacagaggaagaaggtggctatctacaagccaaggagggagccctcagaagaaaccaaacctgcccacgccttgatctcagacttccacccttcagaactatgaaaaaaataaatttctgttgtttaagtcacccagtacatgcaactttgttatggcaactctagccaactactaatagtccctatagattattatagctactccttcttctaaggccatacatgactagttctggttccctggtagatttttctccagatggagctgcctgccttactctcagaccctttttttgttttttttttgttttgttttgtttttgtcgtgctacctacctttgctttgaatgctctttgatcctttgctcccactcgcaa

SEQ ID NO: 257105 - DNA, 594 bp, Homo sapiens
atgatttaaatctggctcttggctgggggtggtggcccatgcctgtaatcctagggctttggaagcctgtggtgggagaatagcttaagcctaggagtttgagaccagcatggacaacatagtgagaccctcatctcttaaaaaaaaaaaawaaaaaaaagccaggtgccgtggcatgcccttgtagtcctagctacatgaaagactgaggtgggaggatcccgtgagcccaggaagtttgaggctgcagtgagctgtgatcgtcccattgcacttcagcatgagtgacacagcaagagcccatctctaaataaatagatagatatgtaggtaggtaggtaggtaggtaggtagatagatagatagatagatctggctctattgccctttttgctgtgtgaattgaatcaacttactctctttcaacctcagttttttcatttgtttaaaagtggagataagaagagtacctctttgtagggttgtggtgaaaattggctgaatgttaagtgtttagaataggacatgatagtcagtgctcaataaatattatttctaagtacttagtttcattagtattacttaattttggtg

SEQ ID NO: 257106 - DNA, 556 bp, Homo sapiens
ccaattcaacaaatctttactgaggacctaccaactattgttatttgatgttttgttatggtttataggtgacctggatgagacttcacaaggagaacctgatgtctatttgctgttctaaattgtacagacatcagagctgaccctcactctatgggcctttaatttggtttgacacatgaggtcacatcagctagtgccttagagggcttctttttgtaagagttcatcatttacccatatactcctgagcaagaaaaatctagagacaaccttcctttcagctttgtatctctgatgaagagctttcagacatatggcacaagtggtgtctcactttgatcgtctggttgtcagttcatagtgctatgttgattctgtcaccggtatcactattcttccaggctatcttttattcttccctctcattcaaacctagtattcagtctgtcattgagtcctgtcatttcctcctttgaactgtctttcagcttctgcccttctctcctttcccattactctctmactaatctaggcttatgattatcgcaggggt

SEQ ID NO: 257107 - DNA, 623 bp, Homo sapiens
ctgcagtaacactttaccatccctgccccagagatcttttgaggttttgaaatgtttggagaccctgataaagatgaaaagtcctatttcttgatctataggggccccagagtcctgtggaagaaaatttgaatttagcccacaattggggtccgatttgtgtaaatcttttgtcatgggctagtgtccctaaagaagattagaccagaggaaaggattaatgaggttactgaaaaaaaattcccagtgagtaaagaaatctgttaaaggtaggcagactatacatgcaaacaccttgggggaggtagttattttaagtaataaaaggctgtgcctaacagttccctggccaaaccaccttgagaaggattgtgctgcaatatttaggatggaactacacatttcactgtggaccataagagtatgctgtgaaaatctctgaaagascttgttaaagggaacagcgttttttgattgtgttgttgtattatattttgtttctgtttcgttttgtttacgtttttttgttttttgggttttgttttgttttgttttgttttttgtttttcctagctgactaaagagagaggaaagctttgatcgtttcgattttggtagaagtg

SEQ ID NO: 257108 - DNA, 611 bp, Homo sapiens
acaaaactatttatagcattccaagtttcccagatgttcatttatccactggaactttttaggttttgattactctgagtatcataacttttatatagtagagtgaagtctacatttttaaaataaaaattaagctaagaatataaaaccatttatyagtagtataacaatggagaaagagaataaagcttttgtttccacatctgatataccacagaaacttattaatgatgtaggcaaaggacacacacccttgaaggaaccacaataactgggtgtatctacttattagatatatctttttttttcaattctagagatgaaataaaagataactttggaacacatacaaatacttacttttaacatatctctaatgatgtggtaattctgaacactttagagtgtttatggcagcacaattctaagcatatttgcagctgttgaactatattttgctcactgttggtaatgctacggatgtttttgatgtacaatgtttactgattcacttaaatcaggtaggagagggaaactcaaactgatcccacttctatagtcctgtaaagcaagcacttccaggaattatattgacagaaaaagagaaatcc

SEQ ID NO: 257109 - DNA, 549 bp, Homo sapiens
acatactaataatacaaggatgagtctggcagaattcaaattttgctgaatacattgaggtacaacttctgttcgtgattttttgttttcttcctccctccctcctgtccttcctctcttgcttcctccttctcttccttccttcctttcttagaaatgtctttaaatgtagttatgtgcctctgaagggtatttagtcatgaggtctgacttcgccatatgctttttctcagaagtgtagtagcgggtaaaaatatatggcagttaaggaatcatggttaggttttgtttattgttctttatttaacaatagcaaggagtactgmatacataaaatgctggcaaaaatataagtgtaattttgtttagagtgagttttttttataggaattatcttttctttctgttttaaaactgaaatcgccggagtcccaattctttcttaggttgtcttgatatacacaggaagaaataatgttccagcaggtttcattgtttccccaagctgtacctgtgctaagagtaagagtaccgacttcatatatatat

SEQ ID NO: 257110 - DNA, 549 bp, Homo sapiens
acatactaataatacaaggatgagtctggcagaattcaaattttgctgaatacattgaggtacaacttctgttcgtgattttttgttttcttcctccctccctcctgtccttcctctcttgcttcctccttctcttccttccttcctttcttagaaatgtctttaaatgtagttatgtgcctctgaagggtatttagtcatgaggtctgacttcgccatatgctttttctcagaagtgtagtagcgggtaaaaatatatggcagttaaggaatcatggttaggttttgtttattgttctttatttaacaatagcaaggagtactgcatacataaaatgctggcaaaaatataagtgtaattttgtttagagtgagttttttttataggaattatcttttctttctgttttaaaactgaaatcgccggagtcycaattctttcttaggttgtcttgatatacacaggaagaaataatgttccagcaggtttcattgtttccccaagctgtacctgtgctaagagtaagagtaccgacttcatatatatat

SEQ ID NO: 257111 - DNA, 594 bp, Homo sapiens
cttttctgctttaattgagttcttctgtttgtgtttttgatgttttatttaccrtgtgcttattggaaggatttttctatttattgttgtggttcctgttctattttggccctggaaatagctcctgtcttgtgttgcccttttctttggaattttgtttaatttctgtcagatgaaggtgctttgaaggctgcagggcccttaatgtcaataaattaaggatataaaaaatgccatctgccaccttttcacctactatacaacatttatcaatgtatcaggaaaaattactttagtcacaattcttttacagagaaatttattttcttgtttttctctgatgaccttctaatttttaggtgtaatcagattgcagtgaagccagtaaattacacatgctattattaagtttaaactctagccactgctagaccattcatatcatgggacattgtctgttgagattaagcagggagcaggacaaaccttccttacagggttcatcagtgaccaagaactgcatgcctgtgtgctccacagtggaataagctgtacagtcttaacaactgcagatcacttagcatgagtgatacc

SEQ ID NO: 257112 - DNA, 594 bp, Homo sapiens
ttacttgactcagggcgttgaaggcataaaggccttctgaaataggcaatgtctgagataaagagataagtattgtaagatatggcattctagacagagatgctatatgtgggcaacaccaggtaaacatgagagaaataggaatttcagggaactacaaataaccatgagatatatggtaaaaggcatgagagatggaattggagaaataaaactggatccacatgatgatgacaagcgtaatgacaattactggattttaaggtcaaatttgcagccatttatttagtcatattctgtaacaggtttcaaaaatacagcattgtgtttaayagtagtcaggcacatcaagctttagaacagaagaaggctgtggtcatataccagtgattttgctgaggcctggaattctgtttcatcttgaaaatgttctgttacaaattaaagactggttttcttaaatgagtacaaagcacagctacagaacgaaaacacacatacataaaaatagtttgacagcatttccacagaacaccttgggggattgaacacagtgtttgagattgctacaaaattgtaagctgaaagcaacag

SEQ ID NO: 257113 - DNA, 568 bp, Homo sapiens
cagccacaacaggctattaaaccaaagcttaatccagagtatggctctaactatcttcagttctatgaaggctgagaaaggtgaggaagctacagaagaaaagtttgaagctggaacagcttggttcattaggtttaagaaaagaagctgtctctataacataaaagtgcaagatgaggcagcaaatgctgatatagaagctgcagcaagttatccagaagatttagctaaaataattgatgaagatgtctacattaacatcagattttcartgcagataaaactgccttttattggaagaaggtgccacctaggactttcacggctagagaagagaagtcaatacctggtttcaaagactcaaaggacaggctgactctcttgttggggactagtgtaactgatgactttaagttgaagccaatgctcatttaccatacccaaaatgctagggaccttaagaattatgctaaatctactctgccagtgatttataaattggacaacaaatcctggatggcagcacattttttacagcttgatgcacagaatattttaagtcatagtt

SEQ ID NO: 257114 - DNA, 591 bp, Homo sapiens
gagttgtcatgagaattaaatgtaaaacacttagaagagtgactggcatacaggaaacaccatacactattattacaatctaagagaggtggactgcacawctctttggaagagttcagggtacttctgtactttttccctaggggtagttttggtcccttccatgggcaaggctaggagatattgaaatgcctatatgcactgcaaacaactaagactagaatcagattcctagacccaaaatgcagttgtcttcagacttatttctttctcatgcagcttcttcaacaccaaagaatgcatgagaaataaatctgcatgcatctccagccttgggttcattagcacaattcagtaagtaatgagaaaggaataacttgtgctaagaaagatggctaacctttataaataaactgattattcgcaagcataaaatgaaattaattttggattattacaggggagacatgagtaaactacagttattaggagcataatgcagtcacattaattcaagttagtgagtaattatcactgtttccatttttctttttaaccatttaagaggtcttactcaacacagtagaacag

SEQ ID NO: 257115 - DNA, 563 bp, Homo sapiens
ctgctcccttgtgttgatgtgatgccaagaaggaagaaagcaaccctttactgagtgcctactgtgtgctaagtccttcatggacatatgctggcatgagycttggcacctcctgtaggaggcaggtactaaataaatgccaccaggcttgaagtgggttaaaagttggggagttgcctctgtcctcctgtctatcacggatggcctggtgtcaagaaacgcgcctccacctaggaggtgctgggcaccgtgggcaggaaactgaaaaggcacatcttgaatttagagagcactggacttccacggtaaatcaaagcacttctttctgtcttttttttttttttttttaaattatttactgtcttcattaaagacacattctgcttactgttaggctgcaggcaatactaatggaattaaaagaaagaaaaaaactgcaggcaattaaatgactaagtccttttgtcctggaaacaactctgaaaaaaaggatgtatcatttctccaaagactagggcagggagttgacggattttcccctcctccccaccgcttaccaccta

SEQ ID NO: 257116 - DNA, 563 bp, Homo sapiens
ctgctcccttgtgttgatgtgatgccaagaaggaagaaagcaaccctttactgagtgcctactgtgtgctaagtccttcatggacatatgctggcatgagccttggcacctcctgtaggaggcaggtactaaataaatgccaccaggcttgaagtgggttaaaagttggggagttgcctctgtcctcctgtctatcacggatggcctggtgtcaagaaacgcgcctccacctaggaggtgctgggcaccgtgggcaggaaactgaaaaggcacatcttgaatttakagagcactggacttccacggtaaatcaaagcacttctttctgtcttttttttttttttttttaaattatttactgtcttcattaaagacacattctgcttactgttaggctgcaggcaatactaatggaattaaaagaaagaaaaaaactgcaggcaattaaatgactaagtccttttgtcctggaaacaactctgaaaaaaaggatgtatcatttctccaaagactagggcagggagttgacggattttcccctcctccccaccgcttaccaccta

SEQ ID NO: 257117 - DNA, 592 bp, Homo sapiens
ccttcctggtggtggccacctcagggtgctgctgcttccacagacttgtctgtcactaattaggctgtgctccttcctcccccawctcctcccttgtactctctcttcctatttcctcttctgtctcttctcattctcacttggttttgtccaagtaggcagcccagtggatttgtatcaataagaagcaatcagggactgccataatacttgcaatcaatagataattgcatcagggtgattccattacctcaggcttccatgcactgattaccgctgaggccttgccattccagtagctgtatctctgctgtgctgcaggctttggtggagcagagggtagggggctgctaggttgagccccggggagcctaccccgggcctaggcagttgtggggcccatcagggtccagggtcagggtcagggtcagacaccaggaaatcagacacaggcgtgagagtctgatgggctgatgaatgagtccagaggtagcctggagtcgggcagcaggatcaacaggactagagccctgagaagcacattctggagtggccttcttggatagaggcaactaccctcatggcccccaaa

SEQ ID NO: 257118 - DNA, 592 bp, Homo sapiens
ccttcctggtggtggccacctcagggtgctgctgcttccacagacttgtctgtcactaattaggctgtgctccttcctcccccatctcctcccttgtactctctcttcctatttcctcttctgtctcttctcattctcacttggttttgtccaagtaggcagcccagtggatttgtatcaataagaagcaatcagggactgccataatacttgcaatcaatagataattgcatcagggtgattccattacctcaggcttccatgcactgattaccgctgaggccttgccattccagtagctgtatctctgctgtgctgcaggctttggtggagcagagggtagggggctgctaggttgagccccggggagcctaccccgggcctaggcagttgtggggcccatcagggtccagggtcagggtcagggtcagacaccaggaaatcagacacaggcgtgagagtctgatgggctgatgaatgagtccagaggtagcctggagtcgggcagcaggawcaacaggactagagccctgagaagcacattctggagtggccttcttggatagaggcaactaccctcatggcccccaaa

SEQ ID NO: 257119 - DNA, 592 bp, Homo sapiens
ccttcctggtggtggccacctcagggtgctgctgcttccacagacttgtctgtcactaattaggctgtgctccttcctcccccatctcctcccttgtactctctcttcctatttcctcttctgtctcttctcattctcacttggttttgtccaagtaggcagcccagtggatttgtatcaataagaagcaatcagggactgccataatacttgcaatcaatagataattgcatcagggtgattccattacctcaggcttccatgcactgattaccgctgaggccttgccattccagtagctgtatctctgctgtgctgcaggctttggtggagcagagggtagggggctgctaggttgagccccggggagcctaccccgggcctaggcagttgtggggcccatcagggtccagggtcagggtcagggtcagacaccaggaaatcagacacaggcgtgagagtctgatgggctgatgaatgagtccagaggtagcctggagtcgggcagcaggatyaacaggactagagccctgagaagcacattctggagtggccttcttggatagaggcaactaccctcatggcccccaaa

SEQ ID NO: 257120 - DNA, 559 bp, Homo sapiens
ttgcattgggttagaacatgctcctttagcttggaggagtttgttattacccactttctgaaggctacttctgttaattcatcaaactcattctctgtccagttttgttcccgtgctgatgaggagttatgatcctctggagggaagaggcattctggtttttggaattttcgacctttttgcatgggtttttcctcatcttcatggatttatttacctttggtcgttgatgttggtgacctttggatgaggtttttgcgtggtcgtcctttttgttgatgttgatgctattgctttctgtttgttacttttccttctaacagtcatgcccctcttctgcaggtctgttggagtttgctggaggtccacttcagaccstgtttgactgggtatcaccagtggagcatgcagaactgcaaagattgctgcctgctccttcctctggaagcttcatcccagaggggcacccgccagatgccagccagagctttcctgtatgagatgtctgtcgaccactgctgggaggtgtctcccagtcaggaggcatgggggtcaggga

SEQ ID NO: 257121 - DNA, 607 bp, Homo sapiens
cttggtcatagtatattatcattgattttagactcaatttgctaatattttgtttcagatgtttaatcaataataaactgttaaattgccctgtaacttccctttcttgtactgactttgttaaattttcattttgaagatacastggcctctttttgacttcctgaaatattatgtaagtttggaattatttgttccctaaaagcttacctaatatttagaattctgtacctggtatcttcttcgaagagatgttttaaaatattgaatcagtaccttaaaggctataaaatcatttcttattcaattttagggatttttattttcctaagaatgtattcatattgtctgaatttttaagttatggagtttttattttaattactttttaatctctgctgcctcagtgcatagttatgtctctttcatcctaattgctatttacttgttttttctcattatatccttatcagacttgcagagatatgccaatttcattatgattttcaaagaagcaagttttatctattgctcccttctattaactctgtttttcatttttgtaatttctgaccttgtctttactacttcctaacttctttccttg

SEQ ID NO: 257122 - DNA, 607 bp, Homo sapiens
cttggtcatagtatattatcattgattttagactcaatttgctaatattttgtttcagatgtttaatcaataataaactgttaaattgccctgtaacttccctttcttgtactgactttgttaaattttcattttgaagatacactggcctctttttgacttcctgaaatattatgtaagtttggaattatttgttccctaaaagcttacctaatatttagaaytctgtacctggtatcttcttcgaagagatgttttaaaatattgaatcagtaccttaaaggctataaaatcatttcttattcaattttagggatttttattttcctaagaatgtattcatattgtctgaatttttaagttatggagtttttattttaattactttttaatctctgctgcctcagtgcatagttatgtctctttcatcctaattgctatttacttgttttttctcattatatccttatcagacttgcagagatatgccaatttcattatgattttcaaagaagcaagttttatctattgctcccttctattaactctgtttttcatttttgtaatttctgaccttgtctttactacttcctaacttctttccttg

SEQ ID NO: 257123 - DNA, 568 bp, Homo sapiens
gaggtcatttggattttctctcttcttggttaatattgtcaatggtctatcagttttatttatcttttcaaagaaccagattttgtttcatttatcttttgtattatttttgtttcaatttcatttagttctgctctgatcttggttatttcctttcttctgctgggtttggatttggtttgttcttgtttctctagttccttgaggtaygaccttagaatgtcagattgtactctttcagtcttttttatgtaggcatttagggctatgaattttcctcttcacaccacctttgctgtatccgagaggttttgacaggttgtgacattattgtcattcaattcgaagaatttttaaatttccatcttgattttgtttttgacccaatgctcattcagatgcaggttatttaatttccatgtatttacatggttttgaacattccttttggagttgatttctagttttattccgctgtggtctgagagagtgcttgatataatttcagttttcttaaatatattgaggcttgttttatagcctatcatatggtctatcctggagaaag

SEQ ID NO: 257124 - DNA, 568 bp, Homo sapiens
gaggtcatttggattttctctcttcttggttaatattgtcaatggtctatcagttttatttatcttttcaaagaaccagattttgtttcatttatcttttgtattatttttgtttcaatttcatttagttctgctctgatcttggttatttcctttcttctgctgggtttggatttggtttgttcttgtttctctagttccttgaggtacgaccttagaatgtcagattgtactctttcagtcttttttatgtaggcatttagggctatgaattttcctcttcacaccacctttgctgtatccgagaggttttgacaggttgtgacattattgtcattcaattcgaagaatttttaaatttccatcttgattttgtttttgacccaatgctcattcagatgcaggttatttaatttccrtgtatttacatggttttgaacattccttttggagttgatttctagttttattccgctgtggtctgagagagtgcttgatataatttcagttttcttaaatatattgaggcttgttttatagcctatcatatggtctatcctggagaaag

SEQ ID NO: 257125 - DNA, 482 bp, Homo sapiens
aaactccttacttccaggcatgtgaattaccacaaatagatcccttgggtctgtcccaattgagctacctgactcacggtgctgacaatttcgtctctcggaaagaaaaggatgtaagaaaggagctgctactctggacttaattctgaccaacaaggaagaacaaaytggtgaagtagaagtgacgggaaccttgggagaaaggggccatgtcatgctggaggttgctattgtgaatgaaaggaacattagatagagtcagatatgtcacttttgaaaaggaggcttcaaaacagtcacacgcacctggtgccatggatagactgtagaaacacagcgatcatctctccaaacccaaaatcatgatgtgtcataggacaaaagattttatattgcagccggtgcaatgagcactccgagaagaagcagcctacgtttcaaaacagtgcttctaaacatatgccagtggcctatgggaatag

SEQ ID NO: 257126 - DNA, 616 bp, Homo sapiens
gcagttgggaagtccaaggtcgaggtgccagcagatccagtgtccagtgagggcctgcctccttatttgcaaatagctgccttcttgctgtgtcctcacatggagggggagagcaaagagaaagaaagcaagctctttcctgtctcttcttataagggcactaatctcatcgtgagggctccaccttcatgactaattacctctgaaacccccaactcctaccatgcattccattggaagtgaatatttcaacatatgaatttaaggtggacgcaaacacacagtccataacatgtggtcatccctacatctatcattggcaaaagctgttttataaaatcatagtagaataatcttctaggatttaagggacattgcaaaatcagccaaaataatcactacaaatgggcacatcaccagggagaaatgccagaggagtatataccaaaaagagcaggctctacaggtcacagctaataatgagctatgktgacactggaaaggacaatgcgaatggttacccagatacatttgtactaatgggagaggaacactctgcttggggcagacagtgcaatgtcaaccaaacgctgcagacgagcattgccactcagtc

SEQ ID NO: 257127 - DNA, 562 bp, Homo sapiens
ataagcagcaaaaccataaggatgatggaaggaggtgactattgtgagtgccgttgacatgttgaagagtgttggggctcagaaaacaacaccccaaaatgaaggacttcaaagcagccttagaagcaaaagtgtttctctgaccttctcccgccttcatgtctctcagtcccattctaccccaaggctaactatagaaattagaattcctccttcccgaggtgggccatagaaaccaggaccccttttcccraaagccagccacaaaacctaaaaatattactctaactttccccatgcctttccatataaaaactggtcataaagaaattatctgacctaccttgtttggctttaggtcataagacccccattccagagagggtcctgtcccatacccagaagagagcaatgctgctcagaaacaccaggaaggatctagacagacaggcctttctggctttccccacccactctgtttgaattagatcatgccctgtttgtctaaccatatttctacacgattgtccatatttgttgaacctaggcataaaaatggaca

SEQ ID NO: 257128 - DNA, 562 bp, Homo sapiens
ataagcagcaaaaccataaggatgatggaaggaggtgactattgtgagtgccgttgacatgttgaagagtgttggggctcagaaaacaacaccccaaaatgaaggacttcaaagcagccttagaagcaaaagtgtttctctgaccttctcccgccttcatgtctctcagtcccattctaccccaaggctaactatagaaattagaattcctccttcccgaggtgggccatagaaaccaggaccccttttcccaaaagccagccacaaaacctaaaaatattactctaactttccccatgcctttccatataaaaactggtcataaagaaattatctgacctaccttgtttggctttaggtcataagacccccattccagagagggtcctgtcccatacccagaagagagcaatgctgctcagaaacamcaggaaggatctagacagacaggcctttctggctttccccacccactctgtttgaattagatcatgccctgtttgtctaaccatatttctacacgattgtccatatttgttgaacctaggcataaaaatggaca

SEQ ID NO: 257129 - DNA, 564 bp, Homo sapiens
aagctgtggcaagtacaatggaggcctcagtaagataaacccttctacgattcagggacaagatagatcagtaaggtttttatagccagggatttgagacaggcctgatgccctcaaaagtaaaggacacatgattgtatttcataatgttcctaagaaaaaagcacaacctgtttatgagcctccttgggttcaagaaactgcatgtgcaacctatttgttgggtgacacagaagcctataagctctcagtggtgcctggagcaggaaagggctctgcagcaggttaaggctgcagcaccagcagctcttgctacttaggccatatgaccccatagaagcaagatctctggaagcaaggccaaagagagtcctgaagmagctatttctgggtggagtgaacttaccccaagaagcaagtgtatatgagcagcgtgaggggtggcttgcatggatattgtgttgccccaccagcttccctctattaggccaaggtactcagcccacagctgctagaaggctcaaagggctgctaagggctcaaagctgtgtccctcagtgagaa

SEQ ID NO: 257130 - DNA, 588 bp, Homo sapiens
cagtgcttctctgatcctcagtttcttccactaataatgacaattaaaaaagctacccagcctacagagcagccacatatgctgtacaggctgggcactgcgcaactcaagcatgtcttgtgactgatggcagggggctggagctgtgcagaacagtggcccggcctgcctgcttccaagttgatggggtcacacaagatcagtgattatttactgtctgcttctctttgcttctgctgattttcctagaatgtgacctttcacctgcctggctcagggtatatgcccatcagctccctctctagcgaaatcctgcatctcgctcctcctggtcaaccttgccttcttgatacctgagacctgcagtttccaagcrcaacagagaggtggagaaatttccagtatttgtggcttttctggagcaacagggcttatctggaaaattcacaccttaaggaaggacctgaaggaggcagcttactgcatggagaggagaactggattccagggtgggaagatcaagcaggtcacaggacaaataaggaccctgcacacatctgcccactcaacggatgggtcgagggttac

SEQ ID NO: 257131 - DNA, 588 bp, Homo sapiens
cagtgcttctctgatcctcagtttcttccactaataatgacaattaaaaaagctacccagcctacagagcagccacatatgctgtacaggctgggcactgcgcaactcaagcatgtcttgtgactgatggcagggggctggagctgtgcagaacagtggcccggcctgcctgcttccaagttgatggggtcacacaagatcagtgattatttactgtctgcttctctttgcttctgctgattttcctagaatgtgacctttcacctgcctggctcagggtatatgcccatcagctccctctctagcgaaatcctgcatctcgctcctcctggtcaaccttgccttcttgatacctgagacctgcagtttccaagcacaacagagaggtggagaaatttccagtatttgtggcttttctggagcaacagggcttatctggaaaatkcacaccttaaggaaggacctgaaggaggcagcttactgcatggagaggagaactggattccagggtgggaagatcaagcaggtcacaggacaaataaggaccctgcacacatctgcccactcaacggatgggtcgagggttac

SEQ ID NO: 257132 - DNA, 588 bp, Homo sapiens
cagtgcttctctgatcctcagtttcttccactaataatgacaattaaaaaagctacccagcctacagagcagccacatatgctgtacaggctgggcactgcgcaactcaagcatgtcttgtgactgatggcagggggctggagctgtgcagaacagtggcccggcctgcctgcttccaagttgatggggtcacacaagatcagtgattatttactgtctgcttctctttgcttctgctgattttcctagaatgtgacctttcacctgcctggctcagggtatatgcccatcagctccctctctagcgaaatcctgcatctcgctcctcctggtcaaccttgccttcttgatacctgagacctgcagtttccaagcacaacagagaggtggagaaatttccagtatttgtggcttttctggagcaacagggcttatctggaaaattcacaccttaaggaaggrcctgaaggaggcagcttactgcatggagaggagaactggattccagggtgggaagatcaagcaggtcacaggacaaataaggaccctgcacacatctgcccactcaacggatgggtcgagggttac

SEQ ID NO: 257133 - DNA, 588 bp, Homo sapiens
cagtgcttctctgatcctcagtttcttccactaataatgacaattaaaaaagctacccagcctacagagcagccacatatgctgtacaggctgggcactgcgcaactcaagcatgtcttgtgactgatggcagggggctggagctgtgcagaacagtggcccggcctgcctgcttccaagttgatggggtcacacaagatcagtgattatttactgtctgcttctctttgcttctgctgattttcctagaatgtgacctttcacctgcctggctcagggtatatgcccatcagctccctctctagcgaaatcctgcatctcgctcctcctggtcaaccttgccttcttgatacctgagacctgcagtttccaagcacaacagagaggtggagaaatttccagtatttgtggcttttctggagcaacagggcttatctggaaaattcacaccttaaggaaggacctgaaggaggcagcttactgcatggagaggagaactggattccagggtgggaagatcaagcaggtcacaggrcaaataaggaccctgcacacatctgcccactcaacggatgggtcgagggttac

SEQ ID NO: 257134 - DNA, 582 bp, Homo sapiens
aaggtaactgtttttcaacccatataatccgtgtttcaacttgattaaatgaggaagttagttttccatctctctctctcttcctccctctctttccatgggcaacattatccttttcctcctggcgtaagcaagaagccactttctgccaggcgcctctcccctcttgctttgattttccctgacaggaagactaatgaaacctgggtgcaccagaaaataacatttatttcatgcagaaatatgctgaaccacaactgaaggtggctgaggtgatcatttgatgggaragagactggttttcaagaggggaaattgtggttcatgaagatgaagggaggaaaagtgttcctccccgtgaagtccctcctatctcaaacccatctttccccagacttccgctctctgcttagaccatttcgcttctggttcaggcaaccagagcgtaaggggtgggctggcatgtggagtcatgtgtgaattcgttcattgattaattcaacaaatattttttgcatgcattttacatgccagccactgtgctacacagggaggatagaaaggtgaataagacctcactgt

SEQ ID NO: 257135 - DNA, 582 bp, Homo sapiens
aaggtaactgtttttcaacccatataatccgtgtttcaacttgattaaatgaggaagttagttttccatctctctctctcttcctccctctctttccatgggcaacattatccttttcctcctggcgtaagcaagaagccactttctgccaggcgcctctcccctcttgctttgattttccctgacaggaagactaatgaaacctgggtgcaccagaaaataacatttatttcatgcagaaatatgctgaaccacaactgaaggtggctgaggtgatcatttgatgggagagagactggttttcaagaggggaaattgtggttcatgaagatgaagggaggaaaagtgttcctccccgtgaagtccctcctatctcaaacccrtctttccccagacttccgctctctgcttagaccatttcgcttctggttcaggcaaccagagcgtaaggggtgggctggcatgtggagtcatgtgtgaattcgttcattgattaattcaacaaatattttttgcatgcattttacatgccagccactgtgctacacagggaggatagaaaggtgaataagacctcactgt

SEQ ID NO: 257136 - DNA, 578 bp, Homo sapiens
gtctagctaattgttttttaatttttattttttggtagatatgggggtctcactgtgttgcacaggctggtttcaaactcataggctcaaggaatcttcaaaccatggcctctcaaagtgttgacattacaggcatgagttaccatgcccatcctgcatgtgaaagccttackagatatgatatgcaaatatttctctcatttggtacgtttcctctttcattctgttgattgtttcccttcatgtacaaacattttaggtttgatgtagtcttgcttgtctgtttttgcttttgttggttatacttttagtgtcacattcaaaaacttattgacaaaaacaagaagggtttccatgtgttttcttctagttttacaatgtcaagatgtatctttaagtacttaatttattttgagttgatttttgtgtatgttgtaaggtaaggattcagtttactttttttttttaatttgcggatatccagtatgccaaatatgattagttagataaactgtgctctgagcacccatgtcaaagataaattgagtagagtacatggatttatttctgcattcttc

SEQ ID NO: 257137 - DNA, 534 bp, Homo sapiens
tccctctgtgtgaggtatacaagtaggagagtcatggggggattggctgctctgtgatgtcgtggcaactgtagaagtgggtggaaatgcagacctaggggagtgtgcggctggccttggcttggtgagctgccaggaagggagaccctgacctcctgatgggcctctctatgtggcggaccaggtcttttttttatgccaaggagagcacaaggcccagacctcagacagaccttggtcttgattttcagttatctgaggagaggggagtgccaaagtgatgggggacagtggagagcaatgggtgttgtggcagacagccaaagcctctttggccctccccccagtgttggttacaggggcccctggcagcaatttctttggctcctgagccatgagttatcyatggtgtggtggctcagcctgggcaggacagtaccccagagaaaaggtggtagagggctcacatggacacgcgtgtcatcagtggtcttgggctgtcattttgcagtgatgggctttccatggatttct

SEQ ID NO: 257138 - DNA, 418 bp, Homo sapiens
tgtctctgggtgagtgagtgtgaggatggtgtccatggccctgggtcacttctgttgttcccagcggagtagggggctctactgttgtgcacatcttcctggaaatggtctcttggccttcgttgtcgggtggccccacctgctgctgctctcgtgagcaaatactgctctgtatcattcccgctttccatcccaaaagtgtccagagcgaatgtgccctgtccctggcctgggactctcctttgggctccagtcatgcatgaggctacccgtggagatctatgtgcattctgagcagtgtgtttgcaatcccagkggcattgccacagagagtcttgacttggcatgtctccatgtgactgtgtgctggcgatgttccagtgttggactccaaaagtccctaggcgtgataaagcat

SEQ ID NO: 257139 - DNA, 334 bp, Homo sapiens
tgctcttacaggggctagagagagagggacaaatttcatttgatgatgcccattgcaccaaggggttctgtccaggcttaggatggggtctcgtttgggcaaaggagaatggcaggggagtggaggctatgtacacaggagattccttgtttgaaggactctatttgtgaggccagggtaccacacatgctgtccgcaggagtaggtgaatgtgcagttgcccaggaagagttagcctgtagcctgcctctgcakggcagtttgtccttgggtcctggctctggatttccatgttccttggaggaggataggtgattttgcttgagaagacagc

SEQ ID NO: 257140 - DNA, 639 bp, Homo sapiens
gacttttttctatggtttttcagtaacattttaaaattgcttctgtataataaagaatttaactggcctttgctcctggttcctgggaagtaacctatacatcctatacatccttggaatttacccagtgaaagaaatgtgtttgttactcaaggtgggtccctaggatcacacctgagttcttggtaatgagatgtctcaagatggtgactaaccaggccacaaaagatcaaacaaagactaaagggttgggggttttgagcaagccctcctgggagggcaggagagttgctgactgaattcagtgacatgtccagtgattcratcttgtcaacataatgaatccccaacaaaaatcatcgacatctggagttctggtgagcttcctgattggggatataccctaatgtgcaggtaatgcatcctgaggacagggaagatttgtgtgggacctgcccagattttgctctatgcatctgttcatttgtatcctttataaaaaactagtaagtatagcactttcttgagatctactagtcatttataaaaccttagtcaattataaagtctgagaaaatagtaggacctcagaatctatagactgttggtcggaagtgtgggtgccctgccaaccctgga

SEQ ID NO: 257141 - DNA, 603 bp, Homo sapiens
ttcttgggtttgctcataataaggataatgacaattgaaaatacaactaagatataattagtttctctactattagactagcaaaagtccagaagttttttacatttttttttttttggcaacatgttcggaattatggaaaatcatacgttgcttctgggcatgtgaaatgtaaaccatatgggtaggaatttaatattttgtaaatttatatctgtggcaaatacatagttcatctcctagtaatatgtagcagtaagaaggattgatggatgtttgtataccactatgtgataatgtcttggatataatgtagaaataggggagaagtcggctacaggaagtaaaaatggcaatatggtgctcagggtgcattcatcactataacagataaccattttgttaatggtgccctgcgcggtaactgaaattgtactgggctttcaacagaattttgtcaaaatgggaygctgcatgagctaataagttgtgaaataaatagggttttattgtggagtaataagtaacacaaagaagggggtttgcagtatcttaggaagaagaacagacgttcttggtaaagttcctttaatatgaaaatag

SEQ ID NO: 257142 - DNA, 603 bp, Homo sapiens
ttcttgggtttgctcataataaggataatgacaattgaaaatacaactaagatataattagtttctctactattagactagcaaaagtccagaagttttttacatttttttttttttggcaacatgttcggaattatggaaaatcatacgttgcttctgggcatgtgaaatgtaaaccatatgggtaggaatttaatattttgtaaatttatatctgtggcaaatacatagttcatctcctagtaatatgtagcagtaagaaggattgatggatgtttgtataccactatgtgataatgtcttggatataatgtagaaataggggagaagtcggctacaggaagtaaaaatggcaatatggtgctcagggtgcattcatcactataacagataaccattttgttaatggtgccctgcgcggtaactgaaattgtactgggctttcaacagaattttgtcaaaatgggacgctgcatgagctaataarttgtgaaataaatagggttttattgtggagtaataagtaacacaaagaagggggtttgcagtatcttaggaagaagaacagacgttcttggtaaagttcctttaatatgaaaatag

SEQ ID NO: 257143 - DNA, 642 bp, Homo sapiens
gcctttttctctttaacatgcaacccctaggacataaagagcctctctctgcagttataaaagctgttctcatgggtctgttccatttcccatctgaaagaaaaactcctgcacctgggcaaggcttccctggtaacagaagccaaaggcaatgtttggatctaccattaaattaaagcctgttgggagttctgaaaacaaaaacctcatttgttccccaagcagtattatttaaacaatggctggcacacagtaggacctcaggttatatttactgagtgaataaatgaatgaatggatggatgaagaggtaactcgatgatgtctctctttgtgttctgacttcagaggcaccagaaactgttcagccgggtgccacagcccagcctgccagctcacattctttgccacacattaagcagcagctgtggagygaagaatgctatcatggcaagctgagcaggaaggcggcagagagcctcttggtaaaggatggggactttttggttcgagagagtgcaacatcccctggccaatatgtgctgagtggactacagggaggccaagcaaaacatcttctcctggtggatcctgaaggcaaggtatcattgacttctcattagaggtttcacaggatgttgt

SEQ ID NO: 257144 - DNA, 499 bp, Homo sapiens
atctccccaggacaaactacataagagatgccatacatacacaaagtgaaaagacagaaacagactgggagaaaatatgtataactcagttatggccaataaaaataatggtgattcacmgaaaatagctatatgacagcaattcatggaaaagaaaacatgcaaataggtaataaagctatgaatagacctttctagtggtctgaagagtataaaacagtaagatttttgccgacatgaaaaataagatgacaataataataaactagaaatgtgccaaatgtaaaaatcttaagctcaaacaaaacttcaaatgtgatatattaaacatggcacaggcagtaccctattgcttcatttttttttaatatcagaaatccaaatatcatgctttacaagaagaaggcccctaaatcatgagtgaatgactactacccagaaaccatttacaattcagtcaatgccatagagtgcacaacaaaatataagtcttaaatgt

SEQ ID NO: 257145 - DNA, 615 bp, Homo sapiens
ctagttattatttaatcttcacaacagcccttatgaggtggctactgtttttccccccacattttatataaaaggaatttgaggcttagaaagtttatttgtctaaggtcatcagttggtaagtggcatttctgcctgaggaaatctgccagcccagcctctcgcccccctgttggtacctttttcctgacatatgaccccagtgcttttctttataattcctgggtaccccctgctctcatgattcttcaccacacccccacacttcttctccttgagaaatgactggttcagaattttgacttttatcaaaacatatccctttcctcaggatctkcctctaaatctctattagtaatttctggtaaatcatctttattaatgagttaatgtggaatgggctaaccccttcctagtaatatttgttcagtttaacaattgggaccttctgaaaacaatggtttaacctaaaagggtgcccagtggtagaatttcaggcatcatgattatctgaaggtaacaattagactagtagagaggactttttaactctgggaagggaaagatgagggaggaacagggatggcctcagagaaggaagcagttacgtaattg

SEQ ID NO: 257146 - DNA, 615 bp, Homo sapiens
ctagttattatttaatcttcacaacagcccttatgaggtggctactgtttttccccccacattttatataaaaggaatttgaggcttagaaagtttatttgtctaaggtcatcagttggtaagtggcatttctgcctgaggaaatctgccagcccagcctctcgcccccctgttggtacctttttcctgacatatgaccccagtgcttttctttataattcctgggtaccccctgctctcatgattcttcaccacacccccacacttcttctccttgagaaatgactggttcagaattttgacttttatcaaaacatatccctttcctcaggatctgcctctaaatctctattagtaatttctggtaaatcatctttattaatgagttaatgtggaatgggctaaccccttcctagtaatatytgttcagtttaacaattgggaccttctgaaaacaatggtttaacctaaaagggtgcccagtggtagaatttcaggcatcatgattatctgaaggtaacaattagactagtagagaggactttttaactctgggaagggaaagatgagggaggaacagggatggcctcagagaaggaagcagttacgtaattg

SEQ ID NO: 257147 - DNA, 569 bp, Homo sapiens
ggatagctcccggctcccgctgcctacctccatctgcggaaggtcaccctcgccaggcatcacatccatctgcaggtcactgctctcttcatacagctcggacaactcagccatttccgacattgtgcaaaccgctcaacctctaggaaaaagcttccagcaagacagatgctgcgcggccgtgcgttcgtgcgcgtgcgcaaaggctgcgcgcttgcgtaaccccgcgcgcaggcgtggtcctcaggtaccgcctcctacttggcgcgccactgtggttggagtagctcagtgttttctccggggtgttggcgtcgccttttgagctacgtttccatcgattcgaacttcgtatctagggaccctgcatgcaagagcgtaacagtttctgtgttacttaaccctactgctgcttgtaatgctgcaaaccggaaaataaccttacatggccttcgtaacatttaatgctccttcccccycttcctcttcccctgggcaatttaccgatgtactgatgacttgtaaatccacgtctccaaaccagacaacatccataaccacagatcagc

SEQ ID NO: 257148 - DNA, 531 bp, Homo sapiens
aacatgtgggggtagtctttttccttaaagcagtgatgcataattctagacaacaagtggtgctacttttaaaagacctcatagatgcaacttttttctctagtgcatttgtgtctttgtagaattgctttgctacctttcatttgaggcatgtcttgtacaaatatgttgatgtgttctgttttgtttttcatgttgtgtcttttgtatttcttgttttttatatctctcagtcaactctgatatggctaattctcaaaatgatttttcaagtaccttgcatgtggagatgagcatttaatgagggtcttgtgtgttaatgttagcgttaaaagatttaaagatgaagataacttttcattgaagaaaatatctttctcttgttgcatctttagatgacaaatggattgagaaacccyttaaaaaaaacccatccagtgaatatgagaaataaatatagagtgaggaagtattcccacccacctccaacatactctgttcccattcccaaattttatttcaccaaagctc

SEQ ID NO: 257149 - DNA, 637 bp, Homo sapiens
attttctgtttagcagcatttttcactgcaatgttaaaataaatatgacattgaattcgaactgtgtgtatgtcagtggaatcaaatcaaaagccactaacatggctgtctgtttcaytggactgtcccatttgctggttaaaaggattggggcccaaatcctctggcctagcatttctcagtgtttgctattcagactgtctaaatacagcatgtgacaagctgaagaagccaaatctatcagtcatttctgatttcattatattctccccctcttcctgctaaaaagacaaaaaacaaaaaacaaaaaaaacaaaaaaaacctcatgagtgcatggatttaaaagagggcaaacaaaaccagtattcttcatatttactattcaaattggtttcattcttagtaaaagtacagaatctatttgaaattatagtaaaatttcttcttgattggctgacactgaatcatagtttctcacctacatatatccttagcacctcgtatagatatgatcagacaaaatgcagaaggaaaaaaaaacatattgaatgaagcacttggaaagattttccacatgtagaccaactggtaaactaacagagtgattaagcatggtgtacagaaaagcattacgct

SEQ ID NO: 257150 - DNA, 637 bp, Homo sapiens
attttctgtttagcagcatttttcactgcaatgttaaaataaatatgacattgaattcgaactgtgtgtatgtcagtggaatcaaatcaaaagccactaacatggctgtctgtttcattggactgtcccatttgctggttaaaaggattggggcccaaatcctctggcctagcatttctcagtgtttgctattcagactgtctaaatacagcatgtgacaagctgaagaagccaaatctakcagtcatttctgatttcattatattctccccctcttcctgctaaaaagacaaaaaacaaaaaacaaaaaaaacaaaaaaaacctcatgagtgcatggatttaaaagagggcaaacaaaaccagtattcttcatatttactattcaaattggtttcattcttagtaaaagtacagaatctatttgaaattatagtaaaatttcttcttgattggctgacactgaatcatagtttctcacctacatatatccttagcacctcgtatagatatgatcagacaaaatgcagaaggaaaaaaaaacatattgaatgaagcacttggaaagattttccacatgtagaccaactggtaaactaacagagtgattaagcatggtgtacagaaaagcattacgct

SEQ ID NO: 257151 - DNA, 637 bp, Homo sapiens
attttctgtttagcagcatttttcactgcaatgttaaaataaatatgacattgaattcgaactgtgtgtatgtcagtggaatcaaatcaaaagccactaacatggctgtctgtttcattggactgtcccatttgctggttaaaaggattggggcccaaatcctctggcctagcatttctcagtgtttgctattcagactgtctaaatacagcatgtgacaagctgaagaagccaaatctatcagtcatttctgatttcattatattctccccctcttcctgctaaaaagacaaaaaacaaaaaacaaaaaaaacaaaaaaaacctcatgagtgcatggatttaaaagagggcaaacaaaaccagtattcttcatatttactattcaaattggtttcattcttagtaaaagtacagaatctatttgaaattatagkaaaatttcttcttgattggctgacactgaatcatagtttctcacctacatatatccttagcacctcgtatagatatgatcagacaaaatgcagaaggaaaaaaaaacatattgaatgaagcacttggaaagattttccacatgtagaccaactggtaaactaacagagtgattaagcatggtgtacagaaaagcattacgct

SEQ ID NO: 257152 - DNA, 500 bp, Homo sapiens
tgttgagtaatctggacttcatcttttctcccatgctagatgcttcctgccctcgaacaccagactccatgttcttcagcttttggacttttggacttacaccagtagtttgccaggggctcgtgggccttcggccacagactgaaggctgcactgtcagcttccctacytttgagattttgggacgtggactggcttccttgctcctcagcttgcagacagcctatcatggtacttcacctcgcgattgtgtgagtcaattctccttaataaactccccttcatgtatacacatatcctattagttctgtctctttagagaaccctgactaacacagtgctggaatacttgagtatctttcggcaaaatgaacctcacactttacacaaaccttaagtagattgtggacttcaatgtaagatgtaaaactataacacttttaggaaaaaacctaaaagagaatcttcaggatataggactatgcaaaaacttattagac

SEQ ID NO: 257153 - DNA, 595 bp, Homo sapiens
tgttctacctttgcttcattcttctggatccccagaaattgggtgggtggtatcttcttcaagcttgagccctagaattctgtaaagtgcatatgtggtgtctcccgggtggagaaggatggccaagaggaggccagagcccttggcttcctgtattttctctcccccaaaaccagcttttaggaaaggctgtgataaactctaagatgtccatgaatgagaggactttaaaagttatcattgcaaatgaatgaacaagatttgtatgatctcttctatggatatttgcatttaaacagtccatgtttgaaatcagcgaagggaaaggtgttctaactgggaattggggcacctttcatctaatagggaaygtatttggggggcagaacagccttcctacctctgaaatcacagctgttttcagtcctgcccttttgatctaaaggacttaaatttcagatgttttagatgaggccaaagaataaaagtaatatagaggtcaaaagaggcaactgggatccaacttatcgatgttattccatgtgctaccatttcaatcatggaagagttcttcccagcacaggtcccagacctg

SEQ ID NO: 257154 - DNA, 595 bp, Homo sapiens
tgttctacctttgcttcattcttctggatccccagaaattgggtgggtggtatcttcttcaagcttgagccctagaattctgtaaagtgcatatgtggtgtctcccgggtggagaaggatggccaagaggaggccagagcccttggcttcctgtattttctctcccccaaaaccagcttttaggaaaggctgtgataaactctaagatgtccatgaatgagaggactttaaaagttatcattgcaaatgaatgaacaagatttgtatgatctcttctatggatatttgcatttaaacagtccatgtttgaaatcagcgaagggaaaggtgttctaactgggaattggggcacctttcatctaatagggaacgtatttggggggcagaacagccttcctacctctgaaatcacagctgttttcagtcctgcccttttgatctaaaggacttaaatttcagatgttttagatgaggccaaagaataaaagtaatatagaggtcaaaagaggcaactgggatccaacttatcgatgttattccatgtgckaccatttcaatcatggaagagttcttcccagcacaggtcccagacctg

SEQ ID NO: 257155 - DNA, 604 bp, Homo sapiens
caacttgctagcttgtaattagggcaaaacagactctccaccattctggatacatgctctcctgcctttcctccgacctaaatggctcatcttctttgctactccctccaattctgcctcttctttttaatgctagakggccccagggctcctctttttatgccaccatccacccactctttccaccagaccctggtctcttctctatctgcactccctcccttaagtgattgcctctagctgcatggctgatcctgatcattccatctatatgcttagaattcctaaatgttgtctccaaccaaatttttaaatcaaactccagaatcaactcaacacattcaaatggaattactgatcttactctcaaaaccaatccacttgtggtcttcccagttcacacaacggcattctctccttgcagttactcaagccaacatttctggagtcatttttcactcatctcttctctcacattcttcatcaatctgtctgaaattctattgaccccatgttaaacacagacacaggttccaccataccttatcaccactgtttctaccacccttgtcaaacacaccatctctccccattcctagtctag

SEQ ID NO: 257156 - DNA, 552 bp, Homo sapiens
tgaccttcttagactgtctcctccattctgcactctgtcagttgctcatctaacataagaaggttatccttaatggccagcaagatcctgtccctgtgaagattttatgtttctccacaacaccacaggccctatatracagttcaccgaggagctgttctcccctggtctcctgcactgccccgtgcccccatcctggcggccaggtgcctgactgcagtcatggtggaacacagcctcagaatgatgggatgccagaaagcagaagagcaagccatgcaaagagacgaggagccctcagagatggcacagcccattttgagcacatccaccaggcaaccttaaaccctcaagatcagagtcactccatacagcaaactccaaaaacaacagctaagggtaccagccaaagggtagttttcaacttcaggcaggagcaatgttcatgttgtggtgtcttcagtctccctcccatgacacagaggtcaacgctcctatcatcagcattctctttgaacaaggagaacgtaatgaaccaacatgcaccccagc

SEQ ID NO: 257157 - DNA, 447 bp, Homo sapiens
attttaagaggatgacaacttaacactattgcatgaacaaacaaaacagttgaaaataaaactttgtctccacttggtaactttttgttatttctctttttttgaatagttaatccatttatatttgaggtaattattgataggtaagatcttactaccatcatcatgttagttattttctggttattttgtagatactttgtttctttcttccttttttgttgtcctcctttgtggtggctttctgtagtagtatgccttraatcctttcaattttttttttttctttgagacggagtttcgctgtgtcgcccaggctggagagcagtggcgcgatctcagctcactgccacctctgcctcccgggttcaagcaattctcctgcctcagactcctgagtagctaggattacaggtgcctggctaagttttgtatttttagtgggga

SEQ ID NO: 257158 - DNA, 534 bp, Homo sapiens
ctgggagaaacagaagtaccacccagatttgtttgctggtgactatgacctctgcctcttttctttgtttctatctaaccctgggcaatctagccatgttatttccccctaatgttctttgtgaggtgaaactagggtgagcttcctgggaagcctttccaaatgcttggaaaatgggatgactgcctccaattttcttttccccatgtagaatatgtgtgcccatagaaatcctttttcatctggcatcctgctgacttggggaaggggagtgcagtcaaagtaagacctttctttttactcttctaatttggatttcaatcagttctgcagaccaaatggatgtctcaggcttgtttcaatattgaaattttcaaaaggatgttccggtctgtagacagtggctatttgatctttctctgtggggtggaggggtgaaggtgtagtctggcatcctattccaccacttggtgacatcacttccccyacccaatccattcagtttctgggataaatcctattttatgttgatgg

SEQ ID NO: 257159 - DNA, 480 bp, Homo sapiens
tgcctgtaaagacccttctcttgctttggaaacaccctccctctcctgccrtgatcaaccctgatgttgggtagttctgcagtgggcacgtctgtacatgcctacccccaaaggctgaggaagctgagaggctaaagaaagaggctgacaaatccagtttgttagaaagacacatttaatgagaacttacgaacaggggccatgtctttgtctcaggcagcagtgagacaagatggtggatcctcacaccattaccctcaagatccagggcttatatagcatagggagggaatgcataggacaatcgaagttgacctctcagggagaggcaagaatgctgtgtgaatctgcttaagggcaggatttatggtccaggctcttttgacctaaagtcaagatttatggtaacagtagaaaaagtagaaatcttagaggcattcctggaacaggggttaatcagaagtcagaatggcagattac

SEQ ID NO: 257160 - DNA, 520 bp, Homo sapiens
agaactaggctttgactttatatcataattctattcactaaattcctatctatctttgtaaacaccctccttatcttgcctgtaaagacccttctcttgctttggaaacaccctccctctcctgccgtgatcaaccctgatgttgggtwgttctgcagtgggcacgtctgtacatgcctacccccaaaggctgaggaagctgagaggctaaagaaagaggctgacaaatccagtttgttagaaagacacatttaatgagaacttacgaacaggggccatgtctttgtctcaggcagcagtgagacaagatggtggatcctcacaccattaccctcaagatccagggcttatatagcatagggagggaatgcataggacaatcgaagttgacctctcagggagaggcaagaatgctgtgtgaatctgcttaagggcaggatttatggtccaggctcttttgacctaaagtcaagatttatggtaacagtagaaaaagtagaaatcttagaggcattcctgg

SEQ ID NO: 257161 - DNA, 480 bp, Homo sapiens
tgcctgtaaagacccttctcttgctttggaaacaccctccctctcctgccgtgatcaaccctgatgttgggtagttctgcagtgggcacgtctgtacatgcctacccccaaaggctgaggaagctgagaggctaaagaaagaggctgacaaatccagtttgttagaaagacacatttaatgagaacttacgaacaggggccatgtctttgtctcaggcagcagtgagacaagatggtggatcctcacaccattaccctcaagatccagggcttatatagcatagggagggaatgcataggacaatcsaagttgacctctcagggagaggcaagaatgctgtgtgaatctgcttaagggcaggatttatggtccaggctcttttgacctaaagtcaagatttatggtaacagtagaaaaagtagaaatcttagaggcattcctggaacaggggttaatcagaagtcagaatggcagattac

SEQ ID NO: 257162 - DNA, 537 bp, Homo sapiens
agaaacaacccaaatgtctgccaacagatgaatggataaataaaatatggtatatccatataatggaattttttcagttttaaaattgtatgaaattcttgtacatgctacaccatgggtgaaccttgaaaaaaatatagtaattgaactaaaccaggcagaaaaagacaaatatttcatttatatgatttcacttatgtgtggtgacccatagaataggtcaattcrtagagacagtatgtgaacaggttactgggcctggggttagggtaatcgatgttattgtttaaaaggtacagagtttctgtttgagatgatgaaaaagttctggaaatggatagtagtgttggtcgcacaccaatgtgaatgcactgaattatatacttaaaaatcactaaaatggtacattttatattgtgtgtattgtattttaattaaaatttttttgattgtttcatgtttaagtgtaatttgctaatttggttgctgtttggtcctgctctaataaatctcagttacatatccattttatcccct

SEQ ID NO: 257163 - DNA, 537 bp, Homo sapiens
agaaacaacccaaatgtctgccaacagatgaatggataaataaaatatggtatatccatataatggaattttttcagttttaaaattgtatgaaattcttgtacatgctacaccatgggtgaaccttgaaaaaaatatagtaattgaactaaaccaggcagaaaaagacaaatatttcatttatatgatttcacttatgtgtggtgacccatagaataggtcaattcatagagacagtatgtgaacaggttactgggcctggggttagggtaatcgatgttattgtttaaaaggtacagagtttctgtttgagatgatgaaaaagttctggaaatggatagtagtgttggtcgcacaccaatgtgaatgcactgaattatatacttaaaaatcactaaaatggtacattttatattgtgtgtattgtattttaattaaaatttttttgattgtttcatgtttaagtktaatttgctaatttggttgctgtttggtcctgctctaataaatctcagttacatatccattttatcccct

SEQ ID NO: 257164 - DNA, 628 bp, Homo sapiens
agagtaatactgagagagcctcacccagtcctattggattccgattgctgagcttcaccacttaggaataacagtggaattctcagatcacagagggctggagaaggtggcactagatgttkgttaaattattctgtcagaacgaaaaatatatatatttattagggaaaatataaaaccatgtgtgtgagtgttggggattacacaagtggagcccagatgtcactgtggcctatctgcccttggttgatctccgtgcactaggcttgaactctcagttctaccgtctgtgaaattcctcaacccttctgtaacccttctcaaccttaacgcaactcctgcacaagctttgagaagctgctccctggagaggtggagcacacattcgatgatttctgcaacatcccagggtcgattcactcaaaaggcccactctcccagcctgtgatgagtttagccaacttggatgaggattttgtggcttagggaggggcatgctcctgctccacagcctactttattcgctctgctccccacccctactctctctctttttgcctttttatcccagctgttcagctacttcttctatcttgatggttaccttttgccgcatgagcaagagcaa

SEQ ID NO: 257165 - DNA, 628 bp, Homo sapiens
agagtaatactgagagagcctcacccagtcctattggattccgattgctgagcttcaccacttaggaataacagtggaattctcagatcacagagggctggagaaggtggcactagatgtttgttaaattattctgtcagaacgaaaaatatatatatttattagggaaaatataaaaccatgtgtgtgagtgttggggattacacaagtggagcccagatgtcactgtggcctatctgcccttggttgatctccgtgcactaggcttgaactctcagttctaccgtctgtgaaattcctcaacccttctgtaacccttctcaaccttaacgcaactcctgcacaagctttgagaagctgctccctggagaggtggagcacacattcgatgatttctgcaacatcccagggtcgattcactcaaaaggcccactctcccagcctgtgatgagtttagccaacttggatgaggattttgtggcttagggaggggcatgctcctgctccacagcctacttyattcgctctgctccccacccctactctctctctttttgcctttttatcccagctgttcagctacttcttctatcttgatggttaccttttgccgcatgagcaagagcaa

SEQ ID NO: 257166 - DNA, 507 bp, Homo sapiens
gaatgccagggaaggcttctgcaaaaggttttatttcagccaagatgcaaatgtgggaaagaatgagctatgtgaagatctggaggtgtgtccctgcacaggacccaggagccctgggcagagcacgctggtctgagctgcaataagagaccagtgaggcctggctgggtgaatgagaaaggagggmtgaaggcccaggggtcaggcctgtaggttcttgaggttcttgtaaggagtttgtacttgttttgctattaataatttcactaggaagcatttgcaagttttaagtagagtctgccacttaccatgtggaaagatgcatgttttattaaagagaggagagtaggtaggaccaggaaggtggcattagctgtggggagcaactcttccccaccctacagctttggtccatttgtttgactaacattaaatattgagtgaatattttttcttatattttatgttcaaattaaaaagtcttatattgagataatattgttctcg

SEQ ID NO: 257167 - DNA, 507 bp, Homo sapiens
gaatgccagggaaggcttctgcaaaaggttttatttcagccaagatgcaaatgtgggaaagaatgagctatgtgaagatctggaggtgtgtccctgcacaggacccaggagccctgggcagagcacgctggtctgagctgcaataagagaccagtgaggcctggctgggtgaatgagaaaggagggaygaaggcccaggggtcaggcctgtaggttcttgaggttcttgtaaggagtttgtacttgttttgctattaataatttcactaggaagcatttgcaagttttaagtagagtctgccacttaccatgtggaaagatgcatgttttattaaagagaggagagtaggtaggaccaggaaggtggcattagctgtggggagcaactcttccccaccctacagctttggtccatttgtttgactaacattaaatattgagtgaatattttttcttatattttatgttcaaattaaaaagtcttatattgagataatattgttctcg

SEQ ID NO: 257168 - DNA, 557 bp, Homo sapiens
gaaacatttatccagaatactctgttgttgaagaaagcactataaagctcagtcaggatatttgagccgttggctgtaacagttacaagctgtgaaaacgtgagcaaagcgcttgcataacagacagattacgggatcaggttaaaagaaatactgaattaaatttatttcaacaaacatattcagctaaaaatcaaagagctcctcaaatatcactgtgaacacactgatcaacagattgaaacttcagctttgtactggtcttgaaaatgtgtcccgctcaccagcaaaatgtgggatatacagtttttgccaaatctgaaatttacttgtcacttyagagttgtctttgaacggaaagattgagattttcgcaagatatgtggagaacagatgatttaatatgcttctttaattttgtgctgtttgtctttctcttccttttttctttggtacatttggacagtgatatattctgactttatttcaaaatactttggctaagattggaagaaaaagagaagggtgcaaaatgaataatgatgagacatttcagt

SEQ ID NO: 257169 - DNA, 482 bp, Homo sapiens
agctgtcataaaaaaaacctccaaagtgcagactgaccaccacattcttcatgtgtttagcagctaaacttacatmatctgctcattagaaatgggctattctagaaatttctgccttgatatttaaaaaacatgtagctctagagattgatttgaactactggacaaaaaaccaaattaataagtctcaaccctgatcattaaactcatatacgcatattctttgctatcctatataaacttcagtgctatttgtatattttacacgtgacttttgataaaaacaaggtgtgagtgctcacatggctcatccaccctccatcctctccttggccccaaggcccaccttccctcccgtgtctttttactgttgcactggctggatggtgacatggcaggcccggagtgggccagtgtgtgtaacccaacaatgcattgcatctttttggtaaataggtactatggccctggcctggaggagg

SEQ ID NO: 257170 - DNA, 582 bp, Homo sapiens
cttctctgctccccacccccagcatgttttatccttcccctccttataaggactcttctcactttctctgcaaactctcccctcacttggatttaatgaggttacttcaaactttagttggaaacacagaaacttcatctttgcgttacaaagagcccacctgagctatctgttggctcattctttgcctcccctatcaaaatggggagcagcttggcatcctgaccatttccaaaatgagcttcaccttggcaccctgtcactactggaggacttggctcctgcagtcctgaccttgccctttctgctactttcctcctccctcatcatgcttccagtacacacactttccttctgctcttcagaaacatcaggcatgcccctgtcctagggcctttgcacatgcccttgctgtatatggctrcactgtgtctagatggttatgtgttgagcatcattagaaggtaattaggtaactaaggattgctcagctgtcacactgatagggagagcccttctctgatcattcattcactttctattacattacctttctgggttgttatcatagcacttatccag

SEQ ID NO: 257171 - DNA, 517 bp, Homo sapiens
cattttgttttggctgagttatgattttataacctgtgctaaatcctgacacctcaaaatatctagcagagacaaatataaaacccagacaaaaatgtatgctgacaattctgaagacattgctattttcatcttttactttggaactctagcaatgagatagcaatacaaacccacgaatttacgaacaggtttacatgcttaaaatttgttctgataggtaatccagtgaacgctgtgaaccacagttttaggtaaagcagtttccagttaggctccagagatcactggggccaaacarcactacagaagatcatcacataactccatcccactttcccatttaacagcaaaatgaggtccatagagagcccaaacttctccagattctaaagaatactggggtcaaacagtattataaaagaatatcagcttatcaaattctgatttcccattactatgttgatacatacacaatcaaccaccaaagcacaatccacctgctgcaacaaccaac

SEQ ID NO: 257172 - DNA, 517 bp, Homo sapiens
cattttgttttggctgagttatgattttataacctgtgctaaatcctgacacctcaaaatatctagcagagacaaatataaaacccagacaaaaatgtatgctgacaattctgaagacattgctattttcatcttttactttggaactctagcaatgagatagcaatacaaacccacgaatttacgaacaggtttacatgcttaaaatttgttctgataggtaatccagtgaacgctgtgaaccacagttttaggtaaagcagtttccagttaggctccagagatcactggggccaaacagcactacagaagatcatcacataactccatcccactttcccatttaacagcaaaatgaggtccatagrgagcccaaacttctccagattctaaagaatactggggtcaaacagtattataaaagaatatcagcttatcaaattctgatttcccattactatgttgatacatacacaatcaaccaccaaagcacaatccacctgctgcaacaaccaac

SEQ ID NO: 257173 - DNA, 618 bp, Homo sapiens
taatatgggaagtcctttattttattatgtgacactatatagcagctgcctaaccacacaatgtagacatgaatagggaagatggctgagaaatagcagtactagtgactcaagtagttagctttatacaataaaaggaatgagttttgactgacttatgagagttttaaaatgcgttttatatcgagtagatttgtttcatgttttcttaaaagaataattgtattsaaccaaaaataaactagatatagtttgttcacataatgaatctacgttcgaagatatgcttacagattaccatttgataatcattgccccattccccccatcctccattctctgtaaccactgttctgttctctgcttatatgagttcaactgtagatcccacaaacaagtgagaatatgtggtatttctttctgtgactggcgtaattcacttagtataatgttctccaattccatcagtgttgtcccaactgacaaaatttttttctttattaatactgagtagcattccattgtgtgtgtgtgtgtgtgtgtgtgtgtgtgtgtatgtgtgtgtgtgtgtgtgtatcattaaaaaaatcaatttatctgttgatggacacttaggtt

SEQ ID NO: 257174 - DNA, 622 bp, Homo sapiens
ggacaacatctggctctgtctgccccactgcactctttctctgggcaatgctttccttgaagattaggtcctcttctgcctctggtcacctcaatcaaaatagcatcactaccagtacacgtgcttgaggtgtctattgttcttctattgttctggcattttctcagaaagaaagctaaatcttgtttcttgtactgaccaaatggtgctgcaggctctgatacctcttgagaacctcagaactccctaacttctgagctaacttctgagctgccccaggcactgagggctgcccggatgtccacaggcactttccccagatggtggagctggtccttattcttagtgtcccgtcaccgcagacactggctccagttaccccttcacgacacacatcaagcgggcactgtagagccgtgagggctacctacgctgggtgtggcaagaagaatcgactgataatactgtgtaagaggaaccagaccacaggagattcacaggtgaaagacagatcagagaccactgcagttgagggctccacrctgaggcactgggaaaaaaggagcggtcttcactatattaccaaaattactaggcaagactgggtgaataattacatatt

SEQ ID NO: 257175 - DNA, 497 bp, Homo sapiens
tagcccctggcttccttttatccgtactaatctccttgccaaacagtcatttggccacacccttggttttctctcctaaacacatttttttagtctttaaatggccaggctgagaattttgcaaatctctacattgtccttcccttttaattataaatcatctttaaatatttctctcttctcatattttactgtaagcatgtaaragaagccacgaaggatcctgaacaccttgctgctttgagatttcatctgctaaatatcctagccattgcttttaattgctgccttccagaaagtcctacagcatgtatataattcttagctgccttataacaagggtgacctttcctccagttttcaataccttgttcctcatttccctctgagacttcatcaaaataatcatcactgccaacaccacttaggtaatctctaaggagaatgaggctttcccttcacctctcctcttcttctgagctctcaccagaatcact

SEQ ID NO: 257176 - DNA, 588 bp, Homo sapiens
aaacacatgataaatattttaacaaaatgcaccagatgccacaggatcataagagagaaagtayctttggaggctagaaaggcttcacggagaaggaagaattgcactgagcactgtggataaggttcccagtgagaagagcaggacaggcatgttcccaggaactcttttgtatggaagttgtgaggtaagaccgatagatattaaaggaatatcgtgtcagcacaggggatggagagcaagaccagcggcagaggaaccagttgggaaatgactacaaagtccaggcaagaaatggcaagatgttgaatgaaaactgtggtgtttaggctggaaaagacggcagagacttgaaaaatatctaggatagagtcactcagagtgaatgtttaattagaagtgcaggcttagggcaagaaagggtcacgtgtgagcctgagtatccaccataggtcatggaaaaagagagaatatggtccaggaagaagaggatgcattcattattggcaatggtgcatttgagatgtggaaggcattgccacacagagcaagacacatttcctagctgcagaggtaattagggttcac

SEQ ID NO: 257177 - DNA, 340 bp, Homo sapiens
ctagctgcagaggtaattagggttcactgccccaggctaagttgtcaaatgctgcaagaggacccaatcgtataagtgtgaacagtgtcacttaggcttggcaagtaggtggacataggccttttaaacatgaggtgtttcagcataatgatggggcagaagttacatgaaatgggaagactgcagaggagaggaggaaaagaatgtcccccaaaatgatacataggtgaggatctcttatcagaaatacttgggaccagaagtgtttcagatttcaaattttttggattttagaatatytgcattatatcaattgatcatccccaaccccaaaattcaa

SEQ ID NO: 257178 - DNA, 598 bp, Homo sapiens
tgttctgactgctccaccaaccgtctctctctttctctctctcctgtttttgggcttccctttcctataccctgagacctagcactatcggaaataggccagttaataaccctaccatggcctgtaagtgttcaagtgcaaggaggagttgcacgtccctcartgtaaatcagaagctagaaatgattaagcttagtgagaaaggcacgccgaaagccaaaacaggccgaaagctaggcttcttgcaccaaacagccaagttgtgagtgcaaaggaaacattattgaaagaaattgcaaatgctacacactggtgcactctggtgcgtttttcttcccatatgtgaacatttctctcgtactccccatcatttgttctcctcacctagattgaccgccttcagctgcatttccgcgtccctgcctgtggccaccagacctccaccctgcgtccaggaataggtggcaatgtgggggtgtacctattgtctcttcgttgtcaatttccatcctcctgggtggatccagacttgtgtgtaagtttcggactaaagaaaatgttagggtcttcaggggacgtcctgagcatattcctcacc

SEQ ID NO: 257179 - DNA, 598 bp, Homo sapiens
aagccctgggctatccccagtatctcatttcgttgcctttgagttgccaggtgctccatctgcaaggtggatgattagagctgtgggtccagctctagtcaggaagtcaggaaacaatgtacaccggcctgttcatgggctgaactctagatcttgaccacaccagcatggaagtaactaaacacagacacgacttatattaggatttgtttgtttgtttgtttgtttgttggagacagggcctggctctgtcrcccaggctggagtgcagtggcatgatcatagctcactgcagcctcaaactcctggcctcaaaccatccttctgcctcagcctcccaactacctaggactacaagcacatactaacaggccaggctaatttttaaaatttgtttttggagatggggtctcgctgtgttgcccaagctagtcttgaattcctggccgcaagagatcctcccatcccattctcccaaagtgctgacattacaggaatgagccaccatgctcagcccctatcaatatttttaataaccgtttgtagcaaaacttttttttgagacagggttttgctctgctgcacagtgtaacaaaac

SEQ ID NO: 257180 - DNA, 510 bp, Homo sapiens
ctgcctcagcctcccaactacctaggactacaagcacatactaacaggccaggctaatttttaaaatttgtttttggagatggggtctygctgtgttgcccaagctagtcttgaattcctggccgcaagagatcctcccatcccattctcccaaagtgctgacattacaggaatgagccaccatgctcagcccctatcaatatttttaataaccgtttgtagcaaaacttttttttgagacagggttttgctctgctgcacagtgtaacaaaacttttaagaaaccccaaaacatggactgactgagctacctaaaagtattagtcacccaatcttcagcaaacagttaacagcaaaaataaatatatcttctcatggcagcccaaaaaaataaataagtgaaggaacattatacagggaagccgcagtgcattgactttacctttatgatgattttatataccagcatcataaaaaattccccaaaggctaagctgaaactaaactgct

SEQ ID NO: 257181 - DNA, 510 bp, Homo sapiens
ctgcctcagcctcccaactacctaggactacaagcacatactaacaggccaggctaatttttaaaatttgtttttggagatggggtctcgctgtgttgcccaagctagtcttgaattcctggccgcaagagatcctcccatcccattctcccaaagtgctgacattacaggaatgagccaccatgctcagcccctatcaatatttttaataaccgtttgtagcaaaacttttttttgagacagggttttgctctgctgcacagtgtaacaaaacttttaagaaaccccaaaacatggactgactgagctacctaaaagtattagtcacccaatcttcagcaaacagttaacagcaaaaataaatatatcttctcatggcagcccaaaaaaataaataagtgaaggaacattatacagggaarccgcagtgcattgactttacctttatgatgattttatataccagcatcataaaaaattccccaaaggctaagctgaaactaaactgct

SEQ ID NO: 257182 - DNA, 555 bp, Homo sapiens
ttcaaatgcacaggatacagaaactcttcaacggtctagtcatttcacactacgtcgaagcaaaccacaaaagcaggcccaggaaattagatttctccarggatggacccagacgactcagcctgaataaaatgatccaagtatgattctgatcctattcagatattcccccaggaatactccagaaggtctctacaaattcaagtcttttgcaataaactacagaggccagaaaagactacaaccactcttgcccaactcagactatttcaggaaactgtcaaacccaaaattgtacattgcctatggagaattatctggatctgtgaaatcattcacttgaactgatttgctggaggaattttaggtcagatatataggtaacctcacactggaaccagctaaacagaaacataaatgacagacaaacctctaatccatgctgcagccaaaacaataataaggcgctatgaattcaagtctcttctgcagtactaggcaactaagggcaattggctgatggcatctgggtctcttcatcaataatatttccat

SEQ ID NO: 257183 - DNA, 555 bp, Homo sapiens
ttcaaatgcacaggatacagaaactcttcaacggtctagtcatttcacactacgtcgaagcaaaccacaaaagcaggcccaggaaattagatttctccagggatggacccagacgactcagcctgaataaaatgatccaagtatgattctgatcctattcagatattcccccaggaatactccagaaggtctctacaaattcaagtcttttgcaataaactacagaggccagaaaagactacaaccactcttgcccaactcagactatttcaggaaactgtcaaacccaaaattgtacattgcctatggagaattatctggatctgtgaaatcattcacttgaactgatttgctggaggamttttaggtcagatatataggtaacctcacactggaaccagctaaacagaaacataaatgacagacaaacctctaatccatgctgcagccaaaacaataataaggcgctatgaattcaagtctcttctgcagtactaggcaactaagggcaattggctgatggcatctgggtctcttcatcaataatatttccat

SEQ ID NO: 257184 - DNA, 525 bp, Homo sapiens
tatgaattcaagtctcttctgcagtactaggcaactaagggcaattggctgatggcatctgggtctcttcatcaataatatttccatactaagacttgataatttgagaaaaaaacttagcctcaagtcctggttaagtctctgttagttcaaaacctctctgctctcctaatttaatattgttattagttgaactccataaaaacgagctctaagacaaagacaagcacacaagaaatttattgaaaaactcttgggaccaatatttgtgtaaggaaaggaaagggaacaaagcatggttgggcagaagcagaagatgacttcaacaaagacctcggctaaccccttggggaactcaagctgggatgacccttctgggtccagagtagggctgtgaaggacagggctttacacatttgcattgacattcataggatgccaccttccctggaaaggggygtgatcttgagcaaggaaggcctctcaaccaaggcactttgcagaaggctatgagctgaggtgtgt

SEQ ID NO: 257185 - DNA, 221 bp, Homo sapiens
tcggttcagtatgcccaattagtcggaacaattgttttagcactaaggagactttttcttactctcaatttattaaagatttcaccccaaattgggatgtttaatttaaagtagcacatgcatgcgcaacacacacacacacacacacayacaccccacccatcagtaatactatagcttccttgcttataactagcatatctaaagcctgaaatttgatt

SEQ ID NO: 257186 - DNA, 210 bp, Homo sapiens
tgtctcaacaatttttaaagtgattacatgcagatataacatttgggtatattgggttaaacaacatattaaaattaatgtcacccttgtttattttttactttgtgtggaattcaaaaatttaatattacacatgtggcttgcattrtatttctatcagacagcattggcttaagagatgcaacttaacttctctaagcctcagttttt

SEQ ID NO: 257187 - DNA, 580 bp, Homo sapiens
cccatggtttcctagggctgccagttgcattggggaaggggatatattagcaaactcacttgacaaacctcagccacaacctccaaataactttaaagttattataaaacattattttatctccagctatcagacctccatgttcatatcaattagttccaaacacagatagggaaacaggattgtttattagtctccgaaaactcstatatagtcatcagatacttaataaataaatggatctcaattcaacactagagccatagacagaagaaaaaatgtaagtcaggaaagcataagcagcttaaaatagaacagttgtaaaatataggcaggctggatgttatgccaacaaagaccttgaagagaagatgagggacaacaataacctttgttactgacttctattcctgtcctctctttcaggaaaaggctgggtgttacccattttttgggtctcccaaattagcaccaatagtagacatgcaaatagctgtttaattagtaagtaatagcccgtgcacatgcacaggttcatactgggaggaggagagcataggtacaagttaaagagtttctt

SEQ ID NO: 257188 - DNA, 638 bp, Homo sapiens
tagtagacatgcaaatagctgtttaattagtaagtaatagcccgtgcacatgcacaggttcatactgggaggaggagagcataggtacaagttaaagagtttcttatgacagctgggctgagaaatcaagtataaagtgatgtgtatgatatcaaacaagccagaaaactacatcctatgaaagcagccctgatggagccttgacaatgatggtaagagaagggcttttctaaaggcaaatggaktgttactactatggactagctgataagatgtgggttaagccactgaattgcctagctcaaatccttctaagcctcagtgtcctcattcatgaaaggaagttggtgaaactgctgatgtcaggggatttttgtgagaatcaaataaccgaattcatgtaaagatattagttcatgcttttcacataggaagtgccagatacctgctggagctagagtagcaagagcaagagtagcaatagcagtagcttcattccagcattcacacttaggagaacacagatgtaacatgaaaaagaaataatttcaaggcaaggagatggtacagataatttaacaggatagaggtagatctattagctaatcaaaaatctgtaattttttaccctaccacag

SEQ ID NO: 257189 - DNA, 638 bp, Homo sapiens
tagtagacatgcaaatagctgtttaattagtaagtaatagcccgtgcacatgcacaggttcatactgggaggaggagagcataggtacaagttaaagagtttcttatgacagctgggctgagaaatcaagtataaagtgatgtgtatgatatcaaacaagccagaaaactacatcctatgaaagcagccctgatggagccttgacaatgatggtaagagaagggcttttctaaaggcaaatggattgttactactatggactagctgataagatgtgggttaagccactgaattgcctrgctcaaatccttctaagcctcagtgtcctcattcatgaaaggaagttggtgaaactgctgatgtcaggggatttttgtgagaatcaaataaccgaattcatgtaaagatattagttcatgcttttcacataggaagtgccagatacctgctggagctagagtagcaagagcaagagtagcaatagcagtagcttcattccagcattcacacttaggagaacacagatgtaacatgaaaaagaaataatttcaaggcaaggagatggtacagataatttaacaggatagaggtagatctattagctaatcaaaaatctgtaattttttaccctaccacag

SEQ ID NO: 257190 - DNA, 593 bp, Homo sapiens
taggtcttacgcatgcatctccctgctgggagcccaaccattttcaccagaaaaggtaaaatggtctgggggtgaaaaagggttcctgagaccagaacataaaaacatacaggttaatagaattataaaatttaagatgtttaaacaagctttatgtaaggtatctgtaacccctttacctaaaagtcttatgaaaatgggtactgtatgtaactaagggggtgtttcctctgtctaatactataaaccgaaggcatatgaatctgttctttcaagaaatacttaattgcacatgctaaatgggaactaataaattgtctaagcctgcaaaatatagggtaaaagctggagtgctagtcaggatgacccctccactgcatagccctttatgtggagcttttactggggatgatggcaaaaactgtaagtacctttcaatggcaatgactgaactagagaatttctgcttgatgggacattgactgccttgctttggaatattaactgaagctacccgcatcttaatggaaataatgttttccaaacgagttccagcataaaaaaaaatggtytacataaaatcttgctaccta

SEQ ID NO: 257191 - DNA, 645 bp, Homo sapiens
cctttatgtggagcttttactggggatgatggcaaaaactgtaagtacctttcaatggcaatgactgaactagagaatttctgcttgatgggacattgactgccttgctttggaatattaactgaagctacccgcatcttaatggaaataatgttttccaaacgagttccagcataaaaaaaaatggtttacataaaatcttgctacctaataaacagagagcctctttcctaggactaattgtgaggagctgctaaattctccagtgcctagtagctctcatgagctgtttggtttgtaaatggcatttccaaggtagacatcttgtttgaaaagctctggttaaagaaggatcaagaaaatctttttcttttacattacttgggtaaagtatgtttttgtaagcaaatttacctttctgagttccccaaaattcagattgtaattttatgacattatagttgtctgcataagttcartaatagtttaaaaaattcatttcaaaggaaaagcataacattaataccagattaaattattccttggctacaataatcctctagaaagtaccagattataatttttctttatatttttagttggtgccgtaatggaatacgttcctttttctcttctgacatacaa

SEQ ID NO: 257192 - DNA, 490 bp, Homo sapiens
  misc_feature (1)...(490): n = A,T,C or G
ttacgtgtcacttttgcatccacccccaccataaaaattgtttgcttactatagaattaaaggaaattctttactaacaggatgaaaataccttgtaacaaagcctcctgngtataatacgcccaaatatgagttgtgaagacaaatctatctatatatttttaaattatttttcagaacaatgcgtatgttttatatagctaattattaaaagtatgtaacaaaaaccaagctgacagtggctccacatatacaagttaaaagtaagtcagtcttggaactttgccttttggttttgtcgttggccttctttacttaaaataataaktataagaagtaatgaacgcctgtccacatccatttttatctggcctagcacaattaattggctatgagtctttcgactcttaaggccctcggccataggaagttctgccgagggaaaaaaacaaaatgacactgtagaatcatatgacttctcctgtgacaa

SEQ ID NO: 257193 - DNA, 593 bp, Homo sapiens
acatgttccggctgcagataactagtcagagcccatccctttatttcggcccatccctttacttccyataaggaatacttttcgtaaatcttctgactagcttgctgtcaataaatatgtgggtaaatctctgttcggggctctcagctctgaaggctgtgaaatccctgatttcccactccacactctacatttctgtgtgtgtgtctttaattcctctagcatcactgggttagagtctccacaactgagatggtctcagcaccctcccactggccagccccaatcaaaatgattctaacctctgaactacttttattaattcatctacatagctattaatagaatgctcccagtgatggttgattttatgtgttaacgtgactggccacaggatgcccaattaaactttatttctgggtgttaggatatgaatgggtggactcagtaaagtagattgccctccccattgtgacctcatccaatctgttgagggtctggataaaacaaaaggtgaaggaaggagggatttacttttttttgcttcctgtctgcctgcatgagctgggacatcttatctctctggccctaga

SEQ ID NO: 257194 - DNA, 593 bp, Homo sapiens
acatgttccggctgcagataactagtcagagcccatccctttatttcggcccatccctttacttcctataaggaatacttttcgtaaatcttctgactrgcttgctgtcaataaatatgtgggtaaatctctgttcggggctctcagctctgaaggctgtgaaatccctgatttcccactccacactctacatttctgtgtgtgtgtctttaattcctctagcatcactgggttagagtctccacaactgagatggtctcagcaccctcccactggccagccccaatcaaaatgattctaacctctgaactacttttattaattcatctacatagctattaatagaatgctcccagtgatggttgattttatgtgttaacgtgactggccacaggatgcccaattaaactttatttctgggtgttaggatatgaatgggtggactcagtaaagtagattgccctccccattgtgacctcatccaatctgttgagggtctggataaaacaaaaggtgaaggaaggagggatttacttttttttgcttcctgtctgcctgcatgagctgggacatcttatctctctggccctaga

SEQ ID NO: 257195 - DNA, 593 bp, Homo sapiens
acatgttccggctgcagataactagtcagagcccatccctttatttcggcccatccctttacttcctataaggaatacttttcgtaaatcttctgactagcttgctgtcaataaatatgtgggtaaatctctgttcggggctctcagctctgaaggctgtgaaatccctgatttcccactccacactctacatttctgtgtgtgtgtctttaattcctctagcatcactgggttagagtctccacaactgagatggtctcagcaccctcccactggccagccccaatcaaaatgattctaacctctgaactacttttattaattcatctacatagctattartagaatgctcccagtgatggttgattttatgtgttaacgtgactggccacaggatgcccaattaaactttatttctgggtgttaggatatgaatgggtggactcagtaaagtagattgccctccccattgtgacctcatccaatctgttgagggtctggataaaacaaaaggtgaaggaaggagggatttacttttttttgcttcctgtctgcctgcatgagctgggacatcttatctctctggccctaga

SEQ ID NO: 257196 - DNA, 615 bp, Homo sapiens
atggttgattttatgtgttaacgtgactggccacaggatgcccaattaaactttatttctgggtgttaggatatgaatgggtggactcagtaaagtagattgccctccccattgtgacctcatccaatctgttgagggtctggataaaacaaaaggtgaaggaaggagggatttacttttttttgcttcctgtctgcctgcatgagctgggacatcttatctctctggccctagaactgggatttacaccagtgactcccctggttctcaggctttcagactcagactgaattacaccgtgggctttcctgggactctgatggcaatttgtgggacttctcagcctccgtaattgtawgagccaattcctcataataaatatgtgtatttattgaggccagaaacaataccccaaaatgaagccgtagaggcaaaagtttttctctgaccttttcttgtccccctgtctccctgtcccattcttccctaaggctagccatacaaactagaattcttcttccccaaggcaagtcatggaaaccaggactccttttcccctaagccagccataaaactgaaaaatgggatctaacttttcctctgctctacctgtgt

SEQ ID NO: 257197 - DNA, 615 bp, Homo sapiens
atggttgattttatgtgttaacgtgactggccacaggatgcccaattaaactttatttctgggtgttaggatatgaatgggtggactcagtaaagtagattgccctccccattgtgacctcatccaatctgttgagggtctggataaaacaaaaggtgaaggaaggagggatttacttttttttgcttcctgtctgcctgcatgagctgggacatcttatctctctggccctagaactgggatttacaccagtgactcccctggttctcaggctttcagactcagactgaattacaccgtgggctttcctgggactctgatggcaatttgtgggacttctcagcctccgtaattgtatgagccaattcctcataataaatatgtgtatttattgaggccagaaacaataccccaaaatgaagccgtagaggcaaaagtttttctctgacctttycttgtccccctgtctccctgtcccattcttccctaaggctagccatacaaactagaattcttcttccccaaggcaagtcatggaaaccaggactccttttcccctaagccagccataaaactgaaaaatgggatctaacttttcctctgctctacctgtgt

SEQ ID NO: 257198 - DNA, 615 bp, Homo sapiens
atggttgattttatgtgttaacgtgactggccacaggatgcccaattaaactttatttctgggtgttaggatatgaatgggtggactcagtaaagtagattgccctccccattgtgacctcatccaatctgttgagggtctggataaaacaaaaggtgaaggaaggagggatttacttttttttgcttcctgtctgcctgcatgagctgggacatcttatctctctggccctagaactgggatttacaccagtgactcccctggttctcaggctttcagactcagactgaattacaccgtgggctttcctgggactctgatggcaatttgtgggacttctcagcctccgtaattgtatgagccaattcctcataataaatatgtgtatttattgaggccagaaacaataccccaaaatgaagccgtagaggcaaaagtttttctctgaccttttcttgtccccctgtctccctgtcccattcttccctaaggctagccatacaaactagaattcttcttccccaaggcaagtcayggaaaccaggactccttttcccctaagccagccataaaactgaaaaatgggatctaacttttcctctgctctacctgtgt

SEQ ID NO: 257199 - DNA, 576 bp, Homo sapiens
ccaagtgtgactggaaacagcagtgatacatgcccagctcagagcacagttgtaaactttatggctccactttctttgtgtcttcagaaagcttaacacttagtcactgtttatgctatattgtagcacttatgctagattgctcattttttcatcccttattgtctttgtcatggtggaccacagggtgagccatagcagatacttcaatgctccagtgatgttggacttgggctatgtgacttgcccttaatgatggaatgtgggtggaagtgaaagtgtgtcaattcccagctataagcattgcatgtttctgtttacacctttgaatgtatgccaccctccatgagaagaacaagccacaggtaaccackgatctcagaacaaagaacctttgaaacagacttgaactcaacccacagcctaaaacagaaccacactagctgaactgcagagcaatgagccagaaataaatcattgttattttaagccagtgagatttgaaggttgtttgttgtgctgcattactgctacgggaacctaattcatacactatgcttgttgtttgttctctaa

SEQ ID NO: 257200 - DNA, 628 bp, Homo sapiens
taataagggcaattggcagaggatatgattctataatataccacagaaaaatgatcaagccataggcagtagatcaagttaggaaatcaagctggaagaccagggctcagcaaatcaaagtctaggcttgggagtctcaaagtgtcaaatatataacacccttctttttcctgcacaagttctgaacccactgagacatgaacagactacaaatcaaaatatcacttttgttactgacaaaaatatttgcaaagtgtgtcttgggtctgagaacaaaaagcgctttccaatactctctgccccgaatctagaacttgagaaagctactggataaaacatttgggtgtgcagaccatggagaccaactttcactagtttgggggtagaaaaagaaggagaagagaatccccagacaaattagctctgctcaaccaagacatgtggatcgatgattattgatcacttaccasaaacctccctcctttcccatggaacaaaaggtcaggagagttgctctagagaagtacctccaaatgaaaacctgaaaagtcaaggagtaatatttcctcctagtcttcctcagctgtttgttctgttagcccatcagatttaacaatcaagccaagag

SEQ ID NO: 257201 - DNA, 628 bp, Homo sapiens
taataagggcaattggcagaggatatgattctataatataccacagaaaaatgatcaagccataggcagtagatcaagttaggaaatcaagctggaagaccagggctcagcaaatcaaagtctaggcttgggagtctcaaagtgtcaaatatataacacccttctttttcctgcacaagttctgaacccactgagacatgaacagactacaaatcaaaatatcacttttgttactgacaaaaatatttgcaaagtgtgtcttgggtctgagaacaaaaagcgctttccaatactctctgccccgaatctagaacttgagaaagctactggataaaacatttgggtgtgcagaccatggagaccaactttcactagtttgggggtagaaaaagaaggagaagagaatccccagacaaattagctctgctcaaccaagacatgtggatcgatgattattgatcacttaccacaaacctccctcctttcccatggaacaaaaggtcaggagagttgctctagagaagtacctccaaatgaaaacctgaaaagtcaaggagtartatttcctcctagtcttcctcagctgtttgttctgttagcccatcagatttaacaatcaagccaagag

SEQ ID NO: 257202 - DNA, 579 bp, Homo sapiens
gagtatgtgttcccctctaacacacagaacaaccaacagcaagataaggcatccacagaatgagggctcacgggaatggaattaaaagacaacagtgaataatctagaatagattgatgttggcaaacttttctaaagaggcagatagtacttttggcttatgggtcatatggcttctgttgcaactgcttggctctgctggtatagcctgaaagcartcatagacaatgcctaaacacaagagcatggctgtgttccaataaaactttatttataaaaaggtggttgcatgagctgtgtctactaatccctgtgagagttctggatgttgccattgctggcttagaacacatgagagattttctcatcaagaacacaaatagcagtagatcttacatacacagtgcaaaaccaagatgagagatggtgaaccaagataggcatacaacctaggggagtgattccaaaatacatcatgtaatcagtgaccaaaagttgttaagcttgttcttcaattagtacaagttttgtgagagtggaaattcttgcctgtttggtttactgctgcgtccttactat

SEQ ID NO: 257203 - DNA, 571 bp, Homo sapiens
aacctgcaactttaagcgaaataacatgtaacaaagccatctttttctcttcaacattacaacaaaacaacattaaacaacaaaaaaaattatttgaggacctgttatatgtcattttgcttaaagttgcagtttctaggagcttaccaaagaagttaagtgaaaacttagtgcatacatcatgatctcaagagggytggcagcaacagaataagagaaatgagacggcttagagagaaatcaagttcaaaagaagaattactgtgcatgtgtgttattgtttagatttgtggacactgggatatatctataggtttagaagaaagaatccatggagagtagaactctgaagatgcaagagcaatgagatgatgcttgatgaatcaaggcatttcaggaaaaatggagaaatggtagggtgctagacttggaaaaaatagggagccatcctgagttacgaggaatacaaaacatctgcacaccatttaccttagcagtcattagtatctgttccaggattgtaaactgactttaatgttagcccaagcggagcataaatagataggttaga

SEQ ID NO: 257204 - DNA, 571 bp, Homo sapiens
aacctgcaactttaagcgaaataacatgtaacaaagccatctttttctcttcaacattacaacaaaacaacattaaacaacaaaaaaaattatttgaggacctgttatatgtcattttgcttaaagttgcagtttctaggagcttaccaaagaagttaagtgaaaacttagtgcatacatcatgatctcaagagggttggcagcaacagaataagagaamtgagacggcttagagagaaatcaagttcaaaagaagaattactgtgcatgtgtgttattgtttagatttgtggacactgggatatatctataggtttagaagaaagaatccatggagagtagaactctgaagatgcaagagcaatgagatgatgcttgatgaatcaaggcatttcaggaaaaatggagaaatggtagggtgctagacttggaaaaaatagggagccatcctgagttacgaggaatacaaaacatctgcacaccatttaccttagcagtcattagtatctgttccaggattgtaaactgactttaatgttagcccaagcggagcataaatagataggttaga

SEQ ID NO: 257205 - DNA, 435 bp, Homo sapiens
aatggtagggtgctagacttggaaaaaatagggagccatcctgagttacgaggaatacaaaacatctgcacaccatttaccttagcagtcattagtatctgttccaggattgtaaactgactttaatgttagcccaagcggagcataaatagataggttagatctgctacatgacaagacagagagcttctcattgayttttacataattcattatttagggttgttcatattgctatccacccccctcggtgctggtattatggacttaaccacacttccaaatgagtgaaaaataatacgatccataaaaatactgataagagtagttagaataaaatgtgttaggattatattttgacttctaagagcttcaagcctggaaattcataatcaactgtgcttcagaagtgctctatgttcaaggcagttattt

SEQ ID NO: 257206 - DNA, 435 bp, Homo sapiens
aatggtagggtgctagacttggaaaaaatagggagccatcctgagttacgaggaatacaaaacatctgcacaccatttaccttagcagtcattagtatctgttccaggattgtaaactgactttaatgttagcccaagcggagcataaatagataggttagatctgctacatgacaagacagagagcttctcattgatttttacataattcattatttagggttgttcatattgctatccacccccctcggtgctggtattatggacttaaccacacttccaaatgagygaaaaataatacgatccataaaaatactgataagagtagttagaataaaatgtgttaggattatattttgacttctaagagcttcaagcctggaaattcataatcaactgtgcttcagaagtgctctatgttcaaggcagttattt

SEQ ID NO: 257207 - DNA, 435 bp, Homo sapiens
aatggtagggtgctagacttggaaaaaatagggagccatcctgagttacgaggaatacaaaacatctgcacaccatttaccttagcagtcattagtatctgttccaggattgtaaactgactttaatgttagcccaagcggagcataaatagataggttagatctgctacatgacaagacagagagcttctcattgatttttacataattcattatttagggttgttcatattgctatccacccccctcggtgctggtattatggacttaaccacacttccaaatgagtgaaaaataataygatccataaaaatactgataagagtagttagaataaaatgtgttaggattatattttgacttctaagagcttcaagcctggaaattcataatcaactgtgcttcagaagtgctctatgttcaaggcagttattt

SEQ ID NO: 257208 - DNA, 435 bp, Homo sapiens
aatggtagggtgctagacttggaaaaaatagggagccatcctgagttacgaggaatacaaaacatctgcacaccatttaccttagcagtcattagtatctgttccaggattgtaaactgactttaatgttagcccaagcggagcataaatagataggttagatctgctacatgacaagacagagagcttctcattgatttttacataattcattatttagggttgttcatattgctatccacccccctcggtgctggtattatggacttaaccacacttccaaatgagtgaaaaataatacgatccataaaaatactgataagagtagttagaataaaatgtgttaggattatattttgasttctaagagcttcaagcctggaaattcataatcaactgtgcttcagaagtgctctatgttcaaggcagttattt

SEQ ID NO: 257209 - DNA, 524 bp, Homo sapiens
aaagggcaaaagcaatgtaccttcctttgtaatttatcctctcttcctcactttcattgcccaaatttaggattttctttcatccattcattgatccaaaaaatatttattgaatatctaccatgtgtctcatgctatgcaggtgctggggatacaataagtaagccataccatgtccttaccttcaggaggcatatagtctagtggagaaggcaaacgttaaacaaataattacagacccacatcaatataaactttcaaattgggaaaaatagaacacratactggggacatataatttaatttggggggatctgagaaggcaaagaaatgttactgcagctagaggatgggaaggaatccaagaggtgaagaggaggaaagtggtttccaaacacagtgaacagcctgtgaaagagcctgagaacagaaagagcttggcatattctgggaactaaaagatggccattgggtctacagcacagtcagccagaataggagtggcacgaggccaggctggagga

SEQ ID NO: 257210 - DNA, 524 bp, Homo sapiens
aaagggcaaaagcaatgtaccttcctttgtaatttatcctctcttcctcactttcattgcccaaatttaggattttctttcatccattcattgatccaaaaaatatttattgaatatctaccatgtgtctcatgctatgcaggtgctggggatacaataagtaagccataccatgtccttaccttcaggaggcatatagtctagtggagaaggcaaacgttaaacaaataattacagacccacatcaatataaactttcaaattgggaaaaatagaacacgatactggggacatataatttaatttggggggatctgagaaggcaaagaaatgttactgcagctagaggatgggaasgaatccaagaggtgaagaggaggaaagtggtttccaaacacagtgaacagcctgtgaaagagcctgagaacagaaagagcttggcatattctgggaactaaaagatggccattgggtctacagcacagtcagccagaataggagtggcacgaggccaggctggagga

SEQ ID NO: 257211 - DNA, 524 bp, Homo sapiens
aaagggcaaaagcaatgtaccttcctttgtaatttatcctctcttcctcactttcattgcccaaatttaggattttctttcatccattcattgatccaaaaaatatttattgaatatctaccatgtgtctcatgctatgcaggtgctggggatacaataagtaagccataccatgtccttaccttcaggaggcatatagtctagtggagaaggcaaacgttaaacaaataattacagacccacatcaatataaactttcaaattgggaaaaatagaacacgatactggggacatataatttaatttggggggatctgagaaggcaaagaaatgttactgcagctagaggatgggaaggaatccaagaggtgaagaggaggaaagtggtttccaaacacagtgaacagcctgtgaaagagcctgagaacagaaagagcttggcatattctrggaactaaaagatggccattgggtctacagcacagtcagccagaataggagtggcacgaggccaggctggagga

SEQ ID NO: 257212 - DNA, 626 bp, Homo sapiens
tcttagtccattttgtgctgctgtaacagaatctctgagactgggtaatttgaaatgaacagaaatgtattggctctcagtgctagaggcgggtgagtccaggatccaggcaccagcatgaggtgtggtgagtgccctttgctgcgtcctttctggcaggaggtggaaaggcaagagggcaagagaacgaatccacttccacgagcacttttaataacagcatgaatctactcacaagggtagagccctcaagagctaaacgcgtcccaattaggccccacctccttatatcatcacattggagattgaattttcattcccctagaatctaggggacacattcaaaccatagtactgcatacgtcctccccttccccactccaggactttgaatgcttgatcaaaaacacggaggggagggagtttttttaatcattcatgatctcttcagctaattcttggttctaaagaagtggttttccaactgggtatgtaggatccccagatttccacatacaggctttaggaagcatcacagaaaatagaggagacccattaggcatggctcaagacwcctggcactgctctgattttatgttttctacatctgttctgtggtgttaaaa

SEQ ID NO: 257213 - DNA, 414 bp, Homo sapiens
acatgtccagtctctcaatgatgggcatttattttcatatttttgttattagaaacaatgccgcaataaatattcttatacatgtgaaaaaaaaaagtttctacctgaaacaaagctaagttcagaattagtgcacataaaactcattgcctattaagttttatatktgcatatttgtgctacagatgaaacaaccggaaaactattgaaatggcatccattaaaatatttaataatttcttctgttcagagttacatcaaaatctagtcccttaggtaactgccttattagcaaattgatgaacaacattctcttgtaatgcaaatgtgcaattcaaattttcctattttctccatatatacttttatacattcttgagtttaaaataatagagattttaataccttgttata

SEQ ID NO: 257214 - DNA, 500 bp, Homo sapiens
ttatctaaaatgaccttgctcatttacccatttacttatctggctctcccactcttatgagaccttgaagcctatgagaacgggaactttatctgttgttccccacagtttcctctttcctagaaaattccctggcaatgagtaggcactccataagtatttttgaatgaatgaataaacagaatctctaaactaaaagggacataaaaagtcacccagcccccacattgactgccagcatggagtcaccaagcttttttcttaaacctccaatggcaattactcatcacaattcgattactctatttcatcttagaacagattcaattttgggaaagttctacttacactcacctgaaatctgtgtacaacttctagtttccgtccatgaagtttatcagaacccaactcttccataagttcacaggtaacaacagactcaatccctctttcacayggcagccattcagcatttgcttctccagtctggacagtttcaa

SEQ ID NO: 257215 - DNA, 625 bp, Homo sapiens
tcatttaataaagatgtaaaactcattattgagcccaatgttctatggttgtattaaaaacaatataatttactagcacaatatgggagaggagcgtgagtagcaaaaagtcatcaaaaatcacagctttacatatggagagaactgasgattttggatgatgtcaagcaaattaagagtcaataatgagacatggctaggaaacaaaaaataaatgcaatcttagactgcactgatacaatgatagtatcaaaattagaataatagtcaacttgtaatgtcagaccatgtgttcattactgacaacaaaattttatgaaagatgtgctaaagatgtatgctataataagatttctagtcactataccttgtgagaaaggtgagaaaactaaagatccaatcttaaaaagaggaggtttaggactcatgatttcatgcttaaaaaagaaaataaaagcctctatgtaaaactgaattagactaagtctaagcataggtatatttacaattctaaaaagctttaagggtggaaatcagagttcacagctttgctgtgtgatcataagaaaaatacttaatttctctctacctgattctttattcattcactcaacaaatatatgaa

SEQ ID NO: 257216 - DNA, 614 bp, Homo sapiens
ttctccaaactcatcacgttgtatacaagaaatatgtacagctttttgtatgtcratcatacctcaataaagtgtttttaattaaagtaaaaattaaaaataatatattttcaaagaaatgtatgatgaagaatatatgaaaatattccattgaaattctataaatgaaaaactaagttttagacaaatagaagattatacagcagatttgacagtggaatgcagcactaataaactggaggcaggtcagtgtaaaatgtctttattgaagcaaagaaaaagaaaacctgacaaaatatacaataataactataaaggacactgtgagaaattctagcatatatgtaaaaggcttccaagaggggaactgtgataaaataatgtgactgaggcaatatgtaaggagataacagactcagattttcccagaatgatgaaatacatcaagttaattattcaggaagtgtgataatctacaaacagaataataagataaacactccaagtttgagagtaaaactactaaaatctaaggacaaaataatctgatatgcagtcagaacagtaagtacacattaattttaaaagagcagttgagcacaatggcacacacc

SEQ ID NO: 257217 - DNA, 600 bp, Homo sapiens
ttaaccagaaaatgtttaaatatttggaaattaggcacttctggaaaacccgtatgtcaaagaaatgtcattaaaaattcaaaaatttttttaaattaatgatagcaaaaatactaccaaaatttgtacaattctgctaaaacttacttaaaagtaaatttgtaaatcttaaagatataagaaaaaagactgaagaactagtgctctaatatccatctcaagaaatttttttaaatagcagcaaattatccagagaaaacaggaggaagaaaataaacaacataagagcagaaaagaataaaataggaagccaaccaaaagcagaaaacaatatcaaagcaaaaatttgatttcttgaaaagatcaagtaaaatctrtaagttcctggtcatcaaaagccatcgttaaaagggtgaaaaggctagccacagcgtgatgagaagctattttcaatacatacacaggacaatatataatgctaaacatcatttgtcaccaagcaaatacaaattccaatcacaattagataccaatccacattcatcagaaaggcaatactagtcaagatagtggctcactttggggaggggctggatcatg

SEQ ID NO: 257218 - DNA, 600 bp, Homo sapiens
ttaaccagaaaatgtttaaatatttggaaattaggcacttctggaaaacccgtatgtcaaagaaatgtcattaaaaattcaaaaatttttttaaattaatgatagcaaaaatactaccaaaatttgtacaattctgctaaaacttacttaaaagtaaatttgtaaatcttaaagatataagaaaaaagactgaagaactagtgctctaatatccatctcaagaaatttttttaaatagcagcaaattatccagagaaaacaggaggaagaaaataaacaacataagagcagaaaagaataaaataggaagccaaccaaaagcagaaaacaatatcaaagcaaaaatttgatttcttgaaaagatcaagtaaaatctgtaagttcctggtcatcaaaagccatcgttaaaagggtgaaaaggcwagccacagcgtgatgagaagctattttcaatacatacacaggacaatatataatgctaaacatcatttgtcaccaagcaaatacaaattccaatcacaattagataccaatccacattcatcagaaaggcaatactagtcaagatagtggctcactttggggaggggctggatcatg

SEQ ID NO: 257219 - DNA, 555 bp, Homo sapiens
ttcccccttgttacacaacaatctttgagagcatagttttctttcattgatttttgtcaacatattggtttaaattttgccaggtaaaagctttggaactgcagaacagggcctttgttccttttacatcatgctgcctttcattttctgttatagcattctctctaaatgatgtgccttaagattcattcagaatgccacggctgacagatggcattctccctgtctgacttggtgcaacacagccgggcactctataaaaactgagaagtcagagctctcctaattctctgctcaaaattgagtacctgttgaggaacctggctgctgcttagcagcyacagtgtggggctgggaactggtgttcagggttaactgacgcacgggggcacgacagccctgctctgggtttcctctgccatgtgccgggatgggcgacatgctggcctctgggaccggtcagcagaggtaatgtctccctgtggtgacacattttagtggcttacaacatccaagcattattttctactctcatctcatgttccttgagggttg

SEQ ID NO: 257220 - DNA, 589 bp, Homo sapiens
tacaaataattggaggatacacgtttacgtaaacacacacagaacttacttatgaaacttggccttgttttaggtcataatcttacagaattgctgttatatattttatgatgacaatgaaattgaattacagataaataacaaaatgattttaaaaattccacttacatttgaaaactaagaaatgcttacaactaatttaaatgaaaattagaaaatacttagaacagaaatgatcgtactacatatcaacatttgtgtgatgtggtatagccttaaaaatttttattacaattattagattacaaatatcaagattctgagttaaagcacacaaaaggtctatcatttgccatagattctaagagaagctgtttaaaattttatttgtttgttttttaaacaacccacgggcagttaggcctarctagagaattttcctcgctgctttttctgggctttatttcatcttattattttcacatctcaccttttctttgaatcctagatttttctggtgtggtctctaagcagggtttgggcctgcccaggaccaaaggggtggttaaaccacagcaaataaaactgg

SEQ ID NO: 257221 - DNA, 590 bp, Homo sapiens
ggcaaaacagtttaaggaagctatgaacccctgagaaatgaaacagccatatgacaacccataaaaagtggacatttaaaagattttttaaatcctggaattctggccaagcgtggtggttcacgccagtaatcccggcactttgggaggccaagacaagcggatcacctgaggtcaggagttcaagaccagcctggccaacatggcgaaaccctgtctctaccaaaaatacaaaaattagccaggtatggtggcacatgcctgtaatcccagctactcgcgaggctgaggcaggagaatcacttgaacccaggaggcagaggttgcagtgagctgagattgcaccactgcactccagcagcctgggcaacagagtgagactctgtctcaaaaaagaaaaaatcctagaatttaaccagttaatagaaccatakaagagatattatcagttacttttgcacagtgaggaagattttttttttttaggtaaagcaagcaataaggtttttgttgttgcttttttccagttctataaccccatcgtcattaccattctcaagtaaagtattcttaagcaaaaggcagcagag

SEQ ID NO: 257222 - DNA, 509 bp, Homo sapiens
tatttttggattcagttagctagcattttgttaagaatttttgcaccaagttcatcaaaaatattggtctgtagttttcttttttgattatgtcctttcttggttttggtattagggtgatgctggcttcataacatgatttagggagggttccctctttctctctcttgtggaatagtgtcaaaaggattggtacaaattcttctttgaatgtctggtagactgctgctgtgaatccatctggtcctggactttttttgttrgtaatttttaaattaccatttcaatctcactacgtgttatgggtctgttcagggtatataattctttctgatttaagctaggagggttgtatttttccaggaactcattcatcttttctaggttttcttgtttatgtgcataatggtgttcatagtagccttgaatgatcttttgtatttctgtggtgtcagttgtaatatctcccgtttcatttcgtatttagattgttcggattttctctcccc

SEQ ID NO: 257223 - DNA, 509 bp, Homo sapiens
tatttttggattcagttagctagcattttgttaagaatttttgcaccaagttcatcaaaaatattggtctgtagttttcttttttgattatgtcctttcttggttttggtattagggtgatgctggcttcataacatgatttagggagggttccctctttctctctcttgtggaatagtgtcaaaaggattggtacaaattcttctttgaatgtctggtagactgctgctgtgaatccatctggtcctggactttttttgttggtaatttttaaattaccatttcaatctcactacgtgttatgggtctgttcagggtatataattctttctgatttaagctaggagggttgtatttttccaggaaytcattcatcttttctaggttttcttgtttatgtgcataatggtgttcatagtagccttgaatgatcttttgtatttctgtggtgtcagttgtaatatctcccgtttcatttcgtatttagattgttcggattttctctcccc

SEQ ID NO: 257224 - DNA, 591 bp, Homo sapiens
cttgtcttttttaactgctgttgctttaaagttcgttttgtctgatataagaatagctacccttgctcacttttggtgtccatttgcatggaatgcctttttccacccctttaagtttatgtgagtcgttatgtgccaggtgagtctattgaatgcagcagatacttggttggtgatttcttatccattctgtagttctatatcttttaagtggagcatttaggccatttacattcaatgttactaytgatatgtgcggtaccattccatttattgtgctatttgttgcctgtgtaccttgtttttttctttattgtttttgctttttaaattgtatttctgttttacaggtctgtgagatttatgctttaaagaggttctgttttaatgtgtttccaggatttgtttctaagatttagagctccttttagcagtttttgtagtggtgaggcgggaaaatgaagtctggaggcagggaacatgaggccaattcacacttcagttataacaggaaatatcctctccatagggcatacaccatgtaaataactttgtaactttacttcattgtcttcatttacagagggcata

SEQ ID NO: 257225 - DNA, 591 bp, Homo sapiens
cttgtcttttttaactgctgttgctttaaagttcgttttgtctgatataagaatagctacccttgctcacttttggtgtccatttgcatggaatgcctttttccacccctttaagtttatgtgagtcgttatgtgccaggtgagtctattgaatgcagcagatacttggttggtgatttcttatccattctgtagttctatatcttttaagtggagcatttaggccatttacattcaatgttactattgatatgtgcggtaccattccatttattgtgctatttgttgcctgtgtaccttgtttttttctttattgtttttgctttttaaattgtatttctgttttacaggtctgtgagatttatgctttaaagaggttctgttttaatgtgtttccaggatttgtttctaagatttagagctccttttagcagtttttgtagtggtgaggcgggaaaatgaagtctggaggcagggaacatraggccaattcacacttcagttataacaggaaatatcctctccatagggcatacaccatgtaaataactttgtaactttacttcattgtcttcatttacagagggcata

SEQ ID NO: 257226 - DNA, 591 bp, Homo sapiens
acaccatgtaaataactttgtaactttacttcattgtcttcrtttacagagggcataccccaagtagagggtatttaaattcacagaaactctgtaacagggccttttagcccctgtgcttggccactaccacactgtggagtatactttcattttcaataaatccttttattccttccttgctttgtttgtgcattttgtccaattctttcttcaagatgccaagaacctagataccccccaccattaacataccttggcgagccagccaggaggaagaggtaagcccaaagtttggaatttattattctcctttctccttttcctttctgctccatacaagggaatctcttttcctttacaacctggggcccttggtgggcagcacctaaacatggaagcaactgcaggtttctggccatggccagtgaaactaagaggtttcctcgtggagaagcctgaccaccaccaccggtttgcttaaggaacctgggtcgctttcatttttttttcttctctttctcttacagtcttgcagtggctgttttccagtagctctttggaaattgagggcaattggctggggtcact

SEQ ID NO: 257227 - DNA, 591 bp, Homo sapiens
acaccatgtaaataactttgtaactttacttcattgtcttcatttacagagggcataccccaagtagagggtatttaaattcacagaaactctgtaacagggccttttagcccctrtgcttggccactaccacactgtggagtatactttcattttcaataaatccttttattccttccttgctttgtttgtgcattttgtccaattctttcttcaagatgccaagaacctagataccccccaccattaacataccttggcgagccagccaggaggaagaggtaagcccaaagtttggaatttattattctcctttctccttttcctttctgctccatacaagggaatctcttttcctttacaacctggggcccttggtgggcagcacctaaacatggaagcaactgcaggtttctggccatggccagtgaaactaagaggtttcctcgtggagaagcctgaccaccaccaccggtttgcttaaggaacctgggtcgctttcatttttttttcttctctttctcttacagtcttgcagtggctgttttccagtagctctttggaaattgagggcaattggctggggtcact

SEQ ID NO: 257228 - DNA, 437 bp, Homo sapiens
caagagtatatgccctttgtcttcagttaccagggtgagtagggaaggaccatcaggtgggggcagggctgggcatgtctgagctcagactctccttgggcaggtcttgctgatgctgctgtggagggtgggcatgaggttctcaggtcaatagagttkcgtacctaggaggattatggctgcatctgctgagtcatgcaggttgtcagggaagtggagtaaagctggcagtcaaaggcctcatccagctgtcatgcaattcaaagggccccagtctcactgccaccatgctccctccaacagcaccgagtctgtttccaggcagtgagcaagcagggctgagaacttgccccaggctacctgcttcccagctgtgaaagaaaagggctttagctttagttcttcccccatctatggtgtctgcacaccagattcct

SEQ ID NO: 257229 - DNA, 580 bp, Homo sapiens
aaaaaaaaaaaaaaaagaaaaaataaataaatctaataaaatatgtacaagctctatatgagaaacaccataaaactttgtttaaaaaaaagaaagaaagaaattgggagatattccatgttcatgggtagaaagactcaatattgtcaagatgtgagctcttcccaaattgatatataagctcaatgtgagcttagccaaaattctagcaagttattctatagattctaagaaactgattctaaagtttacataaaggggcaaagactcagaatagccaacacaatattaaatgagaataataaagttggaggactgatactacactactataaaatgaaaggaatccaaacagtgatmgtgacaaaaaatagacaagcagatgaatggaacagaatacagaactcagaagtagacccatataaatatagtcaaccagtctttgacaaagaacaagggcaatacaatgaagaaaaaataatcttttcaacgaaaggtgctgaaacaactggacatttacatacaaaaaaaatgaatctagaaacaagccttacacccttcacaaaaatgatctcaaaat

SEQ ID NO: 257230 - DNA, 580 bp, Homo sapiens
aaaaaaaaaaaaaaaagaaaaaataaataaatctaataaaatatgtacaagctctatatgagaaacaccataaaactttgtttaaaaaaaagaaagaaagaaattgggagatattccatgttcatgggtagaaagactcaatattgtcaagatgtgagctcttcccaaattgatatataagctcaatgtgagcttagccaaaattctagcaagttattctatagattctaagaaactgattctaaagtttacataaaggggcaaagactcagaatagccaacacaatattaaatgagaataataaagttggaggactgatactacactactataaaatgaaaggaatccaaacagtgatcgtgacaaaaaatagacaagcagatgaatggaacagaatacagaactcagaagtagacccatataaatatagtcaaccagtctttgacaaagaacaagggcaatacaatgaagaaaaaataatcttttcaacgaaakgtgctgaaacaactggacatttacatacaaaaaaaatgaatctagaaacaagccttacacccttcacaaaaatgatctcaaaat

SEQ ID NO: 257231 - DNA, 446 bp, Homo sapiens
agtctaaaccactgataaagaggccagatgcagtggctcatacctgtaattccagcactttgggaggccgaggtkggtggatcacctgaggtcaggagttcaagaccagcctgaccaacatggtgaaactccatctctactaataacacaaaattagccaggcatagtggtgcacacctgtaatcccagctactcgggaggctgaggcaggagaatcgcttgaactggggaggcggaggttgcagtgagccaagatcacaccattgcactccagcctaggcaataagagtgaaactctgtctcaaaaataaataaataagtaaaaaataaaaaactgataaagagaaaatcttcaaagtaacacattacatagagaggaataagagaaggaagatagatgatttcccatcagaaatagaaaacaaacagcgagagagacttaaacg

SEQ ID NO: 257232 - DNA, 446 bp, Homo sapiens
agtctaaaccactgataaagaggccagatgcagtggctcatacctgtaattccagcactttgggaggccgaggtgggtggatcacctgaggtcaggagttcaagaccagcctgaccaacatggtgaaactccatctctactaataacacaaaattagccaggcatagtggtgcacacctgtaatcccagctactcgggaggctgaggcaggagaatcgcttgaactggggaggcggaggttgcagtgagccaagatcacaccattgcactccagcctaggcaataagagygaaactctgtctcaaaaataaataaataagtaaaaaataaaaaactgataaagagaaaatcttcaaagtaacacattacatagagaggaataagagaaggaagatagatgatttcccatcagaaatagaaaacaaacagcgagagagacttaaacg

SEQ ID NO: 257233 - DNA, 575 bp, Homo sapiens
caatttgggttcttttttcaaaagcaaaaggggcaaattccagctaaattaagcaaaaagagtaagtttattggaaaaatgcaaagtagtttacagaatcagaaaagaattccaaaaatcagtcctcaggatgacaaccagggcactcctgaggtatgggaaggagatagtaacagacttttcaaggcaaaacaatggccctcctcaaagatgctcacatcctattccctaggacctgtgaatatttcatattacataacaaagagtgattaagcttgcagatggaatcaagattgctactcatctgaccttaaagcagagagagtagcgtggattcccaggtgggctcaattttatcacaagggtctttaaaagtggaaaggggaggcaggcgagctgagtcagaggagaggtgacgatgggagcagcatcagagaggggccctatgaaaagatttcatctgcctttcaagatggaggaaggggaaaggggccaaggaaagtaggaggccyctagaagctggaaaagacaaggaaacagcttctcctcacagccctgccaacaccttaatatta

SEQ ID NO: 257234 - DNA, 544 bp, Homo sapiens
aaacaaataaaactacaactatcattaaaagatcaaatctgttgaacaggtatttctctaaagaataataagaaccatgaaaagatacttaacattgtaacatctttgcattagggaactgcaaatcaaaatcataacaaaatagtactgcatgctcattaggatgactataatccaaaagaataaaaaagaaaataacaggtgttggtagggatayagatatagagaaactggagctctcatgccttgctggggggcatgtaaaatgattctgctgctttggaaaacagtttggtggttcctcaaaaagttaaacatataatccaacaattccacccaaaagaattgaaagcagggtctagtacaccaacgttcatagcagctttattcacatcaagccaaaggtggaagcagcccaaatgtctactgatggatgagttgatacacaaaatgtggtatatatatgcaatggaatattatgcaaccataagaagatatgaagctctgatgaagccagacacaaaaggacaaatattgtgtgatt

SEQ ID NO: 257235 - DNA, 544 bp, Homo sapiens
aaacaaataaaactacaactatcattaaaagatcaaatctgttgaacaggtatttctctaaagaataataagaaccatgaaaagatacttaacattgtaacatctttgcattagggaactgcaaatcaaaatcataacaaaatagtactgcatgctcattaggatgactataatccaaaagaataaaaaagaaaataacaggtgttggtagggatacagatatagagaaactggagctctcatgccttgctggggggcatgtaaaatgattctgcygctttggaaaacagtttggtggttcctcaaaaagttaaacatataatccaacaattccacccaaaagaattgaaagcagggtctagtacaccaacgttcatagcagctttattcacatcaagccaaaggtggaagcagcccaaatgtctactgatggatgagttgatacacaaaatgtggtatatatatgcaatggaatattatgcaaccataagaagatatgaagctctgatgaagccagacacaaaaggacaaatattgtgtgatt

SEQ ID NO: 257236 - DNA, 586 bp, Homo sapiens
tttgccaggcaaactgaacatatctacaaaaaagtatattacaatagaatgcttcaggtcagggggaagtgttcaaaatacactgtattttaaaagcaaacacaaaatagtatagatagcatgattccaatttgtgaaaaacgtgtgtttgcaaaggaaaaggcataaaacagtgtgcacacatacctaagcaaaaagagataggttctctgagtaataaaattacatttgatttttatttccttttcttgtgtattttctraattttcagaattttatcctatgaatacataatatttgtaaattgaaaaaccttgaaatgaatgctactgatggatttgctgaatgaacctctgtgctctggtttgattcacaaggcatcgggactctcaagggcacttttatctgcagggaatctgcaattccaggtgataccatttggatatttgtccccttccaaatctcatgttgaattataatccccattgctggacatggagcctagtgggagacgtttgaatcatggggccagatccctcatggcctggtgctgtcttcatgatagtgagttcttgtggtcattcaa

SEQ ID NO: 257237 - DNA, 560 bp, Homo sapiens
aggttaatgatcttgctaaggtcacacagcagtaagtggtgaagctaagatgggaacccacaatgattattaaccattaggtatacagtctacttaatttgcccatataattaacatgcactattgattccaattaatcagaataacagggaaaagccaagagatgtgaagattaattacagaatgcctgtaagccgttttatttcttgaaaaattaaataggtataaaacacactccagtttgggagtgttacggaattcttctccatcgctatttacacatgcatgtgaatctgtaagagcagctcctgtcacttttatcataaagatagaagagttaaatgataatyatttctttgcaaccttcaggatctgctggtaagttcctgcccttgggtaactgatcttttacagaaatttttttttctgagaagcctataccagaatagtaatgtgttgactgaagtgaataccctatgatgattttgtgattgctaggaaatctaaagtaacccaaatctttagcaacaaaattaaagttggtaagaagaaggtgcaaa

SEQ ID NO: 257238 - DNA, 540 bp, Homo sapiens
attgacctatcaccctctcctacccaccctcgtatctgcytgaacatatctgaattgactccatctcctgcacccccacgcacacacgctttttctttcagtaccaaagcaaagataaatacccaacatgataatgatccaggatctcttcaattcctgaatatttctcaggggtcgtagaaaatgagagttttacaaagaatcaataattctttgaattattagatgttcattctgtgcattctttcagtcatgtagcctaaaaagattagaaactcactacccagtgacttgatttattccagaagagcaatttaggtcacgggaaaaatgaaacctatcaactgccaatccctcagataacataataactgttatttttctctactggccatttgtttcttaaattagaagtcttcacagcacaaaagggacagaggtagccttacctatgtgtagatttgtgtctgagcccattaacggaagaggttaggttcttgtactaatgagggaaatgcagaacttgcatccccagagaac

SEQ ID NO: 257239 - DNA, 540 bp, Homo sapiens
attgacctatcaccctctcctacccaccctcgtatctgcctgaacatatctgaattgactccatctcctgcacccccacgcacacacgctttttctttcagtaccaaagcaaagataaatacccaacatgataatgatccaggatctcttcaattcctgaatatttctcaggggtcgtagaaaatgagagttttacaaagaatcaataattctttgaattattagatgttcattctgtrcattctttcagtcatgtagcctaaaaagattagaaactcactacccagtgacttgatttattccagaagagcaatttaggtcacgggaaaaatgaaacctatcaactgccaatccctcagataacataataactgttatttttctctactggccatttgtttcttaaattagaagtcttcacagcacaaaagggacagaggtagccttacctatgtgtagatttgtgtctgagcccattaacggaagaggttaggttcttgtactaatgagggaaatgcagaacttgcatccccagagaac

SEQ ID NO: 257240 - DNA, 447 bp, Homo sapiens
aggaaatagagccataatacttgaaatcacaacggtctctgtgattttaaaactctttgccttgaaagaatttgcgcaaataaattcatgaggaagggcctgacacgggcccctagatacaacagtagggcttaatgtgaaatkagttactgaagatataaatttggcgaaaggggtcataagaagtcagtttcaagttgatccttaagccacatacttgtcccagctggacaaaccaaggtcaattactctgaactttgtgaatctcagccagctctacaattgtatcaggatactacttcctcatattgtacagctcattatttttaaaagttcagtctatataatgctcttggggaaagatttctttccttcagaattgttcaaggaactctccaaattacagcctcaaattcttccccatatatttaaacgacctagtagtga

SEQ ID NO: 257241 - DNA, 601 bp, Homo sapiens
aaaggcaaagtataaacattaggctggggaaaatacgtgcaaaggagagtataagagctcctgcaaagagacgggtaagcctcctcagcttcagagaactctgagtgcttatgggtatctgggtcttcgtttaataaattaatttaaaaaaaaacaggaaacagactctctgcatgcctaaacattcacttgagaggataaagtgaaattcactgccactcaatactgactgaaaaccttattgagaaaaaaaatgtacttaacagaattacctgaagtatatgttttctattcactttcctaaaatttgaaaatcatccttaagaagactatgagctaccttcatatctggactgcactgctttggcccctcaaaaaatcctcctgctaagctgagctgatttattctgccaacagcctttacagggagtaaaggtaaagcaacagtcctgtgaagcttgtcgtaattatttgttgaggatattgttcattgtaataatgggcccctctctataaggtccttaggatacattttctcagggctcagaaccaggaatgattgtgcrtattctggaaaattggtggctttatctgataaaca

SEQ ID NO: 257242 - DNA, 614 bp, Homo sapiens
ttgtttctcaatctggctgagcttctgatttctctgaacacctggaagccgattctatttctcaatttccccatctgggaaacagcagtaatattttattttatccatattccttagagcttcataaaacaacctggactctacaatattcctacttattcttctttccttgacactcattacaagtagcaggagaacaaagaagtatacatcaacactctaagacatcacttgaatcactgcttttatgaaaagctttcatggtaagccatctcccccatcccctcttcaccactgcscagtttcatattaaactaaagaaatgcactactcacagtcaccttccaaaccagccattaaattttaattttgttgttctctgcatcaagagcctaacacaaggaaaatgtccttactttttaggagatgaactggtactctttcaacattgatatattaattcagttgaaaggactaggagacaagatgcaaaattaccaggtgccagccaatgtttgaaaagcagtacaactactggttgtacatgcagacttggggagtcaaacggcctatactggaattccaggtctgccacttactaactcctgacttta

SEQ ID NO: 257243 - DNA, 614 bp, Homo sapiens
ttgtttctcaatctggctgagcttctgatttctctgaacacctggaagccgattctatttctcaatttccccatctgggaaacagcagtaatattttattttatccatattccttagagcttcataaaacaacctggactctacaatattcctacttattcttctttccttgacactcattacaagtagcaggagaacaaagaagtatacatcaacactctaagacatcacttgaatcactgcttttatgaaaagctttcatggtaagccatctcccccatcccctcttcaccactgcccagtttcatattaaactaaagaaatgcactactcacagtcaccttccaaaccagccattaaattttaattttgttgttctctgcatcaagagcctaacacaaggaaaatgtccttactttttaggagatgaactggtactctttcaacattgatatattaattcagttgaaaggactaggagacaagatgcaaaattaccaggtgccagccaatgtttgaaaagcagtacaactactggttgtacatgcagacttggggagtcaaayggcctatactggaattccaggtctgccacttactaactcctgacttta

SEQ ID NO: 257244 - DNA, 614 bp, Homo sapiens
ttgtttctcaatctggctgagcttctgatttctctgaacacctggaagccgattctatttctcaatttccccatctgggaaacagcagtaatattttattttatccatattccttagagcttcataaaacaacctggactctacaatattcctacttattcttctttccttgacactcattacaagtagcaggagaacaaagaagtatacatcaacactctaagacatcacttgaatcactgcttttatgaaaagctttcatggtaagccatctcccccatcccctcttcaccactgcccagtttcatattaaactaaagaaatgcactactcacagtcaccttccaaaccagccattaaattttaattttgttgttctctgcatcaagagcctaacacaaggaaaatgtccttactttttaggagatgaactggtactctttcaacattgatatattaattcagttgaaaggactaggagacaagatgcaaaattaccaggtgccagccaatgtttgaaaagcagtacaactactggttgtacatgcagacttggggagtcaaacggcctataytggaattccaggtctgccacttactaactcctgacttta

SEQ ID NO: 257245 - DNA, 540 bp, Homo sapiens
ctgctccctcaagttcctcatcctctaaacaagcactcacaaagccccgcacttttgcactctctacccaacaaatggggtggcattcaatgcaaagttcttggtcagtgggaaagggactggaggaaaggaaatgaggaccatgtgttttgttactagtgatggagctctcactttgattgcagatggtgaacttataaaagaaaaaaaggactgcaggaaatatagtytgtggccctgaacgactctctatgagaacatccagacaacgccagggctactgcaaaatggagttcaacaccagagagtcgggagattgacactggagccttctcccctggagaagattgggacccaagtcaaggctacttcctccccacctgctcctgtgtcagatcagtcctgaacatcctcacctgctagccctccagttgaacaccccccaccaataatgacccctgagagtcttttcatgccaacattggctgcacagaacatgataccactgtccttgactagcatatgggaaaagaagccagc

SEQ ID NO: 257246 - DNA, 540 bp, Homo sapiens
ctgctccctcaagttcctcatcctctaaacaagcactcacaaagccccgcacttttgcactctctacccaacaaatggggtggcattcaatgcaaagttcttggtcagtgggaaagggactggaggaaaggaaatgaggaccatgtgttttgttactagtgatggagctctcactttgattgcagatggtgaacttataaaagaaaaaaaggactgcaggaaatatagtttgtggccctgaacgactctctatgagaacatccagacaacgccagggctactgcaaaatggagttcaacaccagrgagtcgggagattgacactggagccttctcccctggagaagattgggacccaagtcaaggctacttcctccccacctgctcctgtgtcagatcagtcctgaacatcctcacctgctagccctccagttgaacaccccccaccaataatgacccctgagagtcttttcatgccaacattggctgcacagaacatgataccactgtccttgactagcatatgggaaaagaagccagc

SEQ ID NO: 257247 - DNA, 248 bp, Homo sapiens
tgcaagttacttgacctttacagacatccagttttattaaaaatttgagatagtaatgtctatmttgtaagcatcattgtgagcatgaaatgagattgtgtatataaagtgctgagaatagtactggaaacaaataagctatcaagttgggaaagagggggcattttgttactccatttatctctttcttcaatctctttttttattttaagtaaataaaaaatggagtacatttaaattttttatta

SEQ ID NO: 257248 - DNA, 540 bp, Homo sapiens
cacacttgtagttccagctattcgagagacygaagtgggagaattgtttgaacccaggaggcagaggttgcagtgagctgagatgatgccactgcactccagcctaggtgacagagtgagaccccatctcaaaaaaaaaaatgttaataaataaacaaatagagacagggtctcactatgttgaccaggctggtctcgaactcctggcctcaagggtcctccttgcctcaatctcccaaagtgctgagattacaggcatgagctactatgcctggcctcagtttttattgataatatcagttaacctttattgagagtttactaagtgccaatctctgagccaagggccttccatgcattatctcactgaatcctctcaaacctctatgaagtagttactgctttttaaaaaccctatttacaaaaatggggccttagagagataaagcaacttgcccaactgctgttgagtagaaatcttagatgtgaatccagacagttaggtattttctcaattagggtcacaataaagtaggtagg

SEQ ID NO: 257249 - DNA, 495 bp, Homo sapiens
ctgcaagtcctaggattaaaataggagagtgaagtgatcgggtttgggtttcagaaggaattctcctgtctcagtgttgaagatgggttggagaagaacaaaggtaagaccatctatgtagagaaaatgcactttttgcctaaaccagaggaataaggaggaagaggtggcattctacagatgtgaaggcaatttatctgtgaagctgagggactcgggatgtggagggagaaagggagggaagcacccaagattgttgtgcaggagctaagcttagctggggaccacgggaggcgcctttacctggggcgggaccttccttaggtgggggttgaggaagaagckgccaggcttggcttccatcgaggtttctgtatctgggtgatacctggtgatgtgtcgacaggcagtgggttaagaaggcctcaatttcaggaaaggactatggcctggtcacatacattagcgagctgtctacatagaggtggcagttta

SEQ ID NO: 257250 - DNA, 587 bp, Homo sapiens
gcctgaagcatttatcatttctttgtgttagtaacattccaatactgctgttttagttattttgaaatatacaataaattattgttaactatatagttgccctattgtgctaatgaacaccagatcttattccttctaactgtatttttgtacccattaacsagttccctttatctgtttttttccacccttcctagcctctagtatccatcattctactttctatcttcatgaattcaattttctaaataatattttatgtgaaaatgaagaatggaaaaataaatttaaagcttaaataggaaataaaattcttaaagaagttgcttgttatttctatcttatggctacttggttgttatagttatttaataatgttttcctattttctgcaacatgtatctgttgatttgaaataaattggattgaatctatgtagctgttaaaatgaaaaagaaagcggcctttatgatcatctaccggtgccagacagtgtaaaaaactgttttgtaactttgtgtcattatttttcccacgatccaatgggaaaggcattttcattttcatcttgcaggtaaggaaattaa

SEQ ID NO: 257251 - DNA, 587 bp, Homo sapiens
gcctgaagcatttatcatttctttgtgttagtaacattccaatactgctgttttagttattttgaaatatacaataaattattgttaactatatagttgccctattgtgctaatgaacaccagatcttattccttctaactgtatttttgtacccattaaccagttccctttatctgtttttttccrcccttcctagcctctagtatccatcattctactttctatcttcatgaattcaattttctaaataatattttatgtgaaaatgaagaatggaaaaataaatttaaagcttaaataggaaataaaattcttaaagaagttgcttgttatttctatcttatggctacttggttgttatagttatttaataatgttttcctattttctgcaacatgtatctgttgatttgaaataaattggattgaatctatgtagctgttaaaatgaaaaagaaagcggcctttatgatcatctaccggtgccagacagtgtaaaaaactgttttgtaactttgtgtcattatttttcccacgatccaatgggaaaggcattttcattttcatcttgcaggtaaggaaattaa

SEQ ID NO: 257252 - DNA, 629 bp, Homo sapiens
aattctcatagggtctataaaacaataacaggattaaaaaaacacaaggtattaaggcaacaactagcatgatgaatagaatcatacctcacatctcaataccaacactgaatataaatggcctaaatcctccatrtaaaagatacagaatggcagaatgaattgaaaagtccatcaaccaagtatctactatcttcaagagactcacctaacacataaggacttacataaacttaaggtaaaggggtggaaaaagatgttccatgtaaatataaactaaaagcaagcaggagtagctattcttatatcagacaaaacaaatgttaatgcaacaacagtttaaaaagacaaagagaacattatataatgataaaagtcttactccaacaggaaagtgtcatgattctaaatatatagggacctaacaccagagctcccaaatttattaaataattactagcagacctaagaaatgagatagacagtagcacaataatagtgggagacttcaatactccactgacagcactagacaggtcatcaagacagaaagtcaacaaagaaacaatggacttaaactataccctagaacaaatggacttatcagatatttacagaacattctatcc

SEQ ID NO: 257253 - DNA, 629 bp, Homo sapiens
aattctcatagggtctataaaacaataacaggattaaaaaaacacaaggtattaaggcaacaactagcatgatgaatagaatcatacctcacatctcaataccaacactgaatataaatggcctaaatcctccatataaaagatacagaatggcagaatgaattgaaaagtccatcaaccaagtatctactatcttcaagagactcacctaacacataaggacttacataaacttaaggtaaaggggtggaaaaagatgttccatgtaaatataaactaaaagcaagcaggagtagctattcttatatcagacaaaacaaatgttaatgcaacaacagtttaaaaagacaaagagaacattatataatgataaaagtcttactccaacaggaaagtgtcatgattctaaatatatagggacctaacaccagagctcccaaatttattaaataattactagcagacctaagaaatgagatagacagtagcacaataatagtgggagacttcaatactccactgacarcactagacaggtcatcaagacagaaagtcaacaaagaaacaatggacttaaactataccctagaacaaatggacttatcagatatttacagaacattctatcc

SEQ ID NO: 257254 - DNA, 577 bp, Homo sapiens
tgacagcttgcaccatgtccttggagaagctgcaggcactcaacaccagcacgtgacagcagctgtgggggcagagctgcccaaggccttgggagctcatctctggatgtgatatatgaagtcaaaggagattttggagtcttaagatttaatgactgcttggtcatgtttcagacttgcatgggacctgtggcccctttgttttgagcatttctccccatttggaatgggagcatttacccaatgtttgtacctccattgtatcttgtgtgtaactaacttgcttttgattgtrtaggctcataggtggaagggactagccttgtctgagatgagatttggactttgtgcatttgagttaatgctggaatgaattcagactttggggattattaggaagacatgattgtatttggcaatgtgagaaggacatgagatttgggaggggtcagggtggaatgatatgatttggatctgtgtctccacacaaatctcatgtcaaattgcaatccccagtgttgaaggtgggacctggtaggaggtgactggatcatgggggtggatttcttatgaatgg

SEQ ID NO: 257255 - DNA, 591 bp, Homo sapiens
aagccagccaaagattttttaaactacaaatatatgttatgaatatacatgcaaaaattctcaacaaaatactagcaagctaaaacttgaaacatgaaaaaataaaaattatacactatgaccaaattcgaatttataccagtaatgcgaggtttaacatgtaaaaattaattgatgtaatatactatatcaagtgaataataaacaaaaaccacgttgatctcaattaatgcagaaaaagcatttgacaaaattcaatgcccttgcatgaaaaaaacacttagcaaactaaaaatagaaggaaatttctttaacctgacaaaggaaatttgtaaaaatcccatagctaacatcatactcaatatgaaaaactggttactttctcctaaggtcataaataaaagaggaatatctgttcctaccatttatattcagcattatactagaggatctagccagggaaatttggcaaggaaaagaaataaaaggcaccagattggaagggaagacttaatagaatttctattcacagatartatgaccttgaaattttaaaaatccaagctaatctattttaaaattattagaatg

SEQ ID NO: 257256 - DNA, 534 bp, Homo sapiens
tttaaaagtatattgcaatgatgccacaggagagaaacaggctaaaaggatctgaggatggaggaggaaaattttccatcacaactgttactgagcaactcgctcaaatcttaaattctttaagtttctgcccagtgctgttaagggcaccacttagtacaagcaacccttccttcccagcctaacaaatattcaccttccacaaacaggaggcatatgtagtgcaaggcatgtgcagtcaaggctgaggctgcctcccaagagaagtagaaaagttttgtggagtccgagtccatagccagacatatactttatgtgctccaaatcaaccccaaatactgtacaagccagtcatattcgtctcctgaattaagagtgaacagatgaatcccacacacactccktctctctccatcccctgcaaccccagcagtcatatgcacccttgccttccctcccgactcccggatcactgatcttcgatgtcactgggtccttcttttccctcagcctgaaccactgtgattgggtcaa

SEQ ID NO: 257257 - DNA, 600 bp, Homo sapiens
tgtctctcacaataggaaggaaacttagcgttccttggaaacctgaagggatgtagtgaacttaagaattttcaagagcttatcaatcagtcagcccttattcatcccagagcagatgtgtggtggtattgtggtggacctttactgggcactctgctgaataactggagtggcacttgtacttcagtccaattggctatccctttcaccctggcatttcatcagccagagggaggaaaaataagacattgtaaagcgagagaagccccttatgggtcttttgactctcacgtctatttagatgcaattggattcccatggggaataccagatcactttaaagcttgaaatcaaatagctgcaagattaaagtcaacattttagtagataactgtaaataaatatgtagattagatgaactacatctattacaaccaacagcaatgaacttttcatgagttaaaagaaaaactcatgttggyctcagccctggggctacctgacctgacaaaaccctttacactctatgtgtcagaaagagaaaaaatggcagttggagttttagcccagactgtcgggccctggccaaggacagtggcc

SEQ ID NO: 257258 - DNA, 528 bp, Homo sapiens
gttattctatacaaggtatgtaacccaggaaatgacctgygttatgtgtgttatgacccatctgagcttcccatgaccacagtttttgaaataagattaaggactgaggactcgtgggggctcataaatgacatgattaaagtgttagccaaaacagaagaaaaaggggtgcccaaaaaagtcaccttgaaatttgatgcctgtgctgtcattaatagtaataagttagaaataggatatggttctcttaattaaaaaagaggctatatgacaaaaaataagtacatttgtcatgaattaggactgtgtgaaaatgaatgtggatactggtcttgtgtcatttaggctacttggataaaaaatgaaaaaaaaaatcctgtccaccttcagaaaaggaaaagtggcccttcctataccaggggtccgtgtaaccccttagaactggtaataaccaacccccttgatcctccctggaaaaaaggggagcatgtaaccctagaaatcgatggggctggactggatccttga

SEQ ID NO: 257259 - DNA, 607 bp, Homo sapiens
catttacatgctcaaccaaagcatatggttacaagctgtcttagaaataatcactaataagaccagcagagccttgactattctggcccagcaagaaactcagatgagaaatgctatctatcaaaatagattggctcccaactacttgctggcagctgaaggaggggtctgtaggacatttaaccttactaattgctatctacacayagatgaccaagggcaagtagttgaagacatagttagaaatatgacaaaactggcacatgtgcccgtgcaagtgtggcatggatatgatcctggggccatgtttggaaaatggttcccagtgctaggaggatttaaaactcttataataggagtaataatagtaatagaaacctgcttactgctctcttgtttgctacctgtacttcttcaaatgataaaaagcttcatcgctaccttagttcaccaaaatgcttcagcacaaatgtactatatgaatcactattgatctgtcttgcaagaagacatgggtagtgaaaatgaaagtgagaactcccactaatgagtgagattctcaaagcgggggactaaaggaggagaccacccctcatattgtcttatg

SEQ ID NO: 257260 - DNA, 607 bp, Homo sapiens
catttacatgctcaaccaaagcatatggttacaagctgtcttagaaataatcactaataagaccagcagagccttgactattctggcccagcaagaaactcagatgagaaatgctatctatcaaaatagattggctcccaactacttgctggcagctgaaggaggggtctgtaggacatttaaccttactaattgctatctacacatagatgaccaagggcaagtagttgaagacatagttagaaatatgacaaaactggcacatgtgcccgtgcaagtgtggcatggatatgatcctggggccatgtttggaaaatggttcccagtgctagraggatttaaaactcttataataggagtaataatagtaatagaaacctgcttactgctctcttgtttgctacctgtacttcttcaaatgataaaaagcttcatcgctaccttagttcaccaaaatgcttcagcacaaatgtactatatgaatcactattgatctgtcttgcaagaagacatgggtagtgaaaatgaaagtgagaactcccactaatgagtgagattctcaaagcgggggactaaaggaggagaccacccctcatattgtcttatg

SEQ ID NO: 257261 - DNA, 462 bp, Homo sapiens
gagccctgaacaaagaatgtggttaccttttaagcattttgtggggtggggggagatctgtgcaggaggaagcatattacagaagtgagaaacaaagacagttatttaattaagacatgcattacatcatttcttccttttcaagaaacaacatgttttatgacttgagattatctgtctagtgaycttgcagctgcacagctagaaaaacaatgcttcaccatgcctgggaaagacagagataaggctcactagcctcagaaagaaaaataggcagttaattttaaaggactccagccctttctcttccttaagggaaattgggggtttttttttacataaaactgagtttttgcttacacagtttttaatttcttttaattcctgttccactggaactttaatgttttctgtagatcaagtcgcattgtgccagggtgaaagagtggctggaatgagtaa

SEQ ID NO: 257262 - DNA, 604 bp, Homo sapiens
cctctccttcaggaccagaaaatcttctattccctaaggacatctgtgcttctcttaattatcatgttatcccttccattccatgatacctctcgtaccccatacactaggaactcttctctttctatacatctttctgaagcacatataaaatctctagtgagatattattctttggattgctggaaaacaaaagctagaagctagtaagcagcatctccttttcctttctccattagtatattcctctatctccttcacttatctctccctttgcatatattatgtttttaaaaacatacctttatatgtaatatacaaatatttatatatacaattatttatatatttaaatgtatttaaatatacaattatttatataattaaatgtattttcaaataacatatttgtgtgtaatacacaaattatttwtgtatttaaatatattttcaagtaacttaaaaatgcatatatatattccatgtgtgcctgtgtgtgtgtgtgtgtgtgtgtgtgtgtgtgtgtgtgtgtgtatatatatatatatatatatatatatatatatatatgcatgtatgttatttagacaatttggtgaccctg

SEQ ID NO: 257263 - DNA, 595 bp, Homo sapiens
gtgtgtgtgtgtgtgtgtgtgtgtgtgtgtgtgtgtgtgtrtatatatatatatatatatatatatatatatatatgcatgtatgttatttagacaatttggtgaccctgttaggggcacagtgtctgtggcttcagagctggaggtaaggtggaaatattttcatctttttccaaatatgagggaatactaagtagaaaaaaattaagataaaaaataaattactggaagtaatcagcaagggttgaagcactttgctgctggcataagggaaaaagaatcaacatagatgacagctagctaatacagcactatgtgattcctgagccccatccagacggcgactttcctcctcttgatgtccagcccctcctggccaagctgaaagcatccatttaagagatgagagcaagttacccactgtgtctggtgaaactgtacctagagtctgagaaggattaaaacaagctatcttgaccttttactgggggaaaataccacgctttgctgaaattgacgatgaaaagattcagaagggaaaccacaaggaactttctgaactgcttcttctgctagaaagagtgtacttattgaa

SEQ ID NO: 257264 - DNA, 595 bp, Homo sapiens
gtgtgtgtgtgtgtgtgtgtgtgtgtgtgtgtgtgtgtgtatatatatatatatatatatatatatatatatatatgcatgtatgttatttagacaatttggtgaccctgttaggggcacagtgtctgtggcttcagagctggaggtaaggtggaaatattttcatctttttccaaatatgagggaatactaagtagaaaaaaattaagataaaaaataaattactggaagtaatcagcaagggttgaagcactttgctgctggcataagggaaaaagaatcaacatagatgayagctagctaatacagcactatgtgattcctgagccccatccagacggcgactttcctcctcttgatgtccagcccctcctggccaagctgaaagcatccatttaagagatgagagcaagttacccactgtgtctggtgaaactgtacctagagtctgagaaggattaaaacaagctatcttgaccttttactgggggaaaataccacgctttgctgaaattgacgatgaaaagattcagaagggaaaccacaaggaactttctgaactgcttcttctgctagaaagagtgtacttattgaa

SEQ ID NO: 257265 - DNA, 605 bp, Homo sapiens
ggtgtaggtgaggacctatctcttgaagatttgaagaagatttatggtgtgtgctgttggcaaattgttgctatatttccacaacaaacctatcctttggtgctatgaatgtgtttacaatgaagattaatgacagagtacacatttttaaataactttytgatgtttttgtatatagaatgtatgggagcttgccattcaatctggtcagtagcattctaaaattatctgaatgcatgcacctgtgttacactacattggcttagattatagtctttttcttgttccctactatgtttcttctgtcctaaaaatcctctcagatagccaactgagagctattacccaaaccgaaaacagtcctagtttccaaatatacatcaaagccactaagtgacccacactgagtttttcctaaacacaaaattgatttatatcatatgcatgcccagctgattacttgtaggaggatcatcctttccacctgactccaggtgcctgttctgccatgtcattctcaatatgacatctgtagaagttaaatactcctctcttagagaaaaagatccactactttatcccaattgcgtattactattgacagt

SEQ ID NO: 257266 - DNA, 556 bp, Homo sapiens
acccctgataaagaggtggggaaacccagaccacccttccctcttctattggccccagtcaccttgtggatcagcagcaccaccagtctcttatttcctcayttttatgtcaccatcctcctcatgggtcacaattgcaaggagagagcatgaggagagtggtacaaacagccatccgtttttcttggcaaagttgtcaaatagactagaaacccaaaatgaggcctgaatctggatggttttagaaggatgatggggatgcagaagtggtggcatgggaagggaaaagggggaaaggcccgggctaggaaccaagaattctgtttttgtttttgtttttgtttttctcccagcccttttgttaacttgtgtgattctgggtacattatttcccttttattggcttcttttacttcatctggggaaagattacaatggccacgaccacttacaagcttctttcttatcctaagaatgctaaaagtctacaaggtgtttttcattagcagattttatcatgagcagcctcagtttactgcctgggtgccccatgaat

SEQ ID NO: 257267 - DNA, 363 bp, Homo sapiens
gagtggccataaaatggcaacaagttggttgtatggcaataaaacaacacctttctaagtgaaggaagcagctggtatcatagaacgagctggtctttgactaagatcaaaccaatggcaaacatttcttgcatggccctgttaatctcctgaacctaakattcatttgtaaaataaaataatgcctactttacatggaggaggaaagcaaagtggtgtgcagttttcattcattcagcattttctttagaaaaactactataagccaagcagtgtgccgtgtgcttctgaaaaaatggtaaaaaataattttcactcaaagagtttatagactacttggaaaaacagaccagtaaataaatc

SEQ ID NO: 257268 - DNA, 567 bp, Homo sapiens
gaacccaacattgggtaggcagaggagacttcctagataaggggacatctaattggagacctgatgaatgagcaaaagacacacaaatggaaagggaatgaaggaaggtaatattattatttctatttttcagaagaagaaactgaaactcagagatattcgtatagctggtatagatgagattgaaatccagttttacttaattccaaaaactatgtggtctataatctgaaattacgattctcaaaattaaaatagattatatttcagaaatattgtcctggtttcaracaacaggaataaataataataaaatcagagaattaggctcaaggtagaggcagttctctagggaagggatgatggttactgaactacctgtgatgctagtgaagttggagagaatgaatggatttgaaagatgcttaggaacaagaaatgacagtacttgttggtataatggatgtgtaaatcaggagaaaaaacaggaaaggatgacactcagattctgggttaggaaactgaatgagtgatagagccattcagtaaggcaatagacatggacca

SEQ ID NO: 257269 - DNA, 580 bp, Homo sapiens
agaaccctaaaacagttttttggtttggttttttgctcataaaacagttctcatattttggtttggggataaactaccttgttaggtgatgcctgtgtgagggacagaggaacaactgaccccgcttttccaatataattttaaaaattaattaacaactgctctgggctctgacctactctgctgcttgttgttttgwcactgaacttgagctcttttttatttgcttttatttgtatagtagttagttttgtcctatgcttatttagaggtagggtgattctatttatgtttctctgtcaaatttcaattttattgttctttatatcaccataaatcctcaatcacttgtctgctaagaataacactaataatatctcacttcacactatatggaagaggaggtaagattgacatctgttcttagtctagaatttcaacctctcttataaagtcatgaaactctgtacctttgtcttctgtaatgccacattttcctagtttgcctgttatcttctttaatctctttttgccatcctctggaaacccttatttctgataatactgtttctattctcta

SEQ ID NO: 257270 - DNA, 644 bp, Homo sapiens
aatggacaccggggaacattcagaggctgtaagcaatactcctgataaaaataggatgatggcttggcacgaggagatgggagaaatacagagttaaaaaatggttgcgtagaattagaatatgattgatggagcatagaaggtatgtaacggaaggtatcaatgacaaactaccagacatttaacacagacaactgagctaattgttgggccttctaccaagaaaggacatttgcagtcgcatagccctcttagcattcctgttacctttagctcttgcctctcttgattagggactgcttgtagtgttctgaagtaatstccacataatattccttgtgccaccttcctttatctgaaagataaattttgaggaagactgaatatcttctaatttggtcttctaatgtttgaaataaaaattacctcttctctttgctggaacaatttgataaatgatcaaattatgggctttattatagtgacttcaaaattaaccccagagggggacaattctctcaagttcagcaaaatttgagggtatggattcagtttaagaccaaaaataaggcctgctattttattttattcgtttgctccaaatctaaattttgtattctgttcaggggatgctgaagtctact

SEQ ID NO: 257271 - DNA, 599 bp, Homo sapiens
actatttgcatggagtatttcatcccttcactttcagcctgtgttttttcttaaagctaaagtgagactcttatagcatatagatctgtttttttttttaaattcagccactctgtgattgaagaatttaattcctttatatttaaggttattattaataggtaagtagttagtagtgccattttgttattttkggggggggggttgtttttgtagatatttgtttatttcttcatctcttgtctccctttgtggttaggtaattttatgaagtactaagcttttaattttttttatctttcatgtatctgctgcagttctacagttcttatagttctagaggctgggaagtctaagggcatgtatgacataaacctctggtgagggtgatcccatggaaaaagatggaagtgagtgcacaaagcaaagagagagagatggggccaaatttattctttatcaggagtccactcctgccatagcttaccctctcccatgataatgacatttatccattcacgaggatgaaggtctctgggtgtaattacctctgaaaggtcacacctcttaaaactgttacaatggcaattaagttttca

SEQ ID NO: 257272 - DNA, 599 bp, Homo sapiens
ataactggtttcaagtgagtccaaaatccaacagagaaaacagaattatgttttaaatctggagaataatttcctttgactccatgtcctgaatcctgggagtgctgattggggccctcagacatgaccctgctcccatatctttgctggactcagtccgtgcttcagctctgttaggttggagttgcatgctagtggccttayagttctgagatctcaaaggtagccccactcccaaggctccactaggcatatccctaattgggactctctgtgttggctctgactccgcattcccactcagctttgccctaatagaggctcttagaagtggctccactcccatagctatatgtgatattctttgatcctaggtggagaaagccatgcccctacatctcttgcagtctgtgagcctgtacacatggattccaccaaggtttacagcttgtgccttccaggcacaggtattccaggcatagtggcagtgcgagctgaggtcctaggctcagggttttgcaaaactgctgtggcatatggcacaggttcactcacccagttgtggctggatgcaggttacccacaaagctaaggctgta

SEQ ID NO: 257273 - DNA, 556 bp, Homo sapiens
attgggactctctgtgttggctctgactccgcattcccactcagctttgccctaatagaggctcttagaagtggctccactcccatagctatatgtgatattctttgatcctaggtggagaaagccatgcmcctacatctcttgcagtctgtgagcctgtacacatggattccaccaaggtttacagcttgtgccttccaggcacaggtattccaggcatagtggcagtgcgagctgaggtcctaggctcagggttttgcaaaactgctgtggcatatggcacaggttcactcacccagttgtggctggatgcaggttacccacaaagctaaggctgtaactctaaagcacacctcagtaactcaagcccatggagcagggatggaattgagactgattctggggtcagtgcacaacatcatcaaggctccagggaaagaggggtgctttggaggcttgagctctggggagcaggttactgttgaaattttggttccagagacaatcgggcatagcagcaattccaaccctggggaatggagtgccacatagtgtt

SEQ ID NO: 257274 - DNA, 599 bp, Homo sapiens
ataactggtttcaagtgagtccaaaatccaacagagaaaacagaattatgttttaaatctggagaataatttcctttgactccatgtcctgaatcctgggagtgctgattggggccctcagacatgaccctgctcccatatctttgctggactcagtccgtgcttcagctctgttaggttggagttgcatgctagtggccttatagttctgagatctcaaaggtagccccactcccaaggctccactaggcatatccctaattgggactctctgtgttggctctgactccgcattcccactcagctttgccctaatagaggctcttagaagtggctccactcccatagctatatgtgatattctttgatcctaggtggagaaagccatgcccctacatctcttgcagtctgtgagcctgtacacatggattccaccaaggtttacagcttgtgccttccaggcacaggtattccaggcatagtggcagtgcgagctgaggtcctaggctcagggtyttgcaaaactgctgtggcatatggcacaggttcactcacccagttgtggctggatgcaggttacccacaaagctaaggctgta

SEQ ID NO: 257275 - DNA, 556 bp, Homo sapiens
attgggactctctgtgttggctctgactccgcattcccactcagctttgccctaatagaggctcttagaagtggctccactcccatagctatatgtgatattctttgatcctaggtggagaaagccatgcccctacatctcttgcagtctgtgagcctgtacacatggattccaccaaggtttacagcttgtgccttccaggcacaggtattccaggcatagtggcagtgcgagctgaggtcctaggctcagggttttgcaaaactgctgtggcatatggcacaggttcactcacccagttgtggctggatgcaggttacccacaaagctaaggctgtaactctaaagcacacctcagtaactcaagcccatggagcagggatggaattgagactgattctggggtcagtgcacaacatcatcaaggctccagggaaagaggggtgctttggaggcttgagctctggggagcaggttactgttgaaattttggttccagagacaatcgggcatagcagcaattccaaccctggggratggagtgccacatagtgtt

SEQ ID NO: 257276 - DNA, 607 bp, Homo sapiens
  misc_feature (1)...(607): n = A,T,C or G
attggcaaaattttttctgtcaacattattttatatttgaaatttgtttgagacaatgttgcaaacatattgtgtcactttttgcactttatctttaacttttcatttttgtgatttcattttcaattgaataaattatccatactttttacatattctatatgtgatatatatccagatgctcctaatctgtgggacttcttggaggcttgtatcaagcatatctacttccttctttatggaatccaatgtaagacttattcagagactaattgctttctaagcatgtctttttgttgggatttctcctttactactaactttgatagttctcagaactataattctccagggaagtgataggtatcagctgatgcatttaatttctaggattatgatcaataatttatgctgtacacctcaaggagactcttatctttgataagtataatctgaaatctgtgrccatagtgtcnctgtttctttgatactgtttctacattttcccccaaatttatccttatgcaatctttgtttttaacactcatttcacctgacttatagagattttagttgtttcccactttcataacaaaatggagttcta

SEQ ID NO: 257277 - DNA, 539 bp, Homo sapiens
ttggcaattaggagtaacattgctataaatatctgtgtgcaggtcatgtgtggacataagtttttcaactcatttggttaagtatgattagtgtattgtaagtaagagtacgtttagttttgtaagaaactgccatactgtcttccacatggccttgtcaytttgaagatttcaatcaacagtcaatgagttcctgctgttctgcaaaatctccagcaattggtagtgccagtgttctggatttttaccattctaacaggtgctagtggaatctcactatcatgttaatttgcatttcccttgtgacataagatgtggaccatcttttcatgcgtttctttaccatctctatatcttctttcgtaaggtgtcttgttaaattctttggcacatttttaatgaggacgtttatgttcttattgttaagttttaaatttgttgtatattttgggtaacgatcctttgtcagatatgactcttgcaaatatcttctcccagtctgttgtttgtcttttcatctcttgacaatgtcttctgca

SEQ ID NO: 257278 - DNA, 559 bp, Homo sapiens
atatataatatatatattaccaatgtcaataatagctttttattaaactcttactatgatctggacattctgctaagtgctttttatgtgtactttttatttcacatcatcaccacaaacttttgagggaggatttctcattatcttcattttatggatgaagagaggttaagtaacttgctcaagatcacaactgtttggtacaggatcagggttcaaatagggtcactcyattatcagaatcacatacatgtaactacctaggtttccgctttcatgtccattttcttttcaagatctcattgaaaaccagcttacatggttttagccttccacacgtgttcagtagattaccaagaactgcaggagctgtgtttgtccactgagtcatcactcagactcttgtaggcattgaactagattggtaaatgcagtaaattggtaaaacccttttttgctgctaccttccattattctttcaacctttttttccgaacatcacctgcaaagtgcctctcttttctcccttttacagtataagtaccagtaccaagagcca

SEQ ID NO: 257279 - DNA, 559 bp, Homo sapiens
atatataatatatatattaccaatgtcaataatagctttttattaaactcttactatgatctggacattctgctaagtgctttttatgtgtactttttatttcacatcatcaccacaaacttttgagggaggatttctcattatcttcattttatggatgaagagaggttaagtaacttgctcaagatcacaactgtttggtacaggatcagggttcaaatagggtcactccattatcagaatcacatacatgtaactacctaggtttccgctttcatgtccattttcttttcaagatcwcattgaaaaccagcttacatggttttagccttccacacgtgttcagtagattaccaagaactgcaggagctgtgtttgtccactgagtcatcactcagactcttgtaggcattgaactagattggtaaatgcagtaaattggtaaaacccttttttgctgctaccttccattattctttcaacctttttttccgaacatcacctgcaaagtgcctctcttttctcccttttacagtataagtaccagtaccaagagcca

SEQ ID NO: 257280 - DNA, 501 bp, Homo sapiens
ctggccaacatggtgaaaccccttctctactaaaaatacaaaaaaattaccaggcgtggtgacgggcgcctgtaatcccagctactcaggaggctgaggcaggagaattgcttgaaccctggaggcggaggttgcagtgagctgagattgtgccactgcacttcagcctggtgacagagcaagactccatctcaaaaaggaaaaaaaaaaagtagattccaactgtatccaaaaaggattttgaattttcaatataagaaattcacaataaaattattacataagaagcagcaaatttaaaatgtaactctcatgtcaagatgcctttcataaagccaataaaatgcaaaagccaagatctcaacaagggtktttctggctaaacactatttgagttttctttgttcaaaagataaatatcaaactctggagcatgatcaatatcggttttccaaatctggcctaacccaacttcctagtgtctgccgggacctgcagcca

SEQ ID NO: 257281 - DNA, 488 bp, Homo sapiens
attttattctcaattttactttcaatttgcatcaaaactctcttgtgttttctcttgggaaaaggtttttaaacttaaattccaattctaattttaatttaatattaatcatagtcactgttattaaacttatgaaacaaaatgtatcaaataacaatttaattttctaaggtaacaatttcytgagatttgatagtcagtagactctatattagaaactgcctgtttaccagccacatctctttttccttgctaactaaaccatcattttcttcagtttttcctgagctaaaaggtagtgtagactcctcccagctacagaggtaaatcttaatcagtctaagccagtaatggcaagtccattacccttactgatagttgatttgggcatatgtatataaaatatttatcaaaaatgagatgtgtctaccatctcccctctggtatagtctgctagcagtccttgatgaaatccttacaccaccaaa

SEQ ID NO: 257282 - DNA, 592 bp, Homo sapiens
aaaaaagtcaaaaacattacaagaaaagaaaactgcagaccaacatctctggtgaacaaagatgcaaaaattcccaacaaaacatgtgcaaactaaatctaatagtgtatcaaaagaattatataccataaccatatgggatttatcccagatatgcaaggctgactagacattcaaaaatcaatgaatgyaactaatgacatcaacaggctaaaaggaagaaaaatcacatgattatatcaacagatgcaggaaaaatattgagcaaaatccaatgcctgtttattataaaaacttttgaaaaactattaatagaggataacttgtttaggttgataaagaatatttattaataaaactacagctaacttcatacttaatggagaaattcaaagctttctcactaagatcaggaccaaggcagggataagcctgtcactactccttttaccatttactggaagtcatagctgaaatggtaagacaagaaaaggaaataaaggtatacaattggtaaggaaaaaaataaaactgcttttattcacagatgacgtgattgtctgtgtagaatatctgaaagaatcaaccaaaa

SEQ ID NO: 257283 - DNA, 592 bp, Homo sapiens
aaaaaagtcaaaaacattacaagaaaagaaaactgcagaccaacatctctggtgaacaaagatgcaaaaattcccaacaaaacatgtgcaaactaaatctaatagtgtatcaaaagaattatataccataaccatatgggatttatcccagatatgcaaggctgactagacattcaaaaatcaatgaatgtaactaatgacatcaacaggctaaaaggaagaaaaatcacatgattatatcaacagatgcaggaaaaatattgagcaaaatccaatgcctgtttattataaaaacttttgaaaaactattaatagaggataacttgtttaggttgataaagaatatttattaataaaactacagctaacttcatacttaatggagaaattcaaagctttctcactaagatcaggamcaaggcagggataagcctgtcactactccttttaccatttactggaagtcatagctgaaatggtaagacaagaaaaggaaataaaggtatacaattggtaaggaaaaaaataaaactgcttttattcacagatgacgtgattgtctgtgtagaatatctgaaagaatcaaccaaaa

SEQ ID NO: 257284 - DNA, 585 bp, Homo sapiens
ttagtaggcatatttatttaatttttaatgttagatcataaggtaagatttttatagactctttttaaccttttataatctttgttaaagagcaggttaatgctttaagagaaacccattgtgtttttattttaatgttcagttcacagaaaaactggatgatacccctttaactttagccaatatgtttacacacagaatttcctttacaattgacgttttaaaacttgcttaaaccttcaaaacaatttttaaaaatcttttaatgtaggtaaaaatccacattcttatgcctccttataatgcttttaccagaggtgtattttacttttcttatacaccttgcacataaactgttttctcagtagttttacattcaggaggyctagttacttttaaattatacaacatttcttgcatcaattctttttttataactctttttctttcatgacttttgtagacaattcttcaacatgcctcaactttctgacttattacaaacatttctttctttaaacaaccagttaatttatttcaggacaagaatttactatataagattctttttacataaattctgcc

SEQ ID NO: 257285 - DNA, 563 bp, Homo sapiens
agttactattatacatgttayactgttaacttttagcaaattttacttttgttgaaaaccttgtacgtttgggatttcaattatcctttgctattagtaagactttgtttagtccaaattaacttagaattggtatagacggctttttcttttccttccattacctgggaggaaccgtctatcatccagtcctgaagggagttcctcctaggtctggtcagacctttgtatggcaattaagatttagatcccctgttaggaaacctgctgggttaagggaatttttagtggttaatgttaaatcatctttttttttttcccttaggatacttctgaactggtgaggtgtgctcacaatgaggtttcctctaaaagttatttttctactttcttctgttagcaaagtagttgccgctacagagtgaatgcatttgtgccatccgcagattactaggttaaagatttttgataggaagtctacaggttgtcagtggcctcagtgctttcgggctacgcacttgtttacacttacagcaaggtggtattggagtgttgtagggtca

SEQ ID NO: 257286 - DNA, 659 bp, Homo sapiens
gtgttgtagggtcacagagaagaccttcaattatcaattataggttttaaatttaccctgtcttttaaaggaatagggtacactgtttttttcttaactacttgtatatctctttctttctgtctttgactttctgtgtctttctctttgactttccttttgcctctgtatctttctctctctctctctctgcctctttctttctctctctctctccttgactccctctttgtctctctgtctcttcctctctctctctctgctggtctttccttgcctctgccagctgcttatgctgctgttctctcaaccactgtgagtgggtggggtctaaaaccagctgtacccaagtgtctatatacgggaactggtctgggtgccctggcttacaagttaccttgtgccacacctttgaaacaagggacctgtccaggcttccttctgatggccaacccacctcyaatactggccagtctatttcacacaaagttctagtttttcctggtgtcatagtaacactgtaatctcccttaaatcctttcttgaaatttttcaacatagctcctagtggtcttactttgtgcctggcccatgcttcctgaagacaaaacaccatgctcacactgcaaaacaaaaatgggtaaaaagggcacacacac

SEQ ID NO: 257287 - DNA, 607 bp, Homo sapiens
ggggcccaacctttctggagggcaaagatctgttgttagagaaaaagagcagccagaggaggaagatgacttgagggtaggcagcagttgggcaatcagtattgaaaggttgctttcagcctgccaagacttggggaattagaaaagcaagataaaacaaaacaaacaaacaaactatatatataaaaaacaattttttaaaagtytttttatgttctatattactattagctatatattaatgaatgttcctttaaagcagtgtagtcattattgctattattattattatggttagttatagacagtggaatattgttctttctctatattatgattactagcactattactgttattagttacatgttattgaaagcttcaaagcagcataggctttttataaatatttttgctcatctttatgacaattctccagtgttggtattgctcctctatttaacagattagaaaactgaagcttcaagaacagacttgcctaacaacaggaaacttgtatgtctcgaagtggcaattcacacataaggctccatgactcctgaactctcacaaatattagttggctcttttcatggttttactgaag

SEQ ID NO: 257288 - DNA, 521 bp, Homo sapiens
aagtctcatgagcagaccagggcctgagaggcagaaatgcagaagccttcctgagcacctgccagacacctgagactgtggcttctgtggcagagctgcacaccctccaggatgtcttttcatatttctcactccagagtttccacagggtttgtatcctcattaggatcttgcagaaggcgataatgcattagtgccatgggagcggcaaaaaggccctgtctttacaaatgctggttttcatcctcaatctcactttctcttcccacagactatccagatcttgtgtggcatgatggtattgagcttggggatcattttggcatctgcttccttctctccaaattttacccaagtgacttctacactgttgaactctgcttacccattcataggacccttttttgtgagtagagtttctgaggagggcaggatggggcaaagaggggaggaagatrccaatagcttagacttcccacctgccagcttgctatgtttgatctgccaggagcaaggagtca

SEQ ID NO: 257289 - DNA, 430 bp, Homo sapiens
ttttctgttccaagatccatgccaagctactacattacactacattacattttgtcatgatgtctcctcagggtcctctaggctgtctaagattttccttttccttgagaactttgatagttttgggtagcgctggctgagatttttatagaatgttcctaaatttgggtttgtctgatttttttttttgatgtttaragtatggtgatgaatttttgggtggtgatgatgaggtaaagcaccattttcatcaagtcgtatcaagggtcatgctaccaacataatgtcactgacacaattaaccttgattatgtggttggggtagtattttccagatttctcctctgtaaaattactacttttttttttaaccattgcttttatgtccttccctagagaacatcttacaccaaaactgtctcattttatt

SEQ ID NO: 257290 - DNA, 550 bp, Homo sapiens
gaggggacagataagggaataacttacaatttaatggcaaagatgcataacagattcatgagtcattagcaatgatccttacccaacatttctctttcaggtgcatagcagcctggttggaagcattctgagtgctctgtctgccctggtgggtttcattatcctgtctgtcaaacaggccaccttaaatcctgcctcactgcagtgtgagttggacaaaaataatataccaacaagaagttatgtttcttacttttatcatgattcactttataccacggactgctatacagccaaagccagtctggctgtaagtatttttagatgggatgttctaatcttatgaggtattcaaaagccttgatttcttgttattccttcttttgaaaatctctctattggttctggtttgggcatctgggggaaarccaggtttatgtaaatcaaaggggactacagggatgagattaaggggattacatactaatagagtggaattgaaaatgttaaataaggttgatgatgaaaaactaaaacttactgtttgtag

SEQ ID NO: 257291 - DNA, 526 bp, Homo sapiens
cttgtaagatcaaacatgggactactataaggcacggtctcttcctacctttgcatctcttcagggcacaccaatggaagttattgtcctttctggtgtgtggactctaattcacagtcctcaaagaggatgaatacctgtctgatgtgtaatttgtgatgaaactttgtcttagacccatgggccactagtttcctgtgatttatctcactctccttgccagataggtatctgcaatgtttttaagttttgtaatatatccctgatataataatctaacttcacttctcacatgctaacacagtatcartgtaagagcacattgtcaatgctagctcccctccattgccgtgtctcctgaatagtatgcatgtctcgcttgccagattcactgttaataggactcatgtttctctggcttcatgtaataaaaactttcttaaattatgagtgcgtctgaattagggatcttcttaaaaacatgattttatttaataatattgtattttataaaatccttattgtg

SEQ ID NO: 257292 - DNA, 590 bp, Homo sapiens
tactttttttttttttttttttgctactgagttgtgtgagttccttatatattttgcaggttaacccccttatcagatatgtggtttgcaaatattttctcccattccataggttgccttctcattttgttgtttcttttgctgagcagaaaatttttagtttagtgaagtcccaattgtttattttttcttttgttacctatgcatttggtgtcatcgccaaaaaatcattgccaggaccaatgtcatgaagattttcttctgtgttctaagattcttatggtttcaaatcttacatttaagtcttcaatccattttgagttgatttttgtatatggtgtgagctaaaggtccaatttcattcttctgtatatggatatccagttttcccattgttatttattgaaraaactgtcctttcccatatgttcttggcacctttgttgaaaatcaattggctgtaagtgtgtgaattgattcctgggctttccattctgttccattggtctaaatgtctgtttttatgccagtaccctattttggttactacagttttatagtatactttgaagtcaggtagtgtgatgcca

SEQ ID NO: 257293 - DNA, 564 bp, Homo sapiens
caaaattgtaaaaaggaacaaaaggaaaattctggagctgaaaagttcaataactgaaattaaaattttattacagaggctcagcaatagatttgaaatggcagaagaaggaatcactgagcttgaatataggacactgagatcatccagtctgagaaacagaggaaaatatgcattaaggaaagtgaaaagcacttctgggacctatagaacacacttgarcacaccaatatatgcatgatgagagtgccaaaaggagaggagaaggagcaagaggcagggagaatatttgaagaaataatggctgaactcttctcaaatttgatgaagatactaatctacacatccaagaggctgagcaaaccccaagttggacaaactcaagaagacaactagatacatcatagtcaaattgttgaaagacaaagacaggatcttgaaagtagcaagagagaagcaatgtgtcatgtgtaagtcgtcctcaaaaagattaatagtcagtttcttttcagaaaccatgaaggccagaagtcagcagaatgacagatctacaattctgaaagg

SEQ ID NO: 257294 - DNA, 389 bp, Homo sapiens
ccaggccactgtcaagacctccatcagctaagcccacagggcatgcaactctccagttgttagcaagagctaggagggaggtggaggcgaagccagtgccagtgtctgctggaagctcaggcagctgtgggaggagaaagaggagaacaagatgtcaagacactaagaagactcaggaagtgccccaggacstctcgcttcgggggaaggacaggttgtgatggtaacacagcagaggatgtaaacctcccgctaagagttacagtatttagagaaaagactcagcacaggggcacttggaacttttgttccaaatctaaaaatctaagaataaccacctggaataaacacaggcctatgcagcaagtggggttcccctcagggtccca

SEQ ID NO: 257295 - DNA, 603 bp, Homo sapiens
actaaggcactggtctatgaccaacaagtttcctggcagctgttccagtgaataaaaatttcttggtagttctcaaaataggcacagtttctcagatgtgttctcaaccttgggctggctgttttctagggtaaaaggcagtcattccagatgacaaccatttcacgcaggttaattttcatctgaatcatattcaatatagagaaaactgtatgagataagctgcttaggaatactataaacttaccattagcaaaatatgatacctcaaaaatccctatatttaagaaaactgtggctgtagcactctaaaaagagtaaaagtatttgagagccaagaaatcctaaagaaaaaaaaagttaattatgtaataattcaatgaattaaaggaaaaattctggaacaaataacttctacatataaaaaaaaaatctcaatgttgagctgggtggggaagactcaacatcatcagtgatggtgtaaagcattttcarctttactgaacttggccttactattgggctttcagttatgtctatgccttctcaggttgcaacaaaaagattttcagaaattttcagagataatcttgccagtgctgc

SEQ ID NO: 257296 - DNA, 599 bp, Homo sapiens
tctaccttcagatcactttgtcagaaactctttttctgtactgaatgaaaatttgcctctgtttaagttctgtattctggcatatttctatcctctggagtcctctaagtcttcctctggtatccctgattatcaccttcttaaagtcaccttacaatctctttcaayagttcctcccaagacatagcctagttctctctctatcttggctggtcttctccagatgagagtatctctttcacagtagagtaaccaaattgaatactaagtctacaagctgaggtctggctgggggacagtaaactttgacatgaggctaactccactccattcatggacactccctgctctatattacttattcatatcaactttatccaagctatcactaattacacaatttcagatatcttgatcatgttaactatgttccttgttttccacactttgccatgttctttcaaaataaaaatctaatgtgaagaacatagcctatacatacaccttcagaaacaaagaaaatggtttcctaaaattataccatgttttaaaagtaataacacagaagctggaactctactgccctgcacaaggaataa

SEQ ID NO: 257297 - DNA, 631 bp, Homo sapiens
cttgtttcttaacaaaaaataagctaaaggtattttttagtgcattgctacatttgcatttttaaattatggtagwtatttttattgcgttaagtaccttattctatctcagcgaagagtcgtggctgttttaagtaaacaagactgttacaagaataccctactcttcttccatggtgagtgcctgtattcaaaccacagtgccatggaaaataacttccccaacatttactctcttggccacaagtgtctgtttagagaagtgtctggcttggtctgaacaacacatccccaagcaactaagtggaaacccaggtcgataacatgagctaagatgaggattctaacatttgcgatgatggcccacactgaattttgataatctcaaaaaaacaaaaaaaaaacaaaaaaaaacacaagcaattccaattctggattcacatgtacacaaagatacatatgcaaggaagctcatcttaacattgtttgtaataaagaaaagctgaagctctccactataaaagagactcagtgatgaacccttacactatggagcactatacagaattaaaaatagtatggcaaatcctttttactgacatgaaaagatccagaggaaaagaactgaaaa

SEQ ID NO: 257298 - DNA, 565 bp, Homo sapiens
cccctccttagatttagggaatggcggaagtctctgtaatgaagtattagctataataaacttgggcctatttcagtagctccacttacagtattttttaaattaaaaccacaactcttctataaatggaatactaagtgatattctagctaatttaagaatgccagttgtttgggcttcagtacaaaaggattacaaataaaatctagtttatctgacttgttaactatagtagatcagatcaacctggggtctctccaaaccacagaagccacatagagtttaaacccttacccaataacattcctacatcatgccccaaaccaatcctacttccagaaaaaaaaaaagaaggaaagaaagaaatcggccaygaaaaaaaacccacactgcattctttaatctccttttccataaacagtagccattcccatactcatgcaaaaggcacaagatcaataaacatcttgcaaaagagctctcctgacatgttatttatggttgagagatgttttagacatacctactaaagactaaaatttgcagaagtgactaactgacgtaa

SEQ ID NO: 257299 - DNA, 571 bp, Homo sapiens
atcccccaatccaccaacatctctatcccaggggattaaaggcaggacatggcctcttctatttccgatcatactaacagaaacgtaagccctaagaaattgagagtcctagtgaagaccagtcacatcctaaaggaaagacatgtcagagcttcactgcaacaggctgaattgcaaagagcagtcagacctgaggcatgaaaagaaaagtatcttagcagaatagagatagataaatggggatactctgttcggacttcttcatcaaggtgaaggtcatcttctgaaacttccttttaacrctgagaacacagacattgagagtggaaggcatgagaaaagactagatttcgatctatgtacaaatgtacctgaggcttcaagaaaggagctgacttacctaacacaacctgctggttacacaactgggaagaggacccattgctcttggctcaactcaactcccttttccaagtcaaacgtcaaaaacaaaaacaaaaaataatgcatttcaggcaaaacagcaactcacttcattcttaatacatgtggtgtgtaggatgtcttgcat

SEQ ID NO: 257300 - DNA, 571 bp, Homo sapiens
atcccccaatccaccaacatctctatcccaggggattaaaggcaggacatggcctcttctatttccgatcatactaacagaaacgtaagccctaagaaattgagagtcctagtgaagaccagtcacatcctaaaggaaagacatgtcagagcttcactgcaacaggctgaattgcaaagagcagtcagacctgaggcatgaaaagaaaagtatcttagcagaatagagatagataaatggggatactctgttcggacttcttcatcaaggtgaaggtcatcttctgaaacttccttttaacactgagaacacagacattgagagtggaaggcatgagaaaagactagatttcgatctatgtacaaatgtacctgaggcttcaagaaaggagctgacttacctaacacaacctgctggttacacaactgggaagaggacccattgctcttggctcaaytcaactcccttttccaagtcaaacgtcaaaaacaaaaacaaaaaataatgcatttcaggcaaaacagcaactcacttcattcttaatacatgtggtgtgtaggatgtcttgcat

SEQ ID NO: 257301 - DNA, 572 bp, Homo sapiens
agaaagtgctgccaccttatgagcagttaagtattgaaataactgasagcagagaaacaagactggttcttaatttaagaaaggaaccactgtaaatacagaagctgccactcaagaactggagtgaggctcagaggctctatgcactctcacttagtcaaacaaatgtcacgcaagagtcaaacagcacagtgacaatactgcttctctagcgtttgcaactacaattctgatggctgtcttctgaggaattggaagccctgaaacagatttgccacaaccctttcaagactttagagaggcagggaatgatcactagcagtggaagatcagcttctggaatgcagatattaagtgaagatgctgaaaaatagccaagctccaaagtaggcaaaaataaaaaaattaaaaagcaaagaaaaactaacaaggcaccatttgcacttacaaaacacagattaattgcaaccatcacattctagtgaacttgaggagaaactgatatattcaaactaactggtggtaccagtatcaactattcacaaccttaggaaagaaaagtaaataaagtg

SEQ ID NO: 257302 - DNA, 628 bp, Homo sapiens
cttcaactctcttgtcatagccaaaaatagaaaaagagtgacatgacaggttggttgaaatttagacttttctgagtctgaatttccagtctgattaaactgtttaaggccagcaggtctgtatactggaaacagatgttttcaaggtgctaatccctctatcagaggagatttcatgtttatatcaaagggcagtaataactatgaaacactgtggtattattaagaaaaattccatttaacatttaaaattcatgtgaacattctgggtaatgggggtcctggtacaaggaaagacaggacattattgttttggaatgcaactaaaaactgagtaaagttgatcctcttgtgcgcagatataaaatattatagtagacataaatttgstaagtgtatttccacatactcttagatagtccaatatattggcaagggtggtagagtgttgtctgcttaaatctttccctgggccatagttttctcatctataaaatgaagagaatatcacatgttctatctaagccagggtgatgttataagatttagataagaaaatggatgggaaaatactctgtaagttgtaaagtgctataattatgatgattttcctaaatagcattaatta

SEQ ID NO: 257303 - DNA, 532 bp, Homo sapiens
aacacaatgaacatttaagtgtgtggggcagggggagtaagggtgggtactgagtgaatttatagtttatttcccttaaaaacaacctatattatgtcatatatatggttaatgatgccatgaaaataccaattgacacaccaaataatagctaagaggtatttggataaaaataaaaatgaagacagtaacatttctatttaatataatctctcatgctgtatagtaatatgagcagcctcaccaaacggatcctggtaatgttcagtggacacaggccgtattcagtagtgagaattgcagaaaatatgatctattttatctaatagaaatrtcattttatggaaagagatacaaactgttgtaagttagggaaaaaatgaatgcattcctattgggatgtgtatcctctttcccagtcattcagttgaagtgtttagctttccaaaaaccttacctatctatctccccaaatgtacccttctccaggggaggaggacttacaaataacccactaacttgataactgact

SEQ ID NO: 257304 - DNA, 532 bp, Homo sapiens
aacacaatgaacatttaagtgtgtggggcagggggagtaagggtgggtactgagtgaatttatagtttatttcccttaaaaacaacctatattatgtcatatatatggttaatgatgccatgaaaataccaattgacacaccaaataatagctaagaggtatttggataaaaataaaaatgaagacagtaacatttctatttaatataatctctcatgctgtatagtaatatgagcagcctcaccaaacggatcctggtaatgttcagtggacacaggccgtattcagtagtgagaattgcagaaaatatgatctattttatctaatagaaatatcattttatggaawgagatacaaactgttgtaagttagggaaaaaatgaatgcattcctattgggatgtgtatcctctttcccagtcattcagttgaagtgtttagctttccaaaaaccttacctatctatctccccaaatgtacccttctccaggggaggaggacttacaaataacccactaacttgataactgact

SEQ ID NO: 257305 - DNA, 525 bp, Homo sapiens
cagaaaaaatcaaacagcattaataaatctatttattaactgactcatagtagcctttactctgaaccagcagttgttggatactctacattatcttaattrgtcctcaaaataaccttctaaaaattgttattaatatcctcatttttgcatgtaaagatgggaaatgcagtgataagcaacagagcagggtttcttagccctaaaccctgggctcatgccaccacatcacatgactcaatcaaaagactgaggatgcagagaagagagagatcaagatgatccagttgtcagacacgtatgagtaaaatagtagagttaggcttctaaaaatgaggatatgagggttcatcaggtattgagaaagacacaagaaaaattggcttggcatatgaagctgacaatgacgatatgagcttcaaaagagcaaggactgtataaaaaggacagtgggagatacagtgtgctacataggatgaggtaggtcatagagtactctgaaaaataaaccaagaggagaaattt

SEQ ID NO: 257306 - DNA, 525 bp, Homo sapiens
cagaaaaaatcaaacagcattaataaatctatttattaactgactcatagtagcctttactctgaaccagcagttgttggatactctacattatcttaattagtcctcaaaataaccttctaaaaattgttattaatatcctcatttttgcatgtaaagatgggaaatgcagtgataagcaacagagcagggtttcttagccctaaaccctgggctcatgccaccacatcacatgactcaatcaaaagactgaggatgcagagaagagagagatcaagatgatccagttgtcagacacgtatgagtaaaatagtagagttaggcttctaaaaatgaggatatgagggtycatcaggtattgagaaagacacaagaaaaattggcttggcatatgaagctgacaatgacgatatgagcttcaaaagagcaaggactgtataaaaaggacagtgggagatacagtgtgctacataggatgaggtaggtcatagagtactctgaaaaataaaccaagaggagaaattt

SEQ ID NO: 257307 - DNA, 525 bp, Homo sapiens
cagaaaaaatcaaacagcattaataaatctatttattaactgactcatagtagcctttactctgaaccagcagttgttggatactctacattatcttaattagtcctcaaaataaccttctaaaaattgttattaatatcctcatttttgcatgtaaagatgggaaatgcagtgataagcaacagagcagggtttcttagccctaaaccctgggctcatgccaccacatcacatgactcaatcaaaagactgaggatgcagagaagagagagatcaagatgatccagttgtcagacacgtatgagtaaaatagtagagttaggcttctaaaaatgaggatatgagggttcatcaggtattgagaaagacacaagaaaaattggcttggcatatgaagctgacaatgacgatatgagcttcaaaagagcaaggactgtataaaaagsacagtgggagatacagtgtgctacataggatgaggtaggtcatagagtactctgaaaaataaaccaagaggagaaattt

SEQ ID NO: 257308 - DNA, 531 bp, Homo sapiens
tgagtggagatcatgccactgcactccagactgggcaacagagcaagaagaccctgtctcaaaaaaaaaagacgtcaattttgaaatttgcaggctaggaggccctgtacaagtcaaactcacagaagttaatgataaaataatgataataatagcttaacccctcaaggattggtataaacaccccatgctataatatattttaagttatatagtaagagtacaaaaatgcttgacttttgaatggatcaagtgaaatcagctatgaacagaaaaccttcctaagayactagggtttcaaagtactatattcagagataaaatatgagttagtgccctaggtttttggtgtcagcatcctctactccctttcactccttctttcagaacaaggtgtttctgtgcccctgttgattggattatgtaaattacaaaagaaccgaaagatttgtgggcccaatagggctttcgtaccaaatccatggataaaaggtatgtgatacaatcaacaaggggtttgtcagaaaatat

SEQ ID NO: 257309 - DNA, 531 bp, Homo sapiens
tgagtggagatcatgccactgcactccagactgggcaacagagcaagaagaccctgtctcaaaaaaaaaagacgtcaattttgaaatttgcaggctaggaggccctgtacaagtcaaactcacagaagttaatgataaaataatgataataatagcttaacccctcaaggattggtataaacaccccatgctataatatattttaagttatatagtaagagtacaaaaatgcttgacttttgaatggatcaagtgaaatcagctatgaacagaaaaccttcctaagacactagrgtttcaaagtactatattcagagataaaatatgagttagtgccctaggtttttggtgtcagcatcctctactccctttcactccttctttcagaacaaggtgtttctgtgcccctgttgattggattatgtaaattacaaaagaaccgaaagatttgtgggcccaatagggctttcgtaccaaatccatggataaaaggtatgtgatacaatcaacaaggggtttgtcagaaaatat

SEQ ID NO: 257310 - DNA, 608 bp, Homo sapiens
actgttaacatggctcttagcacaccagggctccaaagagttaggggtaaaagaaagacagggagtgagagaaaagcataagaccgtaactaaaacgataacaaaacaaagtcctagaagccaaataaacaaatattgtgttctccccagaatgtttaaaaatcttggaaaggaactgcatacggagcctcggggtagtactgacttggcatatcaagcccttgtgcaactgattaacccgacattcccctgggtaggggagtattactaggtcacttttttctttaatggacaaactgttctygaacaatttgcaagacataaacaagctattgtaacataccaatcaaagagggtagttttgtcctcaaaaatgcgatgatgtaaccaagtcaaaacaaccgccaccaccacaaccgggcaatcagacaaacaaacatatcccaattccgtctgcctagctctggatgggctcttctttacccactttgatgtataaacacacagtcccacatctgcaaaggttaagtcccagatcaatagcaaagtttacaagacctccaaaatctattggatgttcttcatccaagaacttaacggtttttgaa

SEQ ID NO: 257311 - DNA, 532 bp, Homo sapiens
tgcaatgattcacatagcaatgccataaaggcgggggggcggggggaggtggtgacaaaatccatcacattgagaaaaatgaatgttatgattagcaaacaggtggagtttacacagcatatatatatatatatatatatatatatatatatrttctgagatgacagaaaccacttttttcaagtatatttagctcttcagacaaaaatataactgagactaaaaggcataaaaatatgagcctctactgtcatgatatagaaagaaaaattacaagtttatttagggaaaaaaatgaagagtttcaaagcaccatattaacgaaggtattatcaataggtatttataaaccctgaagattaagggcaaaaattaaatagaaattacctggtttgaggatgtgagattgacaaataactggaagtattcaagtagaggcaggaaggccacttgacatgaatattataaagaagatacaagctttattaatccaaggaaactgcttagtagccctctcgacactgatggttta

SEQ ID NO: 257312 - DNA, 660 bp, Homo sapiens
tatggaccaggagagagtaggataatagaatcaagtgctgaagaaaaaaattgtcaaccatgaatacagtatccagcacagctctcatttagaaatgaaggagaggttaaaacattctaagacaaacaaaagatgaaggaattcattgtaaccatacctgccttaaaataaatgttaaagaacagtcttcaaactgaaagaaaagggcactaatatgtaatacaaaaaattggaaggtataaatccacaggtaaaaataaatattcagacaaattctggatgctctaatatagtaaagagtgaatgtaagccacttacatgtttttagcacgaaggttaaaatacaaaacaaaaataataacaactacaataatttgttaagggataagtgatgtaaaagatgtaaattaagacatcaaaaatgcaaaatatgggggagtgattgagttaaagagcagggtgattgcttttccccatttcttattatcaaaattaagctgttatccattcaaaattacctattgatacyataaaatattcttcgcatgcctcatagtaaccaaaaggcaaacatttttattagatacactaaaaataaaagaacaagaaacaaaaacacacagagaaaatcacttaactacaaaggaagacaacaaaggg

SEQ ID NO: 257313 - DNA, 660 bp, Homo sapiens
tatggaccaggagagagtaggataatagaatcaagtgctgaagaaaaaaattgtcaaccatgaatacagtatccagcacagctctcatttagaaatgaaggagaggttaaaacattctaagacaaacaaaagatgaaggaattcattgtaaccatacctgccttaaaataaatgttaaagaacagtcttcaaactgaaagaaaagggcactaatatgtaatacaaaaaattggaaggtataaatccacaggtaaaaataaatattcagacaaattctggatgctctaatatagtaaagagtgaatgtaagccacttacatgtttttagcacgaaggttaaaatacaaaacaaaaataataacaactacaataatttgttaagggataagtgatgtaaaagatgtaaattaagacatcaaaaatgcaaaatatgggggagtgattgagttaaagagcagggtgattgcttttccccatttcttattatcaaaattaagctgttatccattcaaaattacctattgatactataaaatattcttcgcatgcctcawagtaaccaaaaggcaaacatttttattagatacactaaaaataaaagaacaagaaacaaaaacacacagagaaaatcacttaactacaaaggaagacaacaaaggg

SEQ ID NO: 257314 - DNA, 548 bp, Homo sapiens
gatctggaagaagacgaggatgttcactttaatcacttttttcaacatagtaatggaagtcctagtccgaacaattaggtaagagaaagaaataaaaggcatccaagtggaaaaaaaaagtcaaattatccctctttgcagatgacatgatcatatatgtaaaaaaccgtaaatacaccactgagaatcataaatagtaaatgaacacaataagctttcaggataaaaaagcaacataaaaaatcaataacatctctatacaccaatagcagactatctgaaaaaggaatcaagaaagtaatcccatttaaaatagctattaaaaaaacaaaatacctaaaartaaattaagccatggaaagatgaaaattattaaacattgataaaagcaattaaaaattaaaataaatagaaagatatcccatgttcacagactagaagaattaatattgctgaaatgaccatactactcaaatcaatctataaatccaatataatatctatcaaatttccaatttcattcttcacggatattaaaaaaatcttaa

SEQ ID NO: 257315 - DNA, 637 bp, Homo sapiens
gaaatgaccatactactcaaatcaatctataaatccaatataatatctatcaaatttccaatttcattcttcacggatattaaaaaaatcttaaaatccatgtgaaactacaaaacaccccaaatagccaaataaatcttaatcaaaaagagcaatgctagaggatttacactatctaatttcaaaatatattacaaagctatcctaactaaaacagcatggtattggcataaaaacaggcatgtagaccagtggaacaaaaatagggrgcccaggcataaatccacatatttacatgcaacttatttttgacaaagttgcaaacattcaatggggaaaagacagtattttcaacaaatggtgctgggaaaagtgcatatccccatatagaagaatgaaagtagaccactatctctcatcatacacaacaatcaactcaaaataaattaaatatttaaatttaagacaccaaactatgaaactagtagaagaaaacaggtgaaatgttatatgtcattggtctgggcaaggactttttagaaaagacatcaaaagacatgcacaacaaaagcaaaaataaagaaatgggattacaccaaataaaaacttctgcactgcataggaaacaatcacaaga

SEQ ID NO: 257316 - DNA, 637 bp, Homo sapiens
gaaatgaccatactactcaaatcaatctataaatccaatataatatctatcaaatttccaatttcattcttcacggatattaaaaaaatcttaaaatccatgtgaaactacaaaacaccccaaatagccaaataaatcttaatcaaaaagagcaatgctagaggatttacactatctaatttcaaaatatattacaaagctatcctaactaaaacagcatggtattggcataaaaacaggcatgtagaccagtggaacaaaaatagggggcccaggcataaatccacatatttacatgcaacttatttttgacaaagktgcaaacattcaatggggaaaagacagtattttcaacaaatggtgctgggaaaagtgcatatccccatatagaagaatgaaagtagaccactatctctcatcatacacaacaatcaactcaaaataaattaaatatttaaatttaagacaccaaactatgaaactagtagaagaaaacaggtgaaatgttatatgtcattggtctgggcaaggactttttagaaaagacatcaaaagacatgcacaacaaaagcaaaaataaagaaatgggattacaccaaataaaaacttctgcactgcataggaaacaatcacaaga

SEQ ID NO: 257317 - DNA, 637 bp, Homo sapiens
gaaatgaccatactactcaaatcaatctataaatccaatataatatctatcaaatttccaatttcattcttcacggatattaaaaaaatcttaaaatccatgtgaaactacaaaacaccccaaatagccaaataaatcttaatcaaaaagagcaatgctagaggatttacactatctaatttcaaaatatattacaaagctatcctaactaaaacagcatggtattggcataaaaacaggcatgtagaccagtggaacaaaaatagggggcccaggcataaatccacatatttacatgcaacttatttttgacaaagttgcaaacattcaatggggaaaagacagtattttcaacaaatggtgctgggaaaagtgcatatccccatatagaagaatgaaagtagaccactatctctcatcatacacaacaatcaactcaaaataaattaaatatttaaatytaagacaccaaactatgaaactagtagaagaaaacaggtgaaatgttatatgtcattggtctgggcaaggactttttagaaaagacatcaaaagacatgcacaacaaaagcaaaaataaagaaatgggattacaccaaataaaaacttctgcactgcataggaaacaatcacaaga

SEQ ID NO: 257318 - DNA, 637 bp, Homo sapiens
gaaatgaccatactactcaaatcaatctataaatccaatataatatctatcaaatttccaatttcattcttcacggatattaaaaaaatcttaaaatccatgtgaaactacaaaacaccccaaatagccaaataaatcttaatcaaaaagagcaatgctagaggatttacactatctaatttcaaaatatattacaaagctatcctaactaaaacagcatggtattggcataaaaacaggcatgtagaccagtggaacaaaaatagggggcccaggcataaatccacatatttacatgcaacttatttttgacaaagttgcaaacattcaatggggaaaagacagtattttcaacaaatggtgctgggaaaagtgcatatccccatatagaagaatgaaagtagaccactatctctcatcatacacaacaatcaactcaaaataaattaaatatttaaatttaagacmccaaactatgaaactagtagaagaaaacaggtgaaatgttatatgtcattggtctgggcaaggactttttagaaaagacatcaaaagacatgcacaacaaaagcaaaaataaagaaatgggattacaccaaataaaaacttctgcactgcataggaaacaatcacaaga

SEQ ID NO: 257319 - DNA, 621 bp, Homo sapiens
tctaacagtggggattacaatataacataagatatgggtcagggaaaatatccaaactatatcatatgcacatgtggccataaaaaagggtaaaatcgtgtcacttgtgacaacatgaatgatcatagaggacattgtggcaagtgaaataatctaaactcggtaagacaaatatcacatgatctcattcatatgtgaaatgtaaaaacactgatctaatagagagtagaagagtggttgccagactgggaaagatagggaggagaggttttaacaatgtgtcatgtatcaaaataccacattgtaccccatcaacatgtgaaattaccatgtatccacttaataaaaraaaagaaaaaagaaaatggaagagtcaagatactggggcactggaagagatagaagagaaggtaaatcggcagtaaggaagagagagtctgaaagagcaggtcacagagtggaacattaaagtttataacaatagaaatcaatttttaagttattgaaaagttaagtttatagccatgaaagtgagtagctcaactgaagtgaaagtaaaagtcaatgaaatattaaattagaaaatacattgcttggcatttaatagttacttcagaaata

SEQ ID NO: 257320 - DNA, 621 bp, Homo sapiens
tctaacagtggggattacaatataacataagatatgggtcagggaaaatatccaaactatatcatatgcacatgtggccataaaaaagggtaaaatcgtgtcacttgtgacaacatgaatgatcatagaggacattgtggcaagtgaaataatctaaactcggtaagacaaatatcacatgatctcattcatatgtgaaatgtaaaaacactgatctaatagagagtagaagagtggttgccagactgggaaagatagggaggagaggttttaacaatgtgtcatgtatcaaaataccacattgtaccccatcaacatgtgaaattaccatgtatccacttaataaaagaaaagaaaaaagaaaatggaagagtcaagatactggggcactggaagagatagaagagaaggtaaatcggcagtaaggaagmgagagtctgaaagagcaggtcacagagtggaacattaaagtttataacaatagaaatcaatttttaagttattgaaaagttaagtttatagccatgaaagtgagtagctcaactgaagtgaaagtaaaagtcaatgaaatattaaattagaaaatacattgcttggcatttaatagttacttcagaaata

SEQ ID NO: 257321 - DNA, 594 bp, Homo sapiens
aatgtaaattaatcattaaggaatgtttattttattaataaatttgtcaactttagtttgccaaatctaacaagataccaacatggcattcatggtgatcacacctctagtcaaattttattttagttcattgactataatattaatatcctgaaatactcaaaaattctgtcttaattctgtgaataattcacttattaatcactctatacactacttaatgaatggaatggtgcttggaataaagataattacagggctaaaagggttttctctagaggcagttatagrattttgttgtctgactggaataaaacaaaattaatcaatattttctgcaaccagtggcttttgacttagtcatctattaatatctatcaatccctataacctcagtcctatttcctccattcttctttttttatcataaaaacttgtccatttttttcctgttagatctatatgtttctcctcttttcttttcatccaaacaactggacatcagcttagtacagagagtgcaattgatccgaaccctacataactcactgtttccatttacataacttacataactgcaagctgaaatcacta

SEQ ID NO: 257322 - DNA, 573 bp, Homo sapiens
atgatttcagttcttatgtttaagtctttatttcatttcaaattcattttgtgatggtatgagagaaaggtgtactttttgtctctgcatatctagtttttcctacaccactccttgatgtgtttatcctttctctattctgtgggataggttgactgtatatttgtgagtttatttctgggtcccctattctgttatattggtttttatgtaggtactatactattttgatggctatagttttgtaatacagtttgaaatcaggaagtgggaggcttccagcctttttgttcttctcagtatttggctatttraggtcttttgtgattccatactaattttaaaatagttgttctgcatttttaataaaatggcattaaaattttgatagaaatttatttaaccctgtagatcactttgtgtactatggatattttaacaatatttttagaatccatgcatacaggatatatttcccattttgtattcttcattttctttcctcaacattttatagttttcagtatgctgatttttcatattcttttttctaagtgttccattccaacactt

SEQ ID NO: 257323 - DNA, 566 bp, Homo sapiens
ggcttccagcctttttgttcttctcagtatttggctatttgaggtcttttgtgattccatactaattttaaaatagttgttctgcatttttaataaaatggcattaaaattttgatagaaatttatttaaccctgtagatcactttgtgtactatggatattttaacaatatttttagaatccatgcatacaggatatatttcccattttgtattcttcattttctttcctcaacattttatagttttcagtatgctgatttttcatattcttttttctaagtgttccattccaacactttgttcctaagtgttccattctatttgatmatatcgtaaatggaattatctttattcctttttcagatattttattgttactgtaaaaacatgcacctgatgttcatatgttaatattgtatcctgaaaatttactgaattggttagttataacaggttttttttttctttgtggtaaaatggtgggtattctgaactctggttaaactttaaattgatagttgctattatcatttcaaaattatttaaagtataaccagatggatt

SEQ ID NO: 257324 - DNA, 566 bp, Homo sapiens
ggcttccagcctttttgttcttctcagtatttggctatttgaggtcttttgtgattccatactaattttaaaatagttgttctgcatttttaataaaatggcattaaaattttgatagaaatttatttaaccctgtagatcactttgtgtactatggatattttaacaatatttttagaatccatgcatacaggatatatttcccattttgtattcttcattttctttcctcaacattttatagttttcagtatgctgatttttcatattcttttttctaagtgttccattccaacactttgttcctaagtgttccattctatttgataatatcgtaaatggaattatctttattcctttttcagatattytattgttactgtaaaaacatgcacctgatgttcatatgttaatattgtatcctgaaaatttactgaattggttagttataacaggttttttttttctttgtggtaaaatggtgggtattctgaactctggttaaactttaaattgatagttgctattatcatttcaaaattatttaaagtataaccagatggatt

SEQ ID NO: 257325 - DNA, 566 bp, Homo sapiens
ggcttccagcctttttgttcttctcagtatttggctatttgaggtcttttgtgattccatactaattttaaaatagttgttctgcatttttaataaaatggcattaaaattttgatagaaatttatttaaccctgtagatcactttgtgtactatggatattttaacaatatttttagaatccatgcatacaggatatatttcccattttgtattcttcattttctttcctcaacattttatagttttcagtatgctgatttttcatattcttttttctaagtgttccattccaacactttgttcctaagtgttccattctatttgataatatcgtaaatggaattatctttattcctttttcagatattttrttgttactgtaaaaacatgcacctgatgttcatatgttaatattgtatcctgaaaatttactgaattggttagttataacaggttttttttttctttgtggtaaaatggtgggtattctgaactctggttaaactttaaattgatagttgctattatcatttcaaaattatttaaagtataaccagatggatt

SEQ ID NO: 257326 - DNA, 533 bp, Homo sapiens
tgagtaagtctgcatttggaaaacatgtacacatgagttaatacaatctttattgagcacgtactatgtgttcagaagtctgttacagagcactgttcaggaaatattacatgatgtgagttagtcctcatagcacactggcagctgggtgctaagttttctgtaattttcaggatttaaatgacaggcctagcatttctattttttcttccattttaaaaagtatttacctgaaaaacaaaatgtgcagaataaaagctatgtcgacagatgcaagggatagagaaaaaagggtgaactgttcagagagatgttttatatttatatttactttctgtgccttgtgtagcagccactggatttgcaagaatggaaaacaagttgctagrtaggatgcctctagaagcactggcttcaatagaaaagaaattatggtccccaaatatgcaatgattttcttccatttatctgcttttccactttaggaaattgtgggcaccaactcaggaggcagcaggagcccccgcccgaat

SEQ ID NO: 257327 - DNA, 533 bp, Homo sapiens
tgagtaagtctgcatttggaaaacatgtacacatgagttaatacaatctttattgagcacgtactatgtgttcagaagtctgttacagagcactgttcaggaaatattacatgatgtgagttagtcctcatagcacactggcagctgggtgctaagttttctgtaattttcaggatttaaatgacaggcctagcatttctattttttcttccattttaaaaagtatttacctgaaaaacaaaatgtgcagaataaaagctatgtcgacagatgcaagggatagagaaaaaagggtgaactgttcagagagatgttttatatttatatttactttctgtgccttgtgtagcagccactggatttgcaagaatggaaaacaagttgctagataggatgcctctagaagcactggcttcaatrgaaaagaaattatggtccccaaatatgcaatgattttcttccatttatctgcttttccactttaggaaattgtgggcaccaactcaggaggcagcaggagcccccgcccgaat

SEQ ID NO: 257328 - DNA, 530 bp, Homo sapiens
tctgaatttttgttcatcacataggattmcagaacactgctacgaggttctgaactattctatgtcacataggatttcagaacactcctgctgtgttctgaatgtttgtcccttacttaggattccagatcactgctgttgggttctgagatttagtccctcgtgtaagattccagaacactgctatgtgggtctaaatgtttgtccgtcccataggattccagaacactcctgctgtggtctgaatgtttgtccctcatataggattccagaaaactgttgctgggattgagggtttttccctcacgtactattccagaacactgctacgtgggacagaatgtttgccccacatatgggatttgagaacgctgctaagaggatctgaaactttgtccctcaaacaagattccagaacactgctgctgttgtctgaatgttgtactcacttagtattccagaacgctactgctttggactgaatgtctgttcctcacttaggattccataacagtactacgagggtctga

SEQ ID NO: 257329 - DNA, 530 bp, Homo sapiens
tctgaatttttgttcatcacataggattacagaacactgctacgaggttctgaactattctatgtcacataggatttcagaacactcctgctgtgttctgaatgtttgtcccttacttaggattccagatcactgctgttgggttctgagatttagtccctcgtgtaagattccagaacactgctatgtgggtctaaatgtttgtccgtcccataggattccagaacactcctgctgtggtctgaatgtttgtccctcatataggattccagaaaactgttgctgggattgagggtttttccctcacgtactattccagaacactgctacgtgggacagaatgtttgccccacatatgggatttgagaacgctgctaagaggatctgaaastttgtccctcaaacaagattccagaacactgctgctgttgtctgaatgttgtactcacttagtattccagaacgctactgctttggactgaatgtctgttcctcacttaggattccataacagtactacgagggtctga

SEQ ID NO: 257330 - DNA, 530 bp, Homo sapiens
tctgaatttttgttcatcacataggattacagaacactgctacgaggttctgaactattctatgtcacataggatttcagaacactcctgctgtgttctgaatgtttgtcccttacttaggattccagatcactgctgttgggttctgagatttagtccctcgtgtaagattccagaacactgctatgtgggtctaaatgtttgtccgtcccataggattccagaacactcctgctgtggtctgaatgtttgtccctcatataggattccagaaaactgttgctgggattgagggtttttccctcacgtactattccagaacactgctacgtgggacagaatgtttgccccacatatgggatttgagaacgctgctaagaggatctgaaactttgtccctcaaacaagattccagaacactgctgctgttgtctgaatgttgtactcacttagtattccagaacgctactgctttggactgaatgtytgttcctcacttaggattccataacagtactacgagggtctga

SEQ ID NO: 257331 - DNA, 498 bp, Homo sapiens
catacacataattgatttcacattgttttacatttcctttgtcttcttctggaatgtcatcttttttcttggtttctctttcagcacaggatctaatctagatattggaaaagagaatccaatgggttatatgtttatcttccacyttccccactttacgtatcacataagaacattcgagatgatttcttatgcagaagaaaaaattaactgagcaactatattcagaaaaagacaggttctggctatgtgtttttacttcatatatataatctatatgagtaagtgctatcacatgcttcctccgcagcccttgtgtcagaaacactacagacaaaattatttcagaaacattttacacatcagatcctgctaggcaataaagcaatcattaatttagttttgtcctccaagtgaatacactaggatcaaattatccctagtagacaagtgttcatttgatcagattgaaagcttaatagctattttacgttgcac

SEQ ID NO: 257332 - DNA, 498 bp, Homo sapiens
catacacataattgatttcacattgttttacatttcctttgtcttcttctggaatgtcatcttttttcttggtttctctttcagcacaggatctaatctagatattggaaaagagaatccaatgggttatatgtttatcttccactttccccactttacgtatcacataagaacattcgagatgatttcttatgcagaagaaaaaattaactgagcaactatattcagaaaaagacaggttctggctatgtgtttttacttcatatatataatctatatgagtaagtgctatcacatgcttcctccgcagcccttgtgtcagaaacactacagacaaaattatttcagaaacattttacacatcagatcctgytaggcaataaagcaatcattaatttagttttgtcctccaagtgaatacactaggatcaaattatccctagtagacaagtgttcatttgatcagattgaaagcttaatagctattttacgttgcac

SEQ ID NO: 257333 - DNA, 498 bp, Homo sapiens
catacacataattgatttcacattgttttacatttcctttgtcttcttctggaatgtcatcttttttcttggtttctctttcagcacaggatctaatctagatattggaaaagagaatccaatgggttatatgtttatcttccactttccccactttacgtatcacataagaacattcgagatgatttcttatgcagaagaaaaaattaactgagcaactatattcagaaaaagacaggttctggctatgtgtttttacttcatatatataatctatatgagtaagtgctatcacatgcttcctccgcagcccttgtgtcagaaacactacagacaaaattatttcagaaacattttacacatcagatcctgctaggcartaaagcaatcattaatttagttttgtcctccaagtgaatacactaggatcaaattatccctagtagacaagtgttcatttgatcagattgaaagcttaatagctattttacgttgcac

SEQ ID NO: 257334 - DNA, 498 bp, Homo sapiens
catacacataattgatttcacattgttttacatttcctttgtcttcttctggaatgtcatcttttttcttggtttctctttcagcacaggatctaatctagatattggaaaagagaatccaatgggttatatgtttatcttccactttccccactttacgtatcacataagaacattcgagatgatttcttatgcagaagaaaaaattaactgagcaactatattcagaaaaagacaggttctggctatgtgtttttacttcatatatataatctatatgagtaagtgctatcacatgcttcctccgcagcccttgtgtcagaaacactacagacaaaattatttcagaaacattttacacatcagatcctgctaggcaataaagcaatcattaatttagttttgtcctccaagtsaatacactaggatcaaattatccctagtagacaagtgttcatttgatcagattgaaagcttaatagctattttacgttgcac

SEQ ID NO: 257335 - DNA, 426 bp, Homo sapiens
ctaacccttaaacacaacagttcaaatctatatgcataagcatctcctagggacctgcacrtttccaatattgactactgagacccatccatagagatacaggcttaggaggtctaggattgggctcaaaatttgcatttttataagtactccaggtcattctgaagcaagtgatacaaaccacagaatgaggaacaccccccttcaagagactgaatctggcttcccaacactagcttggtatctgagaccatctgcctgctgactggctttcctggcacaaatattctgcatgtaggcacagtgtgttcctggactccatgccaacccgttcaccctcatgttcccttggttcctgtccccagtccagcgagcagaactgattacagatcttgacaacagaagatacagatttaaaataacttg

SEQ ID NO: 257336 - DNA, 426 bp, Homo sapiens
ctaacccttaaacacaacagttcaaatctatatgcataagcatctcctagggacctgcacatttccaatattgactactgagacccatccatagagatacaggcttaggaggtctaggattgggctcaaaatttgcattttwataagtactccaggtcattctgaagcaagtgatacaaaccacagaatgaggaacaccccccttcaagagactgaatctggcttcccaacactagcttggtatctgagaccatctgcctgctgactggctttcctggcacaaatattctgcatgtaggcacagtgtgttcctggactccatgccaacccgttcaccctcatgttcccttggttcctgtccccagtccagcgagcagaactgattacagatcttgacaacagaagatacagatttaaaataacttg

SEQ ID NO: 257337 - DNA, 534 bp, Homo sapiens
gccaacccgttcaccctcatgttcccttggttcctgtccccagtccagcgagcagaactgattacagwtcttgacaacagaagatacagatttaaaataacttgcctgttcccgtggactttatccactagtgaaggaggacaagtggataaggggagagggtaggtgggggctccttccctattcctcccattccactttatacaaacctcagctagaccactgggagagcaacggaggttaagaatgactgcatctaaatattgtcatctggtccactcttcttccatcttgtacacaggatatcatgagttttgtttaaagcactactgaaaccaagttaaactctggcttagcatgcccctgacggatcagtgtagtaatcttatcaaaaccaagattacctaaaagcactaaccaaaggaaaagctccctcacctcaacctatgactgctcacatttttcagattgaatcatttcaattgtattttaaggttcattgactctttaccacctccaagctgctcctgaaag

SEQ ID NO: 257338 - DNA, 534 bp, Homo sapiens
gccaacccgttcaccctcatgttcccttggttcctgtccccagtccagcgagcagaactgattacagatcttgacaacagaagatacagatttaaaataacttgcctgttcccgtggactttatccactagtgaaggaggacaagtggataaggggagagggtagrtgggggctccttccctattcctcccattccactttatacaaacctcagctagaccactgggagagcaacggaggttaagaatgactgcatctaaatattgtcatctggtccactcttcttccatcttgtacacaggatatcatgagttttgtttaaagcactactgaaaccaagttaaactctggcttagcatgcccctgacggatcagtgtagtaatcttatcaaaaccaagattacctaaaagcactaaccaaaggaaaagctccctcacctcaacctatgactgctcacatttttcagattgaatcatttcaattgtattttaaggttcattgactctttaccacctccaagctgctcctgaaag

SEQ ID NO: 257339 - DNA, 534 bp, Homo sapiens
gccaacccgttcaccctcatgttcccttggttcctgtccccagtccagcgagcagaactgattacagatcttgacaacagaagatacagatttaaaataacttgcctgttcccgtggactttatccactagtgaaggaggacaagtggataaggggagagggtaggtgggggctccttccctattcctcccattccactttatacaaacctcagctagaccactgggagagcaasggaggttaagaatgactgcatctaaatattgtcatctggtccactcttcttccatcttgtacacaggatatcatgagttttgtttaaagcactactgaaaccaagttaaactctggcttagcatgcccctgacggatcagtgtagtaatcttatcaaaaccaagattacctaaaagcactaaccaaaggaaaagctccctcacctcaacctatgactgctcacatttttcagattgaatcatttcaattgtattttaaggttcattgactctttaccacctccaagctgctcctgaaag

SEQ ID NO: 257340 - DNA, 500 bp, Homo sapiens
gtctgaatgtttgtctctcacacagaattccagaacactgctacgagggtctgwatgattgtccctcacataggattccagaacactcctgctgtggtctgaaagtttgtccctcacatagcattcaagaatactgctgctgggttttgagtgtttgtccctcacataggattccagaacactgttaccattgtctgaatgtttgtccctcgcataggattccagaacactgctgctggggtctaaaagtttgtcacgtaggattccagaacactgctacgactgtctaaacgtttgttcctcacagaggattccagaacactactgctgttgtctgaatgtccctcacaaaggatttcagaacactgctacgagggtctgaatgtttttccctcacacagaattccagaacactgctatgagggactgaatgattctcccacacacagaattccagaacactgttacgaatttctgaatgattgtcactcacataggat

SEQ ID NO: 257341 - DNA, 569 bp, Homo sapiens
caaggcagtaggccaggagctccagaccagcctgggtaacatagcaagaccccatctctgaaaaaaaaattaaaattagccagacatggtgttgtacgcctgtagtccaawctactcaggaggctgaggtaggaggatcgctgatgcccaggagttcaaggctgcagtgagctatgatcttaccactggactttaccctggatgacagagtgagacccggtttcaaaaataaaaaaaaagagaactaccacataatccaataatttcacttctggatatatgtccagtgaaattgacataatagtcttagagaggtggctgtcatcccctgttcattgcagcatgacacacaatgaccaaaatatgaaaataacctaaatgtcctttgacagaggaacagatgaatgggtaaagaaaatgtagcgtgtatacttaaaatgaaatattatacaaccttgaaaaagaaggaaatccttctatttgtgaaaacatggatggagctggaagatattgcgccaagcaaaaatgcaagacatagagacaaatacttcatgatctcacacacatgt

SEQ ID NO: 257342 - DNA, 569 bp, Homo sapiens
caaggcagtaggccaggagctccagaccagcctgggtaacatagcaagaccccatctctgaaaaaaaaattaaaattagccagacatggtgttgtacgcctgtagtccaatctactcaggaggctgaggtaggaggatygctgatgcccaggagttcaaggctgcagtgagctatgatcttaccactggactttaccctggatgacagagtgagacccggtttcaaaaataaaaaaaaagagaactaccacataatccaataatttcacttctggatatatgtccagtgaaattgacataatagtcttagagaggtggctgtcatcccctgttcattgcagcatgacacacaatgaccaaaatatgaaaataacctaaatgtcctttgacagaggaacagatgaatgggtaaagaaaatgtagcgtgtatacttaaaatgaaatattatacaaccttgaaaaagaaggaaatccttctatttgtgaaaacatggatggagctggaagatattgcgccaagcaaaaatgcaagacatagagacaaatacttcatgatctcacacacatgt

SEQ ID NO: 257343 - DNA, 375 bp, Homo sapiens
tctgattaatctaaagtaaaatttgacttttttttttttcattccaacaactccatcttctatcacatatctcctttcatgaagttggcccttgataatgtttctgttgacaacagtataatatagacaggattgcatatagttaaagtatgtattttatttatttggtggcagcattctgataagaaattaaagctatttcttttaaaatcataatttaatcmccaggcagagcaagtaaagagaaataagttccagaatctcacatctgtcaaaagtaaatgctgatttttattgaggacctccttatttctgccaccagttgactctcatacagcttgttcccaatagaacatagagtggaattggcaaatg

SEQ ID NO: 257344 - DNA, 617 bp, Homo sapiens
aaatgatttttcctgtgggatttctatgactcgtattctgactagtgtgaaatgacaggtttggatgtctatatctacacccatcaaaacctcagagcttcatgcactgctataacttttctgtcaactctgggtaaattaggaggcaggtacaaggaayaattttaacttcagattttatagtttgtttatgtaaaggcagaaacatctactctttaatgatctgtattttaagatattgacttttcctggtgctattttatgattatggagaaaatagaattcttgttagaaatctcaactccgaattgagaatagatgttttgatacttgtcctgctgtggcctgagacttggaatcatgaattaaaaaagaccttgctgtttatctacagattagaacacacaaacatcagtgtaacatcctcattagcattctggtagttacatttacttattccagagcaaaattaatacatgataagaagtggaatattttctattgatatctagggtattatgacaacaaccttccttagaaaagaaacagtgtgttatgaggacagtggatgctacaacattatttgccttcaaggcattgcaaacaaccggaatcaa

SEQ ID NO: 257345 - DNA, 617 bp, Homo sapiens
aaatgatttttcctgtgggatttctatgactcgtattctgactagtgtgaaatgacaggtttggatgtctatatctacacccatcaaaacctcagagcttcatgcactgctataacttttctgtcaactctgggtaaattaggaggcaggtacaaggaataattttaacttcagattttayagtttgtttatgtaaaggcagaaacatctactctttaatgatctgtattttaagatattgacttttcctggtgctattttatgattatggagaaaatagaattcttgttagaaatctcaactccgaattgagaatagatgttttgatacttgtcctgctgtggcctgagacttggaatcatgaattaaaaaagaccttgctgtttatctacagattagaacacacaaacatcagtgtaacatcctcattagcattctggtagttacatttacttattccagagcaaaattaatacatgataagaagtggaatattttctattgatatctagggtattatgacaacaaccttccttagaaaagaaacagtgtgttatgaggacagtggatgctacaacattatttgccttcaaggcattgcaaacaaccggaatcaa

SEQ ID NO: 257346 - DNA, 617 bp, Homo sapiens
aaatgatttttcctgtgggatttctatgactcgtattctgactagtgtgaaatgacaggtttggatgtctatatctacacccatcaaaacctcagagcttcatgcactgctataacttttctgtcaactctgggtaaattaggaggcaggtacaaggaataattttaacttcagattttatagtttgtttatgtaaaggcagaaacatctactctttaatgatctgtattttaagatattgacttttcctggtgctattttatgattatggagaaaatagaattcttgttagaaatctcaactccgaattgagaatagatgttttgatacttgtcctgctgtggcctgagacttggaatcatgaattaaaaragaccttgctgtttatctacagattagaacacacaaacatcagtgtaacatcctcattagcattctggtagttacatttacttattccagagcaaaattaatacatgataagaagtggaatattttctattgatatctagggtattatgacaacaaccttccttagaaaagaaacagtgtgttatgaggacagtggatgctacaacattatttgccttcaaggcattgcaaacaaccggaatcaa

SEQ ID NO: 257347 - DNA, 564 bp, Homo sapiens
aacacaatgattggttttaaaattcccttgatttatatgtttgtatactgtggattctcaattgagtgaattagtgtctttgcaatatagtaagattttgatacagtttttaatctatccaggaaaaggctatataagtaggatctcatttgtttcatagcccattatttgaaggatgatttaagaccataggaaatactgactcaccttttctaaaaagacaactgcttttcttattcttttaagttcaaatttgtcttgtctccttttgattaattaaaacaagttatcaaaatccttaacagaaaatattatttattgaatcagaagagaaacaagaaatactgtgctttctttggcgtgtttcctataccccattatcataagaattgtttttgcttctataatgttcagcttcaaattcttttgctttgtcaatccaaatgaattacctgaattttctcctcttgttcaaaatggaaccacattcatccacytacccccagccataggactgtttcttttattctgatagtttgtgatatctttgacttcacagcagaa

SEQ ID NO: 257348 - DNA, 564 bp, Homo sapiens
aacacaatgattggttttaaaattcccttgatttatatgtttgtatactgtggattctcaattgagtgaattagtgtctttgcaatatagtaagattttgatacagtttttaatctatccaggaaaaggctatataagtaggatctcatttgtttcatagcccattatttgaaggatgatttaagaccataggaaatactgactcaccttttctaaaaagacaactgcttttcttattcttttaagttcaaatttgtcttgtctccttttgattaattaaaacaagttatcaaaatccttaacagaaaatattatttattgaatcagaagagaaacaagaaatactgtgctttctttggcgtgtttcctataccccattatcataagaattgtttttgcttctataatgttcagcttcaaattcttttgctttgtcaatccaaatgaattacctgaattttctcctcttgttcaaaatggaaccacattcatccacttacccccagccataggactgtttcttttattctgatagyttgtgatatctttgacttcacagcagaa

SEQ ID NO: 257349 - DNA, 547 bp, Homo sapiens
ttacagacaaacatttagaccctcgttgcagtattcaggaatcttaagttagggaaaaacattcagaacctcatagcactgctctggaatcctatgtgagtgacaaacattcagrcaatcataatagtgttctggaatcctctgtgagggacaaacatccagacacttgtagaggattcttctggaatcctatatgagggacaaacattcagacaatcgtaacagtgttctggaatcctatgggagggacaaaaactccgcccccagtagcagtgcactggaatcctatgtgagggacaaacattcaaacaacagcaagattgttgtgggatgctacgttacagagaaacattatgaccctcgtcgcagtgttctggaattctatgtgagggagaaacatacagaacccagcagcagtgatctggaatcctatgtgacggccatacatgtagaccccagcagcagtgttctggaatcctatgtgagggacaaacattcagaccctagcagcagtgttttggaatcctatgtgtgtgacaaatattca

SEQ ID NO: 257350 - DNA, 547 bp, Homo sapiens
ttacagacaaacatttagaccctcgttgcagtattcaggaatcttaagttagggaaaaacattcagaacctcatagcactgctctggaatcctatgtgagtgacaaacattcagacaatcataatagtgttctggaatcctctgtgagggacaaacatccagacacttgtagaggattsttctggaatcctatatgagggacaaacattcagacaatcgtaacagtgttctggaatcctatgggagggacaaaaactccgcccccagtagcagtgcactggaatcctatgtgagggacaaacattcaaacaacagcaagattgttgtgggatgctacgttacagagaaacattatgaccctcgtcgcagtgttctggaattctatgtgagggagaaacatacagaacccagcagcagtgatctggaatcctatgtgacggccatacatgtagaccccagcagcagtgttctggaatcctatgtgagggacaaacattcagaccctagcagcagtgttttggaatcctatgtgtgtgacaaatattca

SEQ ID NO: 257351 - DNA, 547 bp, Homo sapiens
ttacagacaaacatttagaccctcgttgcagtattcaggaatcttaagttagggaaaaacattcagaacctcatagcactgctctggaatcctatgtgagtgacaaacattcagacaatcataatagtgttctggaatcctctgtgagggacaaacatccagacacttgtagaggattcttctggaatcctatatgagggacaaacattcagacaatcgtaacagtgttctggaatcctatgggagggacaaaaactccgcccccagtagcagtgcactggaatcctatgtgagggacaaacattcaaacaacagcaagattgttgtgggatgctacgttacagagaaacattatgaccctcgtcgcagtgttctggaattctatgtgagggagaaacatacagaacccagcagmagtgatctggaatcctatgtgacggccatacatgtagaccccagcagcagtgttctggaatcctatgtgagggacaaacattcagaccctagcagcagtgttttggaatcctatgtgtgtgacaaatattca

SEQ ID NO: 257352 - DNA, 482 bp, Homo sapiens
aaacatttagacgccagcagcagtattctggaatcctaggtttgggacaaacactgagaacctactagcagtgttctggaaccatatgagagggaccaacgttgagaccctcataggagtgttctggaatcctgtgtgatggataaatattcacaacacaagaggagtgttctggaatccccagtaaggaacaaacattcagaacctcgtggcagtgttctggaatcctatgtgaaggacaaacrttcaaactacagcgagagtgttccggaatactactttatggagaaacattcaggctctcgtcgcagtgttctggaattctatgtgagggagatacattcagaacccagcagcagtgatctggaatcctatgtgacagccatacatgtagaccccagtagcagtgttctggaatcctgtgtgagggacaaacactgagaccccagcagcagtgtttggaatcctatgtgtgtgacaaa

SEQ ID NO: 257353 - DNA, 482 bp, Homo sapiens
aaacatttagacgccagcagcagtattctggaatcctaggtttgggacaaacactgagaacctactagcagtgttctggaaccatatgagagggaccaacgttgagaccctcataggagtgttctggaatcctgtgtgatggataaatattcacaacacaagaggagtgttctggaatccccagtaaggaacaaacattcagaacctcgtggcagtgttctggaatcctatgtgaaggacaaacattcaaacyacagcgagagtgttccggaatactactttatggagaaacattcaggctctcgtcgcagtgttctggaattctatgtgagggagatacattcagaacccagcagcagtgatctggaatcctatgtgacagccatacatgtagaccccagtagcagtgttctggaatcctgtgtgagggacaaacactgagaccccagcagcagtgtttggaatcctatgtgtgtgacaaa

SEQ ID NO: 257354 - DNA, 482 bp, Homo sapiens
aaacatttagacgccagcagcagtattctggaatcctaggtttgggacaaacactgagaacctactagcagtgttctggaaccatatgagagggaccaacgttgagaccctcataggagtgttctggaatcctgtgtgatggataaatattcacaacacaagaggagtgttctggaatccccagtaaggaacaaacattcagaacctcgtggcagtgttctggaatcctatgtgaaggacaaacattcaaactacagcgagagtgttccggaatactactttatggagaaacattcagrctctcgtcgcagtgttctggaattctatgtgagggagatacattcagaacccagcagcagtgatctggaatcctatgtgacagccatacatgtagaccccagtagcagtgttctggaatcctgtgtgagggacaaacactgagaccccagcagcagtgtttggaatcctatgtgtgtgacaaa

SEQ ID NO: 257355 - DNA, 482 bp, Homo sapiens
aaacatttagacgccagcagcagtattctggaatcctaggtttgggacaaacactgagaacctactagcagtgttctggaaccatatgagagggaccaacgttgagaccctcataggagtgttctggaatcctgtgtgatggataaatattcacaacacaagaggagtgttctggaatccccagtaaggaacaaacattcagaacctcgtggcagtgttctggaatcctatgtgaaggacaaacattcaaactacagcgagagtgttccggaatactactttatggagaaacattcaggctctygtcgcagtgttctggaattctatgtgagggagatacattcagaacccagcagcagtgatctggaatcctatgtgacagccatacatgtagaccccagtagcagtgttctggaatcctgtgtgagggacaaacactgagaccccagcagcagtgtttggaatcctatgtgtgtgacaaa

SEQ ID NO: 257356 - DNA, 616 bp, Homo sapiens
ttactttttctaattgtttatttgtaaaattaggtttttcgaatgagatctttcttattttttaatataggtatttatcactgtaacatttccctcttagcacttcttttgctgcatcctgtaagttttgttgagttgtatgttcatttttgtttgtctcaatatattttaaaaattcccttttgatttcttcttttacccaatggtrgttgaagagtgtgttgtttagtttctgcatttttgtaaatgtttctcttttctttgttattgacttctaattttattccattgttgtctgagaagatacttggcattatatcaaacttcttaaatttgtaggatgcctcgtgacctaagatttgatctatctcagagaatattctgtgtgcacttgagaagaatgtatattctgctgctgttggatagaaagttttgtatatgtcagtgtttaatctactgtgttgttcaagtcagctgtttccttttttttattcctgcctagatgttctatccattattgaatttggggtacagaagttggctactattattttagtgttactgatttctccccttagctttgttgatattaactttatatatttaggtgttctaa

SEQ ID NO: 257357 - DNA, 616 bp, Homo sapiens
ttactttttctaattgtttatttgtaaaattaggtttttcgaatgagatctttcttattttttaatataggtatttatcactgtaacatttccctcttagcacttcttttgctgcatcctgtaagttttgttgagttgtatgttcatttttgtttgtctcaatatattttaaaaattcccttttgatttcttcttttacccaatggtagttgaagagtgtgttgtttagtttctgcatttttgtaaatgtttctcttttctttgttattgacttctaattttattccattgtkgtctgagaagatacttggcattatatcaaacttcttaaatttgtaggatgcctcgtgacctaagatttgatctatctcagagaatattctgtgtgcacttgagaagaatgtatattctgctgctgttggatagaaagttttgtatatgtcagtgtttaatctactgtgttgttcaagtcagctgtttccttttttttattcctgcctagatgttctatccattattgaatttggggtacagaagttggctactattattttagtgttactgatttctccccttagctttgttgatattaactttatatatttaggtgttctaa

SEQ ID NO: 257358 - DNA, 616 bp, Homo sapiens
ttactttttctaattgtttatttgtaaaattaggtttttcgaatgagatctttcttattttttaatataggtatttatcactgtaacatttccctcttagcacttcttttgctgcatcctgtaagttttgttgagttgtatgttcatttttgtttgtctcaatatattttaaaaattcccttttgatttcttcttttacccaatggtagttgaagagtgtgttgtttagtttctgcatttttgtaaatgtttctcttttctttgttattgacttctaattttattccattgttgtctgagaagatacttggcattatatcaaacttcttaaatttgtaggatgcctygtgacctaagatttgatctatctcagagaatattctgtgtgcacttgagaagaatgtatattctgctgctgttggatagaaagttttgtatatgtcagtgtttaatctactgtgttgttcaagtcagctgtttccttttttttattcctgcctagatgttctatccattattgaatttggggtacagaagttggctactattattttagtgttactgatttctccccttagctttgttgatattaactttatatatttaggtgttctaa

SEQ ID NO: 257359 - DNA, 541 bp, Homo sapiens
actggaaaaaggatcatgcattccctttctgcttttgtaatggaacgtggggcctgtcctcatatttcgcttggggttcaaaaaactaggaagggtgttttgttgaaatgaaacccaaaactatagctatcyatttatagcaccttatttgtacaggaagaaaccatgagacaaaatgtataaaagtgcacgggaggtctaaacatatgaggggttttttgaggagagaaagatcatacttgattggtgctgtggtttcactgtgcctcctccgagattcagtgttgacaatgtgatagtgttgaggtggagcctacaggaagtgatgaggccatcaggactcctacctcaggaatgggtttaggagccctcatgaaagggttccatggaaggagttcatccctcttgccctcccgccttccactatgtgaggacacagtgttccttgtctctggaagatgcagcatcaagacatcatcttgaatggagagaacagcccttaccagacatcagacctgccaacgccttgatcttggacttc

SEQ ID NO: 257360 - DNA, 541 bp, Homo sapiens
actggaaaaaggatcatgcattccctttctgcttttgtaatggaacgtggggcctgtcctcatatttcgcttggggttcaaaaaactaggaagggtgttttgttgaaatgaaacccaaaactatagctatccrtttatagcaccttatttgtacaggaagaaaccatgagacaaaatgtataaaagtgcacgggaggtctaaacatatgaggggttttttgaggagagaaagatcatacttgattggtgctgtggtttcactgtgcctcctccgagattcagtgttgacaatgtgatagtgttgaggtggagcctacaggaagtgatgaggccatcaggactcctacctcaggaatgggtttaggagccctcatgaaagggttccatggaaggagttcatccctcttgccctcccgccttccactatgtgaggacacagtgttccttgtctctggaagatgcagcatcaagacatcatcttgaatggagagaacagcccttaccagacatcagacctgccaacgccttgatcttggacttc

SEQ ID NO: 257361 - DNA, 553 bp, Homo sapiens
gaggcaattcctaaccatgaaaggactgttttgagagttgttgagatgggtggtgagtcttgaaaaggtgatcattaacatcacctctttgtatcaaccttagagaaattcacacacatttatacgatagatttatagtagaaatatttgcagcatttgaaattggaaaaattagsaaatagactatttttgtatgtagcagctgtaaaaatgagcttgatctatctgtattgaacacaggcttctaaggtgtactattgagtgaataaagcttgtgactacatatactgtataataacattcatgtaacacagatatacacagctttgcattttatatagttctatagatatacatgtatgtattaataaatgcacccaaatgtgtcaggaagcacattgatccaatcacactttcctctgtggttggaagtcagattgacacccaaaaattatttaagaattacctgtttggtgtgtgctgtttgtatacaaactctggagccacaccacctcaggtcaaatcctggctctcccttttacttggtttataa

SEQ ID NO: 257362 - DNA, 553 bp, Homo sapiens
gaggcaattcctaaccatgaaaggactgttttgagagttgttgagatgggtggtgagtcttgaaaaggtgatcattaacatcacctctttgtatcaaccttagagaaattcacacacatttatacgatagatttatagtagaaatatttgcagcatttgaaattggaaaaattagcaratagactatttttgtatgtagcagctgtaaaaatgagcttgatctatctgtattgaacacaggcttctaaggtgtactattgagtgaataaagcttgtgactacatatactgtataataacattcatgtaacacagatatacacagctttgcattttatatagttctatagatatacatgtatgtattaataaatgcacccaaatgtgtcaggaagcacattgatccaatcacactttcctctgtggttggaagtcagattgacacccaaaaattatttaagaattacctgtttggtgtgtgctgtttgtatacaaactctggagccacaccacctcaggtcaaatcctggctctcccttttacttggtttataa

SEQ ID NO: 257363 - DNA, 553 bp, Homo sapiens
gaggcaattcctaaccatgaaaggactgttttgagagttgttgagatgggtggtgagtcttgaaaaggtgatcattaacatcacctctttgtatcaaccttagagaaattcacacacatttatacgatagatttatagtagaaatatttgcagcatttgaaattggaaaaattagcaaatagactatttttgtatgtagcagctgtaaaaatgagcttgatctatctgtattgaacacaggcttctaaggtgtactattgagtgaataaagcttgtgactacatatrctgtataataacattcatgtaacacagatatacacagctttgcattttatatagttctatagatatacatgtatgtattaataaatgcacccaaatgtgtcaggaagcacattgatccaatcacactttcctctgtggttggaagtcagattgacacccaaaaattatttaagaattacctgtttggtgtgtgctgtttgtatacaaactctggagccacaccacctcaggtcaaatcctggctctcccttttacttggtttataa

SEQ ID NO: 257364 - DNA, 569 bp, Homo sapiens
gtttcttctctctgcatgccccaaatatactcactgagggcgatattgcattcctagtgcctggaaaaatattccacacataatacgcattcagtaaatattcaacataatttgcattctataaatatttgtggaatgaatgaatgaatgaatgaatgacatatcacaatgttgccttccctgcatttacgctaccactaatctgagttagctataatgattcttaagaattccctgggaaaaatgccatttyaatttcaatttattttttccgcaatatttcctgagtttccaagattgttcctattccatgagcaggaccgttcccaagggctttgggtagaagatcattttgttttcagaatattccactttatgtctctctccttcctcccttcctcccactccagaatacatgtgcctaccacttagatgactttgatgaacactagagtcagactgaaatacacatgagttactacagagcatctggcccagcacaggtcagataggtcaggctcacggaaccgttgcaggctgctctgcttcttccacagcttccattgaag

SEQ ID NO: 257365 - DNA, 569 bp, Homo sapiens
gtttcttctctctgcatgccccaaatatactcactgagggcgatattgcattcctagtgcctggaaaaatattccacacataatacgcattcagtaaatattcaacataatttgcattctataaatatttgtggaatgaatgaatgaatgaatgaatgacatatcacaatgttgccttccctgcatttacgctaccactaatctgagttagctataatgattcttaagaattccctgggaaaaatgccattttaatttcaatttattttttccgcaatatttcctgagtttccaagattgttcctattccatgagcaggaccgttcccaagggctttgggtagaagatcattttgttttcagaatattccactttatgtctctctccttcctcccttcctcccactccagaatacatgtgcctaccacttagatgactttgatgaacactagagtcagactgaaatacasatgagttactacagagcatctggcccagcacaggtcagataggtcaggctcacggaaccgttgcaggctgctctgcttcttccacagcttccattgaag

SEQ ID NO: 257366 - DNA, 681 bp, Homo sapiens
gtctctctccttcctcccttcctcccactccagaatacatgtgcctaccacttagatgactttgatgaacactagagtcagactgaaatacacatgagttactacagagcatctggcccagcacaggtcagataggtcaggctcacggaacmgttgcaggctgctctgcttcttccacagcttccattgaagccacagcttcaatgccatagagaccatttttaaagaccacatttaattctgtattcatttggactccaggtgttccctctatgtcacaaccctatagggctaagtcatgcatcagggagggttctggaaagaaaagagcatgagatctgagacaaaggtggagttaggactcaagttccctcttggccataagcctctctctgcccatttttagatggcctcattgtcacattctctgtggggctcctggaagaattcagggaaataatacatgaagtgcctggcgcttagagttcaataattgttagttcacttgctccccaggctgtgcattaattacaatatgtgtgtgtgttatgggggaaacagaaaaaaagtttaaatcattaggtcatttaaataatatctacatccttttaaaatcaaatggaaataaacattcccagtgtatatcctatctgcacacttgttgtttgttatgatggaatt

SEQ ID NO: 257367 - DNA, 681 bp, Homo sapiens
gtctctctccttcctcccttcctcccactccagaatacatgtgcctaccacttagatgactttgatgaacactagagtcagactgaaatacacatgagttactacagagcatctggcccagcacaggtcagataggtcaggctcacggaaccgttgcaggctgctctgcttcttccacagcttccattgaagccacagcttcaatgccatagagaccatttttaaagaccacatttaattctgtattcatttggactccaggtgttccctctatgtcacaaccctatagggctaagtcatgcatcagggagggttctggaaagaaaagagcatgagatctgagacaaaggtggagttaggactcaakttccctcttggccataagcctctctctgcccatttttagatggcctcattgtcacattctctgtggggctcctggaagaattcagggaaataatacatgaagtgcctggcgcttagagttcaataattgttagttcacttgctccccaggctgtgcattaattacaatatgtgtgtgtgttatgggggaaacagaaaaaaagtttaaatcattaggtcatttaaataatatctacatccttttaaaatcaaatggaaataaacattcccagtgtatatcctatctgcacacttgttgtttgttatgatggaatt

SEQ ID NO: 257368 - DNA, 681 bp, Homo sapiens
gtctctctccttcctcccttcctcccactccagaatacatgtgcctaccacttagatgactttgatgaacactagagtcagactgaaatacacatgagttactacagagcatctggcccagcacaggtcagataggtcaggctcacggaaccgttgcaggctgctctgcttcttccacagcttccattgaagccacagcttcaatgccatagagaccatttttaaagaccacatttaattctgtattcatttggactccaggtgttccctctatgtcacaaccctatagggctaagtcatgcatcagggagggttctggaaagaaaagagcatgagatctgagacaaaggtggagttaggactcaagttccctcttggccataagcctctctctgcccatttttagatggcctcattgtcacattctctgtggggctcctggaagaattcagggaaataatacatgaagtgcctggcgcttagagttcaataattgttagttcacttgctccccaggctgwgcattaattacaatatgtgtgtgtgttatgggggaaacagaaaaaaagtttaaatcattaggtcatttaaataatatctacatccttttaaaatcaaatggaaataaacattcccagtgtatatcctatctgcacacttgttgtttgttatgatggaatt

SEQ ID NO: 257369 - DNA, 552 bp, Homo sapiens
tataaagcgttccagcatttgaaagagctcagcaagatatcaatagtatctattagtaataaatcttattttaaggtaattgaatstgtaattcagaacactgaaataaatgtatggtttcacccaggaaccaccactcctagaattaaaaaatgcatttcgtcttttgaaattccagtttggctattctacattgatttccccctcaaggcggccagacagcagcacacataaagctatttgtcttttctcattattttactgttatctatttgtctgtttgtatttaaaatacttttttttgaagacaacataacactgggtgtatttttcatccattatcatgatgtgcaccttgcaggtgtgaggttcatgtcatttacgcttcctatgtttattggtgtggctgtatttaattttaccaccttgcagtttgctttgtatttctcattcattttcttttttcctcttctttttatgttttccttttgttggattgggtactttctgtgattcgttttatctcctatgctagcctaatagctgtaacat

SEQ ID NO: 257370 - DNA, 606 bp, Homo sapiens
ttggttttgaaatgtgaggacatgagatttgggtgggtccaggagcgaaatgatatggtttggctgtgtccctaccaaaacctcatcttgaattgcagctcccacaattctcacatgtgggaggaagccagtgggaggtaattgaaccatggaggcagttctttcctgcgctgttcttgtgatagtgaataagtctctcaagatctgatggttttaaaaatgggtgtttctctgcacaggctgactttgcctgctgctatccatataagacrtggctaggtcctccttgccttccaccatgattgtgaggcttccccagccatatagaactgtatgtccatcaaacctctcttttgtaaattgcccattcttgggtatgcattatcaccagcgtgaaaacagactaatgcaacttgttattatatcccccaaatatccaaaattgttttcatcctgtttttcagtcttcatggatttctgcctattttcatcacctctcgttgtaggattcaaagatttgatgccaatgtttatgtccttctagccctgttgcctcctttttatcttttttattaaaaattacaaacactccttgaccatttaatg

SEQ ID NO: 257371 - DNA, 633 bp, Homo sapiens
ttttcttgaaatagttgagagcaaaaacaagaacatgttctttcacaaccacagtataactattaaagtcaatatattaactctgatttaatatcattgcctaattttcagacctaattcaaattttacctaacattccaccattgtgttttctggcycagaacctaattcagcatcacaggttgcatttagctgccatgtctctttcgtttccctaaataggaaacggcaattttttccttccatatcctttacacttttggagagtaagggccaattattttacaggctgtccctaaatttgggtttatttaactgtttctttgtgattagattcaggtgattcatatttttttggcagaaatgtccagaattggcattgtgtcttcagttcattatagcaggggacccctgttgacttgtcctattaattgtgatagtaactttgatctcttggttacatggggtttaccagctatttcaaatgaaaagtcactatttttctttttgtaaataatacatattttttgagagattctttgaatctctgtacagattccattttcaataatacttctgttcactaatttcagcacccactgactgatcatttttgtcagaaacaattgctgg

SEQ ID NO: 257372 - DNA, 564 bp, Homo sapiens
gcagtgttgtggtgtatatgttcttttttgttgttgttcttgaatacctatatccacacaaagaaacctatgtacacatacatacacacacacacacacacacacacacacacacacacacagaggaaataatttaaattttactgaatatactgaattattttgaaaggtgcttatgttttacttctttacaacatacatattataaacatttttgtcattattttcaatataattttcaaaataacatactgttttccccccaccattgctaacatactgaaatacaaattttgaaaaatattaagtgtatatataaattcaccaccctaaaatgtctatcattaatagatatttcagagtctgatttcttctgtaggcaaaattaacttctctgttttttggtggtagamctttttcaaaaataataagcatgagatctttcatgtttgaaacacaatgacaagcttaaaataacttgtatagtagtactatttactttataaaagaaaatgtgtaaggcgtatctgcatttataagtttttatattttatatgtaaatct

SEQ ID NO: 257373 - DNA, 550 bp, Homo sapiens
tttctccatatcagcaataaggctgttttcctttcttatcatttgcattcactgaaatagcacttttactatatttcaagaacttttcctttkcattcacagcttggctcactgtttagtgcaggaggcttagttttcagcctgtctcatctttaagtatacttttctcactaaggccaatgatttctagcttttgatttaaagtgatagagacatgtgactcttcctttcacttgagcacataaaggccactgtaggcttattaattggcctaatttgattattgctgtgtctcacggaatagcgaggcccaatgaaggaggtagagagatgtgggagtgaccaggccagtcagtggagcagtcagaacacacacatttattgactaattttaccacttatatggacacatatggggcccccaaacaattacaatagttacaacaaaaattactgatgacagatcaccatagcaagtacaatcatatacctagaagcctgggttattatgaaagttaccaaaatgtggcacagacaccaaaaacgagta

SEQ ID NO: 257374 - DNA, 550 bp, Homo sapiens
tttctccatatcagcaataaggctgttttcctttcttatcatttgcattcactgaaatagcacttttactatatttcaagaacttttcctttgcattcacagcttggctcactgtttagtgcaggaggcttagttttcagcctgtctcatctttaagtatacttttctcactaaggccaatgatttctagcttttgatttaaagtgatagagacatgtgactcttcctttcacttgagcacataaaggccactgtaggcttattaattggcctaatttgattattgctgtgtctcacggaatagsgaggcccaatgaaggaggtagagagatgtgggagtgaccaggccagtcagtggagcagtcagaacacacacatttattgactaattttaccacttatatggacacatatggggcccccaaacaattacaatagttacaacaaaaattactgatgacagatcaccatagcaagtacaatcatatacctagaagcctgggttattatgaaagttaccaaaatgtggcacagacaccaaaaacgagta

SEQ ID NO: 257375 - DNA, 577 bp, Homo sapiens
aaggcagaggagaacaaaggaaggaggaagtaacttgtggaatggtgagaaaggtaaaaagaccttcaaataaggaagaagaacaggctttgacctaatgcttgcttggaccagtataagcatgccagggctaagttgtgtgagctaagaacataaaatacattgatttctttattatggctggcagatatttaagagtgttagcacaggtctttgaataaagtttgcttctaagagaagttactatttattcctaattagatggggaggaaagtctttgaagaaggacctctactttacttktcacgtatagaatcatcatctaatagatacggcaagtataactgatgttctcactggaatagagcttatttacaatggtagggtactgcttttgtaggttttcccagtaccaaataaagataatcttccaaggaagaaaaacatgcctaggtaacacataccccctctcagagacatctttatataaaccagtgtaagaagaaaaccttgcattaacaataaaatagtttttaaaaatttaatcatataggctgtgcacagtgtctcacatgag

SEQ ID NO: 257376 - DNA, 577 bp, Homo sapiens
aaggcagaggagaacaaaggaaggaggaagtaacttgtggaatggtgagaaaggtaaaaagaccttcaaataaggaagaagaacaggctttgacctaatgcttgcttggaccagtataagcatgccagggctaagttgtgtgagctaagaacataaaatacattgatttctttattatggctggcagatatttaagagtgttagcacaggtctttgaataaagtttgcttctaagagaagttactatttattcctaattagatggggaggaaagtctttgaagaaggacctctactttacttgtcacgtayagaatcatcatctaatagatacggcaagtataactgatgttctcactggaatagagcttatttacaatggtagggtactgcttttgtaggttttcccagtaccaaataaagataatcttccaaggaagaaaaacatgcctaggtaacacataccccctctcagagacatctttatataaaccagtgtaagaagaaaaccttgcattaacaataaaatagtttttaaaaatttaatcatataggctgtgcacagtgtctcacatgag

SEQ ID NO: 257377 - DNA, 600 bp, Homo sapiens
cgtacaggctttcatttctcttggctggtagggttttgacacacaaagacctaaagtcagacatccgtgatgctgacagatactgggtttgaacaatcagattttactgagcatgcagaacctgcctttttttttttttgaatttgataatgctgatcaggaataatgacagtgtggctttgccatcatgggtcttgcacaaggaatctgtgtttctgcacgtgactactgaattgaaatctaataagtgctgtttttccagctttaagatcagatctgggacgtatcactgaaaacttttataggatatgtttcacraaatgttgttcatgtcaatgccacaggtgatttaaaatacatttccccacttagaatggttattgtttatttatttgtagtgcatttgattctgacattgtgtcagatatctgagattcttagaaaatttctagaatacgtatgtacaaccgattggtctcattgccctcttattgcttgagaaaaagccattgtcaaatgaaaattcttctgccactctccaccctggaccatattatttagaagtccccagttgacatgctctattctgccaactttggt

SEQ ID NO: 257378 - DNA, 600 bp, Homo sapiens
cgtacaggctttcatttctcttggctggtagggttttgacacacaaagacctaaagtcagacatccgtgatgctgacagatactgggtttgaacaatcagattttactgagcatgcagaacctgcctttttttttttttgaatttgataatgctgatcaggaataatgacagtgtggctttgccatcatgggtcttgcacaaggaatctgtgtttctgcacgtgactactgaattgaaatctaataagtgctgtttttccagctttaagatcagatctgggacgtatcactgaaaacttttataggatatgtttcacgaaatgttgttcatgtcaatgccacaggtgatttaaaatacatttccccacttagaatggttattgtttatttatttgtagtgcatttgattctgacattgtgtcagatatctgagattcttagaaaatttctagaatacgtatgtacaaccgattggtctcattgccctcttattgcttgagaaaaagccattgtsaaatgaaaattcttctgccactctccaccctggaccatattatttagaagtccccagttgacatgctctattctgccaactttggt

SEQ ID NO: 257379 - DNA, 588 bp, Homo sapiens
tactcttctgtctcttctttagaagtttcttgtagtctacaccagaatgtcattgatatagtatattagtatagaatagcacttaaattaccccaaagtggattttctaataggtgatgagatagaataaacttgtttttttwaaaaatgctattttttagagtagttcataacgaaattgaaaggttggtatggggatatctcatctatcccctaccctcctacatgtacagcttcccccattatcaacatccccaaccaaagtgctagatttgttacaattgatgcatctacactgacacatcacaattacccaaagtccatggtttacattagggtttgctcgtggtggtgtacattctatgggtctggacaaatgtataatgacatgtatgcaccagtctagcatcatacagagtattttcactgccctgaaaatcctctgttctcagcctattcatctttcctttccgccaacccctgacaaccactgatctttttaccctctccacagtttttccaggacgtcatatagttggaatcatacagtatctagccttttcacgttgacttctttcacttagtaat

SEQ ID NO: 257380 - DNA, 488 bp, Homo sapiens
aaagacatgattttattctttttatagctgagtaatattccatgacgtatatataccacattttctttatccactcatcagtcgatgggcacttaggttgattccatatctttgcgattataaattgtgctgtagaaaacatatacatgcaggtgtcttttttataatacaatttattttcctttgggtagatatacaaggctgagttgaatggttgatctactttcagttcttgagaactctccatacacttttccatagaagtcgtactaattaacattcccaccagcactgtataagtagtcccttttcaccacatttgtaccaacatctgttttttwaaaattttttaataatggccatactggctggggtaaggagatatcacattgtagctttaatttgcattttcctgatgttgagcactttgtcatatgattgagggccatttctatatcttcttttgagaaaaatacatatcctagaaa

SEQ ID NO: 257381 - DNA, 586 bp, Homo sapiens
catgtggaagaaactccaggagagaacagcacaatgtggggaagttgaaaaatctgcatttaaaatctttccaaactcttaacygatccctgatctacaaatacttaagacttccaggtgtctagcagaaagcaacagtttaaatgcaactctttttaaacttaaaaaagtcttacagacagattttagctactaccaaccgtaagggagatggcattgagagtttgagttgagccagattactcgtgacggaacagttatatacattcttcagagaaagacagcagaacgtagagtctccggaatgttttataaacattattattttataaacaaaattcataaacaaaacagaaaaaaatatgatccacagtcaagtgagatatcagtcatcaggaaccaattgaaaaatacaaatatatcaaaatgtagaccagctattttattataaatatgtccagaaactcaaaagaaaatatagaatgaaaagatggggaatttcaacagaaaaataaaactataaaaatggagattttagaaatcaatgctacgatatctgaaattttaaaactcagtggatgggatt

SEQ ID NO: 257382 - DNA, 596 bp, Homo sapiens
tggcaagctcatacagaatatattgtacatgtttcttatcagacttaaaaaggggtcagactcttagttgattctcccctggatcaggaaaaagccctggaagagagaaaggggattctctacagaatgtagagcatgcaagagacaatgttgtagggctatttcaagatagggcagagaaacatatttggagtttaaatattctgatttccttctttgttgtgtgttatgtgtgatgttatgccggggtcaggttggaaagtgagccacattatagagtgttaaatgaaacccctctgatgagactttatggtttgtaaggtgtaactgtccaggccccttagataggcatttgtcaagagaagaaagaagatcagagtttagtcctcactgaaatctaatttacaagaaaaactaaatttgcaatactcttgggaagacagaacgtagacaaaattcataccaaggtgtgaattggaagcagcttcagaggaggaactgtgtcttgatcrctattgtcaactcaactgttagcatattaacaggtgcttagtaaatattttgattgaataaatgatgctagaatcaattctgga

SEQ ID NO: 257383 - DNA, 607 bp, Homo sapiens
ggtgtccggcacactgccttgcttcatcctctctgttgaattcaccagtgcagagcggtttgccacctcttttctctccatcagagcatcaccatctttgctggagatggcattttcaagccctcaatttatatcagaactttaagacatgaagctatacaaaatgaaatatttggatgtcaygtgttacccttatacataaaaaccaagtaatgagttgatttttttaaaaagcatttgccagccaggtttttcaaaacaacaaatatccctgatatcaaaataattctctggaatcagaaatccacagacatttaaactgaaacaacatggcagtccttttcttagacaaagatacccttataatgataagctttaaatgggcatcacctccacacttgtaaagagacatgcttctaaggaccatgacagagcctgtgacagcatctcatcttttcttaattcactgaaaaacatctaacaaacatcttttaaactgagttactccccttacgatttttttattcttccattacaatatccctcagcttatatcatctaagtaatgttaaaattcagttctctttaccttgatttcttaaatatt

SEQ ID NO: 257384 - DNA, 606 bp, Homo sapiens
atacacaaagtttttaaatggttaaattgtcatacgtaaagataacttcaagcaaatcttcaccattgaaaatgaaaacaaaaraaaacattacccttctgtgattttcagtcttaagaaagaaaatctttatataattatgatcattttttatcattttctaaaatgcatgtaatggcaagcactagagtaacgaagaaaattttaactaagtgctattgaaaatgcaaagcaatggaagtaacaaaacaacaggaagctcttaagtgttagaatcttaagaaagaatgaagagaggatcaacagatttttcatcgcaaatataataaattattttataatcatttgatatgatatatttatcaataggaaggatgtcagagaacgtaaacatttggcttcagtgattctcgggtcatcctgaatgtggattctccccctcgttccacatctctctggctccatgtctctagaggcgctcggtatacttacagtagccatgtgccacatggtgtgtggccacagcattcttttttttttgtttttttgagacagagtttcactctctcgcccaaactggagtgcaatggtgcaatctcagctcac

SEQ ID NO: 257385 - DNA, 546 bp, Homo sapiens
tgtctttgacccaaacaccaatgggcttagcaagcttaattggactatgagtggaccacaagaatttcttgacccatcaagtttaaagcctagaggagaaataggccaagtaatcacttcaaccctctcccmctagatctcgtgggcgtagctagccttctggatccaattattctgacaatgagagagatataccagtgtagagccaaaattattataaatgaatcaaattaggcagttatttggagcctcaccatgaaagaataaagctagatttcagatctagagtaaaataactaccaacatcttcaataacgcagattgtcatccctgaacatgtttttactccactcctcaagtggagtttatgttaattatgcaataaatatgcatacttgctgcaaattgagggttgaaatggatttgagaccttaccaaataaaacaggccaaataaaaacattctgtatactacgtaaaatataaaatgtgcaataatacaggaaacaattaaaaaattaaattttcacttttgtgaaagttggta

SEQ ID NO: 257386 - DNA, 584 bp, Homo sapiens
ctgtgtatgtgcactctcttccctcttttgaaagcttaaagatcttcactttgtcgcaaaggtactaagattttgtgataatgcagtttaatagttggcttttttctttcattctgtcagactaatctttttgagacttagtttcttcagttctggaatttttttcttgtattatttctataactttcttctctgtgtgattactcttatctgtatctataatccacttaataagactctgaacctcctaaatctctattctagttttactccctcctgactttttggattactttctgaatgacttctttgaccttatgatccaactattcaattactttataaaatttatctatttataatatttcctctatttctgagagctctttgttgttatctgaatgtatctattttatatcatcttcattttgttacctaaattagtctttttcacttattcaacttagaatatcccttaaagatctttttacatgtttttcttattccctgaattatctcagcttcttgcagattcataatttttctcttttaggtagaaagytttcctctgaaatcttgtactc

SEQ ID NO: 257387 - DNA, 639 bp, Homo sapiens
aaaataattaataatgagcttgatgcatctggcattaaggcacttccataatgaaacttttaagatgcttaagtatttaaggcarcaaaatgcagatgaatagggcaaaataaacatatataaatgatatgtttatatgtgtttaattttatattttgaaaaaatatagtttatgcttgtgactattgttgttatttttgattcaatgtgagagtagtctttgagtggacattttgtagcttctttcttccagatctctaagtaaaaattaattttaaaaagggtatacatatgttagcagaaaatgtgtcctttccaagtaaaaaataatccatctaattaaaataacttgaaaaattggactaaacctggttttctgaatggattactgcttttcttatattctattgaattagagtagtctttaagaatttctaattcaccttcaggaagtaattttgtgagatattttcagcctattacatcacattttaaaggtctatatgcagaagcagagtatggaagggctctctttatctttcctgcctctattcattattatgacgttcaaccccatttttctatacttatgaacatctacagtcgttccaatctcatgcaatgttcttcctatttgtg

SEQ ID NO: 257388 - DNA, 566 bp, Homo sapiens
gccaagcactgaccatttaggacaaagaggagcatgtgaagatgcactgggggcatcaagagcagtagaagtagcaatagaagcgcctctttcttcctcctagaaaaaaggaatagaagaatatacagaagaatggaaggaaatgtgtaaggagaaaataataaaacacacagtaaagagagattgatggaataggatggaagaactctgtagggtgtttcacaaagggaagcaaagctcaaataaaaatgaaaattattggatgttcagcctttgtagaaaatgatcacacacatacattcacacatacaaacccatgacaaaaagggacaagggaggaactcaagaagacaataaatataatactgagacactgatcaaataatttcctgcatgactgagaattgatggacaacatgaaacacctacttgtatgatatgcttgtaaatcaamcatttgggtaatgcaacaatagtgtgtgcaatttgcaattatttccttttaaaaatacttttaataatattaaagagggcaagtctacttgatatgtgtccatgttaagaag

SEQ ID NO: 257389 - DNA, 601 bp, Homo sapiens
gtcaaaagattgattccctttgacaggtagagaagactggcaygatgcgtaaggggatttctgaggtgcagataaacttttgattcttgatctggtgctggttacatagatgtgccactttataaaaaatccgtcagtctgtacacttacaaggtgtgcacctctctgtactttgttatacttcaatacaaagattttaataatctaggttctgtaaaactctcttgataacctcatcagcctctacttcaaggctaagtcctatggctatgagaatatcagtggtgatatgacactatgactgatatgcactgcaggttcttatggagccaaagatgctcgtgtttcaaaggctcagcatcttctttagcaggagtccatcaaatgggcatattaatagagcaaaatcccgtaagtaactaggaccaaataaaccaatcacaaggcaagcttagggggcatttgggaaattgtactagcttttttaaagctggaatttcataatatttttcgttagaatcactacaaagtaagaaaataaacatctgtgtcaggagaaacataatgattcttacctaaaataatgtaattatagtaagaa

SEQ ID NO: 257390 - DNA, 558 bp, Homo sapiens
aacagaaactgtcctttgtaagcatgaagcataattttatttgcagttygcccatttctttacctacagggaccaccttccaggtgtcatcgttcactgatgctaagagatcttatgtataattcagtactttgtacatctgtccagaaacgcaaaaccagacccccattttacattatgggagaatcaaaagcagttccagagcataatgcttttcttcacatgagggaattttctcagcgtgatgaatgaataggactctctttaacatcagccagacctaactcgaagtaccacctcttactacccaaaaaaaggagaaagtcacctatgtttttttttgtttttgtttgtgttttttctgtaaaacatctacttcctggaatttttctactgtttaaatgagataatatctataaaactcatttagaaagttttcctcatattatttggtaaatattcatgaatatactactactatcgctaccactgctgctaatgacaataataataataaattagtagtagtagctaacatacgtgccaaactattactag

SEQ ID NO: 257391 - DNA, 558 bp, Homo sapiens
aacagaaactgtcctttgtaagcatgaagcataattttatttgcagtttgcccatttctttacctacagggaccaccttccaggtgtcatcgttcactgatgctaagagatcttatgtataattcagtactttgtacatctgtccagaaacgcaaaaccagacccccattttacattatgggagaatcaaaagcagttccagagcataatgcttttcttcacatgagggaattttctcagcgtgatgaatgaataggactctctttaacatcagccagacctaactcgaagtaccacctcttactacccaaaaaaaggagaaagtcacctatgtttttttttgtttttgtttgtgttttttctgtaaaacatctacttcctggaatttttctactgtttaaatgagataatatctataaaactcatttagaaagttttcctcatattatttggtaaatattcaygaatatactactactatcgctaccactgctgctaatgacaataataataataaattagtagtagtagctaacatacgtgccaaactattactag

SEQ ID NO: 257392 - DNA, 613 bp, Homo sapiens
aatttaatcaacacaactaagctacgtaaagaataattcttagaaacattattcttggcattaatgtgatactcatttttttcccttgagaattcaggaattatttttcttactcagattcaacaactgtatgaacrcaattttagacacaattcaaaagagaacatatagcaaaaaaaaaaaaaaaaagtctttctactgcagtgactcaatatgtgtgtgtatactcaccatagttagagacttgttagaaagttgtcagggaggataatgggtccactgaaattcacagtgactcttgtcgcaccatgctcaggctcaggcacattgtttaaaatgatgagaacacatggacaccaagaggggaacaacagaagctggggcttaccagaggatgaagtgtgggaagagggagaggatcaggaaaaataactaataagttactaattgcttaatatttgggtgaaaaatagtctgtacaacaaactcccatgacactagtttacccatatatcaaacctgaacttgttaatgtttacctatatatcaaacctgtacccccgaacttaaaatacaagttaaaaagtaaaaataaaatgaaatttgttagttt

SEQ ID NO: 257393 - DNA, 547 bp, Homo sapiens
ttctgtggaaaagtagagagagcgagagacagagacagagcaagagagagagagagagagagatactagtttgtaaaacccaggctctagaagaaataggctgatcatgcagtaaagacaaagtaaccaaaaaagcaacaataatttttttaggaagctattggggctcagggaatatgcaccctgaacagcagacagtaagtagcagcatagaatatgcttctgttggagacttagtagagataggagtgaaagatgtgaagagtgttaggtacctgaaaatacagtcattggaaaaatgcatacgtccttgggtgttgaagacagcyagcctgagattctctttatagtatacataaagatagcttagccctgttaaagaaagcaggtttagattggagaagtcctattttgctgaaagaggttttcactcattccccgtattgttcctgggtggcaaccattaaagagctgattgcataaaggctgtggactttactattaattagaatatattcttatattgtggagccattagttcctgaca

SEQ ID NO: 257394 - DNA, 621 bp, Homo sapiens
tttgagttatattttcatgaatacgttattaatatatgttccaaaattgtatgtgattcctaaaattctgttatatcttggtaggaaatcagtcataactatagttattatgttaagttattataggccacagaaayaaccaaattttcttctcacttgtgtctttgatcatgatcatattaattcttgtccacagttaactgcttaattctgatgcattttaaaacagctctttacaagcaaataaaatcctaaagtgttgtgtcttcatggaagttcatggaaagggtagaaaggaccataagaagcacctttgaatacaggtttctgatgactttaggatcatatcatttggactaagtaaggattcctagtactccaatgaaaagactaactgatttataaaactgctaatccaaggaggacaataattaattgaataccaagaaaatactttgccaggttttcataataaatcagccagcactgaaattattaagatgtgctattcgaatgaactccatgatgcaagtcaaattaccaatgtgatatggtttggctgtgtccacacccaaatcttatcttgaaatgtagctcccataattcccacgttttgggagg

SEQ ID NO: 257395 - DNA, 621 bp, Homo sapiens
tttgagttatattttcatgaatacgttattaatatatgttccaaaattgtatgtgattcctaaaattctgttatatcttggtaggaaatcagtcataactatagttattatgttaagttattataggccacagaaacaaccaaattttcttctcacktgtgtctttgatcatgatcatattaattcttgtccacagttaactgcttaattctgatgcattttaaaacagctctttacaagcaaataaaatcctaaagtgttgtgtcttcatggaagttcatggaaagggtagaaaggaccataagaagcacctttgaatacaggtttctgatgactttaggatcatatcatttggactaagtaaggattcctagtactccaatgaaaagactaactgatttataaaactgctaatccaaggaggacaataattaattgaataccaagaaaatactttgccaggttttcataataaatcagccagcactgaaattattaagatgtgctattcgaatgaactccatgatgcaagtcaaattaccaatgtgatatggtttggctgtgtccacacccaaatcttatcttgaaatgtagctcccataattcccacgttttgggagg

SEQ ID NO: 257396 - DNA, 621 bp, Homo sapiens
tttgagttatattttcatgaatacgttattaatatatgttccaaaattgtatgtgattcctaaaattctgttatatcttggtaggaaatcagtcataactatagttattatgttaagttattataggccacagaaacaaccaaattttcttctcacttgtgtctttgaycatgatcatattaattcttgtccacagttaactgcttaattctgatgcattttaaaacagctctttacaagcaaataaaatcctaaagtgttgtgtcttcatggaagttcatggaaagggtagaaaggaccataagaagcacctttgaatacaggtttctgatgactttaggatcatatcatttggactaagtaaggattcctagtactccaatgaaaagactaactgatttataaaactgctaatccaaggaggacaataattaattgaataccaagaaaatactttgccaggttttcataataaatcagccagcactgaaattattaagatgtgctattcgaatgaactccatgatgcaagtcaaattaccaatgtgatatggtttggctgtgtccacacccaaatcttatcttgaaatgtagctcccataattcccacgttttgggagg

SEQ ID NO: 257397 - DNA, 633 bp, Homo sapiens
cagtcactatgtgggtgatgtaagaagctgcaagcagctctcttacaagccagagagtcagaaagcagaagacacactagctgcagcctatccagtattagtgtaagctaataccagaaagcagtatgtggcaaaagtacagaagtcaagcctactacactcttaatacatttacttactgtgtcagttgtggtttgtgttcttctttgaccctaaaaagataagtttgcacaactgagtgcactgtactatgaagagatttctatttacaaatttgtgttcatataaaatggacaccaaaaataagaattttatatagaaagacttagtgctttgccatatattgaaattatacatttcaatcaattttacacaaaaaagagaaaatgaatcatttgtccttaacagaaaactaatattaaaattctacctctgttttaaagcaatgatttggtcctgaagttttctgaatatttttattgatattgaagatttttaartaattattttaacatactatattaaacacaattacatttagttaagtgcaaatagatttcctttttttaatttttccttaatattgaagtaaaggcataaatattttaaattaaacatagagttttacgaatg

SEQ ID NO: 257398 - DNA, 629 bp, Homo sapiens
ttatatcatcatgtcaaagaacactccccaattgggcaagtaacaaataataatgtccttcgccaggacagagtatagaggtaaggttttgcttctaacactacttgttattaattcattaaccacttgctgccacttgaatctgcccaatttataatcctgccacagtataaaatctcctagtgcatattttcctgacaaataaaattattacctcaatgaattccatttttgtaagattacgaataggaagatgaataaggatttatttcagtatcttgacatctttcaatgcattcatcttagtctctcagcctattcatttctaaatgtagcacaagaccaaaagagctgcaacagagcttcaaatgtccgtatgatcaggaattgctttggaatcccagtttttatagtagttttactaaattaagttgacctaagcacctcagagacagtaatgttattctggggctcatacaaaagttgtgatggaatttaaaggtttctacgggaaatctgmtttagttcagatccattcttccaaggctttctatgaatgtttctaaacttgatcacaaacatataaagtggttgatccaaataagtaaactatgaaagcagctaaggct

SEQ ID NO: 257399 - DNA, 623 bp, Homo sapiens
gaacaacctgctcctgaatgactcctgtgtaaataatgaaattaagggaaaaataagaaagttctttgaaactaatgagaacaaagagacaatgtacccaaagctctgggacgcagctaaagcagtgttaggggggaaatttatagcattaaatgcccacatcaaaaagctagaaagatctcaaaaacctaacatcacacctaaaacaactggcaaaccaagagcaagccccacagctaacagaagacaagaagtaaccaagatcaaaactgaactgaaggtgatacaaaaattaaaaaaaaaaaaaatcaaaaaaaaatcaatgaacccagcagctggtttttggaaaaaaaattaatataatataccactaggtaagactaataaaaaagaaaagaaagaagaatcaaataaacacaatcagaaataagaagaatatcaccactgaccccacagaaatataaacgaccatcagagaatactataaacacctctatgcacataaactagaaaatatataagaaacaaataatrtctggacacatacacctacccaaggctgaaccaggaagaaactgaatctgttaataggccaataataagttctgaaattcaggcagtaa

SEQ ID NO: 257400 - DNA, 547 bp, Homo sapiens
ttacttgttaaagaactcctgggtgagaatctgcaagaaatcatgttgctcttaatcagtgacaagtttttatcataaacatgttgatattaatctaaaaatcagtttccaatttcaaaatctttactagaaaacataggcataaaaatctaaattattaaaactgggttttgtaaaaacatctatatatgaaatgtataacatttgcatcatcctcccaaacaaaatatgtataaatatttaaaatatttayattttatatttatgttttaaataaatatttaaaatgtctttaaatacaattaaaagtataaaattattcttctccttttgccaatattttagataaaatcacattacaaagtatctcaccaaaattaaaatgttgagataatgaattaaaaattggtaatatgagaaactaattacatcacctatttctctgacaatatgctaacattattaacagtgaactcctacattcgtccattccaagaagctgatgagattctagtttccaatctgacatataaagatcttggaaatt

SEQ ID NO: 257401 - DNA, 548 bp, Homo sapiens
catttctttctagctgctttcaagattttttttttttttttgtcttcagttttcaraaatttgattatgatgtgtctcagcctgaatttcttttggtttggcctgatattggttcactcagtttcttgaatctgtatgtttatgactttcccccaatttgtgaagcttttgctcatatttcttaaaattttttttttagttttgtactgttctttttttctgggactctgaggacacatatgttaggtattttactccccctctccctgccttcctttgtactgccagagtatccaagatggttcatttgttaatttgttttttctgttcatcagattttaaaattggtattactcaggtttcaagtttatagtttatttcctatttcatcttgtcctgctattgagctcatctagtgtggtttttgttttggttattgcattttttacttctaaagtgatagccttttaatgataactgctttaaaatatttggaattaatcatcatctatatcatcttagtgttggcatatgttaattgtattttt

SEQ ID NO: 257402 - DNA, 618 bp, Homo sapiens
tcttcctccagtgaagttgattttctctggtgatatgatttagtttcttgctttttattttttgtgtatgcattgtatgtgttttgaattgaagtcaccatgaggcttgcaaatattataacccattatcttaacctgagaaaaacttagcactatttgcataaacaaacaagcaaagagcaaactattaaaactctatgccttaacttcatcctcccccrttttaaatttttcttttttcataaataatttgtactgactatatcttaaaatgttgtagttattttgattgtgtcattatttactctttccacttaggataagagaagtttacacaccacagttatagtgttaaaaaaaatctgtgtttttctgtgtacttactattactagtaagtttggtaccttcaggtgattatttattgctcattaatgtcctcttctttctgattgaagtactccctttagcatttcttgatgacaggtctagtattgatcaaatctctcagtttttgttcatctgggagtctttaattctcttttatgtttgaaggatattttagccagatatactattctacaataaaagtgtttttcctttaccacattaaatatgtc

SEQ ID NO: 257403 - DNA, 618 bp, Homo sapiens
tcttcctccagtgaagttgattttctctggtgatatgatttagtttcttgctttttattttttgtgtatgcattgtatgtgttttgaattgaagtcaccatgaggcttgcaaatattataacccattatcttaacctgagaaaaacttagcactatttgcataaacaaacaagcaaagagcaaactattaaaactctatgccttaacttcatcctcccccattttaaatttttcttttttcataaataatttgtactgactatatcttaaaatgttgtrgttattttgattgtgtcattatttactctttccacttaggataagagaagtttacacaccacagttatagtgttaaaaaaaatctgtgtttttctgtgtacttactattactagtaagtttggtaccttcaggtgattatttattgctcattaatgtcctcttctttctgattgaagtactccctttagcatttcttgatgacaggtctagtattgatcaaatctctcagtttttgttcatctgggagtctttaattctcttttatgtttgaaggatattttagccagatatactattctacaataaaagtgtttttcctttaccacattaaatatgtc

SEQ ID NO: 257404 - DNA, 583 bp, Homo sapiens
aggggatagccttatagtgtgggaaggctggctagggattcatgcccaggggacctgtggaacaaacctyctacagcatggcatctcctttggctgacttacatagcagggtttccatgctgaggatagtggtcctgccctcccactttgtgtttggttgtcctcaaggataatttttccttcaggtactcctgatgtttcccctgggttgaggcagggacagtctcctgctagggaactgaagttagaagcaaaactagttatccaccttgatctcactttttccagtgtagaaactgtagttttggggaaactttaggcatatctggtgccaggcagattgtggggaggagcatcatggaaatccaattctcttaatccgttcagagttttttcaattctctgtagtctcaggaactgtctcttcctcatatttgaattctgggatattactggtgataatctcagtgctgtatgtgtatatatatatatatgtgtgtgtgtgtgtatgtgtgtgtttatatatataaattatatataaaacataaatatatattatataaatacatatttcctgtggtgg

SEQ ID NO: 257405 - DNA, 548 bp, Homo sapiens
agaaataggaaataccaggcaacagtttcacatgactaacatagaaggaacacagaaaccagctacaggaatggggaagsgggaggagccaataagaccctgacaaacaggatgtaagaaataccagttaagacaagctagatctaacatggcactggatttgactcaaattgtaccccaggttcaattataaactcattattatactaaaccacatctcagcagaaccatgacagttccaggtatacctatgtttgttataaaactcagtggcacctcaatttcaagaaatcttattctcttcccagaaatccttatgatcattctgcctcttaatttgaaaaacattttttggttttgacaaaccccaaacatattgggcataacatactctcctgagtaggcctatactcccacccttgagtgtgtactttcacttgacaaaaaatactttctacttttgctttgactcgtccttgaactctctcgcaaaggtgtcaagaaccgggacagtggctggggtcaaggtctcaccagtgttcagaggc

SEQ ID NO: 257406 - DNA, 569 bp, Homo sapiens
gaaccctccagtatttcaggccttataataagaggtagaaaatatgcattatcactaagggatgatcatgggaactgagagaaacccttgaccaaaaaagaaataggcacaagaggcctaccaaagcttgcagatgtagctagagatctgaggaacgcttcagacatgctagactttgcacttagtatgaaggcatctgcaaaagacaaaactgcagaaatgttaaaaaagatactctgtcaggaacaggcatatagtacctgttgccaaggcagcggaattgagagaaaacctgcagatactccagtccttacaaggaataacaagcagagggtgtctactatttcacctgagaaacaatggagttcagaagacaaaaaaagaaataaaaatactaatatgtttaaagtgctaaaaaaaaaaaaagaaccatccaacctagaattataaatccataaaatatatccccaaaaatatggataaaatacattttcagatgtacaaaagttgaaatattttatccctagtaaacctgcmctaaaaaaaatgttaaaaaaaaaaaaaaaaaa

SEQ ID NO: 257407 - DNA, 547 bp, Homo sapiens
tccatgtaagatgtgactttgctcctcttcaccttctgccatgactgtgaggcctcccacccacgtggaactgtgagtcaattaaacctctttcctttataagttatccagtctcggatatgcatttatcagcaacataaaaatgaactaatacacagtgaaaacatccttaaaacatgaaggagaaatacagacttccccagacaaactaaagctgagagatttcatcaacatcagatctgtcctacagaaaatactagagttcttcactctcaaagaaaataatgttaatgagmaataagaaattatctgaaggtacaaaactcattgctaatggtaactacatagaaaaacacaaaagattacaccaatgtaattgtgacgtgtaaggtatgcataacttgagtagaaagaccaaaagatgaatctatcaaaataatagctacaaaaaatttttagacaaagacagtataataagatataaatagaaccaacaaaagttaaaaagtggggaaattaggttaaagtgtacaagttagctataatt

SEQ ID NO: 257408 - DNA, 547 bp, Homo sapiens
tccatgtaagatgtgactttgctcctcttcaccttctgccatgactgtgaggcctcccacccacgtggaactgtgagtcaattaaacctctttcctttataagttatccagtctcggatatgcatttatcagcaacataaaaatgaactaatacacagtgaaaacatccttaaaacatgaaggagaaatacagacttccccagacaaactaaagctgagagatttcatcaacatcagatctgtcctacagaaaatactagagttcttcactctcaaagaaaataatgttaatgagaaataagaaattatctgaaggtacaaaactcattgctaatggtaactacatagaaaaacacaaaagattacaccaatgtaattgtgacgtgtaaggtatgcataacttgagtagaaagaccaaaagatgaatctatcaaaataatagctacaaaaaatttytagacaaagacagtataataagatataaatagaaccaacaaaagttaaaaagtggggaaattaggttaaagtgtacaagttagctataatt

SEQ ID NO: 257409 - DNA, 547 bp, Homo sapiens
tccatgtaagatgtgactttgctcctcttcaccttctgccatgactgtgaggcctcccacccacgtggaactgtgagtcaattaaacctctttcctttataagttatccagtctcggatatgcatttatcagcaacataaaaatgaactaatacacagtgaaaacatccttaaaacatgaaggagaaatacagacttccccagacaaactaaagctgagagatttcatcaacatcagatctgtcctacagaaaatactagagttcttcactctcaaagaaaataatgttaatgagaaataagaaattatctgaaggtacaaaactcattgctaatggtaactacatagaaaaacacaaaagattacaccaatgtaattgtgacgtgtaaggtatgcataacttgagtagaaagaccaaaagatgaatctatcaaaataatagctacaaaaaatttttagacaaagacagtataataagatataaatagaamcaacaaaagttaaaaagtggggaaattaggttaaagtgtacaagttagctataatt

SEQ ID NO: 257410 - DNA, 543 bp, Homo sapiens
aaaaagagataaaaggcattaaaatgagaaataaataagtcaaattatacttgtttacagatgatctcattcatctggaaaaacctaaagactccaccaaaaaactattcaaactgataaattcagtaaagttccaggatataaaatcaacatacaaaaatcagtagcatttctatatgccaacagtaaaaaatctgaaaaagaaatcaagaaagtcatcccatttacaataaacacaaataaaattaaatgcctaggaattaaccaaagaagtaaaagatccctagaacaaaaactataaaacattaatggaggaaattgaagagaacacacacaaaaaaatgaaaagatattccatgttcatggaccggaaaaatcagtattgttaaagtgtccatactaaccaaagtaactgacagattcaatgaaatccctattaaaataccagtaacaytcttcacagaaataaaaaaaaatactaaaatttgtatggaaacacaaaagacccagaatagccaaagctatcttaagcaaaaagaataa

SEQ ID NO: 257411 - DNA, 556 bp, Homo sapiens
taacccaaccaaatgctggtgaggttatggagcaaccagagtgttcatatttggctggtaagaatataaaattgtatatgacctttgcaaaactgtttgcaatgaaaattgaatccagcttcttgatccagcatactctactcctagkttctaccaaaaagaaacatataagcccacaaaaagacttgaacacaaatgtttatagtggctttattatagccaacaacactagaagcaatccatatgtcctgcaacagaaaaatggataaacaaattgtggcatattcatataataaagtagtatcagcaataaaaaggaacaaactacagttataggcaacatcatggatgaatctcatagattttgaattgaaagaggacactacatattatatgatttcatttatatgatgttcaaaaacaggcaaatctacctatggtaataaggtcagaagggtgattgccttttgggagacggggataaaaaactgacaggaaaagggcatgcataaacttcctaggatgatggaaataatatatatcttgatgtggtgct

SEQ ID NO: 257412 - DNA, 577 bp, Homo sapiens
taacgcctgatgatctgtcactgtctcccatcaaccccagatggaaccatctagttgcaggaaaacaggctcagagctctcactgattctacaatatgatgaactgtataactatttcattatatattacaatgtaataataatagaaataaagtacacagtaactgtaatgtgtttgaataatcccgaaaccatctcctcacccctgtgtggctgggactacaggcatgtgccaccatgctaggctaatttttttttgtatttttagtagagatggggtttcaccatgttggccaggctagtctcaagctcctggcctcaagtgatctgcccaccttggcccccaaaagtgctaggattatagctgtgagccaccacacctggccaataagtgttcaatgatattattaataaacatatctaccctggtttcctgaaagctctccaaattcaatatcttcataaaatcattgccttccctaccgtcaccctytgaccctcaccaccccaaaacggctcctccatcttccatatactggtttcagcacaaatatcctcattcaatgcagaaagctag

SEQ ID NO: 257413 - DNA, 546 bp, Homo sapiens
ttttttctcataatcaaccatccttatggccatccttactatcttatcacttctaataatcagtcacccttcctctccacaagatcaatttactttaagtattactcccaaatctaccttctcattatcacttatatatcattgattctatcattattttccacctctgatatttcctcttatcrtggcatcatttcagactatatatgacaaaatcatctgtcaataactattctttgtgcaactttccatgattagttccccagtctcctaggaaactaatgttaatttcccctcagaatccttctttagatagaggtattccatctttctgatccctccctctgtatcagtgctctatattctatatagttaaactaccatcacttgcctctcacttcttgactaccttctctaatcaacccaaaaatacctctctttcacaccactacaatattctctctcaaggctggtcttcttttttccaagaataacaacaattaaattctgtctgtatagtttatatttttaattcatccacaagtt

SEQ ID NO: 257414 - DNA, 574 bp, Homo sapiens
ttaatcaaagaaatgaaagatctctacaatgaaaactataaaacactgaagaaaaaaattaaagaggacaccaaaaaatggaaagatattccatgttcatggawtgaaagaatcaatattgttaaaaggtctacccaaaacaatacaacccaaagcagtctacagattcaaggcaatccctttcaaaataccaatggcattcttcacagaaatagaatattatcctaaaatttatatggaaccataaaagacccagagtagccaaagctgtcctgaacaaaaagaccaaaactggaggaatcacattacctgacttcaaattatagtatacagatatagtaacaaaaacagcatggtactggcataaaaacagacatgtagaccaatggaacacaatagagaacccagaaagaaatccatacatctacagtgaattcatttttgacaaaagtgccaagaatataaacttgggaaagggcagtctcttcaataaatggtgctggaaaaactggatatccatatgcagaagaataaaactagacccctgtgtctcaccatatacaaaaatcaaatc

SEQ ID NO: 257415 - DNA, 588 bp, Homo sapiens
tagtaatgaacacagcacgcaggcagaaaaagcaacaacaacaaaaaatcagaattaaactaaactctagaccaaatggacctaactgacatttacaaaatatttcatccaactgtgacaaactatacattcttttcattagcacatataacattctccaaaacagatcatatcttaggycagaaaacaagtcatagtgaaattttaaaagtaaaaatcatatcaggtatcttttctgaccataaggaacaaattcaaaatcagtaaaaagaggaatgttgaaaactgtacatatacatggaaataaaacaacatgcttgtgaataaccaataagtcaatgaagaaattaagaagaaaatttaaaaattgtcttggaacaaatttaaatggaaatactaaattactaaaatcagtgggatccagtaaagcagagggaagtttacatcaataaatggctaagtcaaaaaagtaggaagacttcaaataaacaaccaaataatgcatgttaaagaactagaaaagcaagaataaatcaagcccaatattaataaaagaaaaaatataataaaaaagcaggaataactaaa

SEQ ID NO: 257416 - DNA, 605 bp, Homo sapiens
gggactacaggcacacaccaccatgcccagctaactcttgtatttttagtagacatggggtttcaccatattggccaggctggtctcgaactcctgaccttgtgatccgcccacctcagcctcctaaagtgctgggattacaggtttgagccaccgcaccctgcccaaactttttcttttttgagacaaggtttcactctgtcacccaggctggagtgcagtggcacaatcatggctcaccacagccttgacttctccagcttaggtcatcctcccacctctgcctcctgagtagctaggactataggggcccgccaccatgcctggctaatttttgtgggttttttttgtttttttttttttcgtagagacagggtttcaccatgttgcccaagatagtctaraactcctgggctaaagtgatccgcccgccttggcctaccaaagggctaagattacaggcgtgagccatcgtgtctggccacaagcattttaaaatgtttttgctaatttcaacaaaatattatttgggttgaattaacatactctctaacgtgaatagataaacacaataagcttaactagaagagaactgtaattttcat

SEQ ID NO: 257417 - DNA, 628 bp, Homo sapiens
caaccattatggagaacagtttggagtttcctcagaaaactaaaaactgagccaccatatgatacagtacacccactgctgggtatatagccaaagaaaggaaatcagtatattgaagaagtatctgmactcctatgtttgttgcagctctgtttttacaatagctaagatttggaagcaacctaagtgtttacacacagaggaatagataaagaaattgtgatatatatgcaaaatggaatactattgagtcataaaaaagaatgagatttactcatttgcaataacatggacggaactggagatcattatgttaagtaaaataaacaagtcacagaaagagaaacatcatgtattctcacttatttgtgggatctaaaaatcaaagcaatggaactcatggacatagagagtagaaggatgattaccagatgttggaaatggtagtgggggctctagggggaggtgggaatggttaatgggtccaaaaaatagaaataatgaataagatctactattttatgcacaacgtggtgactatagttaataattacttaattgtacagtttgaaataacttagagggtaattggattgtttgtaactcaaagaataaatgcttgagatgg

SEQ ID NO: 257418 - DNA, 665 bp, Homo sapiens
tatattcaacatagtaatggaaatcctagcaagagctattaagcataagaaagaaataaaaggcatccaaattgaaaaggaaatttaattgtctctgtttgtggacaacatgatcttatctacagtaaaccctaaagactccagtatgttgaagagatatccatattcctatgttcattgcagcattatttacaatagtcaatatataaatcaatgtaagtatccatcagtgaatgaatcaataaaaaaaaatgcggtatatataaacaatggaacactattcagctataaaaaagaaagaagtcctgtcatttgttacaacacagatgaactcagaggacattatgttaagtgaagtaagccaggcacagaaagacaaatactgtatgatttcatttacatgtgaaatcttaaaaagttcaactcatagaggtrgagggtagaattatgatcaccagagactggggtatgggaggttagggagatgttggtcaaaggatacaaaatttcagttagatgggagattcaagtgatctattgtacaacatgatgtctatagttaataacaatatattgtattttgaaaatcataagagggtagactttgttctcaccacaaaaataagtatgtgagataatgcatatggtaattagctggattgaat

SEQ ID NO: 257419 - DNA, 665 bp, Homo sapiens
tatattcaacatagtaatggaaatcctagcaagagctattaagcataagaaagaaataaaaggcatccaaattgaaaaggaaatttaattgtctctgtttgtggacaacatgatcttatctacagtaaaccctaaagactccagtatgttgaagagatatccatattcctatgttcattgcagcattatttacaatagtcaatatataaatcaatgtaagtatccatcagtgaatgaatcaataaaaaaaaatgcggtatatataaacaatggaacactattcagctataaaaaagaaagaagtcctgtcatttgttacaacacagatgaactcagaggacattatgttaagtgaagtaagccaggcacagaaagacaaatactgtatgatttcatttacatgtgaaatcttaaaaagttcaactcatagaggtagagggtagaattatratcaccagagactggggtatgggaggttagggagatgttggtcaaaggatacaaaatttcagttagatgggagattcaagtgatctattgtacaacatgatgtctatagttaataacaatatattgtattttgaaaatcataagagggtagactttgttctcaccacaaaaataagtatgtgagataatgcatatggtaattagctggattgaat

SEQ ID NO: 257420 - DNA, 500 bp, Homo sapiens
aatgggaagtccagaagtagtacaatacttagtgatcattaacattttttacaaaggagctgaagtaattcaatggagaaaaaaattgtcttttaagcaattagaaatttatatgtaaaactagtgatatcatttggatgttttgtaccctctaaatctcatattgaaatgtgatctccaatgttggaggtggggcctggtgggaggtgtctgggtcatgggggtggatccctcataaatggcttggtgctctcctcatgctaatagagtgagttcttgctctgctagttcacaggagaactagttgtttwaaaaagtttgggactactccctgcccttgctccctctcttgccatgtgacatgtctgcttcctgtttgccttccaccatgaatggagggtttctgaggccccaccagaagccaatgacagcactttgcttcttgtacagcttgcagaaccatgagccaaataaaactctttcctttaaaaattacgcag

SEQ ID NO: 257421 - DNA, 557 bp, Homo sapiens
gaactgtaatgatcccagatactgcagcactatcaaggctgcaaaatggaatcaaatggttccagctgtaggaagaacagagatacagaagctacaagccagataagacaatgtcttgataagacagtaatttgaggtactaagaaacagtatttaccttactttagtttgaggtactaagaaagatttttttaaaaaattttatttattcatcctaccaggcctataaaatgagacactgctagacaaagaggtggtggtatatgggcagactcaggagttaattgacgttccttgccaagatcatatcttcccttcccatttacacataaacaaaattctctgcttcctcatgccaggcactcttctactctatctcatcactttccagtctacttcctaatgctcactaaatttatcaatggcytccatgtacctaaaattaatggacaaacgtttcagtcatcatattacttcagttctgaacaatatttaaaactatgtgtcacagtcctcactgtccacttagcttttgtaagactcctggttttcttcct

SEQ ID NO: 257422 - DNA, 440 bp, Homo sapiens
caaagatataatcataaaactagtttaaaacttttattacaaataaatatttaaataaatataaatttagaaatatttttctactttcttatctcataaagttattgtatctaaatttttcaggtatatcttctatatcaaagtctccctcatcactaaggaaactaaatgaattcagtattttctaaagtaaatatttttcacttctgagttctgtgaaataatgaaacttcttcaattcatatttactgctgttcctggcaattttttccccagccacttagttttgttgttgttgtttacctattcatattataagtgtgttttcatattctccaaaagttaactacctmtattactcctttttaaagtaatcttttaaaaagtttgtttactaggatttccaacacttgccactgtgaggtcataccactgtgaat

SEQ ID NO: 257423 - DNA, 589 bp, Homo sapiens
tgttttaaatttacataacaagtcttacctttgtttaaggtagttttctggccatcttgtcttaaatgggtctttatgtaccttttttccttgggttgaataaatggtgataggatatttaggcctaaagtctcagctctgtgctkttcagatataaattttctacctttttttcacctaagagtcatcactttaaaagacaaattgttgcttaactaataattgcttaggacaaaaaaacaggtatttgtaagactgatagagtaaatagagaaaagaaaaactatttaaaagtccacaaaccagaattccttataaaagctaaaagatctgcttttgtctgagtgtctgtatgtctgcaagtctgtatgtgttatgtgcatgtgctgatactttgtaaaaaaaaaaggagttttaaaattgttggtaaaaaaaataagaatggcttcataattgtcagttaaatataatacggtaatttctgcctgggtgtactggtcagataggcttatgctatctctgttacatgtttcaaggtcacaaaactgctgcttccttaatatttttaatacttgtttaatttgacggt

SEQ ID NO: 257424 - DNA, 589 bp, Homo sapiens
tgttttaaatttacataacaagtcttacctttgtttaaggtagttttctggccatcttgtcttaaatgggtctttatgtaccttttttccttgggttgaataaatggtgataggatatttaggcctaaagtctcagctctgtgcttttcagatataaattttctacctttttttcacctaagagtcatcactttaaaagacaaattgttgcttaactaataattgcttaggacaaaaaaacaggtatttgkaagactgatagagtaaatagagaaaagaaaaactatttaaaagtccacaaaccagaattccttataaaagctaaaagatctgcttttgtctgagtgtctgtatgtctgcaagtctgtatgtgttatgtgcatgtgctgatactttgtaaaaaaaaaaggagttttaaaattgttggtaaaaaaaataagaatggcttcataattgtcagttaaatataatacggtaatttctgcctgggtgtactggtcagataggcttatgctatctctgttacatgtttcaaggtcacaaaactgctgcttccttaatatttttaatacttgtttaatttgacggt

SEQ ID NO: 257425 - DNA, 589 bp, Homo sapiens
tgttttaaatttacataacaagtcttacctttgtttaaggtagttttctggccatcttgtcttaaatgggtctttatgtaccttttttccttgggttgaataaatggtgataggatatttaggcctaaagtctcagctctgtgcttttcagatataaattttctacctttttttcacctaagagtcatcactttaaaagacaaattgttgcttaactaataattgcttaggacaaaaaaacaggtatttgtaagactgatagagtaaatagagaaaagaaaaactatttaaaagtccacaaaccagaattccttataaaagctaaaagatctgcttttgtctgagtgtctgtatgtctgcaagtctrtatgtgttatgtgcatgtgctgatactttgtaaaaaaaaaaggagttttaaaattgttggtaaaaaaaataagaatggcttcataattgtcagttaaatataatacggtaatttctgcctgggtgtactggtcagataggcttatgctatctctgttacatgtttcaaggtcacaaaactgctgcttccttaatatttttaatacttgtttaatttgacggt

SEQ ID NO: 257426 - DNA, 589 bp, Homo sapiens
tgttttaaatttacataacaagtcttacctttgtttaaggtagttttctggccatcttgtcttaaatgggtctttatgtaccttttttccttgggttgaataaatggtgataggatatttaggcctaaagtctcagctctgtgcttttcagatataaattttctacctttttttcacctaagagtcatcactttaaaagacaaattgttgcttaactaataattgcttaggacaaaaaaacaggtatttgtaagactgatagagtaaatagagaaaagaaaaactatttaaaagtccacaaaccagaattccttataaaagctaaaagatctgcttttgtctgagtgtctgtatgtctgcaagtctgtatgtgttatgtgcatgtgctgatactttgtaaaaaaaaaagkagttttaaaattgttggtaaaaaaaataagaatggcttcataattgtcagttaaatataatacggtaatttctgcctgggtgtactggtcagataggcttatgctatctctgttacatgtttcaaggtcacaaaactgctgcttccttaatatttttaatacttgtttaatttgacggt

SEQ ID NO: 257427 - DNA, 464 bp, Homo sapiens
gcggacaaatatcccagatccagtttcccacagtgattgctagctcggtacacactcttcctgacttcccatctcagttccccattcccctacctagaagtcctgagattacttcccacataaatcacttgcccttgaatatttctctcaggatctgcttctagggattcccaaactaagacacctttttgtctaccagctgctacacatgggaacccatgtgtgtctttccagctctgtctcctaccgcatgactcagaccccaataatycacttaaaagaataaagagttgcactgtttgagcttttactgtgtgtcagtctctgcatttacccccctaatctcatttcaatcccataaccaccctaacgaacaggttttatcattcttgtttataaatgaaaggcaccaagaggttgagcgaccttctcaaacctcacacggctaaaagaggttgattatt

SEQ ID NO: 257428 - DNA, 645 bp, Homo sapiens
gaagaatgggatggagaggagcatgaccatcartgaaccacaaagccttttagcatccatttgcgactgctgctgaacaaacaattgcaaacacaccagtcactagctggggcttggctctcctgggacagccttgaactccagcccagagccccatccccaaacaaaggatagaggaggtgctctcagcaaccccatctccatctctgccgctaaatccagacctcgaacgttgcagccctccaactgtgttctggtccttggcaaggaggagtcctcaatatctttagctcagtgagcagtggtcctgctaaggcggttccatgagaaatagagatgagttgctgggatctggtattttcataacaactgtttagatatcagctttcagaatcagactctgtggaatccacccatccttggaggaagacacagttcctctgcgttaaggtttatgcaacaggttccattcccctgaaacaaaggacaggaggcttgtagagcccttgatttggataagcagaagcaggctgtccctctggtgttccccttctgtccccattcattccatagcatgacagacccaaacgtctgatcaactaggcttggtgtgagggctaagagctatatggagtgcaaaaagcc

SEQ ID NO: 257429 - DNA, 645 bp, Homo sapiens
ttgcagggctgtggggtcccatcgcctgggcacctgacgccaacagcccatgcagaatggccccgtatgtgtgaggtttaagccatagtaaaaatgtgcttctttctatgcctgactgagactagcacaaatgtctttctggtgtggattttcttgcatggaacatttattgacagctgctccctggagtcatggtctcacttcctgtcatccttaggcagccstctgatgttggggtgagccatcattcccgtttcacacatgaggaaacagaggcccaccaggattgagtaacttgctcaaagccccccagctgttaggttcacagctcttctccactggaggaaactctacttttaaaggtgtctgggttctcccactttctatccttgcagcctgaataaaataaaggcgggacaaggacaatgaaagaggaacagggggacaagctgcccacacgtgtccacttgagatgctgtgagggtgtgcccacagcccctctctaggaacagtggagactaaggcccagacagacagacagacagacagacaaggcagctcggcctcactctggggtacgaggagagctctgtggttcagaagcgggagtgtagatggacttcaaataataatcacaaacacgca

SEQ ID NO: 257430 - DNA, 585 bp, Homo sapiens
gtgtgtgtctgccccttcctggctgtctgccctctcccagtcctttctgcagcctgagccatcacatcttcatgctctcttgtctcttcctactgccaatcckgtgtgctgagctcaaggaaactatgacttcaggggcagtgaggagaaggcattcctaaacatctcattggcatcagcagggagatggaaaggagaacagaggggacaagttatacacctgcaagggctaagaggccagagtcaaggagttaattctctactgccctgtccttttatgtttagaagacagagcacccttactctgcttctgcgagttgggctgtccctttgcttgatgagactctgctggctgtggctcatcctgggggcaagccctgaaattctctagtcctgaccctcttcatggattgatgtctcaattcactttagttaagagaggctgtgcatgggctctgattactgagacttcattcatcttcccaaatgactagaaagtatcatcataaataattcaaactaaactacacctagagagagaaagcacaacccagtgaggccatggacctgattgtcaaccacggc

SEQ ID NO: 257431 - DNA, 544 bp, Homo sapiens
catttgtgttgctaacttttccaaatattatcttacttgaaactttgaaaaaaaaaagtaatgaattgaactacgttcaggcagtttaaaccttccttgttggatggaaatagttcattgtttgaggaaatgtttgacgatctgctccaagccctagggttcagaaaatccccagtctgttaggagcccagctgggcctgatttgcaggggctgctaactgtwcaagtttcctacaaaaggccaagttgctcaaggcatctccttgggtgtgttttcaagcgcccactcctactatttcagagcctaagattactctggggaggaggagaaaggattctttttagaatccagatcttttcgactttcctggataagaatgttatataaggaattttaacatgaagatgcagaattcacttgctaattaaaacaaaatcagacgcctctctaggcttgtttttgcatctgttagaatggccccaggtgagaaggggctcagaacattgaatcgtggaactttctctaatcaaattgggtaattta

SEQ ID NO: 257432 - DNA, 570 bp, Homo sapiens
cttagaagggcttatgcaatgaggataatttggaaaggaagttggatttcagggcaaatgaagacggactttggtttattttcattacgggtgrgtaaagggactcctagtttgaggacacggttttcctcttgtttttgaagttgtgttgggaaggcgtcagcacagcaagatgtagggtagactccggcattgaaaagctgcccatgcaatgggatctcagcacgtagctctacacagagtcccagagtggatgccaagagcaacatgatttctaaatctgctggctggcttccatgacatacagtgctccactccactgtggcagggtggggtggtgggatatggctctttgccaaggctcgggtaaggggactggcatgaaaggggttaacatggtgaattagcatccacctgcctggtctcagagatggatgtgaccaaatggttcaagagaggctgggtaccagttccaaaacagaaacttgaatttcaagatatactcccagctggggtttccatgtttggcgatgttgggtgggggtgggtagggaggcatgatacgaggtt

SEQ ID NO: 257433 - DNA, 570 bp, Homo sapiens
cttagaagggcttatgcaatgaggataatttggaaaggaagttggatttcagggcaaatgaagacggactttggtttattttcattacgggtgagtaaagggactcctagtttgaggacacggttttcytcttgtttttgaagttgtgttgggaaggcgtcagcacagcaagatgtagggtagactccggcattgaaaagctgcccatgcaatgggatctcagcacgtagctctacacagagtcccagagtggatgccaagagcaacatgatttctaaatctgctggctggcttccatgacatacagtgctccactccactgtggcagggtggggtggtgggatatggctctttgccaaggctcgggtaaggggactggcatgaaaggggttaacatggtgaattagcatccacctgcctggtctcagagatggatgtgaccaaatggttcaagagaggctgggtaccagttccaaaacagaaacttgaatttcaagatatactcccagctggggtttccatgtttggcgatgttgggtgggggtgggtagggaggcatgatacgaggtt

SEQ ID NO: 257434 - DNA, 625 bp, Homo sapiens
cctctttcgtgtcttggtgctggctgctgtctttggccaggtaagctcatggtctgggctcctggggtccactcactgggcctccacactgcctgcaggtaggggagcctttgggccaggactatccttggctccccttccaggtggtgggttcaaagaccattcctgggttccaccaccrccaagcctcaatggtgtctcgatggtcacaggaactgctggggctttctaggttaagacccttgcctatcccggtgttcctccctgcagtagggggctgcaggggtcagcctcagtctctgccttgggagcctgccttaccttgcctgaactcaagcgatctgcctgccttggactcccaaagtgctgcaattataggcgtgagccactgcacccagcccagccttgactttgaaatatatgttgtacatccagacagcagtgaactctgggggaacaccaaagatgaggagaatgagagaagagatacctccaattaaaggagttaggaagagatgcttgaacttatgttttaaaaagtcaatgcaggttgggcacagtggctcgcacctgtacacacagcaccttgggaggctgaagtgggtgaacggctggagcctagaag

SEQ ID NO: 257435 - DNA, 554 bp, Homo sapiens
cctggccttgaatcatttttatgtgcttattggccatttttattcttgtgggaagtgcctgtttctccattgcctattttctggccaagctcccaagtcacatttcacttaatttttatcctgctgattgaaagcattttaacataaacaggagcaggacagactgtaattatctagatcttgctctgtcacccaggctggagtgcagtggcatgatcatagctaccacagcgtcgtactcctgagctgaagcagttttcatacatcagccttccaagtagctaggactacaggtgtgtgccaccacccccagctaatttttaagattttttgtagagatgygaattcactatgctgcccaggctggtcttgaactcctgacttaaagtgatcctcccaccttggcttgccaaagtgttgggattacaggtgtgaactactgctcctggccgagggctcattttgtttgctagtggtgatattggtatctgtttatatttgaggctttggtgctagtgctgatgtattacactcaccatccgaggtttgcagga

SEQ ID NO: 257436 - DNA, 554 bp, Homo sapiens
cctggccttgaatcatttttatgtgcttattggccatttttattcttgtgggaagtgcctgtttctccattgcctattttctggccaagctcccaagtcacatttcacttaatttttatcctgctgattgaaagcattttaacataaacaggagcaggacagactgtaattatctagatcttgctctgtcacccaggctggagtgcagtggcatgatcatagctaccacagcgtcgtactcctgagctgaagcagttttcatacatcagccttccaagtagctaggactacaggtgtgtgccaccacccccagctaatttttaagattttttgtagagatgcgaattcactatgctgcccaggctggtcttgaactcctgacttaaagtgatcctcccaccttggcttgccaaagtgttgggattacaggtgtgaactactgctcctggccgagggctcattttgtttgctagtggtgatattggtatctgtttatatttgaggctttggtgctagtgctgawgtattacactcaccatccgaggtttgcagga

SEQ ID NO: 257437 - DNA, 620 bp, Homo sapiens
ccaaaacacacatggctatacaygtgtatgaaggaacagaaaagatgtgagatctttccttcaccatcataaggctcacagctgacacttctataacaaaagacaggttaacaagagaaaaacataacagatttgtttaatcaaagttttatgtgacatgagagacttcagaaatgaaaattccaaaatactgggaaaaacgatctatttttatgcttcggtttgatgaagctgggacagccatgtagaaataggattgtacagaaagggtatgatctcatgctaatagacttagtggggaaacccagcaaggcctgtctgtccagattcttgctgggcctctctgtgcagcatcgcctctcccaggtataggataggaccctttctggaataggggtcttatgactcccaaacaagttgtgtcagagaatttctttatggccagctgttacaccaaaaggtgtggggggaaggtaagagtaatagttttaggttttatgactggctttggggtaagggggttttggtttcttcaatgacccatctgggggaagagggcttttagtttctatggctggcctcaggagagaatgaggggcaagagacaggagggcagggga

SEQ ID NO: 257438 - DNA, 596 bp, Homo sapiens
atcttgtaaaacaatcaagaccataacattcacataccttctatttggtcagtgcagagacacagatctttgttccgaaatttgcatttaaatgsaaagcttcagagcctgaaaacatctaaaattatacccaggactgacaactggcctagactcaatgtctttggaatttgctctactaaatttgctaccgtttgaatgtgttccctccaaaactcagctgtttctaatgtgaatatgatgcaaaaagtgaaaaccttatacatctttacagcagcctagaagtaaagatgaagcaatcctttttttttttttttttttttttaagaatctacagttactacaactaactgaaaaagtgggaaatctggagaccaacacatagaagaagaaaaatggcagtcaaagactcactctccaaattggacatttatttaaaccagggtttctcagcctcagcgatgtgtatatactgggccagacaatttgtggagggttctcctgtgtgttgtaggacgtttagtaacaccccctctacccaagagatgccaatagcacctcccatcatgaccagttgtgacaaccgaaaatgtctc

SEQ ID NO: 257439 - DNA, 634 bp, Homo sapiens
aaggcaattaaaccaagtcattcagatttctaggatggcctttgtacactaggtggcagaggcttctaagaatatctctcttatataaagtaccagaggtttgtttagctttgcaagctcaagcaaaacattcatgaaaatgttcttcttcagcagtggactaagattctcctttttacaaataagtggaaaaatttaaacagcatgttttgttctgtgtgaaccttcaacaatgcaatactttttttttttwaattttttggagaccaagtcttgtctctgtcacccagactggagtgcagtggtgtgatctcagctcactgcaacctccacctcctggattcaagcaattcttgtgcctcagcttcccgagtggctgggactacaggcgcccgccaccacgcccggctaattttttgtgttttagtagagactgggtttcaccatgttgcccaggctggtctcgaactcctgagctcagacaatccacccgcttcggcctcccaaagtggtaggattacagtcatgagccaccacacctggccaaatgcagtatattttttgtttagtgaatttattttttcatagaatagcagaatagggttttgatagtgttaatttttaatttaattca

SEQ ID NO: 257440 - DNA, 540 bp, Homo sapiens
aagacttggctagtaagttgtgagaatcaacagattttactttttttgatatgatatagatgcaggcagaaatatctaaataggtttataatcacgccaaatctttttttttcaattatcataaattrccacaaaaattttgttccatgtgaaaagattacctaatgaatgaataagtaacttggaactttaaataaagaaaatggacagacactcattcacacacgtacatagaggaggcacattgcagtaaaagaatttcttttctagattaatggttgtaaatgaccccaatcaaatattaattaataaggcaacaacgtcctttgaaaaataatttgagaaatgacaacaattttgtttctgctactaatttttacctctggttgctaaatgatctaacaactacccattgttctctctgtgttttttttttctagtgtaaatttggtagacttaattacaggtgataatagtagcatttttgaggaatgacaatctgttgtgcattttcatgcataattataaaagcactcttga

SEQ ID NO: 257441 - DNA, 540 bp, Homo sapiens
aagacttggctagtaagttgtgagaatcaacagattttactttttttgatatgatatagatgcaggcagaaatatctaaataggtttataatcacgccaaatctttttttttcaattatcataaattaccacaaaaattttgttccatgtgaaaagattacctaatgaatgaataagtaacttggaactttaaataaagaaaatggacagacactcattcacacacgtacatagaggaggcacattgcagtaaaagaatttcttttctagattaatggttgtaaatgaccccaatcaaatattarttaataaggcaacaacgtcctttgaaaaataatttgagaaatgacaacaattttgtttctgctactaatttttacctctggttgctaaatgatctaacaactacccattgttctctctgtgttttttttttctagtgtaaatttggtagacttaattacaggtgataatagtagcatttttgaggaatgacaatctgttgtgcattttcatgcataattataaaagcactcttga

SEQ ID NO: 257442 - DNA, 637 bp, Homo sapiens
ggcgcagctctgctccagggcaaagagctcgtccttgcccaccttggtggccttgcccgccttgagcgtgccgctgggccccgacggcgccaggtaacggccctcgcagtcgcggaaggccacmttgccggagcggaactgcagcgtgtagccagtggccggctcggggcgcgccaccaggcgcctgtcatggcgcaggaagcggtggtccgcggtctgcacgctgtagcgctgctcctggaaggcgagggtgacgagcgagtcgacgccccagggcacgtcgcggtccactgcgatctcgtcggccggcggcgcgctcaggtgcgcctagcgcttaggggtgacgcggtagatgttgacctgagggtgcatggcgatgtgcacgctccacttctcggcgggggacaccgtctgcgcgaagcacgacaggcggtcctccgtgccgccgaaggagcgccggtgcgcctcggactgcagcgaccagcggccgtcgtcgtgcgccacggtgaggaagcggcagtcgggaccgggcacctcgcgctcgcaggtcacattgccgtccttgtccgccgccaggtagcggcccaggtggctgcgcaggcacacggccgcgctgcccgcctagtcagggggctgc

SEQ ID NO: 257443 - DNA, 641 bp, Homo sapiens
aagtttttttcacttcctttttaaacttttattttaggttcgggggtacaagtgcaggtttgttacataggtaaacttttgtcatgggggtttgtggtacagattatttcatcatccacgtattgagcctagcacccattagttattttccctgatgatctcccatctctctgcctcctctctctgaaagtccccagtgtgtgtcgttcccctctgtgtgtccatgtgagttctcatcatttagctcccacttacaagtgagaacatgtggtgtttttctcttcctatrttagtttgctaaggataatagcctccagctccatccatgtccctgcaaaagacatggtctctgttcttttttatggctgcatagtattccatggcatatatgtaccacattttcttgatccagtgtgtcactgattgccattttggttggttccatgtctttgctattgtgaattgtgctgcagtgtacatatgcatgcatgtgtctttataacagaatgatttatattcctttaagtatatacccagtaatgggattgcagggtccaatgctatttctgtctttaggcttttgaggaattgccacactgtcttccacaatggatgaactaacttacactcccactaacagt

SEQ ID NO: 257444 - DNA, 595 bp, Homo sapiens
tgtaatccctcaccatctttcctctagattcttgcggtggtctactagtgttatagatgaactaacctccctaaagagtctcagtgtgtctgccctcacaacccttcaaatctctgtcaacacaatatccagagtgggcccattgaagcctaaaaaatgtgcatgtctcctctcctcagaaccttccagagcctactattgcacaagaatgtgtttgtgtagtgtttgtatggcatgtgtatatgtgtgtgtgagagagaatgtgtatttgtggaggtaatcctaggaatcaacaacactggagtggaaaactatggcagggaagaaaggaagccawtaaagttttgttatcaagcagcatactgctgtgggcaccaggtgcctaggctcagtaggaaactcagaagggtagggtgaatatgacccagaggagttccaaccaaggttctaagaagctgagaatttggtccacactatctggcagttattggttgatggctgctttggggaaggatgtggaaggaatgcattactttctaacatgtccaatctactttatctttaagcctggcaaactgtagcagccaaagagagc

SEQ ID NO: 257445 - DNA, 595 bp, Homo sapiens
tgtaatccctcaccatctttcctctagattcttgcggtggtctactagtgttatagatgaactaacctccctaaagagtctcagtgtgtctgccctcacaacccttcaaatctctgtcaacacaatatccagagtgggcccattgaagcctaaaaaatgtgcatgtctcctctcctcagaaccttccagagcctactattgcacaagaatgtgtttgtgtagtgtttgtatggcatgtgtatatgtgtgtgtgagagagaatgtgtatttgtggaggtaatcctaggaatcaacaacactggagtggaaaactatggcagggaagaaaggaagccattaaagttttgttatcaagcagcatactgctgtgggcaccaggtgcctaggctcagtaggaaactcagaagggtagggtgaatatgacccagaggagttccaaccaaggttctaagaagctgagaatttggyccacactatctggcagttattggttgatggctgctttggggaaggatgtggaaggaatgcattactttctaacatgtccaatctactttatctttaagcctggcaaactgtagcagccaaagagagc

SEQ ID NO: 257446 - DNA, 538 bp, Homo sapiens
gttttcctgagttgccagataaagtccttattcaaaaactgtttgacttccatgaacccaaaataattccacttgataaagtatattttattagtatttaccatcaccttaaggaaaggcatatgtaggagattgcctagtgctgatattggaggaccatatatcagaaaaayatatattaaattacacttgatcatttctatatttctaacttgagagaatatttctgtcagtcagtgattcaggatcctgtatttaattagctgttaaacatttattacaatttttgattttgtcattttttattaaaatagttttaacaaacatgattcattgaaaataatattctcatcccacgttaaagatagttttctacttttattttttctactcaactctttttaccttatattcatcaaagaaaagtagaagtaaacgtatccccccaaaattcatttctacttgggctctgtgaatttgactttatttgaaaataagatattttcaaagataatgaagttaagatgaatttacactg

SEQ ID NO: 257447 - DNA, 543 bp, Homo sapiens
ttcatgggggaatggaagcatgtatccatgagtctctaaagtattaaatagcacaatcattgcatttggagggaaatcatgaaataaaattcaaagcaacataattggcagtagccagatttaaattttgtgaagaaaaatctagggcggggcaaagtggctcacacttgtaatcccagcattttgggaggctgaggcragcggatcgcgtgagcccaggagttcgagaccagcctgggcaatatagcaaggcgccatctctacaaacaacacacagattagccaggcatggtggtgtgtgcctgtgccaggcatggtggtgtgcacctgtggtcccaggcactggggaggctgcagtgtgagcatcgcttgaccccaggaggtcgaggctgcagtcagcactgatcactccactgccctctagcctgggagaaaaagcaagaacctgtcttaaaaaaaaaaaagaaaaaaaaattaagccaaacaccacaagatatttcctcagaaacctctgtacatgatcacagcccatgggagtggcac

SEQ ID NO: 257448 - DNA, 543 bp, Homo sapiens
ttcatgggggaatggaagcatgtatccatgagtctctaaagtattaaatagcacaatcattgcatttggagggaaatcatgaaataaaattcaaagcaacataattggcagtagccagatttaaattttgtgaagaaaaatctagggcggggcaaagtggctcacacttgtaatcccagcattttgggaggctgaggcaagcggatcgcrtgagcccaggagttcgagaccagcctgggcaatatagcaaggcgccatctctacaaacaacacacagattagccaggcatggtggtgtgtgcctgtgccaggcatggtggtgtgcacctgtggtcccaggcactggggaggctgcagtgtgagcatcgcttgaccccaggaggtcgaggctgcagtcagcactgatcactccactgccctctagcctgggagaaaaagcaagaacctgtcttaaaaaaaaaaaagaaaaaaaaattaagccaaacaccacaagatatttcctcagaaacctctgtacatgatcacagcccatgggagtggcac

SEQ ID NO: 257449 - DNA, 594 bp, Homo sapiens
cacattgacaattttctgaaaacagtaaaagcgaaaaacaaaaatcaagcttcactttccaatgctcagaatgcaatttcatcccaaacatctctgtggcttttctcctccctgccctcttgcattctcatgcacatgtattctatgtctatattggtattgacrtgactatcaatgcaaacatagacataggtattactaaaggtacagatgtaggtttagatttagagtatatagatatacatatatctggttatatttctgttacattttgcaatctaaatatctgtggtcatattagcaagccaagtttcttaaaatctagtagaaatatatcaaccaagaagaacagccaccaggccagtacccccagtttcttacgggctgcctggttcgtctttacctttcgcaggtcatttgagaggtaaaacaggatcagtaacgtcccgtcttattttccacccaaagaacctgtaagaaaagcaggccctgaggctggcaaacatttaggtattctgactcacaaagtagaaatgcagcccaaggtcaagcccaggtggaaaaatccatatcagtaaatgcaaacgctgagcc

SEQ ID NO: 257450 - DNA, 596 bp, Homo sapiens
aggagctccactgggtggtgtttctaatgcaaatgaatgggggaacaaaatagcttaaaaaatctcttttctttctttcctttccttccttttctttacttccttcttttctttctccccttctctttccctccctcccttttctcctctcctgtctcccctcctttcccctcccctccgctcccctcctcttccctcctctctcctcttttcttcttctctttgcttcttctctcttctgttctttttctttttcctctttcttttctttctttcattcaagacagaatctcactctgtcacctaggctggagtgcagtggtgtgatctcaactcamtgcagccttgacctcctgagctcaagtgatcctcccacctcagcctcctgagtagctagaagcataggcatgcatcactcgcctggatagcttttacatttttagtagagatgagggctctcactctgttgcccaggctggtcttgaactcctgggctcaagtgatcctcccgctttggcctctcaaagtgctgggattacaggcgtgagccgccgcacctggcccctgttaacttgagtgttggttgaaatgtttct

SEQ ID NO: 257451 - DNA, 596 bp, Homo sapiens
aggagctccactgggtggtgtttctaatgcaaatgaatgggggaacaaaatagcttaaaaaatctcttttctttctttcctttccttccttttctttacttccttcttttctttctccccttctctttccctccctcccttttctcctctcctgtctcccctcctttcccctcccctccgctcccctcctcttccctcctctctcctcttttcttcttctctttgcttcttctctcttctgttctttttctttttcctctttcttttctttctttcattcaagacagaatctcactctgtcacctaggctggagtgcagtggtgtgatctcaactcaatgcagccttgacctcctgagctcaagtgatcctcccacctcagcctcctgagtagctagaagcataggcatgcaycactcgcctggatagcttttacatttttagtagagatgagggctctcactctgttgcccaggctggtcttgaactcctgggctcaagtgatcctcccgctttggcctctcaaagtgctgggattacaggcgtgagccgccgcacctggcccctgttaacttgagtgttggttgaaatgtttct

SEQ ID NO: 257452 - DNA, 604 bp, Homo sapiens
tccctttttgctttggacactaggttgcattttcctggctgggagatagcttgtggaagtcccacctttcaaagcatgttttggtgggttttctttgcccatttttctcagcaactagatcagctgttcccaaaaatgtaagcaaaaatgaaccatgcttacccccccgccaccacttgtttgaattttagtttttgattctgagacttctgaaacatttcccagcacaagctgatagagtgggacaaaaagtaactgtygaaacaaacgcaaagggcactgcaggctctctcatcatctcagtttacacagaacaagatactgctgtttaaatacttagctaaactttactccttttaaggctccaagccaaaccttatttttcccttttcaaacaaatggatttacacctaggtgaggaatgagaggaaaggtgtttcctttggttgtgttaggaggaaaggaggtatcttcatgttgttgcttccatatttccatggtaggacttctcttttagacatttgaatagaaattcagtagccagattggcttcaatcattcaccatctgtgtccttaggaagaagtggataattagactgtggt

SEQ ID NO: 257453 - DNA, 375 bp, Homo sapiens
tttgaggttcagcataagagtttctctacgcatagtgggctgtaayccaatttgatgagtaaacagactgcaacctgctcttgtaacaaggagctgagtgccagccaatcacagaagtgaacttcagccaaccacaggcagccaactgttccacccaggtttagagaaggcgggtgccctgccagccagtcacagaagtgaatgtcagccaaccacaggcagcctattgttccacccaggttcagagaagttgggcacccaactgcaaccagtcctgctgttcctgcatcccatttttgttttctgtgtgtcactttcctttttctgtctataaatgttaactgaccaggtggcatccctggagtcactttcctt

SEQ ID NO: 257454 - DNA, 375 bp, Homo sapiens
tttgaggttcagcataagagtttctctacgcatagtgggctgtaacccaatttgatgagtaaacagactgcaacctgctcttgtaacaaggagctgagtgccagccaatcacagaagtgaacttcagccaaccacaggcagccaactgttccacccaggtttagagaaggcgggtgccctgccagccagtcacagaagtgaaygtcagccaaccacaggcagcctattgttccacccaggttcagagaagttgggcacccaactgcaaccagtcctgctgttcctgcatcccatttttgttttctgtgtgtcactttcctttttctgtctataaatgttaactgaccaggtggcatccctggagtcactttcctt

SEQ ID NO: 257455 - DNA, 538 bp, Homo sapiens
ttgtttgaaatcctgtaggcaagaaacactggatattaaatcgaaggatctgyttttaacctattatgtgggtatcttattgtcacaacaccaaataaagttgaatccacagctacaaaagaaattccaaaaatattcaaatatgtcgatgacttctacatgcattctgttctcacaacctactgtcctgtggtcctgagagcatgccggccaaaatggtgttgtagcattttcttttcaggaatgcagtggcctgtggggtctgctgcacatgactggcttgagctttgggacccagcttgctctggcacattgacagtagactctgaagttagttgtggtttaatttcttcttctccctggatataaatttatgaataaactggaactccccacttggagagagggagcagcactctaagggtatctatcatgcatacagagaacttcccaggcattcaactcgacatcagcagataaccgtacagatgcagatacctcttggaaacagtcaaaagactacatttttttaacagaa

SEQ ID NO: 257456 - DNA, 562 bp, Homo sapiens
agagtttgaaaaacattgtatgattttttaaaattttccttctgtctgtggttattagacctaattcctcccaacctcttttttcttcttgattaggccagctagttatttatctcattcattggggttatcatagagccaattactgattttgtgtatcagttttactgyagtttttcttatttattgttactctttaaaattcaaatttaagggttttattatatttttgttactggttgaattgaatatttttaattattgtagcaagtaattgaattttattttagctttcttgtgtaccataaattttgacactggtactttgaagagagtttgcagtttcactttgatttcttctttgtttcaggagttgttacagagagtttagaattttccaaatggctgaacttctatgagtgttgtttttgtttttgcttgttaatttttagtgtcatggtactgtattatggagctcctgggacctgtactgttttgaatttatggaacttttagagccttccttgtggttaatatggaggcatttgatgttctattgcca

SEQ ID NO: 257457 - DNA, 608 bp, Homo sapiens
ggagtttcatcttgctggctggcaatgatgcctgtgtcagtgcagaccactttgggaacctggacttcccctcctgccatgcactgaattgtatcctccaaaattcatatgctgaagccttaacccacaacatgattgtgtttggagamaggctctacaaggagataattatgttaagtgtggtcataagggtgggaccctggtcctacaggattagtgtccttataaaaaagaggaagagagagatgaaagtccatgtgaagacacaacaagaaggctgctgtctgcaagccataaagagagccctcaccagacatgggctctgctggcaccttaatcttcaacttctggcctccagaactatgagaaaattactgtctgtggtttaagatgcccagtctttggcagtctgagtggtaaggaggctccttgctgcccctctggtttggggtcagagtgctggtgtcattcaaggctgtgaacggagcagatgcccggctttccagacccttctggacaggaaagtatcagcagaggcttgtgggaaggcagaaaccacctccaccacagtaatgaccagccccaccctgggtgtcagtggagtgcag

SEQ ID NO: 257458 - DNA, 608 bp, Homo sapiens
ggagtttcatcttgctggctggcaatgatgcctgtgtcagtgcagaccactttgggaacctggacttcccctcctgccatgcactgaattgtatcctccaaaattcatatgctgaagccttaacccacaacatgattgtgtttggagaaaggctctacaaggagataattatgttaartgtggtcataagggtgggaccctggtcctacaggattagtgtccttataaaaaagaggaagagagagatgaaagtccatgtgaagacacaacaagaaggctgctgtctgcaagccataaagagagccctcaccagacatgggctctgctggcaccttaatcttcaacttctggcctccagaactatgagaaaattactgtctgtggtttaagatgcccagtctttggcagtctgagtggtaaggaggctccttgctgcccctctggtttggggtcagagtgctggtgtcattcaaggctgtgaacggagcagatgcccggctttccagacccttctggacaggaaagtatcagcagaggcttgtgggaaggcagaaaccacctccaccacagtaatgaccagccccaccctgggtgtcagtggagtgcag

SEQ ID NO: 257459 - DNA, 608 bp, Homo sapiens
ggagtttcatcttgctggctggcaatgatgcctgtgtcagtgcagaccactttgggaacctggacttcccctcctgccatgcactgaattgtatcctccaaaattcatatgctgaagccttaacccacaacatgattgtgtttggagaaaggctctacaaggagataattatgttaagtgtggtcataagggtgggaccctggtcctacaggattagtgtccttataaaaaagaggaagagagagatgaaagtccatgtgaagacacaacaagaaggctgctgtctgcaagccataaagagagccctcaccagacatgggctctgctggcaccttaatcttcaacttctggcctccagaactatgagaaaattactgtctgtggtttaagatgcccagtctttggcagtctgagtggtaaggaggcyccttgctgcccctctggtttggggtcagagtgctggtgtcattcaaggctgtgaacggagcagatgcccggctttccagacccttctggacaggaaagtatcagcagaggcttgtgggaaggcagaaaccacctccaccacagtaatgaccagccccaccctgggtgtcagtggagtgcag

SEQ ID NO: 257460 - DNA, 608 bp, Homo sapiens
ggagtttcatcttgctggctggcaatgatgcctgtgtcagtgcagaccactttgggaacctggacttcccctcctgccatgcactgaattgtatcctccaaaattcatatgctgaagccttaacccacaacatgattgtgtttggagaaaggctctacaaggagataattatgttaagtgtggtcataagggtgggaccctggtcctacaggattagtgtccttataaaaaagaggaagagagagatgaaagtccatgtgaagacacaacaagaaggctgctgtctgcaagccataaagagagccctcaccagacatgggctctgctggcaccttaatcttcaacttctggcctccagaactatgagaaaattactgtctgtggtttaagatgcccagtctttggcagtctgagtggtaaggaggctccttgctgcccctctggtttggggtcagagtgctggtgtcattcaaggctgtgaacggagcagatgcccggctttccagmcccttctggacaggaaagtatcagcagaggcttgtgggaaggcagaaaccacctccaccacagtaatgaccagccccaccctgggtgtcagtggagtgcag

SEQ ID NO: 257461 - DNA, 569 bp, Homo sapiens
gtcatacttgagaattacagcatggggtcattgtataaccaaaaatctaaaagaaattaaaaataaagcaaaattgataacaacttcacaatgatcaaaaaggtacataatatttcatatttcatacaatgaattgttatttattgtggactccactgtaagagtgtcttaattctcacaagcttaaaagcagtatggtgtcttgtaatgttggggaagtgaattcacacttggaggtagctktatctcacagtcaaactgtggatttcagttaaggaacttgagttagaattcttttccacgcctctttgttattatcattttttatacatttccaagtttcattttctctttggcctatagagataccataatattttttatcttattccaggaaattcttaaaaggaggattctttatgagcataaaagttctcatatgttactgtccaaacaggcaaatagttagactctattgtaaagaaaacaaaaaaacctgtaagacacaactaagtcaaaaggaaactagccactcactcttgacctgtaatagataattgacacgtgat

SEQ ID NO: 257462 - DNA, 599 bp, Homo sapiens
ctgggagacctgaagacagaccacatcacaggactctttgcagacattctgcagtaccagcccagagcctggtaccccactgggtggctagacccagaagagcaatagcaatcacagcagtccagctctccagaagcccccattcctaggggaaggaggagagcaccacatcaagggatcaccctgtgagacaaaaggatctgaacagaagtccttgaattccagatctttctactgaaatagtctacccaaacaagaagaaacaaaaaaaaagtaattctagtaatatgacaaaacaaggtcctataacaccccgaaaagatctcactagctgctccctagcaatggatccaaaccaaggagaaatctctgaattgccaaataaataattcaaaaggttgattattaagctactccaggaggtaccagagaaaagttaaacccaacttgaagaaatttaaaaaaaaaatgcagggtatggatgaaaaactttccagagaaattgatatcataaagaaaaaaacaatcacaacttttagaaatggaagacacacttagagaaatacaaaatagayggcaaagtttcaacaatagaacaa

SEQ ID NO: 257463 - DNA, 477 bp, Homo sapiens
aattaaaaaattgccaacataaaaatgtccagaaccrgatagattcacagctgaattctatcagacattcaaagaattggtaccaatcctacagaaactattccaaaagatagagaaagagggaatcttccctaaataattctctgaagccagtatcttcttgttaccaaaaccaggaaaggacataccaccaacaaaaaaaactacagaccaatatctctgatgaaccaagatgcaataatcttcaacaaaatactagctagccaaatccaacagcatatcaaaaagataatacatcatgatcaagtgggtttcataccagggatgcagggatactttaacacacacgaagtcaataaatgtgagacatcacataaactgaattaaatacaaaattcttatgattatcccaagagacacagtaaaagcatttgagaaaatccagcatccctttatgattaaaacactcaacaaaat

SEQ ID NO: 257464 - DNA, 477 bp, Homo sapiens
aattaaaaaattgccaacataaaaatgtccagaaccggatagattcacagctgaattctatcagacattcaaagaattggtaccaatcctacagaaactattccaaaagatagagaaagagggaatcttccctaaataattctmtgaagccagtatcttcttgttaccaaaaccaggaaaggacataccaccaacaaaaaaaactacagaccaatatctctgatgaaccaagatgcaataatcttcaacaaaatactagctagccaaatccaacagcatatcaaaaagataatacatcatgatcaagtgggtttcataccagggatgcagggatactttaacacacacgaagtcaataaatgtgagacatcacataaactgaattaaatacaaaattcttatgattatcccaagagacacagtaaaagcatttgagaaaatccagcatccctttatgattaaaacactcaacaaaat

SEQ ID NO: 257465 - DNA, 477 bp, Homo sapiens
aattaaaaaattgccaacataaaaatgtccagaaccggatagattcacagctgaattctatcagacattcaaagaattggtaccaatcctacagaaactattccaaaagatagagaaagagggaatcttccctaaataattctctgaagccagtatcwtcttgttaccaaaaccaggaaaggacataccaccaacaaaaaaaactacagaccaatatctctgatgaaccaagatgcaataatcttcaacaaaatactagctagccaaatccaacagcatatcaaaaagataatacatcatgatcaagtgggtttcataccagggatgcagggatactttaacacacacgaagtcaataaatgtgagacatcacataaactgaattaaatacaaaattcttatgattatcccaagagacacagtaaaagcatttgagaaaatccagcatccctttatgattaaaacactcaacaaaat

SEQ ID NO: 257466 - DNA, 449 bp, Homo sapiens
gccactcacaatatttatactagacgttgccaggggaagagaagagagtccaaaaatatgtccaaatgctgccctgtgaaggttgctatttattttcacaaacctcagggctgcattcagtttcccgtctacctgtgtaggcagccatttcttcagtgtattccctatgttctaattggctcgctgtacagattcttggctctgtgcttaggaattgtcattgacttttaacccacctcacctgctgagcagctttctgtgtttycattagtatttcaggcaccgaatctcatttttaaagttattatcaggattttaattggtggttctcactattcacccttaagtttagtaatatttaaatttttattttgttgcatttaataaaagaatcataaagaaagaaaaataattagggagagaaaataatttctttagagggaaaatgg

SEQ ID NO: 257467 - DNA, 585 bp, Homo sapiens
tattttaatcagacaccagctgagtgggagaaagraaaagaacagagaagaacaaacaaaactcccttggtcttggatgtaagagaatccagcagagatggactggagtttcttcagagtagttgcaatgctgttcatttttctggtgagtggattctggtaaaagtccttcataatcgtgcccattgtaaacaagtgaaaactttttagaaaatgttagtgggcattatttctaacctaaacccattgaaaatgtatattaatgacaagatgattttatgaactagatttttcaatagcatttctctctttaattgaagactcaagatcatgttaatgcctcagtgtcaactcattgtattacatctctgacactgaagtcattgctaagtcatgctgggaaaagactgaatttaggaaattcctatcgctagttagtagcactttgtcgttcaaaatctcttctgcaagagggcttttaaactaaatatcacaagtgtgtctggatttttaacctgtttttttttttattttttttgtgtgtttggtggtggaattactctaatttttaaaacataaaaatag

SEQ ID NO: 257468 - DNA, 585 bp, Homo sapiens
tattttaatcagacaccagctgagtgggagaaagaaaaagaacagagaagaacaaacaaaactcccttggtcttggatgtaagagaatccagcagagatggactggagtttcttcagagtagttgcartgctgttcatttttctggtgagtggattctggtaaaagtccttcataatcgtgcccattgtaaacaagtgaaaactttttagaaaatgttagtgggcattatttctaacctaaacccattgaaaatgtatattaatgacaagatgattttatgaactagatttttcaatagcatttctctctttaattgaagactcaagatcatgttaatgcctcagtgtcaactcattgtattacatctctgacactgaagtcattgctaagtcatgctgggaaaagactgaatttaggaaattcctatcgctagttagtagcactttgtcgttcaaaatctcttctgcaagagggcttttaaactaaatatcacaagtgtgtctggatttttaacctgtttttttttttattttttttgtgtgtttggtggtggaattactctaatttttaaaacataaaaatag

SEQ ID NO: 257469 - DNA, 585 bp, Homo sapiens
tattttaatcagacaccagctgagtgggagaaagaaaaagaacagagaagaacaaacaaaactcccttggtcttggatgtaagagaatccagcagagatggactggagtttcttcagagtagttgcaatgctgttcatttttctggtgagtggattctggtaaaagtccttcataatcgtgcccattgtaaacaagtgaaaactttttagaaaatgttagtgggcattatttctaacctaaacccattgaaaatgtatattaatgacaagatgattttatgaactagatttttcaatagcatttctctctttaattgaagactcaagatcatgttaatgcctcagtgtcaactcattgtattacatctctgacactgaagtcattgctaagtcatgctggraaaagactgaatttaggaaattcctatcgctagttagtagcactttgtcgttcaaaatctcttctgcaagagggcttttaaactaaatatcacaagtgtgtctggatttttaacctgtttttttttttattttttttgtgtgtttggtggtggaattactctaatttttaaaacataaaaatag

SEQ ID NO: 257470 - DNA, 587 bp, Homo sapiens
agaaagtttgtagtttacaacaacaaactaatacagaaagcagaattgtttataaaaacctatcctatgygaaaacataatcattatcaattgcaaaaaaaaatcaaaacaaattcaaaaaatgcaaattacgtgaattgtgacacgtatgacagaggctgttttctctcatatacaaaagtacatgaaagaaccagtattaaagacatcagcagcccagtggaaaaccaggaaaaaggaaataaatatttcaaataaaaagaaatataaatggccagtatctctccccggcccctggcccaccccatgaagagatgctaatcttattcacactagaaaaatgtttttgactgggtgccatggctcacgcctgtaatcccagcactttgggaggcagaggcaggcagatcacttgaagtcaggagttcaagaccagcctgaccaacatggtgaaaccacgtctttactaaaaatacaaaaaattagccagatgtggtggcgggcacctgtaatcccagctactcaagaggctgaggcagaatcgcttgaacccaggaggtggaggttgcagtgagctgagattgtgc

SEQ ID NO: 257471 - DNA, 587 bp, Homo sapiens
agaaagtttgtagtttacaacaacaaactaatacagaaagcagaattgtttataaaaacctatcctatgcgaaaacataatcattatcaattgcaaaaaaaaatcaaaacaaattcaaaaaatgcaaattacgtgaattgtgwcacgtatgacagaggctgttttctctcatatacaaaagtacatgaaagaaccagtattaaagacatcagcagcccagtggaaaaccaggaaaaaggaaataaatatttcaaataaaaagaaatataaatggccagtatctctccccggcccctggcccaccccatgaagagatgctaatcttattcacactagaaaaatgtttttgactgggtgccatggctcacgcctgtaatcccagcactttgggaggcagaggcaggcagatcacttgaagtcaggagttcaagaccagcctgaccaacatggtgaaaccacgtctttactaaaaatacaaaaaattagccagatgtggtggcgggcacctgtaatcccagctactcaagaggctgaggcagaatcgcttgaacccaggaggtggaggttgcagtgagctgagattgtgc

SEQ ID NO: 257472 - DNA, 511 bp, Homo sapiens
tattttcattgtgttattgaccacaatttagttcatctagaaacaattttaaaatcaagcagagattttagctttcattcatattcttcttgtattgctattgagaatatttattttctccctaataatcattcctawttttttttaacaaattaccttctttaaagtatattgagatagaagtgttcattctggatattttaaaacaagaggtgcttagtaaggaccaagaaaatgacaaaaattcttttgcaaatatttatgtgaactagaagatactcatacttagggaatttaatgcctaaacttttgtccaaagctttcttttaaattgttttaatgactgttgaatatttggtaataagatgaaaatactgaaaaccaaaaaagtgttagttctaacccaatttacctttctatctataataagcccatatttacaaattgtactgtatgactttggtcaaaagcaactcatccttcctttaaaaaatccatatggaactggaga

SEQ ID NO: 257473 - DNA, 511 bp, Homo sapiens
tattttcattgtgttattgaccacaatttagttcatctagaaacaattttaaaatcaagcagagattttagctttcattcatattcttcttgtattgctattgagaatatttattttctccctaataatcattcctaattttttttaacaaawtaccttctttaaagtatattgagatagaagtgttcattctggatattttaaaacaagaggtgcttagtaaggaccaagaaaatgacaaaaattcttttgcaaatatttatgtgaactagaagatactcatacttagggaatttaatgcctaaacttttgtccaaagctttcttttaaattgttttaatgactgttgaatatttggtaataagatgaaaatactgaaaaccaaaaaagtgttagttctaacccaatttacctttctatctataataagcccatatttacaaattgtactgtatgactttggtcaaaagcaactcatccttcctttaaaaaatccatatggaactggaga

SEQ ID NO: 257474 - DNA, 594 bp, Homo sapiens
aaagggcagttacacaagcagctatatagacaggggaagttacacagctatacagataaagaaagtttcttatacaaacttttgcattcaactgtaaaaatggaaaccctcttgggacccctctctgctgtggagagctttcttctgttgcttattaaacttttgctccaacctcatccttgrtgtccttgctttttaatttccttggttgtgagaccaagagctcagataacacctcagacaataagactgcttcattgaccctagaccgtttcaccaatggcctaagcactcatgctctttgtaacacactgaggatatggtacagaaattgccttcgtatcaactgagcccaggctcttgagcctcagctgacgattccacacaacagactatgtctgccccattcaaataacttttagcaatataagcaacattaatcagaacagagtatttctgggagcaaaatatatgagtttgaattctagccccatgttctactaactgtgtaaattgagccaactttttttttttttttttttttttgagatagagttgttttgctcttgttgcccaggctggagtgcaatggcg

SEQ ID NO: 257475 - DNA, 640 bp, Homo sapiens
cccgaaacattatgaatagtaaatatgtttctcctctctgaaaccaccagaatacagtcccccaaatccctattacgggaccaaatcctttccaggataaaagaaactgttgaagttttcagaagtgctgttccataaaagcctaagtgtatacattcaaataggaatgacagcaggaaaggacggggaaatttyccgttaaaaaaaaaacttgcataaactttcaatcaaagatttcaaaacttatctccacagaatagaacaaagcaaacgacataaaagcaaacgaaaagaaaaaaacgaaaatttaaagttcaccctattcttacagaatggaacaggagttatttggtaactcattcatgaacgtaccatcaaaccatttttagagcagaaaacatacaccttttatttaacaacgataaacttgacaacgttgaacacattgtatgttaagaattttttaactcatgtgttcagaaaataaatcttttcctctacattggtgaaaggtcaggtggggaagggggtgctctgtctccacccacgttgaagttcctccgtctgaattttaactttccaaaggagaatttctgcgttccttaattattatctaagttcaacttcaggcaagtaattc

SEQ ID NO: 257476 - DNA, 557 bp, Homo sapiens
aatcacattcattcataatatgtaactgaatactgacagaaagaaactcagctcagcacacactctatttccaagtcttacaaactctgaagaaaaaaactctgaagaaatattcaatactttgaaaagatgactaaagcaaaaagttagagaggaataaaagtataaaacacagaataacacgcagatatttctttttcccggcattttgctccccagttttcagatttttaagtgtctttctggaatgaaagctatttgtgatccagctagtcaatattccttgtggtactgtactagccaatgacttaattaatcattaaaacaaaccggttacctaattcaatctaattctgatgaaaaacatagaatttaacctctggactatcacattcctctaatattcaactgtttaaacatgtaatttcattctaaaaactgaaaaaaaaattaacttacctcaattgtttygcatagttctgttcaatttctatcctctctttaacaaatttggcatatctttccaagaagtcaattccccattgtgtatgcttgtc

SEQ ID NO: 257477 - DNA, 601 bp, Homo sapiens
ttctggttcactgttagcaaatgtataggattttttgtctgcattttgtttacaaattttattcttagtatcatcttagatttgtctatttctttttttcatctcttttataattattgtatcttgctctgttatctttatgttgctttagatggaagtgtaaagtaattaacaagtgattttgaaccattttattttattctggtcaaaaatctttctgaaagatttttgaatttgggcaagaaaggatcttataatttggaacattatctgtgtgccaagcactttgctagatgttcttttattttttattttactttcatgccggctctgcgagataagtagtggtattcccattttacagaaggtgaaacttaaggttaacttttgtcatgtaaagctaaactctgatctagatttgtgtgactccaaaactttttttatatgcctctaatggatgtaatttacctagagatttattaaycctctagtgggggtcgtttccatcttcaacaagcatttataaaatactttatagaaagcactgtgcctagttctgggtatacatccccaactgccttgtagaaattgctacactgga

SEQ ID NO: 257478 - DNA, 285 bp, Homo sapiens
tcactattcttacttactttatgcaaataatcaggccaggtataagactaaaacataattttacaaatagattggtctttctatgatttatctttgttagaagtagggaactaaagagagaaaaactatgtttcagaagaaaactttcatgtacctgttataaattcctaaccctgtccattgttttggggattttattattttccttgcaggaaatcctgaatcctgaattctttcytggctataagtctccaaactaatgtttctaaatttttcttccatttt

SEQ ID NO: 257479 - DNA, 601 bp, Homo sapiens
ttttgaacaaagatttactgagtagctacagtacatacggatcttctccttgtaattgtaaagatatgtacaattttctctaatttatgcttattcaatataggaaccttaaatctggtatactatttactaaacacaatatktgtattctgaaaattgcctctatgtttctatcatatgtctctggaatcccagttacatgtttgttggatcttcttgctctatcctccacatgaataaaacattcattatttatatttctctactgtgttctgttttctttttacagattttttcaataaattttatgataaattatgttaattggttgtttgacatgtttccaatttcaatcataatatgttgttttcttttctacaagtactattttgttcttttccaaacagtcaatttcttgttctttaatcatactttcaatagcagtctttaaacatattaaacataattattaaattattacctaataacttaaatacctagtttgatgttattgctgtcattcaagatgtgagctatttacttgtgggtttagtgattcttaatcagaagttcatgttactttaaatttatctgcaggaac

SEQ ID NO: 257480 - DNA, 616 bp, Homo sapiens
gaatgagggcaaagaacacctggcctgcccagggcagaaaaccacttaaaagtatccttaagccacaaacaatagcatgagcgatctgtgtcttaagggtgtgttcctgctgcagttaactagcccaatctattcctttaattcggcccatcccttcgtttcccataagggatactttcagttaatttaatatctatagaaacaatgctaatgactggtttgctgttaataaatatgtgggtaaatctctgttcrgggctgtcagctctgaaggctgtgagacccctgatttcccacttcacacctctatatttctgtgtgtgtgtctttaattcctctatcgccactggttagggtctccctgactgagctggtgtcggcagtgaggtaggctatatgtctatttggggtagttgaggggctctgctccacattgtgaagacaagttgcataagcatcttagtctatttgggctactataacaaaatacctgagactgggtaatttagaaataataggaaggtatttctcacaggtctggaggctggaaagttcaagatcaaggcaacaaaatctgctgaatgcttgctctctacttcatagatggtgtctctta

SEQ ID NO: 257481 - DNA, 641 bp, Homo sapiens
gtcctcaaggtcaaattaaatgagagaacaattcgtcaataattcagaacagtatagcaaatgctgttaggtagcatatgcatggtatagtggggcaacagaatagtctgcagcatcttgaaaagcaatccttgaattgagttttagaggagaagcaattaaacagagaaaatgtagggatgagtaatgatgttctagatagagaaaagagcatgtaaaaagatactgatgattggagaatactactatgcatttgtacaactacaaacattttaatgtggctagagaactgtggggagcaggaggtcaggtcagattggtgaggtgggtggcagctagatggagaagggctgtctgtgctaaaataagaaattgatacttgataccaaaatccatgaggagctattaaagtatttcaatccaacggattaacaaattagattgttttacagattattctggcagtaggtggatggttctgattgtgtgactgggtagatggtgaagggcaaataatagtaaagaaatgagaattgggaaaagctattgcattcaggtgygtattttgaagtttaaaacacctggcccaaatgggtctctctctctctttttttccctgaataacttctaatatacatgta

SEQ ID NO: 257482 - DNA, 567 bp, Homo sapiens
gaggacctcgcagaaagaaatctggccttaattcatcttggtagacccagtacctagtgcagagataattaataaacatttactgaattgaggtgtataatttgcatctgtgtgtccctagtttccagcacagtgccaatgcctaatacacattaatgaagctgtatttcaactttcagaattctaccagtgttctaycaaaatcatagagtgattggttggcaaaaacaaacaaattccattttcacataccacagtattctttttgtcatacaatatactatatataatgtgtgtgtatcattcacttacacacacacatatgtgtatgtgcacatacacactttcctcctctgtcaaataggctcaaagatctacttttgtacctttgaaagactgccttgtcaggtaccttttctaatatttttaaagaattttttaaaagtctcattgctttagctagtacttccataacaatgttgaaaaggtgtagtgagagggaacatccttgccttcttcctgatctcagtggaaaggatcaggtttcttaccactaggcgtaatgtt

SEQ ID NO: 257483 - DNA, 567 bp, Homo sapiens
gaggacctcgcagaaagaaatctggccttaattcatcttggtagacccagtacctagtgcagagataattaataaacatttactgaattgaggtgtataatttgcatctgtgtgtccctagtttccagcacagtgccaatgcctaatacacattaatgaagctgtatttcaactttcagaattctaccagtgttctaccaaaatcatagagtgattggttggcaaaaacaaacaaattccattttcacawaccacagtattctttttgtcatacaatatactatatataatgtgtgtgtatcattcacttacacacacacatatgtgtatgtgcacatacacactttcctcctctgtcaaataggctcaaagatctacttttgtacctttgaaagactgccttgtcaggtaccttttctaatatttttaaagaattttttaaaagtctcattgctttagctagtacttccataacaatgttgaaaaggtgtagtgagagggaacatccttgccttcttcctgatctcagtggaaaggatcaggtttcttaccactaggcgtaatgtt

SEQ ID NO: 257484 - DNA, 582 bp, Homo sapiens
ataacagttctacaaaaattctttcagaaaattgaagaagaagaaacttcccctaattcattatatgagactagcattcacccggtaccaaaaccaaacaaaaacacagaagatratgaaactgtatgccactgttcttcatgaacattgaaataaaattcctcaacaaaatgttagcaaaataaatcccgtaatgaatacaatggttaatatattctgaccaaactagtttatcccacaaatgcaagactggtgaaaaaaattagaaaattaaccaatgtaatttaatctacacacacacacacacacacacacacacacacacacacacacacacacaaattcttctcaatagctgaaagaaaaacatttgacaaggtcttacattcattcctaacgaaaactttcatcagtgtaggaatagaagggaatttcttttacctgacaaagtccatatataaaaaatttacagctaccgtcatggtttatcatgaacaactgaatgctttctgtctaagattccaaagaaagaaagaaatgtccatgctcacctctttttctttgacaggttctcgctttatc

SEQ ID NO: 257485 - DNA, 579 bp, Homo sapiens
ataacagttctacaaaaattctttcagaaaattgaagaagaagaaacttcccctaattcattatatgagactagcattcacccggtaccaaaaccaaacaaaaacacagaagataatgaaactgtatgccactgttcttcatgaacattgaaataaaattcctcaacaaaatgttagcaaaataaatcccgtaatgaatacaatggttaatayattctgaccaaactagtttatcccacaaatgcaagactggtgaaaaaaattagaaaattaaccaatgtaatttaatctacacacacacacacacacacacacacacacacacacacacacacacacaaattcttctcaatagctgaaagaaaaacatttgacaaggtcttacattcattcctaacgaaaactttcatcagtgtaggaatagaagggaatttcttttacctgacaaagtccatatataaaaaatttacagctaccgtcatggtttatcatgaacaactgaatgctttctgtctaagattccaaagaaagaaagaaatgtccatgctcacctctttttctttgacaggttctcgcttt

SEQ ID NO: 257486 - DNA, 579 bp, Homo sapiens
ataacagttctacaaaaattctttcagaaaattgaagaagaagaaacttcccctaattcattatatgagactagcattcacccggtaccaaaaccaaacaaaaacacagaagataatgaaactgtatgccactgttcttcatgaacattgaaataaaattcctcaacaaaatgttagcaaaataaatcccgtaatgaatacaatggttaatatattctgaccaaactagtttatcccacaaatgcaagactggtgaaaaaaattagaaaattaaccaatgtaatttaatctacacacacacacacacacacacacacacacacacacacacacacacacaaattcttctcaatagmtgaaagaaaaacatttgacaaggtcttacattcattcctaacgaaaactttcatcagtgtaggaatagaagggaatttcttttacctgacaaagtccatatataaaaaatttacagctaccgtcatggtttatcatgaacaactgaatgctttctgtctaagattccaaagaaagaaagaaatgtccatgctcacctctttttctttgacaggttctcgcttt

SEQ ID NO: 257487 - DNA, 559 bp, Homo sapiens
agatacttcataaaaaatatatgtggatggcaaataagtacatgacaagatgctcaacatcattatttgttatgaaaatgcaaattaaaacacaatgagataccatcatatatccactagaatgttaaaaagactagcaatactagtctttggtgaacatgtgaagcaaccagaacactcacacactgcttgtggtacttgaaaatgatgtaatctctttaggaaacagtttggaagtttcctaaaaagttaaacataaacctattatcatgagatctttggggtgttgcttcaccygctggaaacctctgtggccattggcacctttacccaagttttgctcaggcctgcggggcttgttttgcccacttggcctgtcaggctgcacttggcttgcactgttggtctggatcccacacctaccaagggtgagccagggacagagcggtgaggaatgtgtgagtgagcatggggtctggccactgcacacagccaggcatgccggctgcagtggggcaggcagctccaggtgctgacacaggtgccggccccctgtgag

SEQ ID NO: 257488 - DNA, 328 bp, Homo sapiens
ctcactgtgctttctttgtatttccaacttgccttataaagaagaaaaagtgtacccgggctgacactcttcccacagaagctctgctcgttgagataataactcatcaacactgctttactaaatcccttttctgtaatttctcttctttctagaacaggcaattaaataatttaaccctcatgaaaattctgaggtcttttttacctgaggctgtttggcaactgttatcatcaagtgatgacagacaggatttataagcaagctcaaagtctgaattacatttatcatcyaacagagccagcatgataagcaggcaaaaaccatg

SEQ ID NO: 257489 - DNA, 464 bp, Homo sapiens
tcgggtgaggtgtatgggagaggaggggagagttaraacttgtgcctttgggagtaaggggtaactgcctggagggctggtggcactgcccctccctgacccagacatcccaccaaagctaactttcccccacccctgatgcagtaaaacattgaaaaaaaaaaaaaaggagaggtagaagactgtagctatatatataaatatatagtaagttttttttttttaagagcaacagagagaagcagcctcctccctgctgcggtttcctatttatgtggccatgttcctcctggacggatctccctgtgtgtttcaagctgagagatgtgggctccggctggatttgggttttgtgggaggtgcaggggccaagagagacgtggtaggtctccaagagtcccacccgggggggaagaagcaaagccatctcccaccccctcccagccttctcatttctgctttct

SEQ ID NO: 257490 - DNA, 551 bp, Homo sapiens
gattgcttaagcatgagaggttgaggctacagtgagaagtgatcacaccactgcactccagcctgggcgacagagcaagacccygaaaaaaaaaaaaaaggaaagaacgagagaaagagaaagaagaaaacactacccaacagctgaggtgacccagcttagataggaacctctgtgtcaaggccctcagtttccccatctgtcaaatagggataacgatccccaccctgttgacctctggggctgttttgaggcacacagccgactaaggatgaggcagaaggagcgggtctcaagctcacagaagggatttgttggacgctcacagccacacagatggggggtcctccagcagggctccagagctggggagacccagccctcatccagtcccctccctctcagaaggtaggctcttccctcccccatgcccacgggaggcggaagggaggagggcctccagcccacggatgccagccgggctggcaagggttaaggtggcagctgccaggcagggctgagctgagtagtttggtttgagggctgcgtgc

SEQ ID NO: 257491 - DNA, 551 bp, Homo sapiens
gattgcttaagcatgagaggttgaggctacagtgagaagtgatcacaccactgcactccagcctgggcgacagagcaagaccctgaaaaaaaaaaaaaaggaaagaacgagagaaagagaaagaagaaaacactacccaacagcygaggtgacccagcttagataggaacctctgtgtcaaggccctcagtttccccatctgtcaaatagggataacgatccccaccctgttgacctctggggctgttttgaggcacacagccgactaaggatgaggcagaaggagcgggtctcaagctcacagaagggatttgttggacgctcacagccacacagatggggggtcctccagcagggctccagagctggggagacccagccctcatccagtcccctccctctcagaaggtaggctcttccctcccccatgcccacgggaggcggaagggaggagggcctccagcccacggatgccagccgggctggcaagggttaaggtggcagctgccaggcagggctgagctgagtagtttggtttgagggctgcgtgc

SEQ ID NO: 257492 - DNA, 619 bp, Homo sapiens
ctagttccttgggtatgctttacacagcttaaaggtgttaccacctccaatataacaagactagaaatttgcaaatcacccttagtgctccgctcccttcaccatccaactggccactgagtcccatcctttctgcagcattagtggtttgaaggtaccctctttgctttccatttccattgctcctgattcagttgacaccttttctaaccagcccctgagactattgcaatagtggctggttcccctgactcccaggagcacacccccgtcctcccttccctccccagtccctcctccacactgcaccaagagggatgtcagaacacaggttggagcatgccactcttatgctcaaaaacctttgatggctccccattgccggcaggataaagttccaacattgcctggcatttacagcctgccctgatctggtgccaacctaccttgccagcctgggtcccyactgtgtactttatctcctcaactccagccacatcctatggctcgtcttatcccagacctgctgtgcattttcatggccgaccaccttggctcatagacaagcttgttcctagcacttacagtgttgtgggggaggaggattaatcacataatc

SEQ ID NO: 257493 - DNA, 556 bp, Homo sapiens
agatgaaaccaggacacagacgctcrtctcctctgtgctggtcagtggctaagatgccccagcaggctttccagataggggccactcccctagttcaatgttttcctcagggcagctgtgtctggtagtctcactgcagtctctcttgctgcagaggccatgtgagtggtggtactcgcagcacaggtggtatccggcaggtagggagcacgggggaggaggaatgtgcccggggcctgggcaggatgccagtggacagtcccagcagccccacccctacccatgacctactcaccccaccttctgccagccatggtccttgtccctatgccaggggtcacagccagtcatgggttccgggtaaccattcctgggaggagacccggcctccagacgtgagggacatcttctggggcattagtcattgccataactgccatttcacacacactgaccctggtctatttagtcctcacagttaaatattgtattacccccattttacaggtaggcaaaccaaggctcagggtgaagaagtccctgatactgtgtacct

SEQ ID NO: 257494 - DNA, 556 bp, Homo sapiens
agatgaaaccaggacacagacgctcgtctcctctgtgctggtcagtggctaagatgccccagcaggctttccagataggggccactcccctagttcaatgttttcctcagggcagctgtgtctggtagtctcactgcagtctctcttgctgcagaggccatgtgagtggtggtactcgcagcacaggtggtatccggcaggtagggagcacgggggaggaggaatgtgcccggggcctgggcaggatgccagtggacagtcccagcagccccacccctacccatgacctactcaccccaccttctgccagccatggtccttgtccctatgccaggggtcacagccagtcatgggttccgggtaaccattcctgggargagacccggcctccagacgtgagggacatcttctggggcattagtcattgccataactgccatttcacacacactgaccctggtctatttagtcctcacagttaaatattgtattacccccattttacaggtaggcaaaccaaggctcagggtgaagaagtccctgatactgtgtacct

SEQ ID NO: 257495 - DNA, 568 bp, Homo sapiens
ttcaccactcaacctaatggagtgtgtgtgtgtgtatttcagataatcttcatagtactactttttcagacataccttgctgataagggaagggtctgaggggctgggatagggagcagtggtttgaggttggggaacccctgggagtggcctgccccttgctcaattaaaaagcaaaacagtgccgggcgtggtggctcacgcctgtaatcccagcactttgtgaggctgagaacggcaaatcacttgaggccaagagttagagaccagyctggccaacatggcgaatccccgtctctactaaaaatacaaaaattagctgggcatcgtgtacttgtagtcccagctactccagaggctgagaggcactagaatcgcttgagcccaggaggcggaggttgcagtgagctgagatcgcatcactgcactccaactgggcaacagagcgagactccatctcaaaaaaaaaaaaaaaaaaaagcaaagcagaagctggaccctgcctataatccaagcactttgggaggccaaggtgggaggatcacttgagcccagtagctcagggctg

SEQ ID NO: 257496 - DNA, 585 bp, Homo sapiens
tcggattagggtatgcacagttggggcacagagaaagaggagagaaaaattccagccagaaagaacaactagcaaggcatgatggtgtctataagaacatgcatagctgaggttgmagtcttcatgcctcttgaggagtaatagcttgagtgctaacaacccagagttaagctgtttctagattgttgagggccaagaaagtcaggcaaaagagtttaaacatctgtaggtggtaggaggcattgaatcttctgagcaaagatggttgggtggcaatgagattaggaaagtgaacatggtggcagagtacataaggactggataagcaaggagtctctttaaagaaaccctaaactaggacagcagcagcagcctcggccacaccgctgggtgaagcggaagagtggctgtgggccagcgggaggaggtgggacttgtaaagtgattcatggttatgagtgtagacccgggaatcagataaactgggctcaagtccaactccagcacttactccctgtaaatgatcagtcctttctggaacccagtttccccatctgtaaaaccgaggcaataaaatggagtcat

SEQ ID NO: 257497 - DNA, 585 bp, Homo sapiens
tcggattagggtatgcacagttggggcacagagaaagaggagagaaaaattccagccagaaagaacaactagcaaggcatgatggtgtctataagaacatgcatagctgaggttgaagtcttcatgcctcttgaggagtaatagcttgagtgctaacaacccagagttaagctgtttctagattgttgagggccaagaaagtcaggcaaaagagtttaaacatctgtaggtggtaggaggcattgaatcttctgagcaaagatggttgggtggcaatgagattaggaaagtgaacatggtggcagagtacataaggactggataagcaaggagtctctttaaagaaaccctaaactaggacagsagcagcagcctcggccacaccgctgggtgaagcggaagagtggctgtgggccagcgggaggaggtgggacttgtaaagtgattcatggttatgagtgtagacccgggaatcagataaactgggctcaagtccaactccagcacttactccctgtaaatgatcagtcctttctggaacccagtttccccatctgtaaaaccgaggcaataaaatggagtcat

SEQ ID NO: 257498 - DNA, 585 bp, Homo sapiens
tcggattagggtatgcacagttggggcacagagaaagaggagagaaaaattccagccagaaagaacaactagcaaggcatgatggtgtctataagaacatgcatagctgaggttgaagtcttcatgcctcttgaggagtaatagcttgagtgctaacaacccagagttaagctgtttctagattgttgagggccaagaaagtcaggcaaaagagtttaaacatctgtaggtggtaggaggcattgaatcttctgagcaaagatggttgggtggcaatgagattaggaaagtgaacatggtggcagagtacataaggactggataagcaaggagtctctttaaagaaaccctaaactaggacagcagcagcagcctcggccacaccgctgggtgaagcggaagagtggctgtgggccagcgggaggaggtgggacttgtaaagtgattcatggttatgagtgtagacccgggaatcagataaactgggctcaagtccaactccagcacttactccctgtaaatgatcagtcctttctrgaacccagtttccccatctgtaaaaccgaggcaataaaatggagtcat

SEQ ID NO: 257499 - DNA, 448 bp, Homo sapiens
agtatactctccccacacccagccccgtctgccttctccagcgtgggctgctgtcttcaaactaaccatcctgaaactgctttaaagagcctgacaggtaatttattctgtggcagaggatagcaatttcattgtccagaggcaagagatccaactrtatcagaaaatccgtactctcaaggaacacaggtttaatatgataacgattctaagggtgtgtgttcataattcttcctgttctttcctccccttccctaaagctgctagtgaatgcttttgcagttttttttaagggccctccaaagaactgacataaaataaatcaaatattttaccacgaaaggtgattatcaaacacttatttgtgaaaagagtcaaccagaaggggtcaaggcctagctgctgttatgggatttttgcccacaagtaaaatgtttttaaaaattgc

SEQ ID NO: 257500 - DNA, 577 bp, Homo sapiens
ggcatggaagtgagcattttggatggcttcttacaggtgctaaatgttttttataattattctcacacttaaatgtgacaatagatttgtgttttacagtggtcattacaattcccatgtgataggggagaaaaaaatgagcctgtctgagataaagtaaactccttaagatcatgcaacttatagtgatttatctgtgcccccaagccatactaagcgtaggtttgatggaaaatgagaaggcatatagaacaaaagaccaggctctcctatactcccaggcccctctatgcggctcctactgtggaggcagggagtacccccagtccaaccctgccaccagtggagtggtgyccacaggaggacagcctggcccaatctttcatggaatgtcacaatattgccttcccctttgcctgctgatcagggtcctgcctcccgaaagtgatctaagccaatgccccacccagaggcagaatcaaaaggcattcagccatgctccccatacttgggtttctacccaccgagagaggcatagagatgcccaaagcccctctcagaacagccagctgatccc

SEQ ID NO: 257501 - DNA, 532 bp, Homo sapiens
gggtggtgcctgttccaatatttacccttcacaatatctgaaaggggattacaaagtgagacaaccttaggcaagcaaaaagattaaccaaacttaacctgcactgtataacaaacccaaagagataagtaccatgaagtacataaaatgtgtgagtatagccctgttgttcygatgttacttgttcctgctgccttgagtactgctaaactctcagtccaatgcgggtggggaaacagctgaaaaggacctttgtttcccgttcctggttccacaggttataggtctacttgttgatctcacactggttgacatctacctcatgctaatccacaactggacagttactatctttcttcttttaaatttttatttggtgtacaaagagttagcatggttgctttcattgggtggattccttggataatccattcagagaagatcacttagtccagcttaatgaaacccacatcctttgcacactgatggagatactggccacacataaaaataggaacactcacaaatgtgc

SEQ ID NO: 257502 - DNA, 512 bp, Homo sapiens
agtataaataaagatagttttcacctttcccatgcaaacgtcaacaaaaagtgtataaaagttgattaagaagtcayagaggtatagacacactatctagagtgtggaggagtaaatgaaatagccagtaattaggtaaaaaaggtgctcagattcaccaggcccaaggaaatgcacattaaaataacaatatgatacacttttatacccattagattgttcaaaaattaaaaagagctatgatgtgagggcaagggtactttcttaggtgtgattttagaaaataacctgaaaggatttatcaacataaaaaaatgcaagtaccaacaatccactcctgggaatctatgccataaaaataaaagcactaagatgtaggacaaatgtattaaggatggttattctggcattatttgagaagaaaaacatgaaaaaatgtactgcttagcaatacgggaatggcagaataaaacatgtccctggatatgccagcattgtttgcagacaaattt

SEQ ID NO: 257503 - DNA, 512 bp, Homo sapiens
agtataaataaagatagttttcacctttcccatgcaaacgtcaacaaaaagtgtataaaagttgattaagaagtcatagaggtatagacacactatctagagtgtggaggagtaaatgaaatagccagtaattaggtaaaaaaggtgctcagaktcaccaggcccaaggaaatgcacattaaaataacaatatgatacacttttatacccattagattgttcaaaaattaaaaagagctatgatgtgagggcaagggtactttcttaggtgtgattttagaaaataacctgaaaggatttatcaacataaaaaaatgcaagtaccaacaatccactcctgggaatctatgccataaaaataaaagcactaagatgtaggacaaatgtattaaggatggttattctggcattatttgagaagaaaaacatgaaaaaatgtactgcttagcaatacgggaatggcagaataaaacatgtccctggatatgccagcattgtttgcagacaaattt

SEQ ID NO: 257504 - DNA, 512 bp, Homo sapiens
agtataaataaagatagttttcacctttcccatgcaaacgtcaacaaaaagtgtataaaagttgattaagaagtcatagaggtatagacacactatctagagtgtggaggagtaaatgaaatagccagtaattaggtaaaaaaggtgctcagattcaccaggcccaaggaaatgcacattaaaataacaatatgatacmcttttatacccattagattgttcaaaaattaaaaagagctatgatgtgagggcaagggtactttcttaggtgtgattttagaaaataacctgaaaggatttatcaacataaaaaaatgcaagtaccaacaatccactcctgggaatctatgccataaaaataaaagcactaagatgtaggacaaatgtattaaggatggttattctggcattatttgagaagaaaaacatgaaaaaatgtactgcttagcaatacgggaatggcagaataaaacatgtccctggatatgccagcattgtttgcagacaaattt

SEQ ID NO: 257505 - DNA, 512 bp, Homo sapiens
agtataaataaagatagttttcacctttcccatgcaaacgtcaacaaaaagtgtataaaagttgattaagaagtcatagaggtatagacacactatctagagtgtggaggagtaaatgaaatagccagtaattaggtaaaaaaggtgctcagattcaccaggcccaaggaaatgcacattaaaataacaatatgatacacttttatacccattagattgttcaaaaattaaaaagagctatgatgtgagggcaagggtactttsttaggtgtgattttagaaaataacctgaaaggatttatcaacataaaaaaatgcaagtaccaacaatccactcctgggaatctatgccataaaaataaaagcactaagatgtaggacaaatgtattaaggatggttattctggcattatttgagaagaaaaacatgaaaaaatgtactgcttagcaatacgggaatggcagaataaaacatgtccctggatatgccagcattgtttgcagacaaattt

SEQ ID NO: 257506 - DNA, 591 bp, Homo sapiens
tagtgtatttattttagtggctatgtattatttcaaattatctttttctgattgaagatcatgtcagtttctaatttttttagattacaaatcataactctgaacattctcttgtatctttttctcctctttatatatttatatttacataggcatttataatatatatgtgtgtgtatatgcttctgtgtctacatgtgtacatcatcatatactgtatatacacacatccacacatactatgcatatccctaaaagtgaaacttacatgtatattcctagaagtgacatggctgattcctactgcccaattgctctacaaaatcactacattttatttagtttcctaccgatagtgtaaaggagtttcattttctctacatctgtatcaatcaggaatgcacttcattgcaygtataggacatctgactcacagtgacttctttaataagagtttgccttttctcacgtaacattttggagacaagcagctgctactactggagcagatcgatcaggtcagaagcagcgtctctgtgaggagcttggctttaccttcatgctcgtctcccaaggttatatgaaggctgc

SEQ ID NO: 257507 - DNA, 567 bp, Homo sapiens
catggccagtataggtgagaaaaaaaataagaaagaaaatgctattttaatcttattataggaaatgaagctagccacattctgaaactgaattttctgtatttaagcattcagtcatgagaaacatctcccaaataaagattcaaacagggctcttcttataaagattaaatcattcttttaatatcattcaaacaatgcacaaacagtaaytgtacagcccatgggtaatccaaagctcctaggaacccccgtcatgtagactagtctgacttcttgactacacagtgttagactgaccatgcaggaccttgggatcccagtggaagttgcccctggcagggatggcacagccccttctgcagcccagacacccggagcctcatctgctaccacccaccaggttggaaagtgtttggcctgtgcttggcacctcttgaaccacccagaatagtccaaattcttctatctacaaataaggttcaagagggtatggattttgtgtgcaggctccagcagctagtaaggaagcaccatgggtgaccatgtggaaaccacccctgtgac

SEQ ID NO: 257508 - DNA, 567 bp, Homo sapiens
catggccagtataggtgagaaaaaaaataagaaagaaaatgctattttaatcttattataggaaatgaagctagccacattctgaaactgaattttctgtatttaagcattcagtcatgagaaacatctcccaaataaagattcaaacagggctcttcttataaagattaaatcattcttttaatatcattcaaacaatgcacaaacagtaactgtacagcccatgggtaatccaaagctcctaggaacccccgtcatgtagactagtctgacttcttgactacacagtgttagactgaccatgcaggaccttgggatcccagtggaagktgcccctggcagggatggcacagccccttctgcagcccagacacccggagcctcatctgctaccacccaccaggttggaaagtgtttggcctgtgcttggcacctcttgaaccacccagaatagtccaaattcttctatctacaaataaggttcaagagggtatggattttgtgtgcaggctccagcagctagtaaggaagcaccatgggtgaccatgtggaaaccacccctgtgac

SEQ ID NO: 257509 - DNA, 567 bp, Homo sapiens
catggccagtataggtgagaaaaaaaataagaaagaaaatgctattttaatcttattataggaaatgaagctagccacattctgaaactgaattttctgtatttaagcattcagtcatgagaaacatctcccaaataaagattcaaacagggctcttcttataaagattaaatcattcttttaatatcattcaaacaatgcacaaacagtaactgtacagcccatgggtaatccaaagctcctaggaacccccgtcatgtagactagtctgacttcttgactacacagtgttagactgaccatgcaggaccttgggatcccagtggaagttgcccctggcagggatggcacagccccttctgcagcccagacacccggagcctcatctgctaccacccaccaggttggaaagtgtttggcctgtgcttggcacctcttgaaccacccagaatagtccaaattsttctatctacaaataaggttcaagagggtatggattttgtgtgcaggctccagcagctagtaaggaagcaccatgggtgaccatgtggaaaccacccctgtgac

SEQ ID NO: 257510 - DNA, 567 bp, Homo sapiens
catggccagtataggtgagaaaaaaaataagaaagaaaatgctattttaatcttattataggaaatgaagctagccacattctgaaactgaattttctgtatttaagcattcagtcatgagaaacatctcccaaataaagattcaaacagggctcttcttataaagattaaatcattcttttaatatcattcaaacaatgcacaaacagtaactgtacagcccatgggtaatccaaagctcctaggaacccccgtcatgtagactagtctgacttcttgactacacagtgttagactgaccatgcaggaccttgggatcccagtggaagttgcccctggcagggatggcacagccccttctgcagcccagacacccggagcctcatctgctaccacccaccaggttggaaagtgtttggcctgtgcttggcacctcttgaaccacccagaatagtccaaattcttctmtctacaaataaggttcaagagggtatggattttgtgtgcaggctccagcagctagtaaggaagcaccatgggtgaccatgtggaaaccacccctgtgac

SEQ ID NO: 257511 - DNA, 547 bp, Homo sapiens
aatttatcctttccaccctgcctccagcccaccaaacctacctctcctgctcactcccccacttcaccagcagcagcattctttcttaattataataattaactgaaagaatgaacacttatctaatggcgattttcagaccctccttcggctctctggagaacagaaaacttaacccacttgaaggagtgatgggsggaggagggattgaagcttctgcttccttggtcagactgggtgctggtgcttcctacgcagcctcctggaagtggctttcagtttggccttttcttcataggaagaactcgagggctttccatcagcaaatcttccttcagagtcagcctgatctccctcactgttgcttttatcacctcctgcctctgctcagcagttgtctgctcacatacggactcggtcctacgagtatttgttgagcatgcacttacccacgtgccaagtcccatgccaagcaaaggaggcttattaccaccaaaaaggagtaagaagtgtcgtttaagatataaaccacacaggtactgtaatg

SEQ ID NO: 257512 - DNA, 547 bp, Homo sapiens
aatttatcctttccaccctgcctccagcccaccaaacctacctctcctgctcactcccccacttcaccagcagcagcattctttcttaattataataattaactgaaagaatgaacacttatctaatggcgattttcagaccctccttcggctctctggagaacagaaaacttaacccacttgaaggagtgatggggggaggagggattgaagcttctgcttccttggtcagactgggtgctggtgcttcctacgcagcctcctggaagtggctttcagkttggccttttcttcataggaagaactcgagggctttccatcagcaaatcttccttcagagtcagcctgatctccctcactgttgcttttatcacctcctgcctctgctcagcagttgtctgctcacatacggactcggtcctacgagtatttgttgagcatgcacttacccacgtgccaagtcccatgccaagcaaaggaggcttattaccaccaaaaaggagtaagaagtgtcgtttaagatataaaccacacaggtactgtaatg

SEQ ID NO: 257513 - DNA, 547 bp, Homo sapiens
aatttatcctttccaccctgcctccagcccaccaaacctacctctcctgctcactcccccacttcaccagcagcagcattctttcttaattataataattaactgaaagaatgaacacttatctaatggcgattttcagaccctccttcggctctctggagaacagaaaacttaacccacttgaaggagtgatggggggaggagggattgaagcttctgcttccttggtcagactgggtgctggtgcttcctacgcagcctcctggaagtggctttcagtttggccttttcttcataggaagaactcgagggctttccatcagcaaatcttccttcasagtcagcctgatctccctcactgttgcttttatcacctcctgcctctgctcagcagttgtctgctcacatacggactcggtcctacgagtatttgttgagcatgcacttacccacgtgccaagtcccatgccaagcaaaggaggcttattaccaccaaaaaggagtaagaagtgtcgtttaagatataaaccacacaggtactgtaatg

SEQ ID NO: 257514 - DNA, 480 bp, Homo sapiens
caggctggagtgcagtggcgtgatcttggctcactgcagcctctgcctcccagattcaagcaattctcctgcctcagcctcccaagtagctgggactacaagcrtgtgccactatgcctggctaatttttatatatttttagtagagatgtggttttgccatgttggccaggctggtctcaaactcctggcctcaagccatcctcccacctcagcctcccaaagtgctaggattacaggcatgagccactgctcccggccgcagtctatagatttaatataattcttaccaacatcatttttcaaagaactagaaaaaacaatccgaaaattaatatgggaccaaaaaagagcctgaattgccacagcaatcctaagcaaaagtaagaatttggagtcattatattacctgacctcaaattatgctacaaggatacagttaccaaaacaacatggtactgttataaaaatagatacacag

SEQ ID NO: 257515 - DNA, 480 bp, Homo sapiens
caggctggagtgcagtggcgtgatcttggctcactgcagcctctgcctcccagattcaagcaattctcctgcctcagcctcccaagtagctgggactacaagcgtgtgccactatgcctggctaatttttatatrtttttagtagagatgtggttttgccatgttggccaggctggtctcaaactcctggcctcaagccatcctcccacctcagcctcccaaagtgctaggattacaggcatgagccactgctcccggccgcagtctatagatttaatataattcttaccaacatcatttttcaaagaactagaaaaaacaatccgaaaattaatatgggaccaaaaaagagcctgaattgccacagcaatcctaagcaaaagtaagaatttggagtcattatattacctgacctcaaattatgctacaaggatacagttaccaaaacaacatggtactgttataaaaatagatacacag

SEQ ID NO: 257516 - DNA, 581 bp, Homo sapiens
aatcccactgctgggtatctacccaaagaaaaagtaatcactatatcaaaaagacacctgcacagatatgtttatcaaagcacaattcacaattgcaaatatatggaatcaacctaaatgcccatcaactgatgaatggataaagacatatatactgcagaatactactcagccaaaaaaaaaataaaaaagaatgaaataatgtcttttgcagcaacttggatggaacaggaggccattattctaagtgaagtaactcaggaaactaaaacaaaaaactgcattttctcacttacaagtggggagctaagctgtgggtatgcaaaggcacacaggctcaatgtataatggacattggagactcagaagggatgaaggtgggaggaggatgagggatgaaaaactacctattgggtacaatgcacactacccaggtgatgggtgcactaaaatcccaracttcaccactatacaattcatccaggtaaccaaaaacagcttgtacccctatagctactgaaataaaaaaaaattgtttttaaagaactctttccttcccctgggattataaagagagtctc

SEQ ID NO: 257517 - DNA, 580 bp, Homo sapiens
acatatatactgcagaatactactcagccaaaaaaaaaataaaaaagaatgaaataatgtcttttgcagcaacttggatggaacaggaggccattattctaagtgaagtaactcaggaaactaaaacaaaaaactgcattttctcacttacaagtggggagctaagctgtgggtatgcaaaggcacacaggctcaatgtataatggacattggagactcagaagggatgaaggtgggaggaggatgagggatgaaaaactacctattgggtacaatgcacactacccaggtgatgggtgcactaaaatcccaaacttcaccactatacaattcatccaggtaaccaaaaacagcttgtacccctatagctactgaaataaaaaaaaattgtttttaaagaactctttccttcccctgggattataaagagagtctcctttggtattctataaatttatggttttgcctttcacatttaagtttttaatctttttttgtytcatgaaaaataagattccattttcactgtttccatctggataatcactggacaccaccacatttgttgaaaaggccattc

SEQ ID NO: 257518 - DNA, 585 bp, Homo sapiens
ttgttctgtttcacaatccttgtaaactttatttttctggactccctatgtcagctgggatgtctaatacaatattgaataaaatggcgataacaggctttaacaggctttaagtgaaatgtgttcatggtaatgtttcacatatcctaaaaataaagaattaaagtcaaaatggctgtgggaggacctcaaatgcaatacaacagacagttgagcctcatagtaatacaaatgaaaaacatacccatactaaagaaggtgggctggggagggaaaagaactaacctagtaactttggaaaatagtaacttgactgtaaactctaagacaraagactccacgcattgcacacagatcttgcactgagatggtacatttgtttttcacagaggtatgagttaggactcaaattattttatgtacacaaagattgagaacacaagtaaatgtaatgtttattatgagtgctgggtttctcactgtcagagaaaggagtgacaaatacagaaagaggggaaaaggccggaatgaaccctggggtgctggatgaacttgtgttttctggtatatacaaagatagacaga

SEQ ID NO: 257519 - DNA, 567 bp, Homo sapiens
aaaagccaacctgcctgctttgcttacctctctgggttcccactttcttttcgtctttggctcaggattccttcactcttgccagctcatccacacaatttaaaatacatatttctatatattatgcagaatgtgtagttgttcttggcagaaagactggcgccatgctgcctctagcaatgctaacaaaaccaaatacgtgctgaggatttaacttattcctggcctgggcttcatggatgatctattccacagcaaccccgtgagacaggcaggattattgttgttgtttcacaaccagtgagatggagcagaggcccctctyaggggcctgtgaatcccctctcctccaagcatggaaataaaggaaaatcctgagttccttcaaggaaagttccaggcagctcgctagccctgagaagtaaatgagcaacttgatgagcaagaaagtaatagtagcctaaaacgatagccaagaaagttagaatcagaggatgtttggttcgctatagaaactaaagataaagtcttaacatatgttcttgagttgtttttcagaaacccaga

SEQ ID NO: 257520 - DNA, 582 bp, Homo sapiens
gcaacttgatgagcaagaaagtaatagtagcctaaaacgatagccaagaaagttagaatcagaggatgtttggttcgctatagaaactaaagataaagtcttaacatatgttcttgagttgtttttcagaaacccagacctccaccaaatggggctgctagcacagagatcccagatgagggaraactgaggacccaactctgagcagtgttctttgtgttctaaatttcttcctgaagggactggaggaggtcacacccatgagccaatgccaacatttttttctgctgatcccaaatttttagacaaagctttactttctgagccaatcacaaggcagaaaatctttgactccatctgggacctgtgggacctcagttcaagatgccccacctttttaggtccagttgttacaggtagttagacaggcatgagcaggggcaggagagggctctcccccacccactaggcatgtcgggtgatggttcggcaacaatcacattgcctctctaaaagtgataaattggcagtgggtgccagggagaggccattttctgatggtccacacttgttgtactaaag

SEQ ID NO: 257521 - DNA, 589 bp, Homo sapiens
caattatctcttcttcctcccccaattatatgatgttttcatctttttgagttaatgaagttttttaggtcaagtaggtggtaacctaggctatttggagaataggaagatatttgtaattctgagttatccatccagagttgatcaaattttaaaagtttaacattaaatttaatatatatgtgtatgtattrtatctagacaatgcctggcatgtagtaggtaccctataaaaatggtagcgattctctaaattgatctctggatgttgtactgtgcaccatccatctgtttgattaattgtgtggttgcttaggcttcattcctccttcttctgaaaatgccaccacaccaaacctgggtccacccagcccaggcggcaaagacaagcactgattatagcaggatggcagtgagacaaagcgaggggaactattattaccttttggttattaggttgctcatatacttctcagggctagctaggtgcctggaactttccttgaaggaactcaggattctcctttatttccatgcttgtggatgggggtgcagaggaggccccaggggttcctgctctgtctcagta

SEQ ID NO: 257522 - DNA, 589 bp, Homo sapiens
caattatctcttcttcctcccccaattatatgatgttttcatctttttgagttaatgaagttttttaggtcaagtaggtggtaacctaggctatttggagaataggaagatatttgtaattctgagttatccatccagagttgatcaaattttaaaagtttaacattaaatttaatatatatgtgtatgtattgtatctagacaatgcctggcatgtagtaggtaccctataaaaatggtagcgattctctaaattgatctctggatgttgtactgtgcaccatccatctgtttgattaattgtgtggttgcttaggcttcattcctccttcttctgaaaatgccaccacaccaaacctgggtccacscagcccaggcggcaaagacaagcactgattatagcaggatggcagtgagacaaagcgaggggaactattattaccttttggttattaggttgctcatatacttctcagggctagctaggtgcctggaactttccttgaaggaactcaggattctcctttatttccatgcttgtggatgggggtgcagaggaggccccaggggttcctgctctgtctcagta

SEQ ID NO: 257523 - DNA, 545 bp, Homo sapiens
caacgtacttttattacctatagtcctcatgttacacattagatctctacccttgtccatcccacgtatctgctattttgtatcctttgacctacatctcccaatttcctcccactggttatcactgttttgttctctatctctgcatatatgacctttctgttttcttagattccacatataagtgagatcatgcaatatttttctttctctgtctggcttatttcacttcacataatatcctccaggttcaaccatgttgtggcaaatggcaggatctccttctttctaargctgaattattctgttgtgcgtgtgttggaatattacacagtttctttatccattcatccgttgacagttaggttgttttcataccttgactgttgtgaataatgctgtagtgaacataagagtgcaggtatctctactagcgggtgatttaatctccttttagtataggattactaggtcatatggtatggtagttctatttttaatttctttagaaacctccatactgttttccatagtggctgcagcaa

SEQ ID NO: 257524 - DNA, 625 bp, Homo sapiens
ttctccaaccctcccaacactctctccatttgttacctcttgtttttttgataatagccatcctaaagggtgtggggtggtatctcatagtggtttcaatttgcgttttttttcttgttttatttatttatttattttgtttgtttgtttttctgagacagggtctcactctgttgcccagggtggagtgcagtggtgcgatcatagctcrctgcaaactcccaggctcaagcaatcctgttctatcctgctatattgcccaggctgatctcgaacttctgggctcaagtgatcctcctgtctcagcctcctcagtgacatgcgccactgtcagggcactatttctgaatcaggttatttgttttctactattgagtttgatttctgatcgattttggatatgaaccccttatcagatgcatggtgtccaaatgtattctatcattccatagattgtctcttcaccctgttgattgtttcctttgctgtacagaagttttttaaattttgatgacatcgcatttattcgtttttgcttttgtagcctgagcttttggtgtattgtcaaaacaacaacaacaccaaacaaaacctttgccaatgtcaatatcaaggagcttttccc

SEQ ID NO: 257525 - DNA, 625 bp, Homo sapiens
ttctccaaccctcccaacactctctccatttgttacctcttgtttttttgataatagccatcctaaagggtgtggggtggtatctcatagtggtttcaatttgcgttttttttcttgttttatttatttatttattttgtttgtttgtttttctgagacagggtctcactctgttgcccagggtggagtgcagtggtgcgatcatagctcactgcaaactcccaggctcaagcaatcctgttctatcctgctatattgcccaggctgatctcgaacttctgggctcaagtgatcctcctgtctcagcctcctcagtgacatgcgccactgtcagggcactatttctgaatcaggttwtttgttttctactattgagtttgatttctgatcgattttggatatgaaccccttatcagatgcatggtgtccaaatgtattctatcattccatagattgtctcttcaccctgttgattgtttcctttgctgtacagaagttttttaaattttgatgacatcgcatttattcgtttttgcttttgtagcctgagcttttggtgtattgtcaaaacaacaacaacaccaaacaaaacctttgccaatgtcaatatcaaggagcttttccc

SEQ ID NO: 257526 - DNA, 625 bp, Homo sapiens
ttctccaaccctcccaacactctctccatttgttacctcttgtttttttgataatagccatcctaaagggtgtggggtggtatctcatagtggtttcaatttgcgttttttttcttgttttatttatttatttattttgtttgtttgtttttctgagacagggtctcactctgttgcccagggtggagtgcagtggtgcgatcatagctcactgcaaactcccaggctcaagcaatcctgttctatcctgctatattgcccaggctgatctcgaacttctgggctcaagtgatcctcctgtctcagcctcctcagtgacatgcgccactgtcagggcactatttctgaatcaggttatttgttttctactattgagtttgatttctgatcgattttggatatgaaccccttatcagatgcatggtgtccaaatrtattctatcattccatagattgtctcttcaccctgttgattgtttcctttgctgtacagaagttttttaaattttgatgacatcgcatttattcgtttttgcttttgtagcctgagcttttggtgtattgtcaaaacaacaacaacaccaaacaaaacctttgccaatgtcaatatcaaggagcttttccc

SEQ ID NO: 257527 - DNA, 500 bp, Homo sapiens
ttctacaacagttacactattttgcattctaaccaacattgtacaaaggttcccttttctccacattcttgaaaacacagatctgctataaaacattgtccctataattaccaactctctaatgtacacttaaaaatttgctgggaggcttagacaggtggatcacaagatcaggagatcaataccatcctggctaacacgatgaaaccctgtctctaccaaaaatacaaaaattagccaggcgtggtggcaggtgcytgtagtcccagctactcaggaggctgaggcaggagaatggcgtgaacgcgggaggcggagcttgcagtgaaccgagattgcaccactgcactccagcctaggtgacacagcgagactctgtctcaaaaaaaaaaaaataaaaataaaaaataataataaattgttaaaagattagatctcatgttgtgttcttaccaaaataaactttttttaaacaaaatcaatcattttagttattatat

SEQ ID NO: 257528 - DNA, 437 bp, Homo sapiens
cccttctccttggcatggattcatgctttgtattttctgtctctctaccctacctcattcttaccatcaaaacacatctaccctctgcctcattccctctcccagttggtggacagcttgctaatctgttttaaacagggataactattcatgtgcctctattcttagtaacttagttacctttccaaggagacctgcaggtggtagctccttaccccaagaraacagtgttcatgaaaacattttttctcagtcattacagcagattgctgggaaccatttggttcttctcctgatgctaaaagtacaccacaccggtggatgcctctgggtgaggccagaggctgtacttgggaattggcagcaaatcagtagaaggtgtattgttgacaaattggattaaagctagtagcttgttgatttcagctaatggctgt

SEQ ID NO: 257529 - DNA, 596 bp, Homo sapiens
agcgctttcactcctaggtatacatgcactctacattaattattatatacatgcatcaggagggaggtatrggaatgtctgcagcaactggcaagaggaatccattctatccaagccacatgagctgagaattaatgagggagaaattccgtgaaggaaaatagagtccttgtatcagaatgaaggggcactgaacaggcaaaaccacatgtattctccagaaattattataagatgtagcatttgcacctaatacatatagatatgatatatttgtatatattgacttatttagttctcacgctaaccctaagagataaattatattacatcatcactctatagatggggaaactgatgttcaaagaagttaatgaccacctcaaagaatgatagtggggattaaaaggcacaatgggaataagatgactggcatatagtatgcgctcaacaaacaccagtgacttctgatatttttattattagaacaagactgaaattttacctgggctccccagtttcttggaaacttcccagatgggtctcctacccagaactcttaagaaatcaaaccttcatgaacctgatttctcaat

SEQ ID NO: 257530 - DNA, 436 bp, Homo sapiens
gcatcacagctcaacttctctctctggctggttccacttccttccccatccttccacaggtgttgatccaagggcactcccttaaaaaaaaaaaaaaaatgtcctggacactacattccatctcagagtccacttatctgaaaaatccaacatgcaacaggtagacaaccaagagtgtgccctatatcagctgataaaagtttgcaattcactggactagcccagggaacatcaaatatttttacgtaacaggtaagatagcaaatattttaggcttgtggccataaagcctgtcatgactaatcacctctgtctctgtaacacaaaagcagccatagacaatatgtaaatgaaggagcatggccrtgtgccattaaaactgtaactacaaaaacaggctgcagtccacaggatatagtttgtcaacccctggact

SEQ ID NO: 257531 - DNA, 579 bp, Homo sapiens
gcctcagatccttggagtcagaaactgcattttaacaagatccctaggggacttgcacacacattagtttgggaagtgcaactctagccagctcctattcattctttaaatgccacctcctctgggaagccatcctggcccctttggctgggttaggtgagtcttcattcagtacgtattacacttacaggtggctgtctctatttagctgggatgtcagctagattttggctcccatgagagcaggggctgtgaccgctccaactggctcatkttattagtggctgccattttggtgaacctattaagtggcgggcaacttaccagcatgtaatgctcacatcaaacctacagggcagaaaccagtaccatcccttttcaccatggaggaaactgaggttcagaggattaaatgaattgctcaagataagcaggaaagtgacagggtcagggcttgggcctttgatctcagaccaaagccagtgggtagaaccacttgtcaaactgtacatagcaggtggggagggagagtggaggaaagacaccaccatctcatgtgcgtctgtgtaaaacatggac

SEQ ID NO: 257532 - DNA, 371 bp, Homo sapiens
aatttcagctgacccagcatttcttcgtttctgaagacaaggtggttttaccatttaagcttctgataaggatgaaataggttgaccaatgtggagttccctctggctgcctgtcaccatccctaaaatcccatcmcaagtcaatccttcccagtaaggcactggtgcccaggcagtgggctaggtattgtaaactgcctgccatccaccaggctatcatctgccagcaggcaaggctgagagcctccattccacctccctgtatggaatttgctccacaaccgcagtcccaacatctggaggcaaactggagacttgttcactcatcttgatgttgctctgaaggtggaaaacatctgcatagtggaaac

SEQ ID NO: 257533 - DNA, 597 bp, Homo sapiens
ccctttactctgcccccatctcctccattaggtcacccctacacatctcttatcccaagactgactgcccatcccaagactgggtgggatgctcctccatgtgcctatacagccttagacttctgagttcaaatcctagttattccacttacttactgaatgactttggacaagtttatcagtctcattgtgtctcagtttccttgtctgtcaaatggggatactgtgactagtacctatctcatggggttgttgcagtgattacaatggataatttatgtaagcatttaacatagggctgggctcagcaaatgctagcttgaaagaatggttctgaaatccaagtggaaaaacaagcctgtgacataaaacttctcccttactgtrtgagattcatggagctgtgtttttataccattctctcctgcacctcagtatctagcaatgttcctggtgtatagcaagtcctcaataaaatttgttaaatcaatgtcctagttcatcatgttctagggtagtggtcctcaaccactgggccacacagcaggaggtaagcagtgggccagtgaacaaaatatcatcagtatttacagccac

SEQ ID NO: 257534 - DNA, 632 bp, Homo sapiens
aatgacattttagatctaatagattaaatatattatcaaaattaatttcacttgttccttcttcattttttaacataacttctagaagattttaagttatatatgtggctcatattgtatttctgtgctctacagtttatagtctactgaggtgattaaacagctggattaagagtttccatcccggagtcaaacagactgaaatcaaatccccatttcacctctaaccagctgtgtgaccttgggcaagtgacttcccttctctgggcttcagtgtacctgcttgtaaaataaaggtaaatatttgggaagaattttgtcaaactgtatgattttaaataagaattctttttattcctaaacaaaaaagaaatactatcagaaacactgacaaatattattgatgaggaattctacttgccttragaaagaataggctttgcattcagtcaattcaaatctagccaaaagcacagagctgcaccattgttgagagttaatatatgatttctagggtttttggaaatcctgaggggtcccttggaccctagagggctgtcagagacctctaagaagctgggactatgggagagaaaggagtaccgtgatcaatattcactccttacagacag

SEQ ID NO: 257535 - DNA, 633 bp, Homo sapiens
tacttgccttaagaaagaataggctttgcattcagtcaattcaaatctagccaaaagcacagagctgcaccattgttgagagttaatatatgatttctagggtttttggaaatcctgaggkgtcccttggaccctagagggctgtcagagacctctaagaagctgggactatgggagagaaaggagtaccgtgatcaatattcactccttacagacaggggaatggatgaccagagaggttaggtaacttgttcaaggtcacacagcaagtaggtggcagactaggtcctgccagggtctgtgctcgtgatcacttgctatactttgtcatcatacccaattatcacaaaagtcctacttttagccctatttaaagatgaagaaacaggatcagagaagttaaggcacttgtctgtggtcacacagtggcaggtggcattcaatgccagatatactgggctaaagagtgccccccaaaattccgtgtccatctggaacctcagaattggatcttatttggaaatagagtctttgcagctgtaactagttaagttgaggacatactggattcaggtgggccctaaattcagtcactagtgtccttactaaagaaaacagagacatgcagacaca

SEQ ID NO: 257536 - DNA, 658 bp, Homo sapiens
tgggatgaggggcgtgtgggaacccaggtgttcctgggagccatccctgccccagtgagccatcctctgcctccaggtgaacctttcaggcgcctagaataagtgagcaggcgttaatcctcttggaagcatcccttccttcagggaagcagccagcataggaggaaaaaagcacagtgggttaatgttacatggcatttttcttttcttttcttttctttttttttgagacagagtctcgctctgtcgcccaggctggagtgcagtggcacgatcttggctcactgcaagctccgcctcctgggttcatgccattctcctgcctcagcctcccaagtagctgggactacaggcacccgccaccatgcccggctaattttttgtgtttttggtagagttggggtttcaccgtgttagccaggatggtctcgatctcctgacctcatgatccgcccacctcagcctcccaaagtgctgggattacaggcgcgagccaccacgcccggcctattgttatattttctttaatgttttgtattgagtatcgtttacctacagtaaaatgcacccattttagtgtacagtttggcaagttttgacaaatgtgtacaaccatrtaacctctactgcaatcaagatgaacaaatgttccatcacc

SEQ ID NO: 257537 - DNA, 529 bp, Homo sapiens
cattgctcgcaggtacggaccctggttcaagggcaaggatgggaatgagagagccaagcttggcgactacggtggagcctggagccgagccctcaaggggagggytgtccgggagaaggaggaagagcgaggtaagagcgaggaacatctggacactgaggggctggggagaagggaggagatactaacaatgtaataacagctgtcagttttcagtgtttaataggaaccagctgtcatatcattgtagctataaatagtgcctgccattatcatccccattgcacagaggagaaaattgaagctcagagagatgaagcggcttgcccaaggtcacacagcttgtcaagaggcaagtttggatttgaactccacatctatcagaggtcaaagtctgactctcccctgtagccttttacagtccttgttaaatatacatgaaaataaaacagtcagcatttattgggtacttactaggcaccaagtactgtttccaagcactttacatatatagaaacatcaccacaac

SEQ ID NO: 257538 - DNA, 523 bp, Homo sapiens
agggtttaggaagagttatcacagtgagaccataagctgggttttgaaggatgagtaggagttttctaggtagggcagaaataacagcatgctcaaaggccaggactcctgaaatacactgaaacactcagggtgctcaggtaggcagcatgggagtwcacagagggtacaaagggagtatcaggaggggaagccacagaggtgttcaaagcccagtgaaatggggacttgaaagctaactaaagcatccagatttgaccaggagggcaatggggagccactgcagggtgtctatcagggaagtggtctacattcattctatgaatgtgtattaatcatctgtcatatgccaggcattgtccagggataggtgggcaagacccacagggtcactgccctcctggatattatattctagagaataagaacaaaagcaatttacaaactacattaaaaatcactaatatcatttcaaaagtgatgagggtgtctaaagatattatattctagagaacaagagcac

SEQ ID NO: 257539 - DNA, 523 bp, Homo sapiens
agggtttaggaagagttatcacagtgagaccataagctgggttttgaaggatgagtaggagttttctaggtagggcagaaataacagcatgctcaaaggccaggactcctgaaatacactgaaacactcagggtgctcaggtaggcagcatgggagtacacagagggtacaaagggagtatcaggaggggaagccacagaggtgttcaaagcccagtgaaatggggacttgaaagctaactaaagcatccagatttgaccaggagggcaatggggagccactgcagggtgtctatcagggaagtggtctacattcattcyatgaatgtgtattaatcatctgtcatatgccaggcattgtccagggataggtgggcaagacccacagggtcactgccctcctggatattatattctagagaataagaacaaaagcaatttacaaactacattaaaaatcactaatatcatttcaaaagtgatgagggtgtctaaagatattatattctagagaacaagagcac

SEQ ID NO: 257540 - DNA, 568 bp, Homo sapiens
cgtctggtgcttcgtctataaaatgaagacaatcccaatctttcacaatttctggggccacygagtgaggtaaagactagaaagcacctagcacagtgcctgttacagagtagctttttcctaatggaaactccccaattcactccgagaagcacccaattcaagtgatttgaatttccaacagcccacaggagcctttggtaatgtctaaaaatagctggcttgaattctctttggacagttaggctctttgtgtaattcaatctctctctgattataggtagctaggtagccattaacagcttccagctcactgcctttcctcctcaccagcatctttaatgcagtggagcttggcctaattacccaggggttggtggcttctttcaaaccaaggagaactcttccacggctgcctctaagctgatgcctggtgacatttacctcatttttgtgaagctccagaacaaagagatgataggacttcagagacacttgcagctggttccgggctgttcttcatctgcccccagcaaagggagttgatgaacagttgctctgcttgctt

SEQ ID NO: 257541 - DNA, 568 bp, Homo sapiens
cgtctggtgcttcgtctataaaatgaagacaatcccaatctttcacaatttctggggccaccgagtgaggtaaagactagaaagcacctagcacagtgcctgttacagagtagctttttcctaatggaaactccccaattcactccgagaagcacccaattcaagtgatttgaatttccaacagcccacaggagcctttggtaatgtctaaaaatagctggcttgaattctctttggacagttaggctctttgtgtaattcaatctctctctgattataggtagctaggyagccattaacagcttccagctcactgcctttcctcctcaccagcatctttaatgcagtggagcttggcctaattacccaggggttggtggcttctttcaaaccaaggagaactcttccacggctgcctctaagctgatgcctggtgacatttacctcatttttgtgaagctccagaacaaagagatgataggacttcagagacacttgcagctggttccgggctgttcttcatctgcccccagcaaagggagttgatgaacagttgctctgcttgctt

SEQ ID NO: 257542 - DNA, 568 bp, Homo sapiens
cgtctggtgcttcgtctataaaatgaagacaatcccaatctttcacaatttctggggccaccgagtgaggtaaagactagaaagcacctagcacagtgcctgttacagagtagctttttcctaatggaaactccccaattcactccgagaagcacccaattcaagtgatttgaatttccaacagcccacaggagcctttggtaatgtctaaaaatagctggcttgaattctctttggacagttaggctctttgtgtaattcaatctctctctgattataggtagctaggtagccattaacagcttccagctcactgcctttcctcctcaccagcatctttaatgcagtgsagcttggcctaattacccaggggttggtggcttctttcaaaccaaggagaactcttccacggctgcctctaagctgatgcctggtgacatttacctcatttttgtgaagctccagaacaaagagatgataggacttcagagacacttgcagctggttccgggctgttcttcatctgcccccagcaaagggagttgatgaacagttgctctgcttgctt

SEQ ID NO: 257543 - DNA, 578 bp, Homo sapiens
ctagcctggcaatgcagagctgacattgtcagaatgtggggcatgggcttttgcaatccttggactcccactgtggggccgagaggatttctggaaaattcaggtagctggaatgggggtctatggagcccaacttgttaaaattgrgcagatcttcttcaggatagtagagatgggaaacaaggatgtgatgtcaaacaagattggggtcaaatcccagctctgctccctaccagctgtgtgacctggaaaagtaattgaatcttgctaagtttcagggtctctgcctacaaaataggataataatattgttcacctcataggttgctgtgaggattaactgagatataatacacacaacatacttagcactaatgacatagagtaaacagctgttattactgccatcattgctattatatagaaaggtttgatcattaggaagatgccatccagggctactgctgttgtcattcatgactccagggagtaccattcacatagactatgagctgtgaaaagcagtggccctgaaatctgtgaaggattttccttgtaactgaaagtgctcaaagatc

SEQ ID NO: 257544 - DNA, 624 bp, Homo sapiens
gtgatgtcaaacaagattggggtcaaatcccagctctgctccctaccagctgtgtgacctggaaaagtaattgaatcttgctaagtttcagggtctctgcctacaaaataggataataatattgttcacctcataggttgctgtgaggattaactgagatataatacacacaacatacttagcactaatgacatagagtaaacagctgttattactgccatcattgctattatatagaaaggtttgatcattaggaagatgccatccagggctactgctgttgtcattcatgactccagggagtaccattcacatagactatgagstgtgaaaagcagtggccctgaaatctgtgaaggattttccttgtaactgaaagtgctcaaagatccaaggtgttttaagttgggttcccccaatacagggatgtgaaccttggctacctggaaggtgttgccaagatgcacccataggggactagaaaggttagatggggaagaaagctaatacagggtccctgacaaagcaggtctctagtgaggacaatggaagcttaaccccactggagagctctggaggatggtattgaacaaacctcagacgtgttccacctgaggagcagaa

SEQ ID NO: 257545 - DNA, 624 bp, Homo sapiens
gtgatgtcaaacaagattggggtcaaatcccagctctgctccctaccagctgtgtgacctggaaaagtaattgaatcttgctaagtttcagggtctctgcctacaaaataggataataatattgttcacctcataggttgctgtgaggattaactgagatataatacacacaacatacttagcactaatgacatagagtaaacagctgttattactgccatcattgctattatatagaaaggtttgatcattaggaagatgccatccagggctactgctgttgtcattcatgactccagggagtaccattcacatagactatgagctgtgaaaagcagtggccctgaaatctgtgaaggattttccttgtaactgaaagtgctcaaagatccaaggtgttttaagttgggttcccccaatacagggatgtgaaccttgrctacctggaaggtgttgccaagatgcacccataggggactagaaaggttagatggggaagaaagctaatacagggtccctgacaaagcaggtctctagtgaggacaatggaagcttaaccccactggagagctctggaggatggtattgaacaaacctcagacgtgttccacctgaggagcagaa

SEQ ID NO: 257546 - DNA, 624 bp, Homo sapiens
gtgatgtcaaacaagattggggtcaaatcccagctctgctccctaccagctgtgtgacctggaaaagtaattgaatcttgctaagtttcagggtctctgcctacaaaataggataataatattgttcacctcataggttgctgtgaggattaactgagatataatacacacaacatacttagcactaatgacatagagtaaacagctgttattactgccatcattgctattatatagaaaggtttgatcattaggaagatgccatccagggctactgctgttgtcattcatgactccagggagtaccattcacatagactatgagctgtgaaaagcagtggccctgaaatctgtgaaggattttccttgtaactgaaagtgctcaaagatccaaggtgttttaagttgggttcccccaatacagggatgtgaaccttggctacctggaaggtgttgccaagatgcacccataggrgactagaaaggttagatggggaagaaagctaatacagggtccctgacaaagcaggtctctagtgaggacaatggaagcttaaccccactggagagctctggaggatggtattgaacaaacctcagacgtgttccacctgaggagcagaa

SEQ ID NO: 257547 - DNA, 624 bp, Homo sapiens
gtgatgtcaaacaagattggggtcaaatcccagctctgctccctaccagctgtgtgacctggaaaagtaattgaatcttgctaagtttcagggtctctgcctacaaaataggataataatattgttcacctcataggttgctgtgaggattaactgagatataatacacacaacatacttagcactaatgacatagagtaaacagctgttattactgccatcattgctattatatagaaaggtttgatcattaggaagatgccatccagggctactgctgttgtcattcatgactccagggagtaccattcacatagactatgagctgtgaaaagcagtggccctgaaatctgtgaaggattttccttgtaactgaaagtgctcaaagatccaaggtgttttaagttgggttcccccaatacagggatgtgaaccttggctacctggaaggtgttgccaagatgcacccataggggactagaaaggttagatggggaagaaagctaatacagggtccctgacaaagcaggtctctagtgaggacaatggaagcttaaccccactggagagctctggrggatggtattgaacaaacctcagacgtgttccacctgaggagcagaa

SEQ ID NO: 257548 - DNA, 575 bp, Homo sapiens
tgcacagcagtagcttctaatccatctcgggccctttaagtcctctaaaaatttcaccttacttggtattcagagcattcagtttagccctcctctctaagctgggagagtcagggactcattagcaggtgcttaaatgtcaaagggaggccagtctctgcagagcttccttcctcttcctactctggcctcctaatatctaggcaggctggaagaaatcacatggagaaatgccagcctagggattccacatggstctccccctcttttcagtctaaggacagctggcaagcagacggacctttgactgccccctctctagtacctgcagctcacaaagtttatccatgtccatctctgaatgatccacccaatatttatgcccccattttagagatgagaacattaagactctgaaatgagaggaaacttgcccatggtcaaagacaaagaagggcagaggtgccagtgggtgccatgtgaaggagagttccccattttacagctgaagatgctgagttccagagaggagaaacagagtcgggattagagctcgtgtttcctagttgctaagt

SEQ ID NO: 257549 - DNA, 571 bp, Homo sapiens
tactgccacttgtcagctgtatggccttgggcaagtcacttcccctctgcacctgttttctcttctttataatggagagaatgagatcttcctgctaagggttaggagggttccatyggataagatatatcaagcgtttacacaatgcctggcacttgataaatatcaaagatgtcagactaactcttgcaagctgggtgacctgtatcaagcagtttcagtcctctgagccttgagtttcctcatctgtaaaaatgggaagccccataggaccagggtgaatgggagagttcaatgagaccacatgtgtgaacagctcagcctacttcccatcacataccacacaaccagtacatggtagcaataatgatcacaacaatattacgatttttttaaagacaaggtcccactctgtcaaccaggctggagtgcgggggcatgatcatggctcattgcagcctcgactgcctgggctcaagcaattcttccatatcagcctcctgagtagctgggactacagttgtgtgccaccacacatagctaattaaaaatatatatatatatttgtaga

SEQ ID NO: 257550 - DNA, 571 bp, Homo sapiens
tactgccacttgtcagctgtatggccttgggcaagtcacttcccctctgcacctgttttctcttctttataatggagagaatgagatcttcctgctaagggttaggagggttccattggataagatatatcaagygtttacacaatgcctggcacttgataaatatcaaagatgtcagactaactcttgcaagctgggtgacctgtatcaagcagtttcagtcctctgagccttgagtttcctcatctgtaaaaatgggaagccccataggaccagggtgaatgggagagttcaatgagaccacatgtgtgaacagctcagcctacttcccatcacataccacacaaccagtacatggtagcaataatgatcacaacaatattacgatttttttaaagacaaggtcccactctgtcaaccaggctggagtgcgggggcatgatcatggctcattgcagcctcgactgcctgggctcaagcaattcttccatatcagcctcctgagtagctgggactacagttgtgtgccaccacacatagctaattaaaaatatatatatatatttgtaga

SEQ ID NO: 257551 - DNA, 571 bp, Homo sapiens
tactgccacttgtcagctgtatggccttgggcaagtcacttcccctctgcacctgttttctcttctttataatggagagaatgagatcttcctgctaagggttaggagggttccattggataagatatatcaagcgtttacacaatgcctggcacttgataaatatcaaagatgtcagactaactcttgcaagctgggtgacctgtatcaagcagtttcagtcctctgagccttgagtttcctcatctgtaaaaatgggaagccccataggaccagggtgaatgggagagttcaatgagaccacatgtgtgaacagctcagcctacttcccatcacataccacacaaccagtacatggtagcaataatgatcacaacaatattacratttttttaaagacaaggtcccactctgtcaaccaggctggagtgcgggggcatgatcatggctcattgcagcctcgactgcctgggctcaagcaattcttccatatcagcctcctgagtagctgggactacagttgtgtgccaccacacatagctaattaaaaatatatatatatatttgtaga

SEQ ID NO: 257552 - DNA, 537 bp, Homo sapiens
tactgccacttgtcagctgtatggccttgggcaagtcacttcccctctgcacctgttttctcttctttataatggagagaatgagatcttcctgctaagggttaggagggttccattggataagatatatcaagcgtttacacaatgcctggcacttgataaatatcaaagatgtcagactaactcttgcaagctgggtgacctgtatcaagcagtttcagtcctctgagccttgagtttcctcatctgtaaaaatgggaagccccataggaccagggtgaatgggagagttcaatgagaccacatgtgtgaacagctcagcctacttcccatcacataccacacaaccagtacatggtagcaataatgatcacaacaatattacgatttttttaaagacaaggtcccackctgtcaaccaggctggagtgcgggggcatgatcatggctcattgcagcctcgactgcctgggctcaagcaattcttccatatcagcctcctgagtagctgggactacagttgtgtgccaccacaca

SEQ ID NO: 257553 - DNA, 604 bp, Homo sapiens
catggagcctggcatcagcaggaactcagcaaattcaagtggagtggaaagagggaggaaaagccagcatctggttgcccggtgacctgagttagcatccggctgactgagttttctggttaagtgagggttcatccacagtgcttgggacttcccgcctcattgccataaatctttagctcaaatgcccactttcccggtgggtgtggtgactcacrcctgtaattccagcactttgggaggctgagacaagcagatcacttgaggtcaggagttccagaccagcctggccaacagggttaaaccccatctctactaaaaatacaaaaattgagctgggtgtggtggtgcacatctttaatcccaggtactcaggaggatgaggcaggaaaatcacttgaacccaggaggtgcaggttgcaggaagccaagattgcaccactgcactccatcctctgggtgaccttacagggcatccctctcagcaacccaggccacaagatggaagactgtccagtgtttctttacagggcactagtggcatctggatgtgcatgtgctcatttaggaggtgaagggctgtcctgtacagaacaggcatgca

SEQ ID NO: 257554 - DNA, 594 bp, Homo sapiens
gtgactcacgcctgtaattccagcactttgggaggctgagacaagcagatcacttgaggtcaggagttccagaccagcctggccaacagggttaaaccccatctctactaaaaatacaaaaattgagctgggtgtggtggtgcacatctttaatcccaggtactcaggaggatgaggcaggaaaatcacttgaacccaggaggtgcaggttgcaggaagccaagattgcaccactgcactccatcctctgggtgaccttacagggcatccctctcagcaacccaggccacaagatggaagactgtccagtgtttctttacagggcactagtggcatctggatgtgcatgtgctcatttaggaggtgaagggctgtcctgtacagaacaggcatgcacatttctggccccaractttcaagtgccagtggcctcaaatcattggagcaggcgttcccacacctctttgaatgttctcagggtagtaggcatgagagttactgcatagtttaactcccagtcctcgtttatatgtggggaaactgaggcctggagggaccacgcagcagatcagcagcatcctgacactatcacca

SEQ ID NO: 257555 - DNA, 594 bp, Homo sapiens
gtgactcacgcctgtaattccagcactttgggaggctgagacaagcagatcacttgaggtcaggagttccagaccagcctggccaacagggttaaaccccatctctactaaaaatacaaaaattgagctgggtgtggtggtgcacatctttaatcccaggtactcaggaggatgaggcaggaaaatcacttgaacccaggaggtgcaggttgcaggaagccaagattgcaccactgcactccatcctctgggtgaccttacagggcatccctctcagcaacccaggccacaagatggaagactgtccagtgtttctttacagggcactagtggcatctggatgtgcatgtgctcatttaggaggtgaagggctgtcctgtacagaacaggcatgcacatttctggccccaamctttcaagtgccagtggcctcaaatcattggagcaggcgttcccacacctctttgaatgttctcagggtagtaggcatgagagttactgcatagtttaactcccagtcctcgtttatatgtggggaaactgaggcctggagggaccacgcagcagatcagcagcatcctgacactatcacca

SEQ ID NO: 257556 - DNA, 495 bp, Homo sapiens
agtagaagcttctggcaagayagatttgggctgttacagaaggtgagggaggcgggggcagggggatacaccgggctttggagcactgcaaggcaaaggcacttggaaaaatgagcacgcatcatccaacactctgctcagagctggcaccaactgctgaatcaacactcggaaggtgcacggcacaagcacagttcagtcctgaggagcagggagaagagtgatcttaaatgttcagagatggtttctgtttggaagctcacaggtatgttcacacccctccacccacacacttgtttatacccctagagacactcagacacaccctcagagatgtgcatgcttagaagcacacacatacacacagacatgcacaaaagttacactgctgtacaaacaggcaaacacgctcagaaaaacacacatgtacgcccagagatgtgcaaaaagatacagtacaacaccactcagaaattcactcatacgtgagacaaa

SEQ ID NO: 257557 - DNA, 611 bp, Homo sapiens
acacacatattcagaccagagcccctggtatgatcaagagagttcatccatcagaatttcagtatacaaatgtagaagaatatatattgcagcactttttaatggtggaaaactggaaggaatctaaatgcttatcaacaagagaatggatggatcaattccagtatattcttaaaggagagtaccatgcagcagtgaaaattaatgagctagaactctatgtatcatcacagataaatctaaaatactatagtgttgagtgggggaaaaaagcgagttgccacaggacacatatagaattttactatttactaacatgcaaaaacctgaaaagcaattcagtatatttttatgcatatatatatgtrtatatatatatatatatatatatatatagtaaaatcataaaaacatgatggaatgatgaacaccaaattcaggagagaggttaccacagctgggaagaaagtggtttgggagggtttgcaaagagatttaagtgtgtttttcatgttctgtttcatagaagcttgttctgttattttttgcacgtttttctatgcctgaaatatttaattaaagaaagaagaatggggccacagctaacagtc

SEQ ID NO: 257558 - DNA, 576 bp, Homo sapiens
acttcattgtgtaccagacacaagtccaaggtgagctaggcccttccccagtggaccccagatgcactcccagtggcttccctcccagacgtgttcctgccagtccatcccacacagcctgcagcaaggagaaaaccatgcaagccagagggcagggctgatgaactccaccaggcttagagttcctggatgggcaacagaaggaattcccagggtgggaagcgttctgatgacccatctctatccctcatcactgaggacccttggtggctcctgtagtgagactgaatgagaagagagactgagtctcccactggctgcaacacagattcactgtgttatcccggacaagtcatttcccctttctgggcctcagtttttccatctgtaaaatgaagctgtagactgttggcctccagtgttccttccaattctaagattttgtcattttatctataagttcttccttcttctctctccctgtctcactcatcctttccacttctmgtcttcttcctttgctagcggaatccacacttactgttatctcctcttctgtctcctggggctaccaga

SEQ ID NO: 257559 - DNA, 576 bp, Homo sapiens
acttcattgtgtaccagacacaagtccaaggtgagctaggcccttccccagtggaccccagatgcactcccagtggcttccctcccagacgtgttcctgccagtccatcccacacagcctgcagcaaggagaaaaccatgcaagccagagggcagggctgatgaactccaccaggcttagagttcctggatgggcaacagaaggaattcccagggtgggaagcgttctgatgacccatctctatccctcatcactgaggacccttggtggctcctgtagtgagactgaatgagaagagagactgagtctcccactggctgcaacacagattcactgtgttatcccggacaagtcatttcccctttctgggcctcagtttttccatctgtaaaatgaagctgtagactgttggcctccagtgttccttccaattctaagattttgtcattttatctataagttcttccttcttctctctccctgtctcactcatcctttccacttctagtcttcttcctttgctagyggaatccacacttactgttatctcctcttctgtctcctggggctaccaga

SEQ ID NO: 257560 - DNA, 511 bp, Homo sapiens
agccccaccaatagcctgtccctgtttgactgatggggtaccagtggtgatcaactgtggctgtttctatggtagctaaagtccttctgagagcctagtgagcatgtggctcttggacctatttacagtccgatggggaaggatgggtttttgttagctttcggggaagtgctggttagtctgtgcagagctgtgctgccttagcctgcaggggaaagtcatacacagattaattaccctgtgatcatgaatggctttgaggtggccagaacagacactggagccttttcaacgcagataacaattccctaattgatgaatttgctcattcccagtgccctacccccaggccattactagggcttccattttkccacgtcactcttgcagtttctacacactggggaggtttgacagttatgtggctcatcagcctgccaagagcctggcccaccaggactgacatttattgagcacctactgtgtgctaagccctgatgccccttatggg

SEQ ID NO: 257561 - DNA, 592 bp, Homo sapiens
agaaaagtcggaagaattatgcagtgaacacatatatactcattccatagaattttgtgacatacrttaacttttgctgtatttactttattgtccatctctccttttctccatccctcaatccttcctaatttttggtgcatttccaagcaagttgcaagcatcattatacttcaggatgttgtcattggttatataattcaatattagctttctgaagtaacacttccatagagtggaatgcacatattttaagtgtactagttaatatcaactggctaatccactcccctatcaaaatataaaacataaccatattctataaagtccctgtgtctgggctcctttttgcagtgtattccaatgaaaaccattccctgaagcttacttggcttcgacacagatgtcccctggtttattttatcctaaatctgatcatctcagaacaaaaattaaacaggcaggagaagaaagctgaacctccagctagcaggaacaataccaggaaccacaatcgattctgtgggcaattccggcatgtttgtctcaatctaacactgcattcattcaagaatttcattctcctaaacaa

SEQ ID NO: 257562 - DNA, 592 bp, Homo sapiens
agaaaagtcggaagaattatgcagtgaacacatatatactcattccatagaattttgtgacatacattaacttttgctgtatttactttattgtccatctctccttttctccatccctcaatccttcctaatttttggtgcatttccaagcaagttgcaagcatcattatacttcaggatgttgtcattggttatataattcaatattagctttctgaagtaacacttccatagagtggaatgcacatattttaagtgtactagttaatatcaactggctaatccactcccctatcaaaatataaaacataaccatattctataaagtccctgtgtctgggctcctttttgcagtrtattccaatgaaaaccattccctgaagcttacttggcttcgacacagatgtcccctggtttattttatcctaaatctgatcatctcagaacaaaaattaaacaggcaggagaagaaagctgaacctccagctagcaggaacaataccaggaaccacaatcgattctgtgggcaattccggcatgtttgtctcaatctaacactgcattcattcaagaatttcattctcctaaacaa

SEQ ID NO: 257563 - DNA, 544 bp, Homo sapiens
taacattgaactctccctgggagcttggagttggcagtaggggtrtagacaaaatgaagagccgcttgccccccaacagcatcagtcaatctagctaaccctgcccagtctctccccacatcaccttgcagctgaaagatgcttaacttcatgaaatcctttgccgcatttgccacactggggcaaagttctgcagcccctttcagactccaggtataatgagctctttgtagttcaagaatgcactggagatttgcacgtgctatcatctgtacaatgagctgatcccctggcaactcttgctgatttatctaagtcttttagagtttcttttcttctgctaccaacttgctggatggctggacgcatgttcccctgcccctggagacctcagtttcctgctctgtgagaagcatgtatcagatgggtggtctcccagaccctcctaggcctgacaggctgcctgacattttctctctttcctccacattttctgcaacctgctcttccctcagtctggaaaagggtccactccaccagtgag

SEQ ID NO: 257564 - DNA, 544 bp, Homo sapiens
taacattgaactctccctgggagcttggagttggcagtaggggtatagacaaaatgaagagccgcttgccccccaacagcatcagtcaatctagctaaccctgcccagtctctccccacatcaccttgcagctgaaagatgcttaacttcatgaaatcctttgccrcatttgccacactggggcaaagttctgcagcccctttcagactccaggtataatgagctctttgtagttcaagaatgcactggagatttgcacgtgctatcatctgtacaatgagctgatcccctggcaactcttgctgatttatctaagtcttttagagtttcttttcttctgctaccaacttgctggatggctggacgcatgttcccctgcccctggagacctcagtttcctgctctgtgagaagcatgtatcagatgggtggtctcccagaccctcctaggcctgacaggctgcctgacattttctctctttcctccacattttctgcaacctgctcttccctcagtctggaaaagggtccactccaccagtgag

SEQ ID NO: 257565 - DNA, 295 bp, Homo sapiens
tgtcctttcatggtgatagcagagctccctcatggagagtaagcagaaacatatgatgtgtcttgagactgtgctraagacctacttccgccctcattctatgggccacaggaagtcacatggccatgcccatcatcagtagggtagggacgctgactccccacaaagagcaatcacccagtatatcactgtctggcccctctcacagcacccaagccttttctcttcttttctttttttgtcaagagacagggtctcactctgtcatccaggctggactgcagtggcatgatca

SEQ ID NO: 257566 - DNA, 295 bp, Homo sapiens
tgtcctttcatggtgatagcagagctccctcatggagagtaagcagaaacatatgatgtgtcttgagactgtgctaaagacctacttccgccctcattctatgggccacaggaagtcacatggccatgcccatcatcagtagggtagggacgctgactccccacaaagagcaatcacccagtatatcactgtctggcccctctcacagcacccaagccttttctcttcttttctttttttgtcaagaracagggtctcactctgtcatccaggctggactgcagtggcatgatca

SEQ ID NO: 257567 - DNA, 527 bp, Homo sapiens
tcctgggctcaagagatcctcctgcctcagcctcctgagtagctgggactacaagcgagaaccaccatgcctggctaatttttgcatttttctttagagacagggtctcactacattgcccaagctggtcttgaactcctgggctcaagcaattctccygccttggcctcccaagaggctgggattataggcgtgagccaccacacccagccacagtattatttttttccactttatgattaaggaaattgagacctagagagttaacagaggcccaaggtcgcagagctggtagctggctgagccaagattcaaacataggtctgcctgattccaaagccattttcatcagcctcctaaactggctccaaactggcccagcagagaccgaaagaaccataaatcaggctgctgaggtgggaggcacagggattttctgtgtgggagggaccacatcaacacagtgcctggacttctgtgcctacaagggctttgccaaggaagctcttctcacacccaggtatagc

SEQ ID NO: 257568 - DNA, 467 bp, Homo sapiens
agaattgcagacctccccgacactgggctccctaccctcctggctaggctgtagtcctggctatcccagccacacccagccgtcatcctaggtcaggtgccagcatgggggcagccggggccccttccccttctgggtaactccacagtcacgtccacaacccagcctcctcccaggtagggggcagccggggccccttccccttctgggtaactcggcagtcaggtccacaccccarcctcctcccaagcagggggccagcaccggaagcgcagctggtcttgggttgagggatccctggtgggagaaggggcaaatgggaccggctcaaggatggagactggaaggggctctgcaaccctggggcaggggagagaggtcccctaggagggcaggggtcccttgatctagtggggttcactcacctttacaggggactcaacgctggtagccagctccctatttca

SEQ ID NO: 257569 - DNA, 467 bp, Homo sapiens
agaattgcagacctccccgacactgggctccctaccctcctggctaggctgtagtcctggctatcccagccacacccagccgtcatcctaggtcaggtgccagcatgggggcagccggggccccttccccttctgggtaactccacagtcacgtccacaacccagcctcctcccaggtagggggcagccggggccccttccccttctgggtaactcggcagtcaggtccacaccccagcctsctcccaagcagggggccagcaccggaagcgcagctggtcttgggttgagggatccctggtgggagaaggggcaaatgggaccggctcaaggatggagactggaaggggctctgcaaccctggggcaggggagagaggtcccctaggagggcaggggtcccttgatctagtggggttcactcacctttacaggggactcaacgctggtagccagctccctatttca

SEQ ID NO: 257570 - DNA, 467 bp, Homo sapiens
agaattgcagacctccccgacactgggctccctaccctcctggctaggctgtagtcctggctatcccagccacacccagccgtcatcctaggtcaggtgccagcatgggggcagccggggccccttccccttctgggtaactccacagtcacgtccacaacccagcctcctcccaggtagggggcagccggggccccttccccttctgggtaactcggcagtcaggtccacaccccagcctcctcccaagcagggggccagcaccggaagcgcakctggtcttgggttgagggatccctggtgggagaaggggcaaatgggaccggctcaaggatggagactggaaggggctctgcaaccctggggcaggggagagaggtcccctaggagggcaggggtcccttgatctagtggggttcactcacctttacaggggactcaacgctggtagccagctccctatttca

SEQ ID NO: 257571 - DNA, 467 bp, Homo sapiens
agaattgcagacctccccgacactgggctccctaccctcctggctaggctgtagtcctggctatcccagccacacccagccgtcatcctaggtcaggtgccagcatgggggcagccggggccccttccccttctgggtaactccacagtcacgtccacaacccagcctcctcccaggtagggggcagccggggccccttccccttctgggtaactcggcagtcaggtccacaccccagcctcctcccaagcagggggccagcaccggaagcgcagctggtcttgggttgagggatccctggtgggagaaggggcaaatgggaccggctcaaggatggagactggaaggggctctgcaaccctggggcaggggagagaggtcccctaggagggcaggggtcccttgatctagtggggttcactcacctttacagggractcaacgctggtagccagctccctatttca

SEQ ID NO: 257572 - DNA, 541 bp, Homo sapiens
ctgaagtgggtgaatggcagtagtctccatacragcagatagaattgatcttgtgtttcacctgtctacttccatttatcattttctctcatatcccagatgtgacagacaatctgactgtggccacatttattagttttaaggcaaatgaaggattctagagacaggctgtagagaagctaaagaaaatatttcatcagagagaagttaaatacttctgaagtatttcagcaaaatacacatacaaatcctttaaaaatttcttattaactttagagactgaaacttgttaagaacctgtgaaatttctgacttaaatttcaatgcatgaacataggatgtgtgacagatacgagaatgcctgtattgggttgcagcccacggaggtctgagattggtctccaggttggaaggacaacttggatgatctcaggaactaagggacttgagcagactgaactttgaaattttctcttccctaatctccaggacacactgggacctgcagtgaaacaaaggacatctgtagcaaagcctttca

SEQ ID NO: 257573 - DNA, 577 bp, Homo sapiens
aacatgcctggcgtctaagaaactcttctaaaatactgtgaaataatcccacaaacctgctgcatctttaccttatctcaatatgtattttccacaaaacccacatgttttactttgagtctccatgtccccctagattcctccattcaacttttaaacatcactaaccaccctgtgagctgtctaccyatcttcatacaagaaaaaaaaggcatctcttctatcagatttcttcctgaaaagacagggtgtctaatagttcataaatcttacttcctttgaagttcatctaaaatcaactcctcagaatgaagtgctctgagtaggagtgtgaatggagccagtcttcttcccctaatatccagaaactaagacctcctctgtagtgcaagttttgtccagactgttcattgttttcagaactaagatgtccatgctcaaaggatttatcttctatttctccttaaaaaaggcctctgtacccagaatggactcaattaatactgaatctatttggttgcctatacctttatcttaaaaggatatcagaatgacatatctgaaaaacttagaacca

SEQ ID NO: 257574 - DNA, 561 bp, Homo sapiens
ttggataaattgcgtttcttttccccccgatatggtctgtgttgaggtgtagcagctccagagagccctttggaagacatctggggcactgagcagtcagcttgtggctaagttggtggcagctcaataatgcattccttccctgcctcactccctttttctctcactcttggaaagataatacactctccagtataatgcttgcaygtgtggttttgtctcaggctctgttttctagagaatccaagctaagaagaacaatatgaggaatggtccttgaaagaaaactctcatggtaggatttgtcatttgactgtctaccagtctgaaagcaacagggatcacactgctgatggtaaacagagtagtgaaaacatctgtcacagtgatgtacatttactaaagatgtcctactgttaattgggatgaggtaaaggtggaaggagatggaagaatgaatgcttgatcagcctgggaatatggtaatattatggattgtggtgtgggtggctgattttgatggcatttggagcattgcaaaaagaaaataagctcatgcca

SEQ ID NO: 257575 - DNA, 523 bp, Homo sapiens
gcaaattaaaatcacaagttactagcttacttttagtcaatggactggctaaaatgaaaaaaagaatgacaatattaaggactgaccaggatgtagaacagctgggaactgttatacatcacyggtgagattagaaaatggtgtgattattttggaaaagcaggttctattaacctctgacccagccatttcactgctaggttaagaaatattcatagcagttttattcataatagtaaaatatgggaaactcaggtatccagaagtaaactttgatatgttcatacaatggaaaattacttagcaataagaagaaattaacagttgatggacacaacatgaatctcaaaaacattatgttgagccaaagaagtcggacaaagtatacatattgtataattccatttatgtgaatttctagagtggtaaattaaatttaatccaaggtgatcaaaaattaaacagtagaacaatggttatctccatgaagggtcgaggtattgctgggaaggagcacaaggga

SEQ ID NO: 257576 - DNA, 523 bp, Homo sapiens
gcaaattaaaatcacaagttactagcttacttttagtcaatggactggctaaaatgaaaaaaagaatgacaatattaaggactgaccaggatgtagaacagctgggaactgttatacatcactggtgagattagaaaatggtgtgattattttggaaaagcaggttctattaacctctgacccagccatttcactgctaggttaagaaatattcatagcagttttattcataatagtaaaatatgggaaactcaggtatccagaagtaaactttgatatgttcatacaatggaaaattacttagcaataagaasaaattaacagttgatggacacaacatgaatctcaaaaacattatgttgagccaaagaagtcggacaaagtatacatattgtataattccatttatgtgaatttctagagtggtaaattaaatttaatccaaggtgatcaaaaattaaacagtagaacaatggttatctccatgaagggtcgaggtattgctgggaaggagcacaaggga

SEQ ID NO: 257577 - DNA, 574 bp, Homo sapiens
ggactatcgagacttctgttccctctattgaaggaccagagtagaagcaataacagggttggagagctgatgcctaagatcaggaatggctatgggaagaaattgacagtgcccccaccttccagctcactcccaccttcctgctcaccccaataacatcacttgttttctatttccctaagttgcagctgtatccacagtcctcagtctgacttacratcctgggcccttttcattagcttcatgcagcaccagtgccgccttcctctttcagtctaaggagtcttagaaggaggaagctgggaagcgagcagctggctttaatcctcaccaacctctgcccttctcccagaaggctgtggaagcagaaactgctgcacttgagcagagtcctcagagacatctctggcctcctctctctgggttgatgcaaggggacttcccctgacccaaggggactgtatccttgtttcctacaacccatgcctcctccccagctagtggcactgagttgtgcctaccaggggtcatgccctacttgccagaggctgtgagactttcaggtggagctggc

SEQ ID NO: 257578 - DNA, 568 bp, Homo sapiens
cctttcttgggaatactcccaagatgctctcacggatttgcttggtcttgacaccatagattatgggattgaccatgggtgggaagagcagatagaaattggcaaggaggatgtggacatgaggggcagcatggcgggctacacggtgcatgactgaagagatgaccacagttgtgtagaaggctaagatggcacctatatgagagacacatgtcccaaatgccttgtagygggcctcctgagaggcaagcagtagaactgcctgaagaataaagatataagacaggataacaaggagcaggtccaacaccacaataaacatggccacagcgatgccatagatattgttgaagctagtgtccccacacgccagcctcaccacagccatgtgttcacagtagcagtgagcgatcactgggcctcggcagtagtggaaacatctcagcaggaaggggagtggagtcattagtgtcacagcccgggccacagcagccatgccaatcttggtgatgagggacccagtcaggaccttggtgtagtgcagtggcttgcagatagccacatagcg

SEQ ID NO: 257579 - DNA, 598 bp, Homo sapiens
ctgtgtctccctctctggggctctccagtatgaatggtcattgattgcctaagttgaagaagatgctggtttctttttcagagcagaccacactggaaaccagtggttcctgccccatggctgatacaatcacccctgtcttctttgtagccacctcaggtatgcccttctcatcagtgaacctttgtgtggatattctctacttttgctccactgtgttgctgcagattcttaaattggctcttgaggccccccagggctattttgatttgtggatagctctctatttgttgtgtgggtaggtatatgtggggaaatgaaggctggcatcttctactctgcctgttatcttctagtctgccattgtgatgacatccagtattattttaagatgtcaatatttactataatccaggaattctattaaaattatttaatctgataaaaattgtagttataaactcaaaatgrttttaaaaactatacatctcttcatgcacttaaggagttcatggcaaatgttggaggatctctctaaagaacatgttcagccctggtgtttgatctgaaacttccagaatgggaaagatttagatga

SEQ ID NO: 257580 - DNA, 547 bp, Homo sapiens
tgttgcctatgggttgactcttatgccctagaaagaaaactgctataccaaaaactcaattcagagggagtcgcccccacttatctggacccaaccagaaatgcgacagatagaaaaattaaaacatttactagtaactgcccctgttctcattctaccctccctagagcagccatttcatcttttcgtcagtgtaaacaagggagtggctttaggggtactcacccaagatcatgggggccaccagcagcccatagcctttttgtcaaaaattctagacccagtaacccatggatggcctgcatgtgtccaatctgtagcagcaactgccttgctaacagaagaaagcggaaaattaacctttgggggaaacctcattgttagcacacctcaccaagtcagaactattctcaaccaaaaggcaggaagatggcttactcaakaattttaaaatatgaagctatcccaccattagaaaggatgacctagcactaaccactaagaattccctaaatcccattgctttcctaataggaaatccaaaccc

SEQ ID NO: 257581 - DNA, 572 bp, Homo sapiens
aaacgtccttttttggttctccactgaaactcatgttaaactccctgtgcatgtgactctccctccacctgtcttccagttccttctttttgtcacaggagaatttgctctcatctttagcaagactgacttatgacttccaaatatccttcttgttaacaatttttcacctttttatcttgttctggtcattgttcttttttcagatccttaaacactagagttacccagtttttaccaagmctgttataaaattataaaatatatgtttgtataaaacatatatttatacaaaatataaaatataggatccacttaatgagattcttttgaggattaaatgagataatgtacttcaaacacttaatagtcacagaacaaagtaaatattgaaaacaaaaactgggtctctttttcaaaaagaaactgttgggaaatataataattgctctaagatattatagctaatagtgtcagacagccatatctgagtccttctttctaccgattcccatgtcttaagtaactaggcttattgtttccatctagatgccctatatgcaacctgcatc

SEQ ID NO: 257582 - DNA, 532 bp, Homo sapiens
cagcctctctctctctctcccacacatacatacacaaaatacttacagtgaggcatattgcagccagccatcgtagatttattaaaaaaaggggccgtttccccttgtgaagcaatgcatratagagagataaccaatcacagatagtgttgcagcaatattctgggcagaaagccaatagtgtgggttgtcttatgaaaggtcgcgcctgtcagacgttcattactatgctataagcacagaaaatgtccatcagatgtgacttattccactgcaagaggacgagcatgtgggttttgaatttacccaacatgcagttagtggactaaaccatgttagtttcaaaacagcttctcagacaagtctaagcacttgaagatcattaccagggaataaaaagcaaggtttaaaaattgcagctgacttccaagctgctttccctccggctctgcgcagggacgggcactgaacagcctgctcctgctgtcctgacacgtgaataaaaaaggaaaggggtgtttacaaatggtac

SEQ ID NO: 257583 - DNA, 604 bp, Homo sapiens
tagtaagtttaataatacgtagtgtggaacataaacagacacttggtgtttagggtagwaaccttacaggagttgtgttttggtgacattttataggggtaggacacatatagaatgaagtagagattgtggttatacagaacagagatgagggactagatgaggggagtggccctagaatgaaaaggaggacatgtatgctgagagaaatgtgataaggttaggctgcataggatgtaccagctgactggatgtggatattaaaggcaatgggggtattaacaattatttttaaaatacagcaagaatttaaaaaacttttaatcaatcaaaaattccttatttaagaattatataaaatatcagtaagtgaaaaacatttaaaattgtattttatcagggattataacttaagtagaagatacatgttaatttcttaaaacatttcatttctgtgctaagctctttcaaagcactggatggtgatctaaaggtcaccaaattctttgtcccaaattggtaattttaaagtaaacataatttcaacgttaggcctattttgttatttgctgagaaatgtctcaatgtcaaccaggcagttctc

SEQ ID NO: 257584 - DNA, 453 bp, Homo sapiens
taaagcactgcaaaactgaaactgttacttacacatgaactatggtctttcactacttcagccacaagagtaaaaaacaggtgcagaggtgcagatcctgcaaaactgaacatttagctggctaagtttcttacaggttggagtagtaaatgagaatatttaaaggacagtagggacaatggttgaaaaaagacataaaaaagttgatcaaagcaagtactactgccaaattcaaataaaaggatatatacaaatatatttatcatgggtttaggttgccagataatagaagccaatgtgtagcttcattttttatgtgtggcagttgctcccaamctcccttgctcattggggaagaaggagatggattgcaagagcaatacagtaattatgcaaacctccacatgttgcaagaaccactttctggactttagaagctatcatgctgtcact

SEQ ID NO: 257585 - DNA, 582 bp, Homo sapiens
atgtgcatatttaaaattctctgtcattaatgttaaatacaacgcacctctctctgactgatttttcttttctgttaacataaacgttaacctgagtgttttaacctgcttccaatcaagaatttagcatgaggaagattcagatgaaccgtatgtgcccacctttctccaaaactgccagcatcagaaataaattaatttcttctgtctagtccaggatgatactatgctggcatcacacttatttaccaaatacttgaacagaaaaactaaatggtgtacatatcaaatcacatcattttaataaattatgagttgattttgtctcttctccaatatatacaaagtatctaaagagttaacctgtctaccgaatggttttaggcaaattccacactctgcccacaaacagcytattcttggcttctttgtgcccactttgttttgcccgtccattatttgtgaatatttctatcactatactggaaattactttgagaacaggcacatcttacctctttttcctccaaagggtatagcatgatacatggcacactggcactgcaatcaatatttgctatt

SEQ ID NO: 257586 - DNA, 280 bp, Homo sapiens
tccttcaaactctttccctgaatagtgactgtacacacgggtctatcctctgagacctgattagcccaataagyggcttttcctgcagggttggtacttccaaaccctcctgttctttccgttttgttttccccaattttaacataaggcaaaagcagtaattgagcaattctatcacctggattggcactccagggaacagtggagctgatcactaactgaattccccctttataatctgaataaattaccccagtatgaatttggactcccttcaaat

SEQ ID NO: 257587 - DNA, 280 bp, Homo sapiens
tccttcaaactctttccctgaatagtgactgtacacacgggtctatcctctgagacctgattagcccaataagtrgcttttcctgcagggttggtacttccaaaccctcctgttctttccgttttgttttccccaattttaacataaggcaaaagcagtaattgagcaattctatcacctggattggcactccagggaacagtggagctgatcactaactgaattccccctttataatctgaataaattaccccagtatgaatttggactcccttcaaat

SEQ ID NO: 257588 - DNA, 280 bp, Homo sapiens
tccttcaaactctttccctgaatagtgactgtacacacgggtctatcctctgagacctgattagcccaataagtggcttttcctgcagggttggtacttccaaaccctcctgttctttcckttttgttttccccaattttaacataaggcaaaagcagtaattgagcaattctatcacctggattggcactccagggaacagtggagctgatcactaactgaattccccctttataatctgaataaattaccccagtatgaatttggactcccttcaaat

SEQ ID NO: 257589 - DNA, 280 bp, Homo sapiens
tccttcaaactctttccctgaatagtgactgtacacacgggtctatcctctgagacctgattagcccaataagtggcttttcctgcagggttggtacttccaaaccctcctgttctttccgttttgttttccccaattttaacataaggcaaaagcagtaattgagcaattctatcacctggattggcactccrgggaacagtggagctgatcactaactgaattccccctttataatctgaataaattaccccagtatgaatttggactcccttcaaat

SEQ ID NO: 257590 - DNA, 549 bp, Homo sapiens
tatgcatagctcctccaatcccatcacaagccttcacatattctgtaattacatcaactcctgctggaacttttccttttaatggctttatggccgactgacattctggatttgcattttcataggccattaattctacaataacttttcgggcattgtcatctgtaatagacttttgagcagcatcttgtaatcttgccacaaagtcaggatatggctctttagagccttgtctaattgaattaatagggaaagctgttcctgggtcctgaatttttccccaggccctgaggcaaatagcccttacttgttcaatagcctcattctgcatcactgattgttggttaatggtgctccaatttggacctgttcctaacaattggtctgcgtctatattaacagtgggcttagtagcctgattttttcgtacctgttcttgtactccatcaatccaccaggttttaaactgtagatactgagaggatgaaagggaagatttggccaaamtttcccagtcataaggagtaagtctatttccatgagcaatgg

SEQ ID NO: 257591 - DNA, 389 bp, Homo sapiens
gtaaactttctgtttctttctgggattttctccctgtcttttcattacaatctattacacagcttccaggggcatcagaaactgaaacgctatcttcttttgtttgaaatggttctaaagctgctttaataatggcccaatcattccatactgtaagtggaatgatattaccctttctacctgcttgttttagttcctygccaattcttttccaatcttttagatctaaagttccttgttctggaaaccatgggcaaaattgttctattatttgaaatagcttgattagattttttgtagatactctaactccccctctttttaaaagaattttaataaagctgagataagaggcatatttacttttagttttacttttagtttgcccc

SEQ ID NO: 257592 - DNA, 389 bp, Homo sapiens
gtaaactttctgtttctttctgggattttctccctgtcttttcattacaatctattacacagcttccaggggcatcagaaactgaaacgctatcttcttttgtttgaaatggttctaaagctgctttaataatggcccaatcattccatactgtaagtggaatgatattaccctttctacctgcttgttttagttcctcrccaattcttttccaatcttttagatctaaagttccttgttctggaaaccatgggcaaaattgttctattatttgaaatagcttgattagattttttgtagatactctaactccccctctttttaaaagaattttaataaagctgagataagaggcatatttacttttagttttacttttagtttgcccc

SEQ ID NO: 257593 - DNA, 571 bp, Homo sapiens
aacaaattgagggaaagcaaatatatggggaaactgatgatagataagggctagccagtaggtttgtttatgtagactctttctcagtgccatctcatctctggtgataagttgttttcttcctggtatgtaaccataatagatttgtttcctgatgcactcagcaagtcaatatactgagataccaggttgcagcagagaaagcgttttaatcataggkctgcaaacaaggagacaagaagaaacctcaaatccatctccccagggggtttggggttagagattttaagggttttgcagtgggctgaagtaaggagactgttgatttgtagaaaattgtagagtgaagtcatggaagaaggagatgaataagctgtatatatatatatacactacccatgactatatatatatatatataggcacaataacagtttaatgtagccttgacctcctgggctcaaagaaactgtattctcatgttgattcagttcctctgtgggggtcttcaaacattcaagttgtaccactggaattcagaatctgcttaagcactttctttttttttttt

SEQ ID NO: 257594 - DNA, 523 bp, Homo sapiens
taatcagtataatctaccatattaacaggctaaagaagaagtcatataatcatattaatcaatgcagaaaaagcatttgacaaaattcawtgtcctttcataataaaaactctcagagaaataggaatagagaacttcttcaactagataaagaatacaaaaaaacctacagctaaccagctaccactatactaaatgatgtgatactgaatactttctccctatacaagggaagactatctactctcactactcttatttaacaaagtgttagatgttctagccagtgtaataaggcaagaaaaggaaataaaattcacacaattggaaaagaaagaaagaaaactgaccgtatttgtagatgacatgattgcctatgtataaatctcaaggaatttacaaaaaacttctagaactaataagttcagcaaggtagtagtacacaagataaacataaagaaatcaagtatatttctatatactagaaataaacacatggaaatcaaaatttaaaatatcattt

SEQ ID NO: 257595 - DNA, 636 bp, Homo sapiens
tccaagaagctcaatgaaccccaagcgtaagaaacattttttgtgacagcaagtcacatcaaaatcaaactgctcaaaatcagtgacaaagagaaaaatcaatagcagccagaaaaaaaaaagttattttatgtacaaaggagcaaagataaggatgacagtagatttctctctagaaacaaggcaagtgagaagactgaagcaacatcattaaagtactgaaagaaaaaatgttcaacccagattctgtacctagcaaaaatatctttcaaaagcaaaggcaatataaagacttattagacataaagaagcwaaaataatttgtgagtaacagattcacactacaagaaatatgcaaggacagtctttaggtggaagaaaactgatatcagaagaaaatatggatctgcacaaagaaatgaaaaccatcagaaacaatgactatgcaggtagatatgtatttttcttattgtttaaatatctttatacaataattgactaaacaaaaataatagtgatcaagcataggatttataacataggtaaaatgtgtgacgatcatggtacaaaaagtagatggacaaagtggaagtatacagttgttaggttcttatactgtattttaaatggcgtaat

SEQ ID NO: 257596 - DNA, 636 bp, Homo sapiens
tccaagaagctcaatgaaccccaagcgtaagaaacattttttgtgacagcaagtcacatcaaaatcaaactgctcaaaatcagtgacaaagagaaaaatcaatagcagccagaaaaaaaaaagttattttatgtacaaaggagcaaagataaggatgacagtagatttctctctagaaacaaggcaagtgagaagactgaagcaacatcattaaagtactgaaagaaaaaatgttcaacccagattctgtacctagcaaaaatatctttcaaaagcaaaggcaatataaagacttattagacataaagaagcaaaaataatttgtgagtaacagattcacactacaagaaatatgcaaggacagtctttaggtggaagaaaactgatatcagaagaaaatatggatctgcacaaagaaatgaaaaccatcagaaacaatgactatgcaggtagatatgtatttttcttattgtttaaatatctttatacaataattgactaaacaaaaataatagtgatcaagcataggatttataacataggtaaaatgtgtgacratcatggtacaaaaagtagatggacaaagtggaagtatacagttgttaggttcttatactgtattttaaatggcgtaat

SEQ ID NO: 257597 - DNA, 551 bp, Homo sapiens
tttcaaacagttgcacctaagtcacaacgcaccctccctagggccactcctgcccctggttataactagcaaacacaagccagcctgctgctgtactttatttctaattcagagagttctttcttagatctatccactcttctcgggagctcctggcatctcagggtagtgagcacctccctgaaagctctgggtgaccagtctttattcattgcacgtgtgcctcctccccaaagtctagcgtgaagaaatcggacaagatacagagatcctctactccaccgggggaaagtgaaaaccacacagtttaagagagatgggagaacagagaagcagcagcaggctctgttcaacagatgggcagcccagggtggcgagggggagaaatgtgccccagagcagcagcttgtcccggtgctcacatagggtgtccttcgaatggctccccaaatccaaccaaagcctsttcttacaaagtcatcgacatgtctctctcaggccgggcttcttcaaaacaaaaggcacttctccctctccagtgctcaggttca

SEQ ID NO: 257598 - DNA, 583 bp, Homo sapiens
cctcacttttggaaggaaagttactctagtccagaacagcagcacccaggagtcttagtctcataacttcttcatattgaggccccaagagctcatgcttgtgtaggttttgtctrttgatatttactgtactagatattaaaactgagaaaagtagctgggtgtggtgcttacccctgtaatcccagctctttaggaggctaaggtgagcagatcacttgaggccaggagttcaagaccagcctgggcaacatggtgaaaccctgtctctactaaaaatacaaaaattagccgggtgtggtggcagacacctgtaatcccagctactccggaggttgaggcaggagaatcacttgaaccctggagatggaggttgcagtgagccaagatcacaccactgcactccagcctgagagacagagaaaattacaaaatatttgttaattcatttaaaaataacatctatcatacgtgaatatatacaatagttttttaattttccaaaacaaaattagtgagaacagtggccttgttttatattcacaaatctctttaatggcagccttaatagaaaccagctaga

SEQ ID NO: 257599 - DNA, 382 bp, Homo sapiens
ctgtctgctgactccactgggagaggacaatggaagcccacacctggagctctactggactatgcctctgcacctttttccattgctgattttcacctgtaaccttttgctaatraactgtagctgtgagtctaacagttttgctgaattccacgagtacttctagtgaattactaaagctaagagtggttttggggacccctgaatggcagtcttcttgacccccattgttcctgtctgttccatcttatccccttctgcttcggagctgaccctggctctctgcctatttccttgcacctgcctcttggacctctctgccttcaagtttgcattgcattgtgggatggcacacccagtatccagcaatcagcctagccag

SEQ ID NO: 257600 - DNA, 613 bp, Homo sapiens
gtttctctttgccttaccataaacaacaattccttaagggtaggcactgtgctaattcctgtcaccattgtttagtctttcctatcrctggtttcatataaatgggatcataagaaggtattcttgtatgactgactttgcacagtcaaaatcatgattgtgcaatgtatgcctcagaagttcgttcttttcattgctgagtactattccattatatgcatataccacaaattattgttcataaacacatagactgttttcaattttggctcttgtgagcaaagttgctatgtgcatgtctttgggtcaaaaaaagcactcatttctattgggtacctaggaccagagttgctgaaaaacagagcctatgtatgtttagcctttgtggaactttcaaatagttttctgaagcagtgatcactatttacactcccattagcatttttaaattggactttatgtcttttgcttactgatttctacgagttcttcatatattctgaatattacagtgctttgtctgatacatgagttaaaaatatcttgtcctaatctgtagcttgcttcttctctctcttaatggtgtagttttatgaaaagaagcccttaattg

SEQ ID NO: 257601 - DNA, 593 bp, Homo sapiens
tcaggtgggggtggggctaggtgtgtgtgagctcagactctccttgggcaggtcttgctgcagctgctgtggggaatgggagtgagatcctcaggtcattggagttgtgtacctagcaggataatggctgcctttgctgagtcatacaggtcatcaggaaagtgggggaaagctggcagtcacaggccttacccagctcccatgtaaactgaagggccggtctcattcccaccatgtccttcaccccaacagccccgagtctatttccaggcagagggcatgatgggcttgaaaacttgccctgggctaccagccttctagctgtgaaagaaaagggattggttcctcccctgcctatggagtctgcacactggattygcaccctcccccaagttctggccagaaggctcctcacccctttcaaattgttgcaaagttcagctagagatgtcctttttcctgtggagtttcaccccctactcctctggtcaccctcccgatggatccctgtggtgccaggtaagaatggcctactaggggatgcagtgagctccaagggcctttctgctgcttcctctacccctgtatttcac

SEQ ID NO: 257602 - DNA, 547 bp, Homo sapiens
ttaaaatatgtagggtaaaaggttgggctaaatattcagtcattatctttgtatttgaagtgaacgacattttaaaagtgtaaaagtttaaaatattcagaacattgcctttactttttattcttgggcatcatctagatccagtctaaggctgtgatgattttgttgggctccattgaaagcttctttcagtccaagttgcctggttgaaaatacatgagcctgtggtctgactgaggacagttgctgcgatgctggaatgttctaatagcatgaggacctggctccaggagaacagaagggaaaagcagcttatttatcaatttattttcaattcaggactggatttcttatagaagcctggtatatgagtgcacacatttacctgacttttctgcaataggtacactcctaaagtcacacataggccagatttttgcagaacaaattcctttcttttctattaacttacattataatttcagaaatgatttccctgcatttcarttagcagtgagtgattctttacattatctgtcttactcaa

SEQ ID NO: 257603 - DNA, 633 bp, Homo sapiens
aaatgaacatattccaaggagcgtgtgtgtgttggggcgggggagttggagggggagagttaatgaagatcttcatgactggaagcaaaagcagagaggagggtactattacatggagatgcwtaacacctgccacctcccccaaaagccaggccaacaaaaacccagactcctttaagacgtcttaaacaaaggtcctggtccccacgccctttttggaaccttcactgagaagcatggcttagtcacattgggagtcatataggaagatgggtggtgactcctttatcctttatccctgaattccaggagcctcttgaacttcccatcccactgcgacttatccaccagagcccccaagggcaatcagctgctagcttcccctggcttgttctttcttgctccgacgtgcccctacattccccaaacacaccagacccatgatggctccaaggttttgagcaattttcttccgactgctgggattaccctttctctacctggttgcctaactctcccttgttttctgagtcttggcttagagtccacgttctgtgaagtgttcctaaccctctaggcagagctgggtcaccacaggactttgcatgtatggtcaaccggattgaattgtta

SEQ ID NO: 257604 - DNA, 633 bp, Homo sapiens
aaatgaacatattccaaggagcgtgtgtgtgttggggcgggggagttggagggggagagttaatgaagatcttcatgactggaagcaaaagcagagaggagggtactattacatggagatgcataacacctgccacctcccccaaaasccaggccaacaaaaacccagactcctttaagacgtcttaaacaaaggtcctggtccccacgccctttttggaaccttcactgagaagcatggcttagtcacattgggagtcatataggaagatgggtggtgactcctttatcctttatccctgaattccaggagcctcttgaacttcccatcccactgcgacttatccaccagagcccccaagggcaatcagctgctagcttcccctggcttgttctttcttgctccgacgtgcccctacattccccaaacacaccagacccatgatggctccaaggttttgagcaattttcttccgactgctgggattaccctttctctacctggttgcctaactctcccttgttttctgagtcttggcttagagtccacgttctgtgaagtgttcctaaccctctaggcagagctgggtcaccacaggactttgcatgtatggtcaaccggattgaattgtta

SEQ ID NO: 257605 - DNA, 489 bp, Homo sapiens
gccagcagcaatgcctttccctgcctgcttctaattcccgtccccttattaaattcagggctgatttgggctgtgtgagctttgttggaccccctgctgctggaccaattccttttctttctctcctcctggtgactaatagctgctctttccttcagtctgtgtgcgcctcccttctcctcccctcccgttcaaaggcagtggagtcgtgatgcctcctcatccactggactccccgaagcacagttctgggaagcaagttcaagccccccaggccagctcttctagggtctggggcatctctctctagggaggtattgctgtagaaataggaggmtggctggcccagaggggatggagatggagaggaaggaggaggaggaagagagaggccgggcagtctagcacaggagggagggaaaggaggcagagcctgcaaaaggatggagcactcagggcagatcacagaagccccagaacaaagggaga

SEQ ID NO: 257606 - DNA, 508 bp, Homo sapiens
tggcatagccagacactttccatagctttgagaatctattcttgacagtcagttttagttttagactgttttgattgtcaagtacaactcagaagttttgtatgtgtcactttccwtagctttcagaatttattctttacaatcagttttagttttagattgtttggattgtcaagtaaaacttagaatttttttttattttatgagtagggtaataatttatacttagatttaatttcaaagaaccgtttgtggctaataagatattttcaaacttttttagtaattgataggaacttcgttttgagcatataacatttgttttatgtcctgcatttgatattactgctttgaagtgagagcaactgtatcttaaatacttaggtgtagtctcttaacgtgtgttacctcttttaatcctcttcatagttaactgttttataaattgggggcctgctttgaagagattaagtaacttaaacaggttcacccgtccaggtatgtgtca

SEQ ID NO: 257607 - DNA, 569 bp, Homo sapiens
aaaacagcaattttgttcaaaaaaaataartgtttttattttaaaagtttttaaaaaaggtatttggaatacaagcccgagagtaactagtcaaatacactatctcttcattgctctgactttgggctttgttatagttcactgctattaggtttcccgttagtatagtcttttcccatatattgtgacttcagactgacaatttccatcttataataatccagaacttttagaagaatcaggaaccaactacttggaagagccaatgacctcaatttgatgataaaaagcctacagagataaacataacttcaaagatagtgtggtaacagatttttaacaaagtaacagtggctaccaggtattacaaactgattaaattctaaaatatcagatcacatttattttatcacatttataccaggcactgtacactattaataatacattttaactatgtgatatggattctgtcatttaatgctcacaacagccctatgagttattatctcatttttctaagtgaagaatacaggtagatacagtaacttgtccaagatttcatggac

SEQ ID NO: 257608 - DNA, 492 bp, Homo sapiens
tgaatgttaagccaggagatggatgaaagaggaaggcagatttattgtcaagggaggggaaagactaacatcarttatgtttaagggaagctggcctagcaatttacatggaagtggcttgtgatacagggagtatagtttaagtcttttaaggtatatgtgaaatgattggccaaacttgttattgctgagtatagaaagtaaaaacagaaatggtatgtaaataacttaatattgcttttgtgatcatggaaaagtaggaaggatttgtttgggaaaggaacgatgaatacctttgttttcagttacataaaagattaaattaattttcctcctctttcttgttctgttgcaactttggactccagttggagactggatctcccttattctgtacctgacatcacctggcatgatgactttgctcatagttgttgctcaggaacattcattaactaattgcgtatatgaagaaatatagattactggagt

SEQ ID NO: 257609 - DNA, 606 bp, Homo sapiens
actaggtaagactctgtgcttagtatctatttgtatggaaaccatctcattatttgacatacattacgtatagaatatgtaacagttaaattgttttatgttttggggcccctccccaagttattttgctaacttacaatatgaatctttgtagatgattgaagacattctgtagtgttaccaaacttgttaaaagtaagtggtaaagaacacagaaggttccttgactgtttgtattattttcatcaaaatggctggaggaggagtkggtggtgtcagcagtttacgttacaagttccatatacactttattttgatgaagaccatttgcccactttgctaagaagcgtttagtgtggattttcctgactcttttcctggtgatttaccctttgggaaatgtttccctcgctgttagacttgtgttgtaataatattttgggtggccgaagccctgttatgttgttaacagttgaaaatttgaatgtcaccataaatatacagtgaatgtggttccagatttgtaactagattccctcactgtagtcgtatgagccagccgactgaacagatccttatttggaagccactggtgtctgatgtggc

SEQ ID NO: 257610 - DNA, 613 bp, Homo sapiens
ctcactatgttgcctaggctggattattttttagttttaccatctacatgtgtatttctttcagttacctactactgcataacaaactaccctaaaacttacggcttaaaacaaccattttattgtatcttacaaatttgtgaattagggattcagtcaaggcacagcagggtgattcttttccatgcagcattgatggaggtcactcagtgccattcagctggcagactggatccaaagatagcttcactcataggtcttgcttgcactttgatgtggatggctggaaggctgggcttagctggaactgtgtaccagagtgtgtgtacatggcctttctagcattgcggtctgaaggcagttggatttcttaaatggcagctgagatttcctagagaggcagcctcaagaggcttgggcagaagtttcaagcttcttcaaatctaaccttggacatcccattgtattggtcaggccaatcaccaagaccagaatggattcaagccaaaggaattagacttcatttttcaatgggaggaatagtaaaaawattggtggtcatttttaatttgccacagttcttataatagttctaatttttaaaattttatat

SEQ ID NO: 257611 - DNA, 575 bp, Homo sapiens
tgctcttttaaaattcattgtcaacaatgcctagtcatgtatcagttcatgtaaagaaactcggtcttcaatatggatgatgcccctcaagattttgcagtacagttgccctaaagtacaatttccaggactgtcttttcaggcatggaatctttcagtcctggaaaacatttctttcattagttcccgggtaatttcttccagyctgttttatctgttattttttttctggaattcttgctagtcaggataactgttttaattttcttatcttatcccactattttctttcacttagcattttgttatgttttctgggagatcccttcaactttaacttttaatttttctgttgattttgttttcttttgtttctgagatgatgtgggaggggggcggtctcactctgctgcccaggttcgagtgcagtggcgccatctcagcttactgcaacctctgcccctggagctcaagcgatcctccctcctcagtgtcctaagtagctgggatcacagattgcgtatcaccatgcctggctaagtatttgtgtttttggtagaaatgggtttcaccat

SEQ ID NO: 257612 - DNA, 602 bp, Homo sapiens
ggctatgaagctgctgtctgccagagagactaaaagagaagccctcttctttgacccagatagtaaagatagatcatttgatcaaaattcagttaggtcaagttagttaagtcagaatgtcaaggaatcagtttagttagttaagttagttaaattacatataagtaatgtacttggacaagtcatagaacgatgacctacagattaaggtccatagcctggccccatatcacctttctagcctcatctctccctccctcttttttaattaataaaagacaaatagagacagggtctcactatgttggctaggttagtcttgaactcttggccccaagcaatcctcacacctagacctcccaaagtgcgagggttacaggcgtgagccaccacacccggcctctagcctcatctgcatctgccatctctcctcctcactcctctctcctgcctgtgagacaccaccaattggatgtactgaagagatgcacctcttytacatgttgtatattcatgcatgcattggtagcattgtaaatgctctttactacttcagctacttaccctgagaaggtcttacacacccctcatttttactttat

SEQ ID NO: 257613 - DNA, 462 bp, Homo sapiens
gatgctgtggctaaaagtataaggttaaagagcaacatttatgctcttcttcttagttctttgtatcttgtaataattgcttgtaggtgatacctgcctacgatttcattattttgaatgaatgatctttttttgagctgaaatcagtattctagatacagttggccttccgtatctgtgggttcagcattcatggattcaaccaacctctgattgaaaatatttggaaamaaattacatctgtattgactaatgtacaaacttttttccttgtcattatttcctaaataatgtaacaactatttagcctttacgttgtattaagtattataagtaatctagaggtgatataaagtatatgggagaatatgtataggttatatgcaaatattatgccaccttatatgaaagaccagagcctctgtggattttagtacatgtaggaggtcctggaaccaatcc

SEQ ID NO: 257614 - DNA, 578 bp, Homo sapiens
aatatcctaaccattagtcaaagatgatgataaactaagcttttggtgccaagtttctgttgtcaaagttcatttttatcctagttttgatgttttaaaatagggctgtctttgtaatcaatatttatatactttcctcttgtatctaaagaggagtgttgttgtcatcagatgtagaatgaagatttaaattagttgccttacacttgtttcygcaatgaaacattttattttaatgcatctttttagatatttgttggaactgacttttaagttacaaagtctataacttattgagatttatatttggcatgaagaacctgactataaatggtccagacaggcaagacgatgtaatttgagaaaaaacttagaaatgttaagaaacaacccagttgttggccttgtgaccatagatgattgagtttttgaagttagttggcctatcatctagtttccaggcagcatgattactgaaagattataagcaggcaatcattcgttgttttaaagccctccttaggtcagtgagatcttgtggaggagactcataccttactttggcaagtgatacggtg

SEQ ID NO: 257615 - DNA, 605 bp, Homo sapiens
gttgccttacacttgtttccgcaatgaaacattttattttaatgcatctttttagatatttgttggaactgacttttaagttacaaagtcyataacttattgagatttatatttggcatgaagaacctgactataaatggtccagacaggcaagacgatgtaatttgagaaaaaacttagaaatgttaagaaacaacccagttgttggccttgtgaccatagatgattgagtttttgaagttagttggcctatcatctagtttccaggcagcatgattactgaaagattataagcaggcaatcattcgttgttttaaagccctccttaggtcagtgagatcttgtggaggagactcataccttactttggcaagtgatacggtggaagtatggtgctagttacatttatcagtggcttgttttcaagctctgggatgaatgtgaagtatgtaaacaaggcttagccatataatatttgttctactacatttactattcaaaactattttctttaccatcgtattgagctttcattttaaaagaattcattctctttatgactctgagagttattaccttcttcagctgtcttacggttttcctac

SEQ ID NO: 257616 - DNA, 541 bp, Homo sapiens
tgtttagtattgcttttactgcaccccataagttttggtatgttgtatcctctttttcctttcttttttatttatttatttatttttgagacagtctcactctgttgcccaggccagagtgcagtggtgcgatcttggctcactacaacctctgtctccaggattcaggtcattctcccgtctcagtctcctgagtagttgggattacaggtgcccgccaccgtgcccagctaatttttgtatttttagtggagatagggtttcaccatgtggaccaggctggtctgggactcctgacctcaagtaatccacccgcctcrgcctcccaaagttctggggttacaggtgtaagtcatcgcacccagcctctctttcttttctttttttgagacagggtctctgtctctctctctcttttttttttttttttttttttttgagacaggtgcaaacatggctcactactgtcttggcctcctggatgcaaggggtcctttcaccttagctctctaaatagctgggacttcaggtacgcaccacc

SEQ ID NO: 257617 - DNA, 381 bp, Homo sapiens
catatgctggggaatattcccaagtctgaaacccttccccatagatgaggtagtgtgtctaaaaatacaaaacagatagattcagggttatactggccaaaaatctctgttaagcagatgcaagtgaagtttctgagyagaaatattaaaaacaaaggcaagccaggcacgatgcctcacacctataatcccagcactttgggagggcaaggcaagcaggctgcttgagcccagtagttaaagacaagcctgggcaacatagcaaaaccccatctctaccaaaaaaaaaaaaaagtagcatggtatggtggtgcatgcctgcagtcccagctacttggaaggctaagccaggagaatcacttgagcctgggaattagaggt

SEQ ID NO: 257618 - DNA, 561 bp, Homo sapiens
attcactggcttcaagtctcttcctgggcctcttgaacgtggtgccacctgtattgaagtcaacagaagttcagcacaacacaggtcaaaatgaagattctgactcagtaggtcaggatgttctaacgagctctagctgacatgatacgtcagggctgcagactagctttgagcaacaaggtgctagagaaatacctatagaacaacagagatgcaagacaaatgagttggaagttaaaagatttaaattcttgtcttagttttctcattaaagaaaagctgtgtgactatgaaaaaaaatggctctctgagacttttgtttgctcatccaagatgaaaatattgaaatgtattatacaataaacatttgcaaacagtgggtatgtaataaattactgactawcactggaaaataccatagaattcacgtgttaggatttttaaggccctactgttctaaagtggaaaaagttggcacttactatcaggtaactgtggtagagctttcagatttctatttaattttcactttcatgtaatagtcaatttgacaaatatata

SEQ ID NO: 257619 - DNA, 583 bp, Homo sapiens
tcccacttctagcagctaatgagacttcgctgtttcctgtcctggtagtctacaagataccactgcttccttccaattgattcttccaagaattcatccaacacatatgaattgagtctgtactatgtgttcagcattgtagcaggtactaagtacataacagagtaatgaaatagacatggtaactaaccatcatcatagattttagattgacatgaaagagaatcattgactaggtaattacaccaaaaaatatgaaaaggaaaatacaatgtgctatgaaagcatgtagtttgggtagcatagatcattatcccagtcagagggagagatggttgctggttagtggggatctctttgagacagcgccgtgtcagctgatacytgaaggatgacgggcaattgactagctaaagagggaggggtgggtgaaaacattccaagcaacagtaagagctgtgtgaaactgaggattaaaaaattggcattttgaggaaatgccaatataaggaaatctaatatgacccccccgccaaaaaaaaaaaaaaatgaagaggggtcaaaaaaaatgaagtaagggtca

SEQ ID NO: 257620 - DNA, 583 bp, Homo sapiens
tcccacttctagcagctaatgagacttcgctgtttcctgtcctggtagtctacaagataccactgcttccttccaattgattcttccaagaattcatccaacacatatgaattgagtctgtactatgtgttcagcattgtagcaggtactaagtacataacagagtaatgaaatagacatggtaactaaccatcatcatagattttagattgacatgaaagagaatcattgactaggtaattacaccaaaaaatatgaaaaggaaaatacaatgtgctatgaaagcatgtagtttgggtagcatagatcattatcccagtcagagggagagatggttgctggttagtggggatctctttgagacagcgccgtgtcagctgatacctgaaggatgacgggcaattgactagctaaagagggaggggtgggtgaaaacattccaagcaacagtaagagctgtgtgaaactgaggattaaaaaaytggcattttgaggaaatgccaatataaggaaatctaatatgacccccccgccaaaaaaaaaaaaaaatgaagaggggtcaaaaaaaatgaagtaagggtca

SEQ ID NO: 257621 - DNA, 533 bp, Homo sapiens
tgtggtcagctcatcactagaccaaaaacataaaaacaaatgcatgctttacatgagataaaattttaactcattacaatgcttaattactaaaatgatgacagagacaagtacttcttaaattgtaatgtccatacaaatcactggagatcttcttaaattgcatatgctgwttcagtaaacttggaatggggcccaatattctgattttaaacaactaattctattacctttggattcaagttttgtacattgcattaattagttcacaataaaatcacttctaataatttatctcattattgcctaatctagtcaaaattttgtgattcagaatccagttcacaatttcagtccatcagagtcatcataaaagcaagttttaaaaagcacattgatggtcagctaattttcaactgaccacgaagattatttagaggtatccaattacccaagtcttaattattaaaagtttgctgagatgggtcattatgatatgtacataattttatatttgactctttgcttttgat

SEQ ID NO: 257622 - DNA, 583 bp, Homo sapiens
attattttaaaattcttttctaaaagttcttcttttaagcttttatatttctttaaattatttcagacttaaggagaaaaccccactttctttcttcttagacgtctttagaaaaccatgtgataaatattaatatttgaattcatttttcttttgggaggattttgaataccaggttagagtaaagggagaaggcgttctgattaaatttcagacttgcttcgtctattggaagcatggctcagtggtgtccagaaacagtcatgagttcagcagaaggaaacaccaaagagatgcaggtgaaaacttttggctaggctggatggataccagcagtgatgattccctgaagacttcagatgaggctgtgatgggttatgaccacatctgaatgcagtagcttgtatcaagccatgcagattaggttcagaaaatgttcttaaagaaggcaagggtgcagagagaaagaagagttggaggatgatacaggatgacaataacaaaaataattacagctaagaartattgacctacaacaatgtgctaatgataatatgctaatggctaacatttatttagaact

SEQ ID NO: 257623 - DNA, 594 bp, Homo sapiens
tttagaacttagtatgggttgagtgtcattctaaggggagctgatcatgtcccaaaaaagacaatcccaaatattgaaatcccaagagattaaaatcctgaaaatgtaattccgaaaaaaattacacattatttagaaaatacttatttctattttaaaagggcatttatttgagcaacatatgaaaacatgagagaacatttcacagtccattttacacaacaaaatagtcaataataaatacatatttttagaagcataaacaatcaggtatatcaagaagagttacataagtataagagttatgagcagatgaaccatattcataaagaaataggtcaaaaagggagatgtataaatacatctcactatggctggtgattgtttgcacccatctttagaaatgtggtcatctgaaatagtaacacacaacctaaatctttcgacaagattgatcaaaaactgygataggtcaccaacacatatgcagttgcccaaacagccaaaatcttgagaaattttgtcttttgcaaatgcagatgtacaaaaaagacatctcttcacttattgaggaagtttcaacatttttacatg

SEQ ID NO: 257624 - DNA, 412 bp, Homo sapiens
tgattataatgactattacagaaatgtaaggcaagaaaatatttttaaagtaagaatgaaataatccgtttgacatcatgtatctgtgtgaatatgcatgcatgacagaattagaatttaaaaataaacttagatctatattaactggtacagatgccatgctgcattaagaggaaagaagaaaaatcatattgcaaagcatgactctatttagctaacagtacacacaaaaaaccccctatgagtgtctagatgtttctctgtgtgtgtgtgtgtgtgtatgagtgtgagtatgtgtgtatacgcatctttgcatgagcaaggaggtaggtaagaaagcatatacagcaagtgtttatcattggttagcygagagatacagtagtgagggtgggtagaaaatggttggatt

SEQ ID NO: 257625 - DNA, 620 bp, Homo sapiens
atacagctcaggaaaacttgtttccttatctagttaatgtggtttctaatctctgagcagcaggacacagaggtacagatgctggtgtttttcatcattctagytttaagcactatttcttttgcttcctgagaagtaaaagagctgtcaagtcaatcaatactcctactgactcttttctggaaatcaataaggtgagaacatttgtcctgatgtgacttaagcacttaattcactccggagtcttatggattaatccaaatgtattgtgatataattctcgagcatacacaagttttagtgtgtgctagcatttgtgagaaagatgaattttttgaggcccaggttttccttaatcagttctgaatgtgtttagcaatgcaattcctataaccaacacactgatgcaactctgctgacagagcatcttcctctccatgcaatttttttctttcctactatttctcaaatatgtattttacaatgaaaatatataccacagtggttaatggtagctgtgaattaatgtcttttctggtggagtggtggggcagagatagattttcatggtatcctgtaacaaagaagaaaaagcaattttagactaagtttttacaaaa

SEQ ID NO: 257626 - DNA, 605 bp, Homo sapiens
tgcttttgttttttaagttttcttaattcagatctagaatatctattcctataaaactgtacaggcaagtacactcctatagaacatatgctcatatgggtttgaatggcaacaaaactcagccttaaatttttatcacaattagagtacaaatacttcagaaacttcatcagaagtttcagattcatggcacctgataatatatatatatatagtctgtaattgtatgattggctttgctttctatttttaaagattaaagggaataaatgggtacagagtgatgcaacagatatcctccatccaaaataaacaaaagtttatataaaatatagtttgcaaataaaattgaaatccaaaaaccatgaacattataaagtattactttmttttcttgtatctgtatgaggtacatgaggtattttaatacaggcatgcaatgtgaaataagcacatcatggggaatggcatatttatcccataaagcatttatcctttgaattataaacaatccaattacactctttgtttttaaatgtacaactaagttattattaactgtaatcaccatatggtgctatcaaatactaggtctttttcattct

SEQ ID NO: 257627 - DNA, 581 bp, Homo sapiens
agtttggggtctcagatctacatcttcaatttatttttattttatttttatatagtgatagatacaggttagtttcactcttctgcctatggatattcagttttcccagtaccatttattgaagagactgtcctttccccatgtatgtcttggcacctttcgcaaaaatgagttcactataggtgtttgtatttgtttctgcattatctattctgttgcattgatctatgtgtctgtttttatgctagtatcatgctgttagggttactatagctctatagtataatttgragtcacatgatgtgattcttccagttttgacctttttgcttaggacagctttgactattctgggtcttttgtggttctatataaattttaggattgctttttctatttccatgaagaatgtcattggtattttgatagggatcacattgactctgcagattgttttgggtagtatgcacattttaacaatataaattcttccaatccattaacattaacatggaatatttcttttttttttttttttttttttagtgttctcttcaatttcccttatcagtgttttgtag

SEQ ID NO: 257628 - DNA, 557 bp, Homo sapiens
atggaatatctttttccattcctttattttcagtctatgtatatcttcataagtgaagtgtgtttctcgtaggcaacagataaatggatcttgcatgtttatccattcagccagtctatagcttttggttagagaatttagtccatttacattcaatgttattattgataagtaaggacttactcatgccattttgttatttgttttctggttgttttatgttcttcttccctcctgtctttttctagggaaggcattttctctggtgatataatttagtttcttgctttttactttttgtgtatccattgtatgttttttggtttgagggtaccatggggctttcaaatcctatcttatracccattattttgacctaataacaacttcacaccacttgcataaacaaacaagccaaaagaaaaatagcaaaaactctatgccttcatttcatcccctcactttttaactttttgttgtttctatttatatcttattgtactaactatatcttgaaaagttattgtagttactgtttctgatgggttcattgttta

SEQ ID NO: 257629 - DNA, 557 bp, Homo sapiens
atggaatatctttttccattcctttattttcagtctatgtatatcttcataagtgaagtgtgtttctcgtaggcaacagataaatggatcttgcatgtttatccattcagccagtctatagcttttggttagagaatttagtccatttacattcaatgttattattgataagtaaggacttactcatgccattttgttatttgttttctggttgttttatgttcttcttccctcctgtctttttctagggaaggcattttctctggtgatataatttagtttcttgctttttactttttgtgtatccattgtatgttttttggtttgagggtaccatggggctttcaaatcctatcttataacccattattttgacctaataacaacttcacaccacttgcataaacaaacaagccaaaagaaaaatagcaaaaactctatgccttcatttcatcccctcactttttaactttttgytgtttctatttatatcttattgtactaactatatcttgaaaagttattgtagttactgtttctgatgggttcattgttta

SEQ ID NO: 257630 - DNA, 532 bp, Homo sapiens
caggcctggcattggtaaaatccctcttctcttgtttgtctgggacggtctttatttctcctccatgtttgaaggatattttagctggatgtagtatcccagagtaaaagttggtttttgtttttgttttttttcttttgttttttttccttcagcactttaaatatgtcactccactctctcctagcctgtaaggtttccactgaaaagtctgttgccagctgtattggaactctattgtatgttattagtttcttttctcttgctgcttttagcttcctttctttatccttgaccttgargagtttgagtattaatgccttgaggtagtcttctttgggttaaatctgcttggtgctctataaccttcttgcacttggatatttatatcttcctctaggtttgggaagttctctgttatacatttgaacaaactttccatgttgattttctttgagtttcctcaggatcggtccctggtgccttatttagttcatttggtgaggtcatgttttcctgaatggtgtcaatg

SEQ ID NO: 257631 - DNA, 561 bp, Homo sapiens
ccataaatgactaaaataccaaagtaaccagaaacatcactgtgacgaacattccaacagtttcctaataaamtcttttatctttgtgcataacatgccagtaaaaaggagaaatttgcattttgtgttggaagcaccaactgatcatttatgttcggtgtccatttctctcctttttcctttagtaacagcacctctcagggtttgactgggcacattgctgacctgtgcagatggaatttctgagcctcttttatgattagatagggccatctcactgaattctgggcaatgagatgtgaacagatgtgatatgtgcaactggcaaacaatgccctgtaaatgaagatgcctgcttgcacttttctttgactgtctcttgtttgctatatgcagacatgatgaccagagtgaccatacaccttagaagcaaagatgtaggcagcatgttgagaatggtggagcttcccttctacaccttgaccattcattcctgggttgttgcatgagaaagaaagaaatttctatcttgttaggcctatgtattttgtaacccgtttg

SEQ ID NO: 257632 - DNA, 562 bp, Homo sapiens
ccaccgtgtccaagtttaataccaatgtgatgtcaamaatgcagagttgggaagagatgggcacagtccgctcttacaagaccattccagcacattgttggttggatacacaggtctggatctcagcatgaggtccgaagatgatagatcgatttggcaggcaacaagctgtgtattttaaaaccgctaaactgtgttgagttttgctttttgctccagaacttggtcaactaaaaaaatatatatattccattttgctgctaaaaggcatatatattgtgcagatgttgtatgcagtgtctatttgatcagtttttttcattctgtacaagttttccacgtccctattgaattctttgtctgcttgtcttattaattactgagagatgtattccatttgttgtgggtttgttttagttgtatatatatttgtgaccatgctattttaagtgaataaaaagtgaagtatctttcaagcaaattgaaattttgattattgtaacatgcccctttttgtctctagaaatgcatttgtgttaaagtccaatttatatgatactga

SEQ ID NO: 257633 - DNA, 568 bp, Homo sapiens
cagcatgaggtccgaagatgatagatcgatttggcaggcaacaagctgtgtattttaaaaccgctaaactgtgttgagttttgctttttgctccagaacttggtcaactaaaaaaatayatatattccattttgctgctaaaaggcatatatattgtgcagatgttgtatgcagtgtctatttgatcagtttttttcattctgtacaagttttccacgtccctattgaattctttgtctgcttgtcttattaattactgagagatgtattccatttgttgtgggtttgttttagttgtatatatatttgtgaccatgctattttaagtgaataaaaagtgaagtatctttcaagcaaattgaaattttgattattgtaacatgcccctttttgtctctagaaatgcatttgtgttaaagtccaatttatatgatactgacatgactactccagctttcttttacatgatatattttaacttttctgtattcttaagctttagatatttatgttaaaaatagcatatgttatgtttaaataattaagcctggtaatttttgtatcttaa

SEQ ID NO: 257634 - DNA, 562 bp, Homo sapiens
ccaccgtgtccaagtttaataccaatgtgatgtcaaaaatgcagagttgggaagagatgggcacagtccgctcttacaagaccattccagcacattgttggttggatacacaggtctggatctcagcatgaggtccgaagatgatagatcgatttggcaggcaacaagctgtgtattttaaaaccgctaaactgtgttgagttttgctttttgctccagaacttggtcaactaaaaaaatatatatattccattttgctgctaaaaggcatatatattgtgcagatgttgtatgcagtgtctatttgatcagtttttttcattctgtacaagttttccacgtccctattgaattctttgtctgcttgtcttattaattactgagagatgtattccatttgttgtggrtttgttttagttgtatatatatttgtgaccatgctattttaagtgaataaaaagtgaagtatctttcaagcaaattgaaattttgattattgtaacatgcccctttttgtctctagaaatgcatttgtgttaaagtccaatttatatgatactga

SEQ ID NO: 257635 - DNA, 574 bp, Homo sapiens
gtttccacagctatgcctttcatacccctttaggacttgatgtattcatttcatgcattacttgggtaaaatattccatcccatccctcatctccttataacttccctaaagaccttcttatctggattctttttctttcatgtatttaaatcaatactcactttctccccgtcttgatagtcaaaaacttctttaaccaaaacaaacaaaaaaaaacaaaaaacaaacaaacaaacaaaaaaccaaaaagacttgatgtaatataattgtttcttgcttttatttaggggaattactatgcttttcattggtaaaatgtaacatattataaaaaaggaaggacacattggtttagaactaagtgaccttaatatttgaaagttcatatgtrtagaacatgcaaaaaagggattaataatacttttataaaaggattaatcatatgatgaatttaaattaacaagcttccttagtgcatttaacatttaacttgatttatacaaattcaatttatattgctggtcaggaataaatctattaagtaaagcaaggtgcacctgaaattatatttgg

SEQ ID NO: 257636 - DNA, 574 bp, Homo sapiens
gtttccacagctatgcctttcatacccctttaggacttgatgtattcatttcatgcattacttgggtaaaatattccatcccatccctcatctccttataacttccctaaagaccttcttatctggattctttttctttcatgtatttaaatcaatactcactttctccccgtcttgatagtcaaaaacttctttaaccaaaacaaacaaaaaaaaacaaaaaacaaacaaacaaacaaaaaaccaaaaagacttgatgtaatataattgtttcttgcttttatttaggggaattactatgcttttcattggtaaaatgtaacatattataaaaaaggaaggacacattggtttagaactaagtgaccttaatatttgaaagttcatatgtatagaacatgcaaaaaaggkattaataatacttttataaaaggattaatcatatgatgaatttaaattaacaagcttccttagtgcatttaacatttaacttgatttatacaaattcaatttatattgctggtcaggaataaatctattaagtaaagcaaggtgcacctgaaattatatttgg

SEQ ID NO: 257637 - DNA, 599 bp, Homo sapiens
tgctcttggtaaaagacagcaaaagaatctgcagtgaatttaacaatgcaaggcatggtgaccccttctctcccaaggagctgctgaatggagaatgctgtttttatggaggaactaagaaaacattggctaaaagacaattcttgaaaagtgaggttattttatccatscattgattgtgttttaaaacatacctgttatttgattaggtgtgtttagtgctgcataagaatcatatactgttactataggactcaaagaacagaaacaggaaatagaaggagacaataacaatattccttggacatcagggtagaggtcatatcccttctatagcaatgatgaagaaaagatcaattgtagaagctgcagagacagtcaggtggcttgaagacagacagttattacttgtatgggagggggtaacgcagagaagaaagggaccctgaatgggagcaaatctccagcctgagctcttccatacaaagggcagagtaatgatagactaattaattttaaagatagtaaaaaaccttttatatagaacatcactcaattgaatttccagataattacttcatgccccaccttgtagtgta

SEQ ID NO: 257638 - DNA, 627 bp, Homo sapiens
tccttgcggaagaatttttgtgtgtgaggttgcagtaacctttgtgcaaagctgtgtgttttgcagtcttttgtgttagttttgttaycaggcatacaaacatgtaagcgtgagaaccctctctttactgcctttcctcatctctatttgtcagagtttttgttggtgtagttgtttgtttgtttgtttgttttaacacaagtgcctccatttgattctgacaactttaacatagtaaatggctgtagattgctttggggaatgattttgagaatcttaatcatgtatactttctatagcattgcggagtctttatttaatgggttccagcttcccctttagttgatgggttttggaactgaaaactatctcgtgtatggtaggtctaagagagatcatggttttccagtgcagcagctgctcatcagctcttgaccaatttgttcacgtaagaaaagctatgcccttgtgggctgcccaagtcgtcttgctcttaggaacaaaatgatctattagccccttgttgccatcctagtttctgcctgctataataattatttctatctttcctctgatgattaaaaatgatatctgacctctggaattttagagtattatcatccccac

SEQ ID NO: 257639 - DNA, 600 bp, Homo sapiens
gaaattttagtaaaatttgagaacctttgtgcctatacaatgtttaaaattgcccatgtggaagaatattacatgtattcagaggagtgctaactgaattaaatgcatacctctgacagtgtggaagtactgtcatcatagtccctcaagtctgcagtaagcatatttacatggcttcaagtctactagcagccccctgcaaagttccatgggtgatctgattctctctaaatccacgtgggcctatatacatatcattcccacagagaaaatagacttgtagaaaatgcactttagcattattgattagttaacctttaaaatagccccttgtcttaagattttaaaacttcactttttctttgccaaggaatgtactaataagcaagataaaagggcagagaagcaagcagtgccagtttgggaaggygattttagacttaattcgtttgctttccaattgggcctaatgttgaactaatgtacttaatctgcctgggttgtaacaaggaaaaatatgtatgaatttatatttataattttgaggagtttgcaaaatcatttgaaagttaaacttgttgatatatgagacacagaaca

SEQ ID NO: 257640 - DNA, 600 bp, Homo sapiens
gaaattttagtaaaatttgagaacctttgtgcctatacaatgtttaaaattgcccatgtggaagaatattacatgtattcagaggagtgctaactgaattaaatgcatacctctgacagtgtggaagtactgtcatcatagtccctcaagtctgcagtaagcatatttacatggcttcaagtctactagcagccccctgcaaagttccatgggtgatctgattctctctaaatccacgtgggcctatatacatatcattcccacagagaaaatagacttgtagaaaatgcactttagcattattgattagttaacctttaaaatagccccttgtcttaagattttaaaacttcactttttctttgccaaggaatgtactaataagcaagataaaagggcagagaagcaagcagtgccagtttgggaaggcgattttagacttaattcgtttgctttccaattgggcctaatgttgaactaatgtacttaatctgcctgggttgtaacaaggaaaaatatgtatgaatttatatttataattttgaggagtttgcaaaatcatttgaaagttaaacytgttgatatatgagacacagaaca

SEQ ID NO: 257641 - DNA, 559 bp, Homo sapiens
ctgctgctcccacttctccttctttctcctggatcccgatcttttcagcatcccctccagtgtcctctttcacctgccacaaaaaaaataaaaacaaaacaagcccacatttaaaacaaattattagagtcagatattttctcctttcttaagacctagagagcttgtcgattaaacaaataaacaaataaaatatcacacacagtccctcaatctccattcccttgctcttggtgagggtgatgagcaagacaatatctgccttgtaaatcagcaagacggaaatatacacatacatatacatattcatatattcatacacatatacctacatatatacttgtacatatgtatatgtttctatgtatatatgtgtgtttgcatatagaatatgtgtatcatgttacagaggtaaaaactgttataaaatgggaagttttaccttggctcttaccagrgagtgattttagggcaagatgcaactttctctctctctctcttcaaactctttgtgcctctctctctctttgtggctctctctcagtcattaatttatttg

SEQ ID NO: 257642 - DNA, 471 bp, Homo sapiens
tacattgtttttaacatttaagaatctactaacactattgtcattttatcaactgaacaaagacctgtgtagcttttgctttgttttgttttgttttgtttttcagtactttcagtataggatccactctaggatcacacagtacatttaattttcaggcttcttgaatctttaatctggaagagtttctcagcttttactttttataacatttttgaagaacatttccttccagttaataaaaggatcatcacttggagttttcctaatgtttcctcagaactagattcatgttaacattcttagcaggcatattgatttgcatactcttagcaagagtgctacacaagtcgttttatggtcttcttaggatatcayatgtggagacatatcatgttcatctattttccgtgttaatataaattttgatcacctgaccaaggtacagtccagctactccagtgtgtagtt

SEQ ID NO: 257643 - DNA, 568 bp, Homo sapiens
cagtaggggtcaaaactattgttacaaaggatagagattaaactcagctctgctgaaacaaaaggaggcaggaattttaaatgctagggtgagcttatggaaaagtactgaaggattttaagaaggaagttggtcaaagtgattagatggtttctattctctaattggcacttatcctagttaggttcctatcctcccatagagactcagagatgggccctatttttcttgattacgcttaaaaggaaggtgcccagatcctygagaaagacattactgggttggaaaagatttatatctcaaaggagcaaacaaataatttacaatcagaagttttctagtaacttctctaaaaaagggaacttaggggcccacagtcaggaagaattctgtctaaagtttagccaaactgggtggaatggtaaggctcttttggccagtctccacaaaagcagagactaagactatcttgttcatctccggattccctgtagctagctcagtttctaccctgttgtaagctctcattaaatacatatgaaatgaatgaatagattaattgttcatt

SEQ ID NO: 257644 - DNA, 568 bp, Homo sapiens
cagtaggggtcaaaactattgttacaaaggatagagattaaactcagctctgctgaaacaaaaggaggcaggaattttaaatgctagggtgagcttatggaaaagtactgaaggattttaagaaggaagttggtcaaagtgattagatggtttctattctctaattggcacttatcctagttaggttcctatcctcccatagagactcagagatgggccctatttttcttgattacgcttaaaaggaaggtgcccagatccttragaaagacattactgggttggaaaagatttatatctcaaaggagcaaacaaataatttacaatcagaagttttctagtaacttctctaaaaaagggaacttaggggcccacagtcaggaagaattctgtctaaagtttagccaaactgggtggaatggtaaggctcttttggccagtctccacaaaagcagagactaagactatcttgttcatctccggattccctgtagctagctcagtttctaccctgttgtaagctctcattaaatacatatgaaatgaatgaatagattaattgttcatt

SEQ ID NO: 257645 - DNA, 568 bp, Homo sapiens
cagtaggggtcaaaactattgttacaaaggatagagattaaactcagctctgctgaaacaaaaggaggcaggaattttaaatgctagggtgagcttatggaaaagtactgaaggattttaagaaggaagttggtcaaagtgattagatggtttctattctctaattggcacttatcctagttaggttcctatcctcccatagagactcagagatgggccctatttttcttgattacgcttaaaaggaaggtgcccagatccttgagaaagacattactgggttggaaaagatttatatctcaaaggagcaaacaaataatttacaatcagaagttttctagtaacttctctaaaaragggaacttaggggcccacagtcaggaagaattctgtctaaagtttagccaaactgggtggaatggtaaggctcttttggccagtctccacaaaagcagagactaagactatcttgttcatctccggattccctgtagctagctcagtttctaccctgttgtaagctctcattaaatacatatgaaatgaatgaatagattaattgttcatt

SEQ ID NO: 257646 - DNA, 568 bp, Homo sapiens
cagtaggggtcaaaactattgttacaaaggatagagattaaactcagctctgctgaaacaaaaggaggcaggaattttaaatgctagggtgagcttatggaaaagtactgaaggattttaagaaggaagttggtcaaagtgattagatggtttctattctctaattggcacttatcctagttaggttcctatcctcccatagagactcagagatgggccctatttttcttgattacgcttaaaaggaaggtgcccagatccttgagaaagacattactgggttggaaaagatttatatctcaaaggagcaaacaaataatttacaatcagaagttttctagtaacttctctaaaaaagggaacttaggggcccacagtcaggaagaattctgtctraagtttagccaaactgggtggaatggtaaggctcttttggccagtctccacaaaagcagagactaagactatcttgttcatctccggattccctgtagctagctcagtttctaccctgttgtaagctctcattaaatacatatgaaatgaatgaatagattaattgttcatt

SEQ ID NO: 257647 - DNA, 501 bp, Homo sapiens
ggcagcaggcaaaaagagagcttatgcagggaaagtcctgtttctaaaaccataagatctcatgagattcrttcatcctcataagaacaatgtagaaagacttgcccccatgattcaattacctcccactaggtccctcccacaacacatgggaattcaagatgagatttgggtggggacacagccaaaacatataggtttatatacatacatacttaaccattgtgttatacttgcctacagtattcagtacagtcgcttcctgtataggtttgtagcttaggagcaataagctctaccatatagcttaggtgtgtagtaggctctatctaagtttgtgtaagtacactctacaattttcacacaatgacaacatcacctaccaatgcatttcccagaatgcattccctttgttaaatgatgtttaacagtacataaaagtacaggtatagctctgaggatggtattctcaaagtaggaagtgcagagagaatgggaaaa

SEQ ID NO: 257648 - DNA, 526 bp, Homo sapiens
ttttaaaattttttattaaaaattgagtaaagtatttataaatatatatttggcagaaagcaaaacaagtcaactaacaaaaaattcatctatgccattacttttgtagttcttacatgtccctttctttccccttcccactaagagcaaaccagtgttctaagttttgggtttccttttccttgttgtctttatagttttatggtccctgatggccatttgaaagcatcaccttcctgatgactcctcttarcactattacatcacagaataatgacccagaaccatagtagtggccttgaattttcgttaagctttgtgtttgggcttacagcaatttgagtttaattctaaataatatacctttctcattttccaaaacaatatcataaaacacagaatgtggcttaaaaatttatacagcatcggtaacttgcatatggaaagtgtcctaggtagaatcagagtctcacaattagagtggggaggttctgattcacacggtcattcagggagcaagtgtata

SEQ ID NO: 257649 - DNA, 610 bp, Homo sapiens
actattacatcacagaataatgacccagaaccatagtagtggccttgaattttcgttaagctttgtgtttgggcttacagcaatttgagtttaattctaaataatatacctttctcattttccaaaacaatatcataaaacacagaatgtggcttaaaaatttatacagcatcggtaacttgcatatggaaagtgtcctaggtagaatcagagtctcacaattagagtggggaggttctgattcacacggtcattcagggagcaagtgtatacccatatttctgttgcattcccatcccctaggacatttttcttgtctgtatgatcaaagttgggtcctggacacaaccatataatatcttgcagagcgtggaaagagagaaagtccactttaagcgatggaaaatcagccccaattctgaaggaacaaccatgaacagatgatttaaggagaatcaattctttgctctttgcagaaggagccaacagagtgrgatgaaggggacaacttcagatactcaggcagaaggtaggctacagtgatgtaagtccagcatctttatttatttttatttattttttcattttttaatttccataggttttgagg

SEQ ID NO: 257650 - DNA, 619 bp, Homo sapiens
caaagacgtaatatgagtgacaatgatagcacaaaggagagcaaaagaagtggtgcaatattggagmaaagtttttgtacactatggaaattaattggcataaatctgaaatagactcttgtaaataataatgttaatcataattatcagggaacaattaagaaaataacatagtaaaaggaatggtaaaggaattgcatggtacactagaaaatatctatgtagcccaaagaaagcaggaatggaataatagaggaatgaaaagacattgaaaacaactagaaacatgacagacataaatcctaccttatcagtgattatagtaaatttgaagggattaaacatttcaatcaaaaaggaagcaattagtagaatggataaaatgctatgctgtgactatattccctctacagaagatacactttctgttaaaagacacaattgattgaaactaaacggatggaaaaagacataccatgtatacagcaaccaaagtgctatagtaactttcctgatagaagacaaaatatactttggaggaaaactattactagagacaaaaagtacaatttataatgctgaacaggtcagtccatcaaggagatataattataaaact

SEQ ID NO: 257651 - DNA, 619 bp, Homo sapiens
caaagacgtaatatgagtgacaatgatagcacaaaggagagcaaaagaagtggtgcaatattggagaaaagtttttgtacactatggaaattaattggcataaatctgaaatagactcttgtaartaataatgttaatcataattatcagggaacaattaagaaaataacatagtaaaaggaatggtaaaggaattgcatggtacactagaaaatatctatgtagcccaaagaaagcaggaatggaataatagaggaatgaaaagacattgaaaacaactagaaacatgacagacataaatcctaccttatcagtgattatagtaaatttgaagggattaaacatttcaatcaaaaaggaagcaattagtagaatggataaaatgctatgctgtgactatattccctctacagaagatacactttctgttaaaagacacaattgattgaaactaaacggatggaaaaagacataccatgtatacagcaaccaaagtgctatagtaactttcctgatagaagacaaaatatactttggaggaaaactattactagagacaaaaagtacaatttataatgctgaacaggtcagtccatcaaggagatataattataaaact

SEQ ID NO: 257652 - DNA, 619 bp, Homo sapiens
caaagacgtaatatgagtgacaatgatagcacaaaggagagcaaaagaagtggtgcaatattggagaaaagtttttgtacactatggaaattaattggcataaatctgaaatagactcttgtaaataataatgttaatcataattatcagggaacaattaagaaaataacatagtaaaaggaatggtaaaggaattrcatggtacactagaaaatatctatgtagcccaaagaaagcaggaatggaataatagaggaatgaaaagacattgaaaacaactagaaacatgacagacataaatcctaccttatcagtgattatagtaaatttgaagggattaaacatttcaatcaaaaaggaagcaattagtagaatggataaaatgctatgctgtgactatattccctctacagaagatacactttctgttaaaagacacaattgattgaaactaaacggatggaaaaagacataccatgtatacagcaaccaaagtgctatagtaactttcctgatagaagacaaaatatactttggaggaaaactattactagagacaaaaagtacaatttataatgctgaacaggtcagtccatcaaggagatataattataaaact

SEQ ID NO: 257653 - DNA, 619 bp, Homo sapiens
caaagacgtaatatgagtgacaatgatagcacaaaggagagcaaaagaagtggtgcaatattggagaaaagtttttgtacactatggaaattaattggcataaatctgaaatagactcttgtaaataataatgttaatcataattatcagggaacaattaagaaaataacatagtaaaaggaatggtaaaggaattgcatggtacactagaaaatatctatktagcccaaagaaagcaggaatggaataatagaggaatgaaaagacattgaaaacaactagaaacatgacagacataaatcctaccttatcagtgattatagtaaatttgaagggattaaacatttcaatcaaaaaggaagcaattagtagaatggataaaatgctatgctgtgactatattccctctacagaagatacactttctgttaaaagacacaattgattgaaactaaacggatggaaaaagacataccatgtatacagcaaccaaagtgctatagtaactttcctgatagaagacaaaatatactttggaggaaaactattactagagacaaaaagtacaatttataatgctgaacaggtcagtccatcaaggagatataattataaaact

SEQ ID NO: 257654 - DNA, 569 bp, Homo sapiens
acaaaaaggacacatttacagtatgagagctgaaataagaaggtggtacatcaccttacctgaccttagctgggaactacacattgggaagctcaaatttttatcagtctttgcatgtcatagtctgcaaattaccatsaaagtgacatgaatattgatttgggggttagagatacattttagtaagaaggcaaattttccaatatggaatctgaataatgaggatcgaccatatttaagaagcatgaatgttagcttgctagtgggtacaaatcaggcagatgatttttcatcaatgaaagagtgcatggttgaaaagttttctttattcttatttgtgtttggctttaggaattctgcaggttcttgcaggactccacatattgtctatcacagcatattgcagacaggttcccaggaagcagattctgagttggtgatttgcatgcaggaagtttatggagaattgtttctgaatcagctcctgtggggaaatgaagacagcaggactgggcaaaaggaaacattgaactgggatgagatcacaaagaaggcatcagggagggctg

SEQ ID NO: 257655 - DNA, 624 bp, Homo sapiens
agtgcttataaaatatgaaaaaaaaaaagtgtctatacactcccatccagtaactccactcgtaggacttcatccaatggagataataggttatttgccatgtaataawagcaatgcatggggaaaaaattactgtaagtaaaaacaccaaaatattaatagtggccgtttctcagtagagggattaaaggtgattttcattctctatttaattcctttctgtattttccaaaatttatttagtgatcacgtaaaatttttccagcaggattatatagaacttattcattacatggaagatttaaaaagtttaaatgtaataatttaaacttatactaattctgaatatgtttaaataattctgaatatatttaaagcatgttaaagtttctcaaatgcctaaacttttaaaatttatcccaatacccaatatagtcccttgcatgttggaggctctctgtaaattcatatatacagttggcccttcatatcaatgggttccacatctgtggattcaatcaaacataagtcaaaaatatttgaaaaaaagtgaatctttgtgtctgtactgagcacgtacagatttcttttttcatgtcattattcactcttcaatacagtatg

SEQ ID NO: 257656 - DNA, 515 bp, Homo sapiens
ctatacaattttacatgagtgtatctacttgggtctttaatttctctttctttattctgtacatttagaagtgtcacttatatttttcttccagtcatttgatttccagagacatgcaagagtcagcagatttatttttctccaaaacaggttaatgctccacttaactgctgtccagatagtttttattaaaaagtagcacagttctccctgtgagatttcaacatcacatgctaggaagaactgagaagttaactaggttataaggatttgttagattgtctaatcattgctgtgckgttactcaggtaaacacaaatgaagttcttaagtaaaaaatcatgattgtgactcttttttgttaatggaattcttttaggttaaaaaaatgctgtaattctttttttctgtagaaaagccactgttaacttggtcaaatttattttcactgcatgaaaattttatctttcaagagaattagccatcattgcatcttttaaatagcattagccatt

SEQ ID NO: 257657 - DNA, 520 bp, Homo sapiens
actatctcctataattatccatatggcagggagtcaacattcattgaggatctattatttgccagacattggactcagcccttaggtagactgatagattacgtctttgattcttcactccagtcctatgggattttagcaaaactgaagctcagaaaacatcagttgttcccccaaaatcaattgctggaaactggtggatgcagattgaaaccaagttctgtctgctttaatcagcctctgccatttccttgcaaagaccttgaacttccaaagtgtccattgtattgggaactaatcaaccatgttataatawttttattattttttaaagcagttagtttccatagcctcctttccctctctccccctgtattcattcttttatagaacattcgatacatgcagactttgaaaggaaaaatgaacctaaaagctccagtgaagtgaaaatgctaaggcttcttcgaaacttaagtagcattagaagcaattacatttgtgcaaatgcagaaaggct

SEQ ID NO: 257658 - DNA, 616 bp, Homo sapiens
gacccaatattagaaaatccaagcataaaaattggatatatgtgcataatctggggtgatgtgtagagatgattatttatattattaaacattcatttttccacatgaatacgctataattcttttttaaaaatagctaaaccctccmcttaaaactttaacccatttacaaagaaatgagtaatacatatttttattatagttttttatagctaaaccttccacttaatattttctctaattaacaaaaaagttatattcttttactacagtttgtagtaaagccctctacttaaaattatatcgaattttccaaaaatgagtgatatatttgtttaataaaagttttttaaatagctaaaccctctacttaaaatttttattaaatttaaaaaaaatccagtgatgcatcttttttcaaaattaatttgcctaaatgtggatgcatctttgagttacagaagttgaatctaacccttaattagaattagaaaaaaaaaaaaaaacctggggaaataccttgtgtgtgagaaaacacgcacacacacacttttggatataatctgcgtgaattgtgtatgtcaaagtctctacaccccagaaaatcatagctttg

SEQ ID NO: 257659 - DNA, 616 bp, Homo sapiens
gacccaatattagaaaatccaagcataaaaattggatatatgtgcataatctggggtgatgtgtagagatgattatttatattattaaacattcatttttccacatgaatacgctataattcttttttaaaaatagctaaaccctccccttaaaactttaaccmatttacaaagaaatgagtaatacatatttttattatagttttttatagctaaaccttccacttaatattttctctaattaacaaaaaagttatattcttttactacagtttgtagtaaagccctctacttaaaattatatcgaattttccaaaaatgagtgatatatttgtttaataaaagttttttaaatagctaaaccctctacttaaaatttttattaaatttaaaaaaaatccagtgatgcatcttttttcaaaattaatttgcctaaatgtggatgcatctttgagttacagaagttgaatctaacccttaattagaattagaaaaaaaaaaaaaaacctggggaaataccttgtgtgtgagaaaacacgcacacacacacttttggatataatctgcgtgaattgtgtatgtcaaagtctctacaccccagaaaatcatagctttg

SEQ ID NO: 257660 - DNA, 616 bp, Homo sapiens
gacccaatattagaaaatccaagcataaaaattggatatatgtgcataatctggggtgatgtgtagagatgattatttatattattaaacattcatttttccacatgaatacgctataattcttttttaaaaatagctaaaccctccccttaaaactttaacccatttacaaagaaatgagtaatacatatttttattatagttttttatagctaaaccttccacttaatattttctctaattaacaaaaaagttatattcttttactacagtttgtagtaaagccctctacttaaaattatatcgaattttccaaaaatgagtgatatatttgtttaataaaagttttttaaatagctaaaccctctacttaaaatttttattaaatttaaaaaaaatcmagtgatgcatcttttttcaaaattaatttgcctaaatgtggatgcatctttgagttacagaagttgaatctaacccttaattagaattagaaaaaaaaaaaaaaacctggggaaataccttgtgtgtgagaaaacacgcacacacacacttttggatataatctgcgtgaattgtgtatgtcaaagtctctacaccccagaaaatcatagctttg

SEQ ID NO: 257661 - DNA, 591 bp, Homo sapiens
gtgagtataaaacaggtcccaggccaggtgcggtggctcatgcctgtaatcccagcactttgggaggccgaggcaggcggatcacaaggtcacgagatcgagaccatcctggctaacatggtgaaaccccgtctctactaaaaatacaaaaaattagctgggtgtggtggcgggcatctgtaatcccagctactcaggtggctgaggcaggagaatggtgtgaacctgggaggtggagcttgcagtgagccgagatcgcaccactgcactccagcctgggcgacagagcgagattccatctcagaaaaaaaaaaaaaacacatggtccctgccccgtatacctcttagtgtttttccaaaagggcttcttctgcaggtttatgatctgacatacttctatttggctaaaaataaaaaatgaagagatgagagaggtggcttgcacccagctacccaggaaggaggctgagatgggggtgttgcttgagcccrggagttcgaggctgcagtgagctatgatcaccccactgcaccccagcttgggtgacagagtgagatgccattgctaaaaaaagaagtgctcaggaaata

SEQ ID NO: 257662 - DNA, 616 bp, Homo sapiens
gacccaatattagaaaatccaagcataaaaattggatatatgtgcataatctggggtgatgtgtagagatgattatttatattattaaacattcatttttccacatgaatacgctataattcttttttaaaaatagctaaaccctccccttaaaactttaacccatttacaaagaaatgagtaatacatatttttattatagttttttatagctaaaccttccacttaatattttctctaattaacaaaaaagttatattcttttactacagtttgtagtaaagccctctacttaaaattatatcgaattttccaaaaatgagtgatatatttgtttaataaaagttttttaaatagctaaaccctctacttaaaatttttattaaatttaaaaaaaatccagtgatgcatcttttttcaaaattaatttgcctaaatgtggatgcatctttgagttacagaagttgaatctaacccttaattagaattagaaaaaaaaaaaaaaacctggggaaataccttgtgtgtgagaaaacacrcacacacacacttttggatataatctgcgtgaattgtgtatgtcaaagtctctacaccccagaaaatcatagctttg

SEQ ID NO: 257663 - DNA, 545 bp, Homo sapiens
gtctgaattcaaaagctattgttcagcatttgtaaaatgmtcctggaactgtgactattgctgattggatgggagaggcatgagcaaggagaatggggaatgtagaagagagcattggcccactgttcacttctatccagtagaggattagctcactgctgacttctatccaatagaggattagcccactgctcacttctatccaatgggacattggccccctgttcactcatatccaatgggacattggcccactgtccactcatatccaatagggcattggcccactgctcactcatttccaatgggacatttgcccactgccacaatttgaaaagctgtataaaatttattccaccaacatgtatttagctatgagagaaaggtataataatgatgaatgagaataaaaagctctttgtagcttacaatgcactttccttctaaaccctaagctctctgagggcaagaatgaattttgtcttgctggttaccatctctccagtgcctgtgagaggcctgagacatgcagggacccagtaaat

SEQ ID NO: 257664 - DNA, 545 bp, Homo sapiens
gtctgaattcaaaagctattgttcagcatttgtaaaatgatcctggaactgtgactattgctgattggatgggagaggcatgagcaaggagaatggggaatgtagaagagagcattggcccactgttcacttctatccagtagaggattagctcactgctgacttctatccaatagaggattagcccactgctcacttctatccaatgggacattggccccctgttcactcatatccaatgggacattggcccactgtccactcatatccaatagggcattggcccactgctcactcatttccaatgggacattkgcccactgccacaatttgaaaagctgtataaaatttattccaccaacatgtatttagctatgagagaaaggtataataatgatgaatgagaataaaaagctctttgtagcttacaatgcactttccttctaaaccctaagctctctgagggcaagaatgaattttgtcttgctggttaccatctctccagtgcctgtgagaggcctgagacatgcagggacccagtaaat

SEQ ID NO: 257665 - DNA, 545 bp, Homo sapiens
gtctgaattcaaaagctattgttcagcatttgtaaaatgatcctggaactgtgactattgctgattggatgggagaggcatgagcaaggagaatggggaatgtagaagagagcattggcccactgttcacttctatccagtagaggattagctcactgctgacttctatccaatagaggattagcccactgctcacttctatccaatgggacattggccccctgttcactcatatccaatgggacattggcccactgtccactcatatccaatagggcattggcccactgctcactcatttccaatgggacatttgcccactgccacaatttgaaaagctgtataaaatttattccaccaacatgtatttagctatgagagaaaggtataataatgatgaatgagaataaaaagctctttgtagcttacaatgcactttcmttctaaaccctaagctctctgagggcaagaatgaattttgtcttgctggttaccatctctccagtgcctgtgagaggcctgagacatgcagggacccagtaaat

SEQ ID NO: 257666 - DNA, 619 bp, Homo sapiens
ctgtttgttgatatgtaaaactgttcacgctactctcctgtggaaaactttctgtggctccctattgccaagggaaaaatgtctacttgccacctagaacatagaaagacctttcagaactcggctcaagtctatttttctttcttgtttgttccttcttttatccatgcctctgatctcatcaaactctcatgcctccttttacaaaacwtgtatttttcatatcttatattcacttcagactcgccactccctgtgcctagagtgatatttactccatgtccccttcgtatcccaggaagaattcagcctgtctgctattagtttagaatagagtagtccccccttatctgcagggcatatgtttcaagaccccagtgaaactgaagataatactaaacccttcaaacactatgtttttttcctttacatacaaacttatgatacattttaacttataaattacgcacagagagagactaacaatgatgtggaaagtgaaactatgtatggagaggactactgtattttaatagtgaataacagtaaacagtaaaaaagatatgttggctcatgtaactgagaagtcaagatacatatgggcttcaagtaaggtttg

SEQ ID NO: 257667 - DNA, 619 bp, Homo sapiens
ctgtttgttgatatgtaaaactgttcacgctactctcctgtggaaaactttctgtggctccctattgccaagggaaaaatgtctacttgccacctagaacatagaaagacctttcagaactcggctcaagtctatttttctttcttgtttgttccttcttttatccatgcctctgatctcatcaaactctcatgcctccttttacaaaacatgtatttttcatatcttatattcacttcagactygccactccctgtgcctagagtgatatttactccatgtccccttcgtatcccaggaagaattcagcctgtctgctattagtttagaatagagtagtccccccttatctgcagggcatatgtttcaagaccccagtgaaactgaagataatactaaacccttcaaacactatgtttttttcctttacatacaaacttatgatacattttaacttataaattacgcacagagagagactaacaatgatgtggaaagtgaaactatgtatggagaggactactgtattttaatagtgaataacagtaaacagtaaaaaagatatgttggctcatgtaactgagaagtcaagatacatatgggcttcaagtaaggtttg

SEQ ID NO: 257668 - DNA, 619 bp, Homo sapiens
ctgtttgttgatatgtaaaactgttcacgctactctcctgtggaaaactttctgtggctccctattgccaagggaaaaatgtctacttgccacctagaacatagaaagacctttcagaactcggctcaagtctatttttctttcttgtttgttccttcttttatccatgcctctgatctcatcaaactctcatgcctccttttacaaaacatgtatttttcatatcttatattcacttcagactcgccactccctgtgcctagagtgatatttactccatgtccccttcgtatcccaggaagaattcagcctgtctgctattagtttagaatagagtagtccccccttatctgcagggcatatgttycaagaccccagtgaaactgaagataatactaaacccttcaaacactatgtttttttcctttacatacaaacttatgatacattttaacttataaattacgcacagagagagactaacaatgatgtggaaagtgaaactatgtatggagaggactactgtattttaatagtgaataacagtaaacagtaaaaaagatatgttggctcatgtaactgagaagtcaagatacatatgggcttcaagtaaggtttg

SEQ ID NO: 257669 - DNA, 529 bp, Homo sapiens
agcaggggccaaatgggttttatcttattttatttttttaatattctgctaacttgacctcattttttctttttggatcagagaagatggcagattgtctaccttgattctaactagtcaataaataaagatcagctaattggaaaaaaaaaaaagcaattagttaattcttgaattagtatttcctttagatatttggcataggttgttatgttttcaggaaaggtggtaaaggtrggctagatgtctgcagtcatctgtgggcctccctgcaggctgcataattctcacccaatgggggtggatgaagaattgcagacaggcaggaagatggttatgaatccgtatggcagggctccagcagcagccttgcctgctcataccattgttatcaatgaattgattaaaaacagaagatgtctgtttattgtatttcctggtgacaggaagtctgaagaactggctatcagtttggatgacaggctgggatggcaaatggatgaaatgatgaactgagttaaacgggatc

SEQ ID NO: 257670 - DNA, 649 bp, Homo sapiens
ccatggaggagagatgctaggtgcccatcaacttgctgccccaggactcagaaagcctttgaagagagttgagtgtttggacagaccctgttccctgatggtctttatatccctgattcagctcagagcacttcccttatggaagactgagcagggctctgagtcctagttcagcactaagcaacttcctgaacatgttgaagaaaacaaaataaactccagaagtactagaaaaaacagtggaaggactgttaactgargactgagcgttaatgcttggggttggaattctgatgctactgtgtttagctacctgttgaaacccaagccagtatccccagtttatccatttgtgtatagttggagaactccgaaatgctcttttcgttttgtaccggcctagatttctcaaggcagaacgggatttccttgggatccatgggagtttagacatggttcatatcaaaatctcttagcgataaatcagactgcttagtacatcatctgccatcaatatatgattaagtggagatttagtaggaacccagtcaataaataaagatcagctaattggaaaaaaagcaattagttaattcttgaattagtatttcctttacctatcaactatcaatgctaattttgtgcaggg

SEQ ID NO: 257671 - DNA, 649 bp, Homo sapiens
ccatggaggagagatgctaggtgcccatcaacttgctgccccaggactcagaaagcctttgaagagagttgagtgtttggacagaccctgttccctgatggtctttatatccctgattcagctcagagcacttcccttatggaagactgagcagggctctgagtcctagttcagcactaagcaacttcctgaacatgttgaagaaaacaaaataaactccagaagtactagaaaaaacagtggaaggactgttaactgaagactgagcgttaatgcttggggttggaattctgatgctactgtgtttagctacctgttgaaacccaagccagtatccccagtttatccatttgtgtatagttggagaactccgaaatgctcttttcsttttgtaccggcctagatttctcaaggcagaacgggatttccttgggatccatgggagtttagacatggttcatatcaaaatctcttagcgataaatcagactgcttagtacatcatctgccatcaatatatgattaagtggagatttagtaggaacccagtcaataaataaagatcagctaattggaaaaaaagcaattagttaattcttgaattagtatttcctttacctatcaactatcaatgctaattttgtgcaggg

SEQ ID NO: 257672 - DNA, 634 bp, Homo sapiens
atgcggagatcataccaatgtccgcatggctcttgtcatttgttataacctctgctgctctgattcagtgcaagccaccctcatctcttgcctgtgttattgcaatagcctcaaacagtactctctactccagtctactttcaatacaatagccagagcagttctgttaatagataagtcacagcatgtctctttcatctgcacaaagcctttcaatgatgtccatgggaaccaaagtgaaaatcaaagtcctttccaatctggatgccccattagccctctggcatcctctgttcccaccccatcaggattttttgttgttccttgcacggatcagacaaactcccacctccaggcccttgttttctattcctccagatattgagkcttaagagtcatgaagactctttatccagatatcagcatggctttccacatcactttcttcaggtctttgttcacatatcaacttttggagaggcctttcctgaccaccatattgaatgttaaattatttctctgcttagagcatgcatacttgtctagctccctttttgaccttatttttccaaccctttttcttttatcatcacctgcattagttttctcttgctgccataactaactaccacaa

SEQ ID NO: 257673 - DNA, 573 bp, Homo sapiens
tatgtatatatgtatgtattttttctccatacagtgagcgcatatatctgcaattatgaatcttgcctgttttactaaatatcttgaaaagattatttatttatttatttatttatttattggtaagaaatgaaccctggagttgagtttgagaaacctgaaaaaacagggyggaagagcattcttggcagaaggaggaacatgagccaaggtccagaaacagaaagaacactgatttttcaagaaaaaggaaagagactattatgtctggaggacaaagaaggaggaggagaatggccgggtagatcactgattctcaggccactttctgagggaccattgaacttgcttacattctccaggtggcctataccctgaggcccagagtcactgtatggctgatgaggacacttcccgctgcaggtcagctcctcactccgtagacctgccagacgcagggaggctgcttgttcctgaggcctggggaatagagctggccaagagaattgctagttttcccaaaacccactttctttcttcagccccgccctcaagactttttccatgccctgc

SEQ ID NO: 257674 - DNA, 569 bp, Homo sapiens
cacacagccatggatggcaaaacccaggtctggccgagccrggaaactttcctcaaccatgtccagaagtaaagttcctgaggcctctcttggagatagggaattatgatttccaaagcagaactccaaacagttccactctgaatgagttgacagtggcaattggtcccttgagataaaagtcaacaatggctatgctgaagctatagcattgagggaagggatcttgaactttggaataggccaaagaaggaggaggcaagggaggacctgaaatgcgctggaagaaggcattcagcaacctcatagctttccagcgcttgctagggctgcaggaatgaaacgaggctgtggcttctttccaagctgacctgaaggctgcaagatgtgatggctgttgccggagatgttctttgacacagctaccagcattgcagaagcatgacaatatctccagcatcaccttcctgagtccaaaactctgtaaatttgaactcagagagagacacaagatcccagcatgatgctcctatggtactgtgggacctggattgggacttagaatccca

SEQ ID NO: 257675 - DNA, 569 bp, Homo sapiens
cacacagccatggatggcaaaacccaggtctggccgagccaggaaactttcctcaaccatgtccagaagtaaagttcctgaggcctctcttggagatagggaattatgatttccaaagcagaactccaaacagttccactctgaatgagttgacagtggcaattggtcccttgagataaaagtcaacaatggctatgctgaagctatagcattgagggaagggatcttgaactttggaataggccaaagaaggaggaggcaagggaggacctgaaatgcgctggaagaaggcattcagcaacctcatagctttccagcgcttgctagggctgcaggaatgamacgaggctgtggcttctttccaagctgacctgaaggctgcaagatgtgatggctgttgccggagatgttctttgacacagctaccagcattgcagaagcatgacaatatctccagcatcaccttcctgagtccaaaactctgtaaatttgaactcagagagagacacaagatcccagcatgatgctcctatggtactgtgggacctggattgggacttagaatccca

SEQ ID NO: 257676 - DNA, 569 bp, Homo sapiens
agtttacaaaatgggcaatggagctgaatagacatttctccaaagagagagttttcaaagtaatttatcagcatgaacwagacagatgttcacaaaagcatggttctaaactctttgttttcaccattgaaaagctggcactgttcacacacacatacacacatatttatgtatacatatatatccatgtaaatataaatgtgcctgtgtacatacatttaatatatatttcaaaaagtcttcttggacatcaaatgactcttgcaaaacaacatgttgatgagttaagtgtaaatgaatcagaaacatgtgtcttgaattctcttcaaaataccctagggtttaaaatgagggggaaaaggtacttgaaggaaaaaaaaaacattttgggtcttgctgaacctaaatcatttggaaaatagtttaagatgtttgctaaatccaaaaagcagctttgctcctaccacagggccatgtcaaagtgactcttcagatgagcttaagcctaattttaatttcttgcacatgtggtaaaaacatcttggaggactctcttaagccactgttca

SEQ ID NO: 257677 - DNA, 588 bp, Homo sapiens
ctccaaaactatttaatatgtaagtcctagcaatttagcactgtttgaagaagaataccatgcattgaaagaaaaaatattatatcatacttaaataagctgatttacagagtaatgagatatggggacctgttggatacyatggtttctcaaaccttggaatcagattggtcaccatcactttaattttctgttccacattgattttcatgagacacttttttcttttaaaacacagtcacttgcaaaaaatccagcttctcaagcaagacaaggaattatctaatggatatagtgaaagtagatggtgtaggcccattccattctatctctcctgataaatacaactagaatctctaagaaagaaacagaaaggcactatcagaagactctgaaaggtagagaaaagaaagtagattagctagaaacctcagccttctatatgtctaaacttggacactagaatatcctgcagcccagaaacaccaatggatgcagaccaaattaatggtccccccaccccgcaaaacaccctactcttctagtcaagggcctagacaaagggcagaacctttttgactgtacctg

SEQ ID NO: 257678 - DNA, 588 bp, Homo sapiens
ctccaaaactatttaatatgtaagtcctagcaatttagcactgtttgaagaagaataccatgcattgaaagaaaaaatattatatcatacttaaataagctgatttacagagtaatgagatatggggacctgttggataccayggtttctcaaaccttggaatcagattggtcaccatcactttaattttctgttccacattgattttcatgagacacttttttcttttaaaacacagtcacttgcaaaaaatccagcttctcaagcaagacaaggaattatctaatggatatagtgaaagtagatggtgtaggcccattccattctatctctcctgataaatacaactagaatctctaagaaagaaacagaaaggcactatcagaagactctgaaaggtagagaaaagaaagtagattagctagaaacctcagccttctatatgtctaaacttggacactagaatatcctgcagcccagaaacaccaatggatgcagaccaaattaatggtccccccaccccgcaaaacaccctactcttctagtcaagggcctagacaaagggcagaacctttttgactgtacctg

SEQ ID NO: 257679 - DNA, 588 bp, Homo sapiens
ctccaaaactatttaatatgtaagtcctagcaatttagcactgtttgaagaagaataccatgcattgaaagaaaaaatattatatcatacttaaataagctgatttacagagtaatgagatatggggacctgttggataccatggtttctcaaaccttggaatcagattggtcaccatcactttaattttctgttccacattgattttcatgagacacttttttcttttaaaacacagtcacttgcaaaaaatccagcttctcaagcaagacaaggaattatctaatggatatagtgaaagtagatggtgtaggcccattccattctatctctcctgataaatacaactagaatctctaagaaagaaacagaaaggcactatcagaagactctgaaaggtagagaaaagaaagtagattagctagaaacctcagccttctatatgtctaaacttggacactagaatatcctgcagcccagaaacaccaatggatrcagaccaaattaatggtccccccaccccgcaaaacaccctactcttctagtcaagggcctagacaaagggcagaacctttttgactgtacctg

SEQ ID NO: 257680 - DNA, 523 bp, Homo sapiens
tgctggcaattagcacagatcagaaactattaaaattgtacttcatttattcctcacaatatccctctgggttaaattgctgttattattcccccattttacagatgagaggtatagaaacactaagtcacttctccaaggccgcataacttcatagtgagctccatgactagataaatgtattgaatgttggatgcctacctactcttactgataggctcaagatggttggaaggtttggaagacgttagatttttatcttcttcctcttctgcttctttcctggtttgactggaggaaggagagcttcaagtctggacagatcatggctggtgtataattcaaatttcaaattcaatcttcctcaactctgtggccaaagaatacaactagaattcttggtgtcagcttttccatctatacacaggtaggattgccagatttagcgaataaataaagaagaaaaggatrcccaactacatttaaattttagacaaacaatgaataattttttagttgaaaa

SEQ ID NO: 257681 - DNA, 523 bp, Homo sapiens
tgctggcaattagcacagatcagaaactattaaaattgtacttcatttattcctcacaatatccctctgggttaaattgctgttattattcccccattttacagatgagaggtatagaaacactaagtcacttctccaaggccgcataacttcatagtgagctccatgactagataaatgtattgaatgttggatgcctacctactcttactgataggctcaagatggttggaaggtttggaagacgttagatttttatcttcttcctcttctgcttctttcctggtttgactggaggaaggagagcttcaagtctggacagatcatggctggtgtataattcaaatttcaaattcaatcttcctcaactctgtggccaaagaatacaactagaattcttggtgtcagcttttccatctatacacaggtaggattgccagatttagcgaataaataaagaagaaaaggatacccaaytacatttaaattttagacaaacaatgaataattttttagttgaaaa

SEQ ID NO: 257682 - DNA, 607 bp, Homo sapiens
gctgagcctagagtgagggaagcaaggagcctagcatgcaaaatttaaggaggcactcacattcaggcctgtgaaaatgccagcccttcacttacacgaccctgagaataagcacctccttaaattttgtgccctaagcgtctcatttgtctaatgttagttctggctctggttcaaagttatcttttcaaaagtcaccacatactctattaggaagaatcactgcctctttacagaaagttcagtgcctttatttgctaacactcatttggttaaaagtaatagaaatcaactgaagcttgagaaaaatgggactggaatgtctcatagaaccacagagcagatgttaaggtagggaaaagaaaggcctagaactgggaccctgcggaaatttctctctccatctcctgcacttgcttctttcttctttctaggctgaagggcttcccttgctccatcagttccraattctgagtgtttaggaaaacttacttttcttacctataaggtaaaacactgtttctcactttctggctgtcttacctcatagggctttaaagaataatgtatataaacccctcaagtggctgacagggagtaagtgctc

SEQ ID NO: 257683 - DNA, 607 bp, Homo sapiens
gctgagcctagagtgagggaagcaaggagcctagcatgcaaaatttaaggaggcactcacattcaggcctgtgaaaatgccagcccttcacttacacgaccctgagaataagcacctccttaaattttgtgccctaagcgtctcatttgtctaatgttagttctggctctggttcaaagttatcttttcaaaagtcaccacatactctattaggaagaatcactgcctctttacagaaagttcagtgcctttatttgctaacactcatttggttaaaagtaatagaaatcaactgaagcttgagaaaaatgggactggaatgtctcatagaaccacagagcagatgttaaggtagggaaaagaaaggcctagaactgggaccctgcggaaatttctctctccatctcctgcacttgcttctttcttctttctaggctgaagggcttcccttgctccatcagttccaaattctgagtgtttaggaaaacttacttttcttacctataaggtaaaacactrtttctcactttctggctgtcttacctcatagggctttaaagaataatgtatataaacccctcaagtggctgacagggagtaagtgctc

SEQ ID NO: 257684 - DNA, 580 bp, Homo sapiens
aacttttcactctcagtctatttgcatatttagatataaagtgagtctgttgtagacaatatatagtagaatcatttaaaaaaaatcaatttgccaatgtctgtcttttgactgaagattttaatccattacatttaaagtaattactcataaggaaaaacttacttctaccattgttatatatattttttatatagtttatatcttttttgttcctatgttcctccttattgccttcttatggtttaattgatattttgcagtgaaccgttttgatrcccttctcattttcttttctgtatttttaaagatattttcttagtatttactaggagcattacattaacatcctaaatttataaaaatttagtttgaatttatatcaatttagctttaataccatacaaaaactgtttctatacagcacttctcctgtctatgttattattgtcacaatgtattgtcttaatacattgtgcaccatcaatacagatttatacttactgctttctttgtttacctaaaaaattctgtagcattgagtctcttagtatgactttgagttactatctagtgtctt

SEQ ID NO: 257685 - DNA, 560 bp, Homo sapiens
cctccttggtttctaatgagaaactgggtgtttctgttatttgagaatctctcatagttatttctctcctctctttgtctttgtctttgtcttttgacggtttgattacaatgggtcttggatgccttagcatatatccttrtcattcattgggtttctctcaatgaaacacttgtcttgtgtaaacccttgtcttttatcaaatttgggaagtctttagccattattattcaaatatcctttgttcctctttctttcttccctctcctttgggactcccactgcacatatgacattttaaggtgttccacaggtctccctggctctgttcatccttctatatccttttttacttcctgcaactcagactggataatgtcaattgacttattttcaagttaattgattctttcttctgcctgctcaaatctgctattgaaatcttgtcataaaattttcattttatttattttacttttaaactctagaatttctccctggttccactttatatttcctctttactgacatcctttatttgttaagatatccttctcttg

SEQ ID NO: 257686 - DNA, 559 bp, Homo sapiens
ctaaattcccaagtatatatgatggcttttgaatgccctaatttcccaaagaaactctctccttagcttgtcctctcaggcttcctacacatttaccatttgcctcaactgtatctttcatcctagccaacagtcagttgttcatttgctttataatgttttgaagaaatgtactctgagtagctacttttctgcccagttccaatttgggcataatmaagacaagcaccctggtcattccttcgggtagcccccagacaagttaaaacagacaaacataattctttgacagtaaggtctactctgcatcccttaaaaccagaaccatggtcccacccttggaagacagctgtcattttcaagaccaccaccaagcagagaaagagggtggggcagggcaaggaaacagtcacaaagctttcctaccattctaaagttgcttttacaaaatttcgcatttgattaattgttataaacctttgactatttcccagagctctgaaaatgttgagtgtgcccatttttgcttgatctttcaaagctgctgtagggagacagg

SEQ ID NO: 257687 - DNA, 586 bp, Homo sapiens
taagtgagtagaataggggtayacagttactcattcattcagttacttatccttccgtgatttcaacactccttgaatgcttaatttgttattatttccagaaatctcagatacatatgaagtaccgcatgtctcattacgtgatgagagaggttttttctaatctgggagttcagaccaatccctgacttcacaaaaaactcactgtatgaaaaatcactttcagtgcctcagtttccttatctctaaaatcaaggattaaatttacttgccttccaactctagctctaaagcagtggtttccaaagtgtgtgcaatggatcactcacttcaaaatcacctgaaatgtttattaaatgaatatttctggacctcacccaagacctactcaattttaatgtctgagatggaaatgtgcatttttaataataaggtctctggttaatttgtatgcccacaatttgagagaattgttctaaacgattcaaggacaacatttctcaaagtgtcttcatgaaaaacgatttctttactctccaaagttggggttcatggacaaaacaagtcgggaagggttaataagatc

SEQ ID NO: 257688 - DNA, 586 bp, Homo sapiens
acaaacaaggatatttgaagggaggcaaacttcatgggcacaagagaaaagggaaataaataaattaaataaataaataaatcaggagaaagagtgaggggaagcagtggaggctgatttttgtgctatattttgaagtcttagaactggaagcrgtcataacttttctggtgcgagaggtgggcagaataaatgctgctcgtcactgcagggctttgcagctcagatggtatccattggcacccaggaagtaccctcctcaccccctggcttcccccagcttcctccaggccaccctgtatttcaagagcaagagactcattgccatacttggccagtggcccagaaatacttttagtgaagtcattgcccacttctcgctttctccatgatgttttttaagcctttgcggctatgcatatccaggcatcttcaaagggatgccctgggtgggattaacctctgctgctggccagctgcatggcttgggggtctgaattcaacctatctgaatctcaggagctgcatctaggcaactaggatgaaaagcaacatctaggtgttggaaagatgcagccgactagct

SEQ ID NO: 257689 - DNA, 586 bp, Homo sapiens
acaaacaaggatatttgaagggaggcaaacttcatgggcacaagagaaaagggaaataaataaattaaataaataaataaatcaggagaaagagtgaggggaagcagtggaggctgatttttgtgctatattttgaagtcttagaactggaagcagtcataacttttctggtgcgagaggtgggcagaataaatgctgctcgtcactgcagggctttgcagctcagatggtatccattggcacccaggaagtaccctcctcaccccctggcttcccccagcttcctccaggccaccctgtatttcaagagcaagagactcattgccatacttggccagtggcccagaaatacttttagtgaagtcattgcccacttctcgctttctccatgatgttttttaagcctttgcggctatgcatatccaggcaycttcaaagggatgccctgggtgggattaacctctgctgctggccagctgcatggcttgggggtctgaattcaacctatctgaatctcaggagctgcatctaggcaactaggatgaaaagcaacatctaggtgttggaaagatgcagccgactagct

SEQ ID NO: 257690 - DNA, 608 bp, Homo sapiens
tgatagaagccagtcaataagggctgctttttcagcccttggaggaaggagggctgtacctctgactccccttatcaagctmatttcttttccacagttggagaagtggtcaggagcccaaccctaatgataaataaaccaatttttaactatggaacaaagataagaacaggcatttcacagcaaaaggaaatccaaatggccaataagtgtaagtaaagatatccatccttgttgatagtcaaagaagtgccagttataaccaaaaggagagattatttttcccatagccctcggcttggcagaaattgaaaaaacgggctttgctgagcaacggagagccggtctcagactctgctactgtcagagtaagttgatgtgaacccaacttgagatgcaacttagaactgtcatgtaaagctaaggcatgcatatcccaccatccaacaaacatgcttgtaggtaggtaggcactagatcctcagatacatggcccagtagacatacatagtgatgttcactgcagcattgttagacgaagggaactgggtaaacaaccttgaggtccatgacgaagggagtgattaaatccactatcatgacatcag

SEQ ID NO: 257691 - DNA, 589 bp, Homo sapiens
tttcacttcctcccccaccacccggcccccacacttttttttgttaaaatctttcggagaaagcattttacaagaaaatgagtctctggtctcaggcttcatcttatccttcatggctaggatgctttattcctagatgggtaggtcccaaaagctcattttagcagattgtgaagtctcatgtcctgtgaagagaaaatagcagggaggaagggagaaaaaatgacaaacgaaagaacaatccgggaaaaatcgacataggccaccttactctgaagtccatacattagtaggcagatatgaaagtggtttatgtataggttgtataccacactttttttatctgttcattttctgatgaacatttaggttgtccccaccttttggcaattgtggctaacactgccatgaccatatgtgtgcagatatctaagttcctattttcaattyttttgagtatatacctaggagtggaattgctgggttatatggtaatcttatatttagccttttgagaaaattccaagctgttttctatagtggatgcaccattttgaatttctacccacaatttacaagggtttcaatt

SEQ ID NO: 257692 - DNA, 538 bp, Homo sapiens
aatagctaaatgatgattattgtgaacatataaggctctgtatataaatcacttaccacatggggggttaaggaatagtctatgttctttcaccatatcatgtgaaaggaatatgtattagatttataatatgaacaaggtgcaactttaagcataagatatgcatagatcttaaaagtattcaaagtccttccttcatctcgctgctactcagtagagtagaaatgcatgtggcatagagctaggctaccaccagtttcagcaaaaaaagaaaaagaagagtctagaatgagcttgcaaccatcagaagttgacagagggagagagagaaargaaagaaaatccttttcaatgaaaggaatacagcataaagcttcttcttcagcaaggctccaacctaggacaggaaaggtgttggaaccatgagtcttaccaagttgactagaatttgcttttgctatttcccaaatcccccaagaatctcaagaacaaagccagctcaaatagcaagctgccatcatttcaatgggtaaagagg

SEQ ID NO: 257693 - DNA, 585 bp, Homo sapiens
tgagaaacactgtacatgtgtttctgtacatgattatgaatgctcataatcaatatattctcatgatcatccccatttttcagaggaggaaattgagtttagattagtcaagtcgcttgctcaaggttaagaagtgggccgggcacggtggctcacgcctgtaatcccagcactttgggaggccgaggtgggcagatcacaaggtcaggagttcgagaccagcctgaccaacatggtgagaccccgtctctactaaaaatacaaaaattagctgggcgtggtggctcgtgcctgtaatcccagctactcaagaggctgaggcaggagagtagcttgaacccaggaggcggaggttgcagtgagccaagattgtgccactacaccccagcctgggtgacggrgcgagacctggtctcaaaaaaaaaaaaaaaaaaaaaaagaagtggcaacagcaagactcaaggctataactgtctggctccaaaatctgaattttagtcagttacagtcagccttccatatccatgagttctgcatatatggattcaacaacacctagatagaaaatatatgaaaaaatattgc

SEQ ID NO: 257694 - DNA, 526 bp, Homo sapiens
tgattccacatggctgatggggaggctctctggttagacatgaacctcataagcctgtgcgcctggacgtggcaggccaggaccgtacatgtggacctggtcacattattggatgtctattgagcactaacactgtgtgatgcatggcacggggcatagatttgtgtgtctgctgggcagtgacctgaattcagtgctgggtggagtgccgggtgcattggaggagatcrataagcaattataattattattacaattaataataaatgctacatggtccggacaaaagaagctgcaatgtgagatgtgtgcctgcctcggagcccttcacactgagccctgtgcagttacggagctcctctcttcatggaggagagcggggagggcaggtggggttctggcagcccctgcttctgtagcatgtggattcacagcctccctgggagagtgggagaggccagaggacccacagggaaagcaagtccttctggagttggatggaggtcagggtgttggtggtttacga

SEQ ID NO: 257695 - DNA, 502 bp, Homo sapiens
cccttctccatcccctcgctgccctgtgcccatcagtttaggggaccaccttgtgctcagcctctctccccagatgctgccaccagcagccatgcaggacttgggtgtccttgaccagttgctgccatagtttgtattctttatcaccagcagccttctggctcctcccagagctccatccaccagcccagaggtgacctcaaagaaaccataagacctctaagccatatgtagaagacagcctcagtccccacggagggatggcccctgctccacctttacacagagacctcaagttttcaggaggctctggacccagttcttttctaggaaagcagcttcaccaatggatgctcaagtcaaattttaggagcctggttcttcccaagcccttgaaaggaaaggagagaaggaagtcagagaaaaatctgrtggggtaggcaagttattctcccactctggagaggaatgatactcatgggacaaccaggtggcagtaaga

SEQ ID NO: 257696 - DNA, 524 bp, Homo sapiens
acgcctgtaactccagcactttgggaggctgaggcaggtggatcccttaagcccaggagtttgagaccagcctggcaacatggtgaaaccctgtctctacaaaaaaaatacaataataataatagtaataatttttaaaataaaaataaaacttagctaagtgtgatggcacatacctgtagttccatctacttgggaggctgaggtgggaggatcacttgagtctaggagtttgaggccgcagtgagctatgattgagtcactacactccagcctgggtgacagagagagaacctgtctcaaaataaataaatgaaaataaaaataattaaagaaccacgtggccaagacatgaaaaccaygcaggccagttgccggtgaccttttccatcatggtatctgtggtgagcagccccagatcctgatgctatttgcacccaggggtaacatgtcccctcggggctggttctgagtccactcctttgctttcgacccaagacagcaccagcctgaccgcaggtgca

SEQ ID NO: 257697 - DNA, 634 bp, Homo sapiens
gtcctcaccaacactttgtatttctcagctttctgatctgtgccaatctcataggtagctctgcaattaagttataggagtcttttttatatttaagtctatcaactaacttaggaacagtctaaggatcaaagggaagaaatcttgttagaaaatgggagatgcaagagggaagtgcaagtcctcaaagggaggctttctgaggaaccccgattcatagagaagtgcaggaacccgtggaggctgaagctgccttcttgcccaccatctgctcctgagttgatggttctctggaaagggaagaatgcctgtaactgagttcgttccatctccctctcccagaggctggcacacagtaggcattcgtggtttgctattgaatgaacacatgggcatggaacgaggccacaatcttgcaatctagaatataagctccagacaggggaatgcagcaaactccactttcytgatctgaaaacacaatctcccagggtcccctggaaggctgtttttcagggagaagagtggaaagtgcctattgattttcctttatcacaaagtgataaatttgctgattgacatcatgtagcaatgacaagcacacaggagtgtgtgggccccgagcaaacagaga

SEQ ID NO: 257698 - DNA, 444 bp, Homo sapiens
agacaggcggagagagacagtaagaaatagacagtgccaggcaccctggctcacacctgtaatcccagcatttcgggaggccgaggtgggaggatcgcttgagcccaggagttcaagaccagcctgggcaaaatagtgagactcgttctctaccaaaaawaaaaaataaaaaatagcgcggttttggtggcctagctagctactcaggaggctgaggcaggaggatcacttgaaccagggagatccaagctgcagtgagccaggatcccattcctgcactccagccggggagacagagcaagcccttgccttaaaaaagaaataaaagataagaaagaaggagaggaagaaatagatacagagatgaagagagagggacagagacagagagacaaataataagaggcggagagagagaaagcgagggagaactagaggcaaagg

SEQ ID NO: 257699 - DNA, 494 bp, Homo sapiens
caaggtatttgacagatgggggagtgacttccctatgcccggctsaggcactggtagagcttgggtctgacctttcagtgtcttctctccccatagcttggtgatgcacgaagtgtggttctagaccagcaggttcggcctcatgagaatttgttagaaatgcaaattctcaggccgtaccccgagacctctgaaattagaatctctaggggtgcatccaaggaatctgtgttttgacaagctctcaagggggttttttatgcccagtaaggtttgaaaagcacaatatggccgggcgcggtggctcacacctgtaatcccagcactttgggaggctgaggtgggcggatcacttgaggtcaggagttggagaccagcctggccaacatgatgaaaccctgtctctactaaaaaaatgcaaaaattaggcgggcatggtggtgcacgcctgtaatcccagctacttgggagactgaggcaggagaatcgctgga

SEQ ID NO: 257700 - DNA, 494 bp, Homo sapiens
caaggtatttgacagatgggggagtgacttccctatgcccggctgaggcactggtagagcttgggtctgacctttcagtgtcttctctccccatagcttggtgatgcacgaagtgtggttctagaccagcaggttcrgcctcatgagaatttgttagaaatgcaaattctcaggccgtaccccgagacctctgaaattagaatctctaggggtgcatccaaggaatctgtgttttgacaagctctcaagggggttttttatgcccagtaaggtttgaaaagcacaatatggccgggcgcggtggctcacacctgtaatcccagcactttgggaggctgaggtgggcggatcacttgaggtcaggagttggagaccagcctggccaacatgatgaaaccctgtctctactaaaaaaatgcaaaaattaggcgggcatggtggtgcacgcctgtaatcccagctacttgggagactgaggcaggagaatcgctgga

SEQ ID NO: 257701 - DNA, 430 bp, Homo sapiens
accccatttcacttttttcagaccctttatgcttcgtcctcgtcctccccaacaaagactcaacatcctcgcaaagtatttctttcaccgatgggggaagctctgaagaatcagggggaggggaaggggaagagggaggagaagagggggcttctccgggaccagaccccaaagccaggccaggggagacccgtggcttcagactgcacccccttggtctgagctttgccttgsttggagaagaaaggcactgatgccagcacgagcgtgtggaaggagaaaatgtctgaaggtgtgtctatgtggttgtgacaggagggatagagacatcggagacctggtgtgggctttgtcagcattcctgaaaggggcaggggggtcccagagaaaagtccgtgcaaggagaggatacaggggcctccagtctccg

SEQ ID NO: 257702 - DNA, 578 bp, Homo sapiens
actgggacatcatgccaatgaagagatgttggaaacaaagcagcctggactgaggctctttccttcctcctcttcctcattttctccatcctcccctccatcttgtctttcttccttctctttctcctttctgttcttattcttctcttcttcctcctccatttctttcccttctcttctttcttccctttgtccttccttctcctttctctttctcttcttcttattattcctccttttcttccttctcttcctcttccttccaccttctcctaattattttataataatcaattgactcaccatattagagaatcagccaaagtctgaggacctgaatgctggtaagccttccttccagctgtttgcttcacacttcagccttggagtggaaatgcaactctaagtggaaattggggtaaattctattgcgggtgaggcagcgtttttgtcaaggaggacaaagcttaatacctacactcaggaaaggcaattagaagaataaatctggtcaaccagaccttgkcacagacccagccctgtcctattctctctgtgtaaccttcagcaaagagcta

SEQ ID NO: 257703 - DNA, 553 bp, Homo sapiens
atgacacggagaaatggggaaaatctgtgagtccaattcagagctgttcaaagatgagaagagttgccttgggagggagtgacctccccgttgctggtggtatgcaagcagagattttatgatggtcatcaggtggggatggaatactgtataatatgatgaccatcaggtggggatggaatactgtataatataataagtaatatggaatacttataatacatcataagactctccctcacttccagrgaaaactctcttagcttctgtcttctaattcctccctgaaaagcttcctcactactccccacagaactctccccctcactgaaaccaaaaggctcctaggtttctcctgcaagtctttcagctgaatctactgaagtgaaatacaagaaggataattatgaagttttattcttgggacccatgaaatcaatggctcccaaagaaaaaaaaaaaagaagagtaaaccaagctaacgaccccaagtcaaaatggtagatagcatgccacgttgcaacctaggggtgaaaaacaaaggcaagtgttt

SEQ ID NO: 257704 - DNA, 553 bp, Homo sapiens
atgacacggagaaatggggaaaatctgtgagtccaattcagagctgttcaaagatgagaagagttgccttgggagggagtgacctccccgttgctggtggtatgcaagcagagattttatgatggtcatcaggtggggatggaatactgtataatatgatgaccatcaggtggggatggaatactgtataatataataagtaatatggaatacttataatacatcataagactctccctcacttccagagaaaactctcttagcttctgtcttctaattcctccctgaaaagcttcctcacyactccccacagaactctccccctcactgaaaccaaaaggctcctaggtttctcctgcaagtctttcagctgaatctactgaagtgaaatacaagaaggataattatgaagttttattcttgggacccatgaaatcaatggctcccaaagaaaaaaaaaaaagaagagtaaaccaagctaacgaccccaagtcaaaatggtagatagcatgccacgttgcaacctaggggtgaaaaacaaaggcaagtgttt

SEQ ID NO: 257705 - DNA, 546 bp, Homo sapiens
ttaaaatattttcatttaaatacaagatggggatgaagttacccaagatcaccaccactactcaacattgtacttcaggcattagccaatgcaataagacaagaaaaaaaaaacacaaaaatatgatgtttgaaaaggtagagacattatgtatatgtgatatgattgtctacctacaaaatgcaaaagaaacaactgacaaattatttaagttaataagatacattgtgtccaaatcattattatttccttccctgcctcttcttttcctccacaaaaactcacatcctacatttcttgcacctgctctgcaatttctcacttctgaacatttaccccaccttgagctcctctcttgcaatttctgcagttgcaaattctacctatttcccaatgcccaatgcacatgccactgtgttttcctaaaatctttcttgktttcccaaccacaagtaggttctccatcttctaagctcacaaaatctgcattattcgttcattctctacagttctctgaaggtacctaccccctcttacctcttatta

SEQ ID NO: 257706 - DNA, 568 bp, Homo sapiens
ctgtatcctgtctactgaagtaggctgtgagcaacttgaagccagagattgggaagatggaagaatacaatttagtgacaaagagtactttggagcttgacagacccatatttaaatcccagcactactatttatcagttgtgtgcccttaacaaagttcttgacctctctgagcttttttctcatataaggattgagggtatagtagggttgttttgaggtttgcactaaacaagttgacagtgtgtgtgcattcctatgtacatttagcaaaccacctagcacaagacaaagaatactattattattacacactattatttttcattatttatccctagcacctaggacagtgcccaatgtacaagaggagttcaaaagatgctctatgaaatgacrtcacaaatatttcttgagtgcttctgtgcacagggcaatgcacaggatgttagagatgcaagaatgagtaggatccaaagcctggtctccaagaggccaagagcatcagaagattgtaaggaacacaatgtcggagaaagtcaaacccaagcccactaaagacacaatc

SEQ ID NO: 257707 - DNA, 531 bp, Homo sapiens
agccatttctgaaggaagaaaaaaatattctcctcaaacctagcaacaaattggcttaaacaatctgcatcatcatctcccatctccacggctaatcatattggtaaatggttgggtgttttttttcctgtggccactgccttgaaggaggggagatggaaccagggtgggggacaggaaaaaggaaaatgtttcgtgatagatactgattcaagaatgcctttgctcttcttggttaacttccttgcagacccagagaattggcttggtcagacagctcsccctgtgtggcacaaacaagaaacattaattaaaaataattgccaccccctccccagaattaagaatgtgatgttcagattcattttaagaaaggcaatttgatgccaataaattacaattataaaaacttcattacagtcaagagcaatctatccaccattgtcctaattacacattgtaggaataatgaatgctaatgatttaatgtacaataattaccaggattgaaaaataaaatataataatcgt

SEQ ID NO: 257708 - DNA, 581 bp, Homo sapiens
cttggtcagacagctcgccctgtgtggcacaaacaagaaacattaattaaaaataattgccaccccctccccagaattaagaatgtgatgttcagattcattttaagaaaggcaatttgatgccaataaattacaattataaaaacttcattacagtcaagagcaatctatccaccattgtcctaattacacattgtaggaataatgaatgctaatgatttaatgtacaataattaccaggattgaaaaataaaatataataatcgtcattattattgttatcaataacatagatttttggcatggttaatctccacttgaggctgagatgaaatttcagggttttgtggggatttttttatccccacttagaaacactcccttttcttctcctccyccttccagctccaactttattaagacaagaaatccacagcacggaatagaaacgtcttgcttctcctagagggtcagagttgaagggttaaatccacatctcctatcccctgtacagcagatcacctttggtttcttaccaaacatctttttgtgtaggaaagaaagaaaaagcaattactctg

SEQ ID NO: 257709 - DNA, 535 bp, Homo sapiens
cacttccccaaggtcacacagtgaagtcaagaagtaggattcacacatggcctatcaagttcctgtatttttccactcattgtgctgcttctcaaagaagcaaaagggagactgttgggggttagtggcagaagaagatggagttttggagtcaacaagctcattggagtcctgaatgggccacttgctacctgtgtgatcttaggcaagtctcttaattcaattcctcatgtgaacaatggtgctaccagtcactcctaccatgttggatttggggatgacacccagcacatagccacagcccaatgaatggcagtaagaaaacaaatcatctacatttctatarctatgctgggattgcttttggagtcataactagtgagattacttctcattttgtggatgtggaaacagaggctctgagatgagagggactataccaattccatctggctggaattcacagctcctggctcctagtgcagcctagcacatctctgagggaagtggagaaagcagtgagccaggaggggct

SEQ ID NO: 257710 - DNA, 516 bp, Homo sapiens
gtgaacagaagcaatggctcacttccaggcaaaagacctcagaggcagtacacattttgcaatattctatttatcctctatcatagttgctagcaatatttcagatagtgcttgcccaggggcctggatcccagagtgcaaatgagagtaaaaatgcagggcagaatgccctgctaaaccatgacaaacatgaaaagtgtacaagtaaaggatgcagtgatgagtttgccattcattcagcaagtatttgraatgcctactgtgtcccagataccaagtctagcattttcttcctagatggagtgaccaaggggagggtggtatctgagctaggctttgaaaaagacataggatgtcgactgctttagaagaaaggggttggggaaggcatttcaggcaggataaatatcacttgcaaaagtgtaggtatatgaaaactatcggcttgttggagagacagctggaggagtagaaactgaagacagaaaagcaggtggggcaaagccttgaatgcag

SEQ ID NO: 257711 - DNA, 508 bp, Homo sapiens
tttgacctcgtgatccgcccacctttgcctcccaaagtgctgggattacaggcatgagccaccacgcccrgctgaattctataattttaagatgttattgttgagtcttctaaaataatacagttctaaatgtctcttgagctagtttttaaaattctcttgctccaagggtctaagattcaatcttaggtctcttgcagaatctgcatctggtctcagcctaggtctcttgcagaatcttgcagaatctctgaggaggctgaagccaatcagtctaccttcctcacacttgatcccagtgcaaccagctctgtcccaggttctcctgggactgactagtccagttctggattaaagtcaggctctggcacctgtccctggaatagtacttgaagatcagcagtttcacctggctccatcacaggccaggtctccttaaatgcagtgaggcctggttcccctggacccatgagccctcagtagcatggaggtgctgagcaatttaacg

SEQ ID NO: 257712 - DNA, 508 bp, Homo sapiens
tttgacctcgtgatccgcccacctttgcctcccaaagtgctgggattacaggcatgagccaccacgcccagctgaattcyataattttaagatgttattgttgagtcttctaaaataatacagttctaaatgtctcttgagctagtttttaaaattctcttgctccaagggtctaagattcaatcttaggtctcttgcagaatctgcatctggtctcagcctaggtctcttgcagaatcttgcagaatctctgaggaggctgaagccaatcagtctaccttcctcacacttgatcccagtgcaaccagctctgtcccaggttctcctgggactgactagtccagttctggattaaagtcaggctctggcacctgtccctggaatagtacttgaagatcagcagtttcacctggctccatcacaggccaggtctccttaaatgcagtgaggcctggttcccctggacccatgagccctcagtagcatggaggtgctgagcaatttaacg

SEQ ID NO: 257713 - DNA, 508 bp, Homo sapiens
tttgacctcgtgatccgcccacctttgcctcccaaagtgctgggattacaggcatgagccaccacgcccagctgaattctataattttaagatgttattgttgagtcttctaaaataatacrgttctaaatgtctcttgagctagtttttaaaattctcttgctccaagggtctaagattcaatcttaggtctcttgcagaatctgcatctggtctcagcctaggtctcttgcagaatcttgcagaatctctgaggaggctgaagccaatcagtctaccttcctcacacttgatcccagtgcaaccagctctgtcccaggttctcctgggactgactagtccagttctggattaaagtcaggctctggcacctgtccctggaatagtacttgaagatcagcagtttcacctggctccatcacaggccaggtctccttaaatgcagtgaggcctggttcccctggacccatgagccctcagtagcatggaggtgctgagcaatttaacg

SEQ ID NO: 257714 - DNA, 558 bp, Homo sapiens
tggcaggtggcgaatggccggagatccggcctcccagtggtgtccaccgccacgggcctccgctcgacaggcttatttccctccatgctggagcaaaccccggctgaaagagggccgcactaattggtttgcgtacccgaagtgggaatagagagggaggaaaaccatgtttcaggtgttacggggggaaaaaagtgaaatgcgaaccgcaggggagagagcgaccgtcaggcagacaccttgtgaaccgcggtggagagcacacctaggtggggaggtcaccggcccaacccaccaccctccgggagaatgmgggcagggacagcagcaggggggcagcatccacgtctctacgcttgcaagggttccccaagtccctggccactgctccccacttcctgcagcctcggtgtccgccgggggcgtgtgtgaggggcggggccgcatggggaggagggatttaaaaaaaaaaaaaaagcgaggtaattagcattctccgattccactggctctccgccgcccctgctttgcatacgcccgtcccactggctgcccggg

SEQ ID NO: 257715 - DNA, 558 bp, Homo sapiens
tggcaggtggcgaatggccggagatccggcctcccagtggtgtccaccgccacgggcctccgctcgacaggcttatttccctccatgctggagcaaaccccggctgaaagagggccgcactaattggtttgcgtacccgaagtgggaatagagagggaggaaaaccatgtttcaggtgttacggggggaaaaaagtgaaatgcgaaccgcaggggagagagcgaccgtcaggcagacaccttgtgaaccgcggtggagagcacacctaggtggggaggtcaccggcccaacccaccaccctccgggagaatgcgggcagggacagcagcaggggggcagcatccacgtctctacgcttgcaagggttccccaagtccctggccactgctccccacttcctgcagcctyggtgtccgccgggggcgtgtgtgaggggcggggccgcatggggaggagggatttaaaaaaaaaaaaaaagcgaggtaattagcattctccgattccactggctctccgccgcccctgctttgcatacgcccgtcccactggctgcccggg

SEQ ID NO: 257716 - DNA, 610 bp, Homo sapiens
ccttccccgtctgctgccagccagggcacaaccctcaaagagaggatatcttcgaggccacacacacacacacacacacacacacaycctgaaatatcgactaagatggaaacatctggggagaaggcattgggctttgtatgtgcttcttcagaatgcggggattcacctgcaaaacctgggagctttggactggattgctctttgtttgaaaccctacctccaccaaaaagcacagaggggcttaatttccttcctggtggctcccatgacaatcatcttttactctttgctgcccctgactcccagctccttacccaccttctgggcctggaacctcttcttttttctccctcagtatttcctttggaaggctctagtgtggaaatctggtcaccctgccctacttctgcctttgccattatcctgaagttgtgagtttggacaagtcactttacatctttgggcctcagttgcctcatctgtaaaatagggggctagatatgtaatacacccccaggtcctcttgtagctctgtggtagttgcttctatattttttcaaataggttttacttttatgaaccttaacaacttttaaaaacagttttt

SEQ ID NO: 257717 - DNA, 661 bp, Homo sapiens
tgtgtgttcttaggtatgcgacccaacctctctgtcctccagtttcctcagctgtaaaacagaggtaataattacaaggattaaatgagattatgtgtctaagcctattataatctggtgctgacacatggtaggtgctaaaatgatgatgatagttgtgataatccaggcacaatggtatctcatctctatcacatccagattaattcattcccacakgcttagggtggatggagccaacaaggcacagaattttaactggatcctcctttttattatagcaccaagtaactcagtacacccacctcaaggattgatgccatgggcacagccctgtggccagggtcacaaaaagattgttttggtcaaaggaaaatagcttattttggggaggctgaggcaggaagattgcttggggccaggagtttgagaccagctgaagcaacatagtaagatctcagctctacaaaaaataaataaataaaataaaataaaataaaattaagttagcttattttatttgctgtactttaaacttcaatgatatctacctttagtgaagcggcaccaggaaactttctggatgtagtcccttatgttaattgggatgtgggttcagaggtatatgcatttgtcaaacggggtttcaccatgctggcca

SEQ ID NO: 257718 - DNA, 661 bp, Homo sapiens
tgtgtgttcttaggtatgcgacccaacctctctgtcctccagtttcctcagctgtaaaacagaggtaataattacaaggattaaatgagattatgtgtctaagcctattataatctggtgctgacacatggtaggtgctaaaatgatgatgatagttgtgataatccaggcacaatggtatctcatctctatcacatccagattaattcattcccacatgctyagggtggatggagccaacaaggcacagaattttaactggatcctcctttttattatagcaccaagtaactcagtacacccacctcaaggattgatgccatgggcacagccctgtggccagggtcacaaaaagattgttttggtcaaaggaaaatagcttattttggggaggctgaggcaggaagattgcttggggccaggagtttgagaccagctgaagcaacatagtaagatctcagctctacaaaaaataaataaataaaataaaataaaataaaattaagttagcttattttatttgctgtactttaaacttcaatgatatctacctttagtgaagcggcaccaggaaactttctggatgtagtcccttatgttaattgggatgtgggttcagaggtatatgcatttgtcaaacggggtttcaccatgctggcca

SEQ ID NO: 257719 - DNA, 661 bp, Homo sapiens
tgtgtgttcttaggtatgcgacccaacctctctgtcctccagtttcctcagctgtaaaacagaggtaataattacaaggattaaatgagattatgtgtctaagcctattataatctggtgctgacacatggtaggtgctaaaatgatgatgatagttgtgataatccaggcacaatggtatctcatctctatcacatccagattaattcattcccacatgcttagggtggatggagccaacaaggcacagaattttaactggatcctcctttttattatagcaccaagtaactcagtacacccacctcaaggattgatgccatgggcacagccctgtggccagggtcacaaaaagattgttttggtcaaaggaaaatagcttattttggggaggctgaggcaggaagattgcttggggccaggagtttgagaccagctgaagcaacatagtaagatctcagctctacaaaaaataaataaataaaataaaataaaataaaattaagktagcttattttatttgctgtactttaaacttcaatgatatctacctttagtgaagcggcaccaggaaactttctggatgtagtcccttatgttaattgggatgtgggttcagaggtatatgcatttgtcaaacggggtttcaccatgctggcca

SEQ ID NO: 257720 - DNA, 598 bp, Homo sapiens
atgctagctgatgtgtcacatgaatcctaacgtcttagtggctgaacataatgaaagctgctttctcattcatgtagagtccacctgatggcaggggagagaggtgctctgtctgtggaagttgatgaaagctctgccatcttggacgcataactcccggagatgtctctgattgaggatgatagagaatgtggaggattataatacagtcctgggtgtgggtgtgtcaattccttccgcattccaatgaccagcactcagtcacatggcctccactagatgtaaggggactgaaaattatggtctctggtagggcagccacccacagccacaagtctacactatcagaggggcataagcatttaatagagctagccacctcaacaaccttacaaagcaggcrctattattatccccattttacagattaagaagttgaggaacagaaggtttaatgaatttgcttaaggtgacatggcttgcaagtggctggccagatttgaattaggcatttggcagactgccttatagaatacttgtgaggagcaaaatgacataatgaatgtgaaacgttgatcctagcatctcatatgcactt

SEQ ID NO: 257721 - DNA, 412 bp, Homo sapiens
ggaaggaaggaaagatggaattttggagacatgtaatttttttaatagttgtaagggatcgacaacatgggtgccaactgtgttattttgccaaatagggctttaaatgcccagaaataccaactaccatctctcatcctattagggcctcrcagggcagaccagaggctgctgagcacatgtagtctgagtggacagtggagttgggtgctatgcagcccacgtggtgccacgcacgctctgagcaccatcatttcatgaaagaaaggatattttagccccagtaaaatataacagagtaacagagaagggtcagtaagcagatatcacttatttttattttttaattttttatttttttagagatagaatcttactctgtggcccaggctagagcacagtggcatgatca

SEQ ID NO: 257722 - DNA, 560 bp, Homo sapiens
taggctggactattacctaagatccagtcctttctgaatgcaagacattgcctcatcatttaaactcttcacatgatggaaaaggttcagcagttgtccactatgactatcttaatgcacctggattaattaattcttttctttaattagttattaatttgttcatcaaactactattcaatccatatccctagcccttcattcaacaaacaagtaccatgagcacctactgtgtgccagatgcaagactaggcatggtaggcattgcagtacactagacccatgtggctcttcactttatgggtctgaccatctcgcctagcttgagtgagttggatccaactgtcagagctttcaaaactcaaacaagaccatttgtccttaaaaatttaaagtgtaagacatgtatgacataactgaacaccagttttaaaataactgcatatagtttcagccctgacacaagaatccctgtgctaaatggmctgacacaattgtaggagtggcagatctgggcatctgagtcataacctgtctctctgaactgtgtgttgaggaag

SEQ ID NO: 257723 - DNA, 415 bp, Homo sapiens
accttacttccgtcacagggtcagaggtgagaggtggaagtggccttatgtaatcctccaatgcatgcgcaccaatgccttgattttaagtgcagagacctagtattttcagacacaggrcacagacattttaatgtccctgaggagccagcacagagcaccagtagtcatgtggacacacctgatgtggatttcttccaaaagctggacacccttccaccagctagaaaacagagctgcttttcttcagtacaattcaacaaatatttattgagcacctatatgaatatcctattggctacatgcatatagatatgaaatgaataaggagcacatatgtgtgtttatgcacacacaagtcagcatacaagtaaatacacacacacacacacacacacttcatgcattccctcac

SEQ ID NO: 257724 - DNA, 591 bp, Homo sapiens
attcattctacaaacatttactgagagcctactatgacataggcaccatggcaggtgtgcttctgtaaagtggggtggactgtggtgaagatagagtgacatcacccccatggaggccatcacacaatgcctgactgtggtcagtgccactgggcagctggcgtctaagttctagagctcagtgcccatcagttaccaggaactctttgtctcctggttgctgtgcagtgcagtagttgaagtgaggctttggattcctatggattttcatttccctggctctccctagcacacccccacccccaccctgcctgatacaggaaaccagatccagagatcaccttcctgcccagctcagccttcctactagaaagcacagagtgattcttcccatgacctcattagaaaactacaagaagatttatttttaagacaggaggtgatgattgcagtttgcagagcagagttctcgtccctgactgatcaccccaaggcccctcaaggaagcgtttccctgagtcacctacgtataaatcaytggcttcttcagcggcggctgcagaagcaccgacagaggccctgcaccaggtg

SEQ ID NO: 257725 - DNA, 524 bp, Homo sapiens
gtgagtttgcaaggggaacttccacagggcgggagagcttccccaggtcagagaaactctttacaaaatcrccagaaaaagattaatacagcctactgttttacttcattttagtaaacatgtattaagtgccaactgtgtacacaacaccaggcttagttcagcaatggatgtgatttcccacctcacagagcctacagttgtgtagaggagatgggctttcattgcaaattaactgattgctatggaaacatggagtcctatggaaggggagaacagagatggaatttggtcaaagatagcccttctgagggagtgaggctgacattgagagattagtcaaggctaggctggcaaagagagggtcccactctgaaagacgagaatgaacaaaggctcgggaatgagaacgatctgggcccagacacagaacagaacgacctgcgtggctggagaaggtgaatgagaagcagaggcagggagggagaggcagggctggatcacatagtgtctagtgggccatg

SEQ ID NO: 257726 - DNA, 467 bp, Homo sapiens
tggtagaagtctcactgtggtagctgatctctgaagagggtcccaaatggaccacccctctcagtgccatgcccttgtttagtctcctcccacactgaaatctagccagaactttggccagagaatcaggcatggcagcttctgcttttgagcttttggaagccctgaataccatttaagaagtccaatttttgtgctgaaagaccatgcagagagaacacatggaaagacatcatggaaaggctttgggaagaggaagtggttttctgtcagggaaggagaacagacagatacatacacacacacacacacacacacacacacacacacacaaacacacacacatgccccagcatcccacctgacctcacacttgcaaccrtcttccaccaaggcaccagacattttagggagtcatcctagatatcccagtccagtagagccccccggctatctgtagccccagc

SEQ ID NO: 257727 - DNA, 522 bp, Homo sapiens
gtgttgacttgtctatgtccagcccacaagaaggcaaactccatgaggacagagcctgttcgtgtctgtcttctcactgctgcatccccagcacctgtcacttactcaatacctaaatgtgggatgaggagacaataaaaaraatgaatgaatggctgccttcgaggaaagaaaaagctagatcgggcttattttcattgctcagtgaatgggcatcagagtctaaatccagtccagggagaagtgctgaactaagccctagtatgaggacgggcagaagtgcaagcaatcaacagatatgcgaagaaaaagctacatgacatggtgtgacggggctgagaatgccagaaagtccaagctatcgccttggtttctggttataacccctgattccagagtgatctttataaaattgctcagtcagcaatgcctcctgcagtggaggctgtagggcttccttgcaagccttgccggcaggttcaagggcctcctgctgagtctcttcccaggaactgctcagcc

SEQ ID NO: 257728 - DNA, 440 bp, Homo sapiens
gaaccccaatgcttgtccacagggcatggcatgcagccaaagacccatcaggggacgttttcacragtgacagaagatccattcttagtcccaaagacagagggagccagcacagttgtaggtttgggcatgaacagtcaggatgcgttgtgacaagggaaacagggaaggcgagccagtgtgtggaggcagaactagacagctcaaggggaatgagggccgtaaggggacaaggtgagagccaaaaacatgaactggtgggcttctccaggtggaggggactaagaggatggggtgcattgttggacagccctagctcccctacttacttgctataagaccttggacaaattacctatgctcccagagcctcagatcctcatgtataaaataggacagtatctgccttatagagttgttataaggatgaaataccatag

SEQ ID NO: 257729 - DNA, 440 bp, Homo sapiens
gaaccccaatgcttgtccacagggcatggcatgcagccaaagacccatcaggggacgttttcacaagtgacagaagatccattcttagtcccaaagacagagggagccagcacagttgtaggtttgggcatgaacagtcaggatgcgttgtgacaagggaaacagggaaggcgagccagtgtgtggaggcagaactagacagctcaaggggaatgagggccgtaaggggacaaggtgagagccaaaaacatgaactggtgggcttctccaggtggaggggactaagaggatggggtgcattgttggacagccctagctcccctacttacttgctataagaccttggacaaattacctatgctcccagagcctcagatcctcatstataaaataggacagtatctgccttatagagttgttataaggatgaaataccatag

SEQ ID NO: 257730 - DNA, 546 bp, Homo sapiens
tggagtgagagagctctactcgaagtacaggtatctacaaagcaggtgcagagtggcctgaagcccaaagaaatcatttctggagaccaaatgggaagcactttcgttctctgaggagacctagggtatgaaaccrgccataaaaatgaggaagcaaatttaggttgtaactcagaatgctcccaggactagcaaatgtgccggcatgaattttcctggagtaagtggttaaggccaaccttccaatgtcatatgagaaagacaccctagagccactcaggtttttcttactgcacctagattcataatagaccacaaagaccctaagagcaaatgatttctacaacctgtgcaaacaccccacgtttgtaatttttccctggatatttccttacagtggttagcaacaaattgctgaagtcagaaagctccaaagtgcttgccttctaggaaagaaagtaaggaaactggcggggggttgtgccccatttctttgtcattcctagaaacaggaaagttcccagggatgaagagggagatggcaac

SEQ ID NO: 257731 - DNA, 430 bp, Homo sapiens
tttttttttttttttaattttagagacaggctctctgtcacccaggctgaaatacagtggtgtgatcatagctcactgcagcctcaaactcctgtgctcaagcagtcctcccatttaagtawgtgccaccacccctggctaatttttttttttttagagatgggcatcttgttatgttgcccaggttggttttgaactctggcctcaagtgatcctcctgcctcagcctctcaaaatgctgggattacaggtgtaagccaccacacccagccgattctttcccttatgtatgttttcaaaataacaatttagttccctagctttttttttttttttttggtagtggtggttaaaaacacaaaatataaaatttaccattttaaccatttttaagtgtacagtagtgttaaccacatgcacattgttgcgc

SEQ ID NO: 257732 - DNA, 578 bp, Homo sapiens
tgcccgtggtaaccaccattctactctgcttgtttttctttttttttcttttgaagacagggtcttgttctgtctcccaggctggagttcagtggcacattaatagcccactacagcttcaatatgctgtgctcaagcgatcttcccaactcagcctcctgagtagctgagactagcttatttatttatttatttatttatttatttagagacagagttatgctcttgtcrcccagactgggatgcagtgacgtgatcccagctcaccgcaacctctgcctcccgggttcaagcgattctcctgcctcagcctcctgagtagctaggattacaggtgcacaccaccatgcccagctaacttttgtatttttagtagagacggggtttcaccatattggccaggctggtctcaaattcctgacctcaggtgatctgtccacctcggcctcccagagtgctgggattacaggtgtgagccactgtgcctggcctatttttatttttagtagaagtgaggtcttgctatgttgcacagtctgatctggtttccctgatgattagtgacaatgagcattttt

SEQ ID NO: 257733 - DNA, 578 bp, Homo sapiens
tgcccgtggtaaccaccattctactctgcttgtttttctttttttttcttttgaagacagggtcttgttctgtctcccaggctggagttcagtggcacattaatagcccactacagcttcaatatgctgtgctcaagcgatcttcccaactcagcctcctgagtagctgagactagcttatttatttatttatttatttatttatttagagacagagttatgctcttgtcgcccagactgggatgcagtgacgtgatcccagctcacygcaacctctgcctcccgggttcaagcgattctcctgcctcagcctcctgagtagctaggattacaggtgcacaccaccatgcccagctaacttttgtatttttagtagagacggggtttcaccatattggccaggctggtctcaaattcctgacctcaggtgatctgtccacctcggcctcccagagtgctgggattacaggtgtgagccactgtgcctggcctatttttatttttagtagaagtgaggtcttgctatgttgcacagtctgatctggtttccctgatgattagtgacaatgagcattttt

SEQ ID NO: 257734 - DNA, 578 bp, Homo sapiens
tgcccgtggtaaccaccattctactctgcttgtttttctttttttttcttttgaagacagggtcttgttctgtctcccaggctggagttcagtggcacattaatagcccactacagcttcaatatgctgtgctcaagcgatcttcccaactcagcctcctgagtagctgagactagcttatttatttatttatttatttatttatttagagacagagttatgctcttgtcgcccagactgggatgcagtgacgtgatcccagctcaccgcaacctctgcctcccgggttcaagcgattctcctgcctcagcctcctgagtagctaggattacaggtgcacaccacyatgcccagctaacttttgtatttttagtagagacggggtttcaccatattggccaggctggtctcaaattcctgacctcaggtgatctgtccacctcggcctcccagagtgctgggattacaggtgtgagccactgtgcctggcctatttttatttttagtagaagtgaggtcttgctatgttgcacagtctgatctggtttccctgatgattagtgacaatgagcattttt

SEQ ID NO: 257735 - DNA, 511 bp, Homo sapiens
ttgtagtttataggcacttaatgaatactagtactaatactgtgttctaatttagtgtctttttttacagtaccttcattttcctatatgttttattctcttatgggatcagcaacaagatattaatttcttcttcaggaatttatatttaatttgattgagtagaataccctgaaagtatttaagtagataacaaataacattttattttattttgaggcagtgtctcgctctatcacccaggctggagttcagtggtrcgatcttggcttactgcagcctcgacctcctgggctcaagccatcctcctgcctcagcacccggagtagctggggctacaggcacgggccaccatgcccggctactgtttgtatgtatgtatgtatgtatgtatttagtagagacagtgttttgccatgttgcccaggctggtctcaaactcctgggctcaagctatccacctgccttggcctcccaaagtgttgacattacaggtgtgaactaccgtgcc

SEQ ID NO: 257736 - DNA, 511 bp, Homo sapiens
ttgtagtttataggcacttaatgaatactagtactaatactgtgttctaatttagtgtctttttttacagtaccttcattttcctatatgttttattctcttatgggatcagcaacaagatattaatttcttcttcaggaatttatatttaatttgattgagtagaataccctgaaagtatttaagtagataacaaataacattttattttattttgaggcagtgtctcgctctatcacccaggctggagttcagtggtgcgatcttggcttactgcagcctcgacctcctgggctcaagccatcctcctgcctcagcacccggagtagctggggctacaggcaygggccaccatgcccggctactgtttgtatgtatgtatgtatgtatgtatttagtagagacagtgttttgccatgttgcccaggctggtctcaaactcctgggctcaagctatccacctgccttggcctcccaaagtgttgacattacaggtgtgaactaccgtgcc

SEQ ID NO: 257737 - DNA, 384 bp, Homo sapiens
ggcatggtggtgtgagatggaagaatctcttgagcccaggagtttgaatccagcctgggcaatgtagcaagactccatctctaaaaacaaaaaattactcctaataggtcactttctttttagagcagtcattgtcatcagtcatactactagtgatatgctgatagctaattaatatttattgagcacttactrtggggccaagtgctcttctaagcactttgcatgtcttaacgcatgattatccccacagtagccctatgaagtagctactgtatgatccccttttgtatatgaagaaactaggttacagagaggctaaactaacttgcccaggcatagtgctagtgaatggcaaaccaggattaaaaccctgtcagtatg

SEQ ID NO: 257738 - DNA, 598 bp, Homo sapiens
aagcctgaactctgggtgtaaaatgttatccagaagctatagggagctgccttgctcaggtcattggaaatttcaaccctaagactcattggaatttctaagtccgttatgcaccattatgggcatatggagcatattcataccatgaggaggagtctttgtttatgatggactttttaatatggccataattaaactcacactcaaaaaggatgagctattgtcaaaagccaaaagaaaaacagacaaaatgaacatgaagcaaggagtccataaaacaagagttctttaccacgtttaagcaaatgtctctcaaaaaaaattgtatttctgtgcacattagctgagattcacacattttgcacctcagtagtatttcagatgagactcaatgtgtggagaaaacygctaacttgtttggttctactcttaccccctcttctgtggcaatgtggggtcagggccgtatcctaaagtatccacatggtcttaaatggaaatcatgggactctggaaagctggcatgagctggttggagcttttaaacagaagtgctttatgggtatcagatctcttctgacatcaattgtttcaaatc

SEQ ID NO: 257739 - DNA, 582 bp, Homo sapiens
acagggaaggggctccactgagtaggggaacaggtgggatcttgaagctacccctaggatatcttggagggggtcttatttagctctaagaacaaagattgtggctgacgtggctttagagctgaggatgaggggagaagtgtgggcagcatgtatccagtcctgccatgccatctaggggcacccctccctggggcttctctgacctgattctggaataaatgactaagacaaagaaaaggactctagggatagcttagcacagaacccatacaaaccacccctaaggtttytaccagaatttccttaggcttagtaattccccaccctgacatcaggaagggatccagggttttccatcttccttttctagcaaagggaaaaaaaaaaaaagtgtctcacaacaatcacacagcctaccaagctacatccaaaaagagggtctgaggaagggctgggcgggcacctgactgtccccagagcccatatcatgcaatgcctgccttgtccaataagcccagccctaggagagcactgctcccttttaaaactctggtctagatgtaggcttttgtaaagttc

SEQ ID NO: 257740 - DNA, 582 bp, Homo sapiens
acagggaaggggctccactgagtaggggaacaggtgggatcttgaagctacccctaggatatcttggagggggtcttatttagctctaagaacaaagattgtggctgacgtggctttagagctgaggatgaggggagaagtgtgggcagcatgtatccagtcctgccatgccatctaggggcacccctccctggggcttctctgacctgattctggaataaatgactaagacaaagaaaaggactctagggatagcttagcacagaacccatacaaaccacccctaaggtttctaccagaatttccttaggcttagtaattccccaccctgacatcaggaagggatccagggttttccatcttccttttctagcaaaggraaaaaaaaaaaaagtgtctcacaacaatcacacagcctaccaagctacatccaaaaagagggtctgaggaagggctgggcgggcacctgactgtccccagagcccatatcatgcaatgcctgccttgtccaataagcccagccctaggagagcactgctcccttttaaaactctggtctagatgtaggcttttgtaaagttc

SEQ ID NO: 257741 - DNA, 582 bp, Homo sapiens
acagggaaggggctccactgagtaggggaacaggtgggatcttgaagctacccctaggatatcttggagggggtcttatttagctctaagaacaaagattgtggctgacgtggctttagagctgaggatgaggggagaagtgtgggcagcatgtatccagtcctgccatgccatctaggggcacccctccctggggcttctctgacctgattctggaataaatgactaagacaaagaaaaggactctagggatagcttagcacagaacccatacaaaccacccctaaggtttctaccagaatttccttaggcttagtaattccccaccctgacatcaggaagggatccagggttttccatcttccttttctagcaaagggaaaaaaaaaaaaagtgtctcacaacaatcacacagcctaccaagctacatccaaaaagagggtctgaggaarggctgggcgggcacctgactgtccccagagcccatatcatgcaatgcctgccttgtccaataagcccagccctaggagagcactgctcccttttaaaactctggtctagatgtaggcttttgtaaagttc

SEQ ID NO: 257742 - DNA, 559 bp, Homo sapiens
tttgtatatgatgtgaggaagggagtccagcctcgatcttttgcatatggctagccagttaccccaacatcatttatgggaaggggagtcttttccccattgcttgttttcatcagctttgttgaagatcagatgatcgtaggtatgtggcctttattgtatactttttttgtctgtctcttaaattttatgtgtgtttttttttatgtttaaaaaatactttgtgatccccttggccacagataaccattcttgttctgatacggtattaccccagcagagtgttcacatgtagtggaagctctattataatggtttgattgattgttattactgacttttgtgtaggagcaagagtatacatgatacttcgaatgaagggtgtraaagctcttcatagaaatgcagaatgttaacttggccttcgtgagtagtgtttcctagaattgtgcaattcaactcccctgattacagctgaaagaaatttgagactaaagaattaaacctttccctttatactgcagataaaataattcaagtcctgagagattatgtaatg

SEQ ID NO: 257743 - DNA, 620 bp, Homo sapiens
tttatgctatttaccatgtcaggttattttttactgccatatatatttaattttgacagtgaacagatatactaaaaatagaattacagcgtatcattttaattacggccatttcagttgctcatcaacataacaatgaaaaatggaagggttaccacaacattgctgaatcgccatctcttaatagctttctgtgagtgtagcatgtaytaccagataattatgaagattaactcttgcagatagggtgcctgtacctatttttaataatttgtacgcactgaggaaggataaagggttggaaatacaagaatcttaatcttaattattttaccccatctacccttttatccgtattgaactgttgggtatttagtttgctttttttacttttcccttttccttaattttttgttatggtggaggagagactggggatagcaaagaaaggaagcaattaaatttctgtaagagtcacagacaaccctctttagaacaaagtaaagtccataagaatgagtttccatatctctaaaactccacatagcttatttaatactgcacagaaggcgggttattgatctgtgtgtagagttgttggcagagagggagagtagtat

SEQ ID NO: 257744 - DNA, 620 bp, Homo sapiens
tttatgctatttaccatgtcaggttattttttactgccatatatatttaattttgacagtgaacagatatactaaaaatagaattacagcgtatcattttaattacggccatttcagttgctcatcaacataacaatgaaaaatggaagggttaccacaacattgctgaatcgccatctcttaatagctttctgtgagtgtagcatgtactaccagataattatgaagattaactcttgcagatagggtgcctgtacctatttttaataatttgtacgcactgaggaaggataaagrgttggaaatacaagaatcttaatcttaattattttaccccatctacccttttatccgtattgaactgttgggtatttagtttgctttttttacttttcccttttccttaattttttgttatggtggaggagagactggggatagcaaagaaaggaagcaattaaatttctgtaagagtcacagacaaccctctttagaacaaagtaaagtccataagaatgagtttccatatctctaaaactccacatagcttatttaatactgcacagaaggcgggttattgatctgtgtgtagagttgttggcagagagggagagtagtat

SEQ ID NO: 257745 - DNA, 600 bp, Homo sapiens
tgttttcaatgaatttgtggttatagttgatgaccactgattttacttcagaaagtccaaatatagcccagaacagtgtcttaaaactctgttgtgaaggtttcattttgttttacaccaaggtagtaggagtagaggttgaacattcccatcataaaggccacaaacaccacaatgaacacattcagcgcatatcatgcctgtgtgctcattaaatctgtttttctctagcagaggcaggttaaccatgaaactgaagcttcaagataactttacttgccctatgmaaagcagcccatgatttattttttctggggactactgccaaccaggcctgtgtgtcaatctgtaagcatccaacagcaggtctactgtacaaataggtcttttgtcaaacacttattaacccaatatacagcccttcctgttggattagtactaccaaagcctcctgttcttttcacagtgctgcttcccagctttatgtcaacaactgagcaattctttctcctagggaagcagaccatggagtagaggaactaataatgaattgaatttctccggtataatcagagtcaattatttccatatgtacagtga

SEQ ID NO: 257746 - DNA, 630 bp, Homo sapiens
tttttaaagaatgttcaggggaggcctctttgatcaggggatatttaagtaggcacttaaaggatctgagtgccagatttgcttgtcctggagcaaagtagcactttaaagaagatgcctgttcagatgacttgcccaaccctctccaggataaattcacaagagatttcgatatgaagtgagacaacagaaggactatatcagaggaaaggtgacacaagtgcacttttggctatgggtcatgatggctctcagaaggttacaggaatcctttgttggaaacccggcaggaagtgaggtagagttagggcagggagcaaaaagattaaaatgtgtgtctttatgtgggcttttgatgcatatgagcatgagttgatgtgaggatatctgaaactgctttatctactgcagaaatattgtcatgaaayttaaaggaaaattaaaggaaaacaggtgtaggttctagagtatattctcactgaggcagtagcataaaaatttaaaaatccctgacagcagaactgatagattgttagaaggtttaagttggaatgtgagagagggcccccagccctcattcttcatattctctttgtgggggttaactgtcaacaagagagcaatttcaaa

SEQ ID NO: 257747 - DNA, 667 bp, Homo sapiens
agtaaattatctctagtattttcattaaacatttggtgctgtcagtgctgttaaccatggaaacacatttgtgttgtagtaatcaggacttgttcagrtgcaagtgacagaaacacaacacaaacaaatgagaagggcactttgtggctcatcttacagggcagtctggatagttttggcacaacttgatccaggggcttgaaaaatgtgatcatatttctattttaatctccatttcatggttctgtactttttgtctttttcatgcaggttctagccatttgttaggagagatgggctctggtagcccaaagtatgcacttactgtttgtgaacccaccaaaagagagagttcctgtctctgtcagcaccaaagctcaagatagactttaattgaccatgttggtgttagatgcccatccttgaaaaaattacttaagaaaatgatatcctctcattggtgaaacctgaattatccttcatccctttggcaggtggggccaggcatcaagactgactgtggattttaagaggggtggtgctgcaggagagaagggtgctcctactagaagaggaggaagagattctgagcaaacccaacaagcagtcatgacagtggcagttctaaatgcctacaagatccactaaacattggttacatttgaga

SEQ ID NO: 257748 - DNA, 667 bp, Homo sapiens
agtaaattatctctagtattttcattaaacatttggtgctgtcagtgctgttaaccatggaaacacatttgtgttgtagtaatcaggacttgttcaggtgcaagtgacagaaacacaacacaaacaaatgagaagggcactttgtggctcatcttacagggcagtctggatagttttggyacaacttgatccaggggcttgaaaaatgtgatcatatttctattttaatctccatttcatggttctgtactttttgtctttttcatgcaggttctagccatttgttaggagagatgggctctggtagcccaaagtatgcacttactgtttgtgaacccaccaaaagagagagttcctgtctctgtcagcaccaaagctcaagatagactttaattgaccatgttggtgttagatgcccatccttgaaaaaattacttaagaaaatgatatcctctcattggtgaaacctgaattatccttcatccctttggcaggtggggccaggcatcaagactgactgtggattttaagaggggtggtgctgcaggagagaagggtgctcctactagaagaggaggaagagattctgagcaaacccaacaagcagtcatgacagtggcagttctaaatgcctacaagatccactaaacattggttacatttgaga

SEQ ID NO: 257749 - DNA, 667 bp, Homo sapiens
agtaaattatctctagtattttcattaaacatttggtgctgtcagtgctgttaaccatggaaacacatttgtgttgtagtaatcaggacttgttcaggtgcaagtgacagaaacacaacacaaacaaatgagaagggcactttgtggctcatcttacagggcagtctggatagttttggcrcaacttgatccaggggcttgaaaaatgtgatcatatttctattttaatctccatttcatggttctgtactttttgtctttttcatgcaggttctagccatttgttaggagagatgggctctggtagcccaaagtatgcacttactgtttgtgaacccaccaaaagagagagttcctgtctctgtcagcaccaaagctcaagatagactttaattgaccatgttggtgttagatgcccatccttgaaaaaattacttaagaaaatgatatcctctcattggtgaaacctgaattatccttcatccctttggcaggtggggccaggcatcaagactgactgtggattttaagaggggtggtgctgcaggagagaagggtgctcctactagaagaggaggaagagattctgagcaaacccaacaagcagtcatgacagtggcagttctaaatgcctacaagatccactaaacattggttacatttgaga

SEQ ID NO: 257750 - DNA, 667 bp, Homo sapiens
agtaaattatctctagtattttcattaaacatttggtgctgtcagtgctgttaaccatggaaacacatttgtgttgtagtaatcaggacttgttcaggtgcaagtgacagaaacacaacacaaacaaatgagaagggcactttgtggctcatcttacagggcagtctggatagttttggcacaacttgatccaggggcttgaaaaatgtgatcatatttctattttaatctccatttcatggttctgtactttttgtctttttcatgcaggttctagccatttgttaggagagatgggctctggtagcccaaagtatgcacttactgtttgtgaacccaccaaaagagagagttcctgtctctgtcagcaccaaagctcaagatagactttaattgaccatgttggtgttagatgcccatccttgaaaaaattacttaagaaaatgatatcctctcattggtgaaacctgaatwatccttcatccctttggcaggtggggccaggcatcaagactgactgtggattttaagaggggtggtgctgcaggagagaagggtgctcctactagaagaggaggaagagattctgagcaaacccaacaagcagtcatgacagtggcagttctaaatgcctacaagatccactaaacattggttacatttgaga

SEQ ID NO: 257751 - DNA, 569 bp, Homo sapiens
gggggatctgttgagtttttgctatactatggggcctaggggatgctcagtgaataaaaatttaatttttattctacttataagacaaatatatcttaggctttctgaatagagacacattkgagcaaaacaaatatatgaaaggtcagcttagtagtgggcctaaggtaagtgtatttgcaatccctcaataaaattaattttacaagggaaatttttaaaaaagtttcagagtcttacttcttacagtgagattacaagatgaatgggtacataattgcctttgcctttaaggaatgcatgggctgggaaatggggtctcatgagccccagtggtgccactggccaggcccattttcttaggagaacaagctaccacttggagaagtattcgttcttcttattcaggacagaatccagtgtcagaaaatacagtaagaattcaggaagagccttttggttccttaactgaacattttcaatgtatatttatgtgtaaaagacttctcaaaatataaatgcctagaagaggtcaccccataaaattggttgaatgattgaaagtttaa

SEQ ID NO: 257752 - DNA, 569 bp, Homo sapiens
gggggatctgttgagtttttgctatactatggggcctaggggatgctcagtgaataaaaatttaatttttattctacttataagacaaatatatcttaggctttctgaatagagacacattggagcaaaacaaatatatgaaaggtcakcttagtagtgggcctaaggtaagtgtatttgcaatccctcaataaaattaattttacaagggaaatttttaaaaaagtttcagagtcttacttcttacagtgagattacaagatgaatgggtacataattgcctttgcctttaaggaatgcatgggctgggaaatggggtctcatgagccccagtggtgccactggccaggcccattttcttaggagaacaagctaccacttggagaagtattcgttcttcttattcaggacagaatccagtgtcagaaaatacagtaagaattcaggaagagccttttggttccttaactgaacattttcaatgtatatttatgtgtaaaagacttctcaaaatataaatgcctagaagaggtcaccccataaaattggttgaatgattgaaagtttaa

SEQ ID NO: 257753 - DNA, 636 bp, Homo sapiens
aatttacaaatttaaaaaacttataaaaacctaaccaggaaatatataaagaaaagctttcctaggaaaaacaaaggcaaattgtagaaaacctaagattaagagaaaatcttggatgtggctccccaaactgacacttyatataatggagaatgactattcaaatcattgctgacctcttcttagaaaaaaatggaggccagaatacattagaacaaaatgctcaaagtgctgaatgagaaaactattaacctgaaattccatatccagaaataaaaaaatcctttaagaataaatgcaaaatgaagacatttttagataaaagaaaactaagaggattttccactgtagacctggattagaacaagtgttgacagaagttctttagtctgagagaaaatggtaacagacagaaatggccaatttcaagagttactatgaaggtatagtaatcaagatgatattggtgaaagaacagacagatcaatgtaatgaaatagctcagaaatagatctacacaattatagtcaactgttgtttgacaaagatgcaaacacaaatcaagaatgaatagtttacctatacatctatatttgtcaagacccaggaaatgtacacttaagatttatgcatttc

SEQ ID NO: 257754 - DNA, 551 bp, Homo sapiens
ccctgtaatcccagcttcttggggagctgaggcaggagaattgcttgaatctgggagacggaggttgcagtgagccgagatagtgccactgcactccagcctgggcaacggagtgaaacgctrtctcaaaagaaaaaaaaaaaaggaagtgagtagtgagttcctgatagcagaggtgtccattcttcactgtttattcagcctggtttgtttcataagcagttgaatctcagcggtgagccaccagcatctatgatgcatctcttcttcctgcggcagttgattggttttctggatcttttgaagctacaaatcttccttgatatagagagtatgggctgcctcttccccaaggagtgactctagacatttttccccaaagttacagtcttctacctacttcgtctttatctcctcgtatgtttttagaatatttccctttcagattctctttgattatgatacatatttatgtatgataatgatttcatgaactcttgacttcaaaattgggacagttccagttcatacctgtggtatcagcataatta

SEQ ID NO: 257755 - DNA, 583 bp, Homo sapiens
cactctgttgattttttcctttgctgtgcagaagtaagctttttagtttactatagttccatttgtctatttatgtttttgttgcctgtgyttttgcagtcttagccataaaatatttgcttaggccaatgacctggagtgtttctcctgtgtttcttcaggtacttttatagttttgggcctaaacttgaagtctttaatccatttggagttgatttatgtttatggtgagagatagggatctagtttcattcttctgcatgtggatattcagttttcccagcaccatttattgaagaagatgacctttccccggtgtatgttcttgactcctttgttgaaaatgagttggccataatacatggatttatttctggcatcttgattctattcaattgggttatgcgtgtgtttttataccaataccatgctgtttttgttactatagtcttgtaatatatttggaagtcaggtattgtgatgcccctagctttattctttttttctcaggattgctttggctattcaggcactttttggttccataaaaattttaggactgtttttctctttctgtgaagag

SEQ ID NO: 257756 - DNA, 583 bp, Homo sapiens
cactctgttgattttttcctttgctgtgcagaagtaagctttttagtttactatagttccatttgtctatttatgtttttgttgcctgtgtttttgcagtcttagccataaaatatttgcttaggccaatgacctggagtgtttctcctgtgtttcttcaggtacttttatagttttgggcctaaacttgaagtctttaatccatttggagttgatttatgtttatggtgagagatagggatctagtttcattcttctgcatgtggatattcagttttcccagcaccatttattgaagaagatgacctttccccggtgtatgttcytgactcctttgttgaaaatgagttggccataatacatggatttatttctggcatcttgattctattcaattgggttatgcgtgtgtttttataccaataccatgctgtttttgttactatagtcttgtaatatatttggaagtcaggtattgtgatgcccctagctttattctttttttctcaggattgctttggctattcaggcactttttggttccataaaaattttaggactgtttttctctttctgtgaagag

SEQ ID NO: 257757 - DNA, 583 bp, Homo sapiens
cactctgttgattttttcctttgctgtgcagaagtaagctttttagtttactatagttccatttgtctatttatgtttttgttgcctgtgtttttgcagtcttagccataaaatatttgcttaggccaatgacctggagtgtttctcctgtgtttcttcaggtacttttatagttttgggcctaaacttgaagtctttaatccatttggagttgatttatgtttatggtgagagatagggatctagtttcattcttctgcatgtggatattcagttttcccagcaccatttattgaagaagatgacctttccccggtgtatgttcttgactcctttgttgaaaatgagttggccataatacatggatttatttctggcatctygattctattcaattgggttatgcgtgtgtttttataccaataccatgctgtttttgttactatagtcttgtaatatatttggaagtcaggtattgtgatgcccctagctttattctttttttctcaggattgctttggctattcaggcactttttggttccataaaaattttaggactgtttttctctttctgtgaagag

SEQ ID NO: 257758 - DNA, 569 bp, Homo sapiens
atggtcttgatgctggtgagggcagggttgctctcagtggcaggcggctctcaggctctggggagtgcacacatttttttcttttgtcccagggggaagccttccaggtgtgttgactgcctattccctggactgtaggacattgtatgagctagaatgctgggcrtcctgcctaactgctggatccactggtgttgcaccactgcagccctctgggtggatgcaagaggatgtcagtagggctccagggatacggagatgcaggggctgtcaggatgcagtctggtgggatctgagctctcataatggtgctatgctgtacttgcttggatcttgggggatgtatgggacccagagtgagctccctctctggagtaatgccatcatttggactctgggctgttcactcttccagtctcagggattgcaagggtcgaggggctctcccatggttagatttcaggagccacagagagaatgtggactgctagggatctctcacttaagctttccccatattggaaagcctctcagaactcccagctaatcctgagctggctgccttgatt

SEQ ID NO: 257759 - DNA, 609 bp, Homo sapiens
tgttaaacattcaagactttttcatccactgattattctttgtccctttgttatgagagagttctttgaaaacaaagcaaagcaagtgcatgaaaggaatactgaggctattttctccaggtgacacacttatgacaaagctcattcttaggcagtctgtcttctatctctctataagaatatgtattactatttatttaaattgaaaatgacaatcatacaaagtatgtttgatatggtccattcttttgacaatgaggcagagtcagcactagggagaggtaaataaggtgcccagagcacagaatttaaggaaacatcaccctgaatgtgatgcctctttaaattttstaccctaaacacctcacttgtttaagcctagtccaaaatcagcctttgcaacaagatgacatggcaggaattttccatacattgaatgagctaaataagtatgtccatggtattgaagaaaatatatttaaaacaaatgataaaataaaagcattttatcagattcctgggcaagatggccaaataggaacagcttcattctgcagctcccagtgagaccaacacagaaggcaggtgatttctgcatttccaactgag

SEQ ID NO: 257760 - DNA, 609 bp, Homo sapiens
tgttaaacattcaagactttttcatccactgattattctttgtccctttgttatgagagagttctttgaaaacaaagcaaagcaagtgcatgaaaggaatactgaggctattttctccaggtgacacacttatgacaaagctcattcttaggcagtctgtcttctatctctctataagaatatgtattactatttatttaaattgaaaatgacaatcatacaaagtatgtttgatatggtccattcttttgacaatgaggcagagtcagcactagggagaggtaaataaggtgcccagagcacagaatttaaggaaacatcaccctgaatgtgatgcctctttaaattttgtaccctaaacacctcacttgtttaagcctagtccaaaatcagcctttgcaacaagatgacatrgcaggaattttccatacattgaatgagctaaataagtatgtccatggtattgaagaaaatatatttaaaacaaatgataaaataaaagcattttatcagattcctgggcaagatggccaaataggaacagcttcattctgcagctcccagtgagaccaacacagaaggcaggtgatttctgcatttccaactgag

SEQ ID NO: 257761 - DNA, 598 bp, Homo sapiens
ttcttgtctgtgttttgaccttgctttttaaatctgcagtcaattagaggaaaatgttcttaatttcttagtttctaccagttacctgcctctctcaaatgcatccccagaacctagaagtttattgtgcactgttctaatttgaaagctgttgtcatctagttttattttctaagactaamgtttagaatcctcttgattcaccccacaggttttcattcaatacacacattgactatcttccttatgttagtcactgtggtaggtgcttagaatacaaagttgtgtaagtcatggtccctgtcctcaaaagtacctcatcatccagtagggagacaggcataaaaacaggaaattacattacagaatgataagtgccattagaaaggagagcacaagggacagtgatccaaggaagagaattaattttgcctggagagtagggagagcttctgccttaaggaaggtcgtgcttgaattattccttgaatgatgagtggatttagtactctctgttcaagagtcccaattaacaggttgataccaaagaggccaggtcttcccttcaatggaggacattaaaatgattctcagttag

SEQ ID NO: 257762 - DNA, 510 bp, Homo sapiens
taatgtttattgatacattttaagttgttgtagcccatgtcacttttcttttgctgtatcttagagggaatctaaaatacagtcctcatcttcctgtccttatgttgcagtatgtggtttggtttctttatttcagtacttaatttgcctaaattttatctttttatttccagtttcagaaactatctaatgttctaaaaagtgattttaaatgtgggaacaacctggagtccttgattaaaatatcaatggatagtaccgatttttttttaagtatggtaagkgtggtttttaaaaagtcagctctatatttcaaaagcatgaataaaatattataaggggaaatgataatttcctggctgtggcaggagttgaaagccggtggctggggtaggttgggcacattgtaactgaaaaaagaagccaatgaaaaaagaactgaagcagagagggtgaactagaaataacacagtaggggatgaaggacaaagcatccgtagtcccagatcc

SEQ ID NO: 257763 - DNA, 510 bp, Homo sapiens
taatgtttattgatacattttaagttgttgtagcccatgtcacttttcttttgctgtatcttagagggaatctaaaatacagtcctcatcttcctgtccttatgttgcagtatgtggtttggtttctttatttcagtacttaatttgcctaaattttatctttttatttccagtttcagaaactatctaatgttctaaaaagtgattttaaatgtgggaacaacctggagtccttgattaaaatatcaatggatagtaccgatttttttttaagtatggtaagggtggtttttaaaaagtcagctctatatttcaaaagcatgaataaaatattrtaaggggaaatgataatttcctggctgtggcaggagttgaaagccggtggctggggtaggttgggcacattgtaactgaaaaaagaagccaatgaaaaaagaactgaagcagagagggtgaactagaaataacacagtaggggatgaaggacaaagcatccgtagtcccagatcc

SEQ ID NO: 257764 - DNA, 581 bp, Homo sapiens
gaactcactcactatacagtaccaatggggtatggtgctacctgttcatgagaactctgcccccatgatccagtcacctcccaccaggcccttcctccaacactgaagattacaatttgacatgagatttgtgtgaggacacagattcaaaccatatcaatcctcaaaacagccttatggggtagatagtgttactatcatctacatttttagctgggaatattgaagcatgactactggccaaaaatgccagtgcttatacgtagtggatatgagatttgaacccagaccatccaactccaaggttagcaactgtgccacactgccttgggragagcctttggacagtgaaattgtgggatgatggtttgttctaggaatggactgatacattaaagactgagctgtcctatgtcatgacagcaatgggatgagagttgaggagcaaaccttgtttcattgaagcaaggtaacaacaacataaaagaacaaagacagcccatcagtatttgcagtgtagaactccatcctaattttctgggcgttttaaccatttgcataatgcaaggttagtgagtaga

SEQ ID NO: 257765 - DNA, 566 bp, Homo sapiens
agattcaaaccatatcaatcctcaaaacagccttatggggtagatagtgttactatcatctacatttttagctgggaatattgaagcatgactactggccaaaaatgccagtgcttatacgtagtggatatgagatttgaacccagaccatccaactccaaggttagcaactgtgccacactgccttggggagagcctttggacagtgaaattgtgggatgatggtttgttctaggaatggactgatacattaaagactgagctgtcctatgtcatgacagcaatgggatgagagttgaggagcaaaccttgtttcattgaagcaaggtaacaacaacataaaagaacaaagacagcccatcagtatttgcagtgtagaactccatcctaattttctgggcgttttaaccatttgcataatgcaaggttagtgagtagaacttggggaggagaggagaggggagcttggagcaggatttcagaaccaaaggttctcaggaattggtgctatgatcagaatggagaggcagagtccaagacrtgttactgaaacagcaggggtttgg

SEQ ID NO: 257766 - DNA, 597 bp, Homo sapiens
cataaatcagccactcactgtgctcccaggaatctttgattctactctctagttcgtctccttgactgtgccctgaaacctggctcactctattaagtcatgctggatattgtggggtcattttcyacccctcatgcatgtccctgacccacttgttttctctgaaagtcgattttcattttctgtaactctatgtctttgctcttctccctctgccccatagctgtcaacccagctgcatgcagccaacccaaaccctttgtaatttttctcttcagtgattcacaatatatgtcctctctgacttgggagcaaattaatgttaaggattttgcacttaaaatttaatatagcatcattggctctgagtcgaggagtgggtattatgccaaaatacttattgtccccatgttgtgtctagcaagttgggaattctgatatatggctattttaaacaaaagtccaaatgaactttagaattggcttgagaaggaagagagaaagaattttaaattaaagcaaaagagtcttttgttttctaccccagttatactgagatgacatagtttggatgtttgtgccctccaaatctcatgt

SEQ ID NO: 257767 - DNA, 503 bp, Homo sapiens
aataatagtaatatccttattctgtcctttagagcaaccccacaggggtctggttctgtgggaagtggtcccaaaccagagttcttggttctaagatgagaggatgaggtggccttgttcaaggaggtgggttagtgtgggataggtgatggctccaagatgggcggtgaagggaggaagggctgggtgctggcagcaggcacagaagggagagcagagctctctggtcctgcaggctgtgtgctcaagaagcccrgcttccactgatcagagctccccgaggtgggcagggcagctgcagtttcttagactagcagagcaaaaggagaacagaggcccagagcatcaaatagagaaaaatggttttcttgtggagccaaggttttttgttttaagtaagcacaggggagtcctgatgtggatgggaatccttgaattattagaaggtgcttgggttggaaaattgggctaaggctggcctctgtggattccagggaaccctt

SEQ ID NO: 257768 - DNA, 571 bp, Homo sapiens
gttgtcttactcattgctgcacccccagaatgtaggttcccggtgtagagtctagggagctgaataagtgttggtgaacgaatgcatgaagacatgggccatcttccctgcctgctggttagtttcttctgacaagcccttggcccccgagagcttgcccaatggtgccacctccttgagctccattgtgcacaagttttcaaggcctatcaaggtgacaggccagaacaagtcagaaggcttttctctcttcccagttaacatctgtgcatttatcatgggccttctagacaaatttcccttcccacttttgctatacaatccccagtgatgactctggtgagtggctttggggtttgtttatttatttattttgagccagagtcttcctctgccacccaggctggagtgcagtggcacaatctcagcttgctgcaacctctgcctcctaggcacaagtgatcttcctgccttagcctcctgagtagctggaaatgcaggtatgtgccaccatgcctggctamtttttgtattttttgtagaaatggggcttcaccaaattgcccaggct

SEQ ID NO: 257769 - DNA, 613 bp, Homo sapiens
actttgttgccgtcattctgaattttttttttttttttttttttttyaaggagcaaatatatctccgttcagcttccggctgcagtggagatttctgccaagattttcagcacacagctgaaatatgttttgtattttatgagctttggctcatcgtggaattaaatagcactaattacatgaatatagaccagcaagggagacaactgttcacttcctgatttttcggggaattgagaaagaagagagggggtagagggacaaaaggggcctggagtgaggcactcccactagatgttggtgacaacagaagccctgccatttggctgagtgagccccaaatagcctgctcccccacagtgccaatgtttggtgggattatgggcttcctcgagtgaagactctgtggggccagaaggtgggtggctgagctgttggggcagctgtgacaggggctggtgggggtggtcaggcttttaggagtggaggggcggccggacagatgctgaggtccaaggatctgagtgtatggactctcggcttggtttttccaaaaccttgcatgtattatcatttctaggcccactgactgtttttacagttagaaaagtct

SEQ ID NO: 257770 - DNA, 515 bp, Homo sapiens
atggagtattttaagtatttataaaccctggtttagaacagggtacaaccagttttttaggttggtccctgtttgaattgactggctcaaagatttacttgaarcaccaagatttactttgtacttcagctgtacatgatacccactgccatctcatatactctgctatggagcattcattcattcattcattcacgtgtttccaaacatctattatacacctactgtgtttcaggctctgagcttggaactggagaaaagaggggcaatatataatccttgtcctcaaggagctcatatttttatgctaggagacagcatcaatggacaaatataacagagtttgtaaaatgtgagactctggtggcactggttcctgcactaatatatagtaggggcatcttagaccagtggcttgatcagagaaggtttcatttgaacaatgagtctaactcagggcccggaagcatgaattggtgaagacttcccaagagctctgctggtgcagctcctaa

SEQ ID NO: 257771 - DNA, 579 bp, Homo sapiens
acaaatgttatcttgaccaattaatttgctcaggatgatgtggagttaggaaggcctgaggccgtgttggctttgctatttctttatagatatggggacttggggkaatagtatgattgaatgggaggttagggagactacttcagaagtgtacatagttctttatatagtcaaacctctttttaaaaaaatgcaaagaggccaggcgcagtggctcatgcctgtaatctcagtactttgggaggccgaggagggtggatcacttgaggccagggatttcagaccagcctgggcaacatggcaaaaccctgtctctactaaaatataaaaataaacaaaattagctgggaatgatggtacatgcctgtagtcccagctactccagaggctgaggcaggagaatcgcttgaacccaggaggcagaggttgcagtgagccgagatcgtgccattgcaccccagcctgggcaacagagtgagaccctatcccaaaaaaatggttaataaaagaatgcaaagaatctacaaagagcaatcctcttccccccaaaaccactcctggacacccactgccgggcgg

SEQ ID NO: 257772 - DNA, 516 bp, Homo sapiens
aagcatttcttttacctataattaaataaagtttccaaattaattttccctaagtaatttaagctccagagattcccccacttcccctctgaacccmccttgccaaccatgggttccaaaaattcactctggacacaggcaggatattgcccattaaattccatttctcaggacaaggaacccaaagctgtctactgacttaaaacaagctcacatgcctccgtatcagggttccctgccaacctgctcctctctggaaaaggcaagagacttgcagagtcagaatcctgagtggaggaagctatcctgcagattgcattgaaaaacattgatttttatctctcaaagtcattttgtagactgccaagtttttggccaacatgtcttaaactcgcatcatattgatgatgcctggggaagcatcagtcatccataactgggtaccataatatgtattttcatggctgagctggtgacagcaattgcaggggccttaacaatctcagaaagctctta

SEQ ID NO: 257773 - DNA, 608 bp, Homo sapiens
tctcactgggctaatccaggcactggcaggtcttcatgcctttccaggagctcatccctttttggaggttctaggagataatctatttcctgtctttttcagcttctaaaggccacccacattcctcagctacagttctcttcctccgtcttcaaagccagcagtgatacatgtttttggcctttctttcatagtcaagtctccctccctctgaccaaggctgggaaaagttctctgcttttaaggactcatgtgatatgagtgtgcctacctggatagtccaggctcatctctctttttcaaggttcttaacttcatgatatcttccaagtcccttttgccatgttaggtaacctattcgcaagttctgaggattaggatgtggacatctttggggaggggrcatgattctacctatacaagtggagattcctctaaaacatctgcaaaactgattggggataggtgtgaagtttgggggatggcattttgggaccagataggtctactgagaggcccacatccaaagagaaggtgagaaagtttttacaaagactgacaatcccaccaaactttgccatcattcccaactagagcacttcaggtcc

SEQ ID NO: 257774 - DNA, 550 bp, Homo sapiens
actctcagtccccatcccaccagtgacttctcagtccctctgaggcttttccatgtgtggagcaagtagtgtgcagtttacctgaccgggctgcttagggagtcgctaatgatcatggagggcagctaaggcatagcagccatgggagcttctctaagaggttagaaaacattctagtcaggcagcttcccccagcaggagtctcctctaatcacccagaaagcccaagagcctgtgaacaggcaattgcaactatggtccttcattatttaagcttcttgatagatggctctgcaaatctgctaaaagaacacagggggagaacttagaaagtgattaaaaagttaaaaaasgaggaaaatggagagagaagagaaaaagaaaagatggaagtggagagactgcccccgagggagggggttacacataaagagaattgctgtgggggtgctgttcacatcccactgccaccaggggaacttcatccacccacctccatccttgcatcttgggagggctggacccaatggggctcagcgtgaagggggtt

SEQ ID NO: 257775 - DNA, 658 bp, Homo sapiens
agagactgcccccgagggagggggttacacataaagagaattgctgtgggggtgctgttcacatcccactgccaccaggggaacttcatccacccacctccatccttgcatcttgggagggctggacccaatggggctcagcgtgaagggggtttccccacagcagctccagccaacactgactgcaggcttaccaagtgtggatgctgctctgcgtgatttacatctgctaactctttcaaccctcagaacagccctacaaagtagatatgcttatcgttgctaaggacgctcaaggaaactgaggtccggacaggataaagagctaacccaaggccacatgtctcaggctctggaggcaggatttgaatgcagggcctgactcctggctccagagcccatacgggtcctcatcatgccctgttgggctcaggctgagctgagtgtggtcagccacaactcctgcccgagacctacagcctccaaaaaatgtcagacattgtccctcctgcatatttccccctttcacmctggccctctctcttggatccttcttgctctaagatctttcagagccaagcaatgatagatgacccctttctgcctagctggctgatggcttccagcttcttcgtctctgaggggagaagctgagctg

SEQ ID NO: 257776 - DNA, 401 bp, Homo sapiens
ttatttggatgggtccttaggtgacttcactccaatccaaggaccaaggtaaggtcccctttccctggattcttataagccccaggaacaaagattgtaaaactttttagagtttagagacagaaccttttcttygtataaaatcttatgtggaagccaaacattaaactggtaaaaatcatttcaggttgagggtgtatgttggtgggtacgaagtggtttcagagcttccctctcagttttcccagtgttccccaaagactcctaggacacctcgggggagctcaggggacccaatgcagcacaactagaggccccagcctccacactgcctggtgggggggtctagactgaatcgtgaaatcaccctatctatgggctgtgtgtccagttgttggggt

SEQ ID NO: 257777 - DNA, 720 bp, Homo sapiens
aacgggctggtttctaaccctggcagcttgccttcccatctatgtaaccttaagcaagtctcttatcctctctggcatcaatttcctcatctgtcaaatgggctaaaaatacttacatctctgggttgttgtgagaataaagtacattgcacaaagcacacagtaagggctctggaaattaaagcttaatagtgattttttttcctcatgtgctctaagaatactgagggctgagtgtgcactggtagatggaaaatccagtttccaacccagcagcatccactgactgatcaaacctaacctgtgctggataataccttccaaatcctctctggcccttcctcctcccctgggaagaacaatcagcttggtttcatggtaccctacaatttttattttttataatgttgattgtttttaagaattattacaggctgggcgcgatggctcacgcctgtaatcctagcactttgagaggctgaaggggggtggatcacttgaggtcagaagttagagaccaacctggccaacatggtgaaaccccgtttctactaaaaatatagaagttagctgggcacggtgttgtgtgcctgtaatctcagctactcgggaggctgaggcaggagaatcacttgaacctgacaggcrgaggttgcagtgagccaagattgcaccattgtactccagcctgggtggaaagagcaaaactcggtccccctc

SEQ ID NO: 257778 - DNA, 470 bp, Homo sapiens
agattcagtcccactccctcatttacatattgtttctayttagggaagccttgttgtacagagaccatgtggcctcaaagccaagcatatttcttccctagccttttaatggaaaagtttgctgacccctgcttttgagatgctgtttactttgatttttttcagaaaaaagtcctcttgaatcttactgaaaaacgacatttcccagacattttctttcttttttccttttggtaaatctatctcataggaaaatatttcttgtgattatcctcatcttttttattttttactttttggggctgcaatatctttctgcttgcttggttgcttgcttctgtttgttcagccttacaaagagaggctgtgtgcagaggtaccatgagtctaagagagaatagtgtgaacaccattctgaaacgtttaggatctgctcccatcccccctctgcttttgttttactgaaaaac

SEQ ID NO: 257779 - DNA, 570 bp, Homo sapiens
ggcatgccacaggctccctgggtctgaagtgacttggcatgcttcctgatgggtgggacgctaatgtgggaggcagaagcctggccttttattsctgtctcttccatctctccatgctggaacgatttctctttctattaaatgcatggtgctgggatgccttgctgggggagatgatgacagataaaggtttttgatttcctttggaattatcctcctggccaaagcaggggaggaaaacatcttctttctctactctgactcccatggctaagccagacttgagacaaaaataaaaccaaaagaaaagggcaagaaactcttgtgtgtccttccagcatccctttttggaataagagaggactcttggggaaggaagtgggcagggagtgtgatgtaatattttggtgtctgatactttgagcctccttttgggaagagcttccagacagactgaagggagcagaagttttattgattgaagaaagatgggaatcgttggctgtcagggccaggagggccctgcctaccaatgaacttgcccttcccacacagccccatcccatccct

SEQ ID NO: 257780 - DNA, 570 bp, Homo sapiens
ggcatgccacaggctccctgggtctgaagtgacttggcatgcttcctgatgggtgggacgctaatgtgggaggcagaagcctggccttttattgctgtctcttccatctctccatgctggaacgatttctctttctattaaatgcatggtgctgggatgccttgctgggggagatgatgacagataaaggtttttgatttcctttggaattatcctcctggccaaagcaggggaggaaaacatcttctttctctactctgactcccatggctaagccagacttgagacaaaaataaaaccaaaagaaaagggcaagaaactcttgtgtgtccttccagcatccctttttggaataagagaggactcttggggaaggaagtgggcagggagtgtgatgtaatattttggtgtctgatactttgagcctccttttgggaagarcttccagacagactgaagggagcagaagttttattgattgaagaaagatgggaatcgttggctgtcagggccaggagggccctgcctaccaatgaacttgcccttcccacacagccccatcccatccct

SEQ ID NO: 257781 - DNA, 571 bp, Homo sapiens
gaaggaaggaaaggtgattgtttagagtttgcttttccgaggatactaaagaatgtggtttccctgacttgcctccacctcgtcctcctcaccccaccctttctatgcctctccctctttctatgttgaccacatgactgggcaccctcttcatgaaactcttggctctgcagaaaaaagaagccctaatttatagcagatgccaatttctatggtgtaaatacttctaccctggtgttygcaaactaccaatagtttaacaactggatcacaaacttcctaaaaatgtaacaaccagctattgtgagctggcaatggccactctagtgtacctctgtgagttgtcttctccttgtggagctggtcaccactgaccacttcacaggacactgggcctattccttattgacaaaatggaagcttccataaaaaaccaacttggatacccactggtcagtacccactgggaatgggaagtcctgggaggaaaacgtagctctgtttggaacctagtagtccaatgtacttatcagagacagaagctagaaggtgtgagagatgctatacgttt

SEQ ID NO: 257782 - DNA, 669 bp, Homo sapiens
tccaagtttgtagatgtaatgagatgatttatcatgggaaattattgcatgatcatcaaaaagtaatgaaagttgtcacagccttccttcttaatggtatttctccctgacctccttcttcctacccctaaaatgagctctaggactctagcatggagccaacctaggggtctgatgctatttaattcatgcaagcagtcaaccataaatgcatttttcagaagtaaagacaacttccgtaactttttaattaaagcataaaagccattaattaaaaagacataaatcactgagaaacctttaaatcttcataatcttttgtggcattgtatgtgtgtttccagctgtgctcactatagtttcaaaggcagcagagtccagaaaggrccagcactgttctccagcgtcctggggctgtggcttggcaggaccaggcattcagtggctctgtcatagtggaggtgctggtgtggacctcactcaatggagagagaggcctggaagatcttggaacaggaacatccagccctgcttctctcttaatctcagcccacactcagagtgtttagtaggtcaagatggcagccatttctaggggatagagggacaagtcagtcaacaccagaaacaagcaatcatacaaatcaagaatatacaacacttacaaaa

SEQ ID NO: 257783 - DNA, 669 bp, Homo sapiens
tccaagtttgtagatgtaatgagatgatttatcatgggaaattattgcatgatcatcaaaaagtaatgaaagttgtcacagccttccttcttaatggtatttctccctgacctccttcttcctacccctaaaatgagctctaggactctagcatggagccaacctaggggtctgatgctatttaattcatgcaagcagtcaaccataaatgcatttttcagaagtaaagacaacttccgtaactttttaattaaagcataaaagccattaattaaaaagacataaatcactgagaaacctttaaatcttcataatcttttgtggcattgtatgtgtgtttccagctgtgctcactatagtttcaaaggcagcagagtccagaaagggccagcactgttctccagcgtcctggggctgtggcttggcaggaccaggcattcagtggctctgtcatagtggaggtgctggtgtggacctcactcaatggagagagaggcctggaagatcttggaacaggaayatccagccctgcttctctcttaatctcagcccacactcagagtgtttagtaggtcaagatggcagccatttctaggggatagagggacaagtcagtcaacaccagaaacaagcaatcatacaaatcaagaatatacaacacttacaaaa

SEQ ID NO: 257784 - DNA, 521 bp, Homo sapiens
tgttggggaattgtcaggaggctgctgctgtggtccaagggagaaatgatgaggactgggcctgaggtactaagtggaagggaaggcagaggcccagaagtgggtcttggtgagaattagatgaggcagctgaggggcacggaggaccgagtgggtgcttgtgctctagcaaagggagagaatgcaggagaaggaagaggtggggcttgtttttgaggagctgggtttgaartgtctatgggacagcatggagatatactgggtgtgtgagtggccaggaggtcagggagagaccaggattaaggtctgcactgcaataagtcccaaattggatgagggactataggtgcagatgtggtcattgcagcccagtggggtaggaggactattagggtcatcagcagcagaggagctggactcttcctttcctcctcccgctgagtctgtcagacagaagccttgagggaggggaggacaggggaggttaattgtgtatagcagaccttggtgccttgcaaata

SEQ ID NO: 257785 - DNA, 521 bp, Homo sapiens
tgttggggaattgtcaggaggctgctgctgtggtccaagggagaaatgatgaggactgggcctgaggtactaagtggaagggaaggcagaggcccagaagtgggtcttggtgagaattagatgaggcagctgaggggcacggaggaccgagtgggtgcttgtgctctagcaaagggagagaatgcaggagaaggaagaggtggggcttgtttttgaggagctgggtttgaagtgtctatgggacagcatggagatatactgggtgtgtgagtggccaggaggtcagggagagaccaggattaaggtctgcactgcaataagtcccaaattggatgagggactrtaggtgcagatgtggtcattgcagcccagtggggtaggaggactattagggtcatcagcagcagaggagctggactcttcctttcctcctcccgctgagtctgtcagacagaagccttgagggaggggaggacaggggaggttaattgtgtatagcagaccttggtgccttgcaaata

SEQ ID NO: 257786 - DNA, 521 bp, Homo sapiens
tgttggggaattgtcaggaggctgctgctgtggtccaagggagaaatgatgaggactgggcctgaggtactaagtggaagggaaggcagaggcccagaagtgggtcttggtgagaattagatgaggcagctgaggggcacggaggaccgagtgggtgcttgtgctctagcaaagggagagaatgcaggagaaggaagaggtggggcttgtttttgaggagctgggtttgaagtgtctatgggacagcatggagatatactgggtgtgtgagtggccaggaggtcagggagagaccaggattaaggtctgcactgcaataagtcccaaattggatgagggactataggtgcagatgtggtcattgcagcccagtggggtaggaggactattagrgtcatcagcagcagaggagctggactcttcctttcctcctcccgctgagtctgtcagacagaagccttgagggaggggaggacaggggaggttaattgtgtatagcagaccttggtgccttgcaaata

SEQ ID NO: 257787 - DNA, 641 bp, Homo sapiens
gtctactaattgcctcctgcagctgaagaaatgctgacccctccctctcattgctattctccctgttaatcctagcctggaagaggtccttccccagattccttccagcacaaagagatcaggctgtatgtctgaatacaactttttttgatggatcaagggtaataaaggaaacacagagagtaacttaacacttcttcaaaaggtagccactgtaggcatctccaggcttagacctgtcctcacttgtgggtgcctcatgccccactcctgggcatcctgctccctagaggaagggcaggctcaccaccatgctgtgggggtcaggggtactctgagttgcaatgaagacccacattccagccttcattgtcttcctagggaacgttcacttccttcagggtaaaccttacccttgggcagcaggtggggtatagccctagccttatagaacccacagaacagccacagcagaacaaggttccaaccccaaagtctrggttggtgctccaaactgcaactggatcctgggctcagcctccaccttcttgtaaagtgaggatctcacccacctgtgctgtcttcttctgcctaattttcaaactataactctacctctctctacctaatgttcaaactgt

SEQ ID NO: 257788 - DNA, 579 bp, Homo sapiens
tatagaacccacagaacagccacagcagaacaaggttccaaccccaaagtctgggttggtgctccaaactgcaactggatcctgggctcagcctccaccttcttgtaaagtgaggatctcacccacctgtgctgtcttcttctgcctaattttcaaactataactctacctctctctacctaatgttcaaactgtggtttgaattataacttgtctgcccrtccacaaaaataagctgagcattctaaagtcattttaagaaaaaaatcctagcccccatgctgctccccaaacaaacaaacaaacaaacaactcaccccaagggaatattaaagatgtagcagtaacttaacccaaatagcaattgtcatgactgctgaggaatcctccctgcatttgatgtactttgccattttccagaacactaaggagggtaatgactcagggaaatgaccctcccagaagcacggaaatctgcccccaggaagattttagggtccactcacttttaaggtttttcctgcattgatggttccagctttcaaaaatcttgggagggcccaaatgtgtcagcatcac

SEQ ID NO: 257789 - DNA, 516 bp, Homo sapiens
ttttattattgtatattttgtatttatgtataaaattatatatattttttgatccaaggccctacgtattttaaatgtaaagtcttatggttctaaaactgtatttaaataaaaaatacagaagtcagaatatttcaaataaaacatgcaactttacaccctctgattttctttttctttctttctttctttttttttttttgagagggagtctcgctctgttgcccaggctggagtgcagtggtgcgatcttggctcactgcaatctcctcctccagattcaagtgattctcctgcctcagcatcccgagtagctgggattacaggcacccaccaccatgcgtggytaattttttgtattttttttaatagagatggggtttcaccatgttggccaggttggtctcaaactcctgacctcaggatctgcctgccttggcctcccaaaatgctaggattacaggcatgagccaccacacccagcctttcctcttgattttcaataaatgggaggta

SEQ ID NO: 257790 - DNA, 516 bp, Homo sapiens
tacagagttatctttgtttatatatactaatggtagccaaataatacttgatagttaaatgaagctagtgtttagtgtaataggtttccactgagcctgagctatttgtcttattcagttgttttctttagtgctcctatagaagtcttcctctacaattgatacttacttactaatgtgcacactgatacttaaggtctgtttaaccttctttaggtgtcacgttaaatttagtgaagtcgcctttagttcttgactgaaggctagaaataagaccagatctgtcaacttttctgttactcaagacctctggatagatttatagaggaaatataaggacacaagcatcttttaaagttgaagctctgttcatccctcaaggtaataaaataggtagaatttactataattacattcctttctaaattgtaatatatatatttatatatatatatatwtttttttccccagcccaataattgttaatacatttgaaaagtaagggtttttttttgg

SEQ ID NO: 257791 - DNA, 526 bp, Homo sapiens
taaatattaatattttacatctggccaggcacagtggtgcgtgcttgtagtttctgctactcaagaggctgaggtggaagagtcacttgagcccaggagtttgagtcagcctgggcaacatagwgagaccctgtctctaaaaacaataaatatttttagcctctaagccctttgaactaagttaagatgaaaataaaatttgtcaaaacttacagaatccctttttttcccctaagatggtgggttagagggattattagcatgcctctaccacttggaaagacaaaatagtgtgtagagattcacactgtaaactttttttttttacgaagaagcaacacaagaacttaacagaaaagcttaaagaaaccacagactctgaaaaaagcagtgggaaactgtctataccaggaaccaggaagaaaactgtgagtttccagagcatgagagaaagaaagactgcttctgtgacataaactcccactggggagccaggcaatctaggccatgggggaatgcctaaccc

SEQ ID NO: 257792 - DNA, 397 bp, Homo sapiens
ctgagtaaaaaagaccgactctcagcaatgtaggaaggcatcatcaaaactgttgagggcattaatagaataaaaatggtggaggaagcataaattctttcttccttcttgagctgtgacatctatcttctcctgccatttgccatggaagctcctgattcttgggcctttggactctgagatttacaccagtaatcctggygtccctcccttcctactccatctgaattacaccactggctttcctggttctctcacttgaagagggcatattgtgggatttcttggccttcaaaatcatgtaagtcaatttccataataaatttcccatagtctctctctctctcaatgtgtgtgtgtgtgtgtgtgtgtgtgtgtgtgtgtgtgtgtgtgtatt

SEQ ID NO: 257793 - DNA, 542 bp, Homo sapiens
tagtgtgcataagaagtggagtcaaatgacgttcttcctcaattcaaaagcagagtttttaattgtggactgaaaacgttgaaaatcatatttaaaaaattttctgtttttgtttttgcttatttgcttttacttgcttatactttttaactgatggcaaaggagagtctttaaatggtttttagggagggtttgagatgatacaagtaaattttatatatttggatttttaaatattctggctataaaacatacttagaaaaaaagtgtatatatatgggagaaggcmatattagaagcagagacacacattttaaggcccttttagaaggctctaaagataatgagtgtctaagttaaagtaatataacaaggtatgaacagaattagatacattcaagaaatgctaaaaatgctgaattaacagtactttgcaattgggtgtggagagtgatagactaggataggtgtaccagcatgaacattgggaatacaacattgcaagtgtgttgagctgacttgtgtgcccccaaaagatatgt

SEQ ID NO: 257794 - DNA, 542 bp, Homo sapiens
tagtgtgcataagaagtggagtcaaatgacgttcttcctcaattcaaaagcagagtttttaattgtggactgaaaacgttgaaaatcatatttaaaaaattttctgtttttgtttttgcttatttgcttttacttgcttatactttttaactgatggcaaaggagagtctttaaatggtttttagggagggtttgagatgatacaagtaaattttatatatttggatttttaaatattctggctataaaacatacttagaaaaaaagtgtatatatatgggagaaggcawtattagaagcagagacacacattttaaggcccttttagaaggctctaaagataatgagtgtctaagttaaagtaatataacaaggtatgaacagaattagatacattcaagaaatgctaaaaatgctgaattaacagtactttgcaattgggtgtggagagtgatagactaggataggtgtaccagcatgaacattgggaatacaacattgcaagtgtgttgagctgacttgtgtgcccccaaaagatatgt

SEQ ID NO: 257795 - DNA, 633 bp, Homo sapiens
ttaaaatcatccatgtagttttgttatcagaatttagtgaaataaggcatataaaatgatagagtgtctgggactatagtaggtgctcaataaattaggttattagcttcagcttttaaagagtaggcctatgagcaggggcagtgaaagggagagagaaggtgcctgagcgagttaatagtcatgttatttactgaacctaagagcagaatgattctgtggactcttaatggagaatattccacaaactttctttgctttatcccattgatcctttttaattcagcgtatttcctatttttttttgaagaaattgatttgttaaagaaactgagtcaagtagygggacatatcacactttcctcgggtgcacatcagttcaggtttttaaaatcaatgataaacagagtcctttattatattataaatcaaagaacaacccagcttttctgaatctgacagtgacaaattagacatatactttactgccaaagctaaatcagtcatttctcagataatgctaaaaagtaaacttagtcagatccaatggcttttactgtagttttaggctgttgcactagttaactaacatgtattcaatagcagtagcaaaacaaataatttaatacatca

SEQ ID NO: 257796 - DNA, 568 bp, Homo sapiens
aatatccatgccggccttcagggggacatgcatggggagcttgccgtcttacatggctcttctcttatctgagtcattttcagtgctaatatatctactttacgagagagaagcattgggcctctctgttagacaggcccccaagtggccaagggcttttgctgttatgcgttcttatgacacatgtcaatgattctccaagtatggtccccagaccagcgacatccatgtcacctggagctagttagaaaagcaatcacttgggccctcctcaggccttctgagtcagaacctctgcaggtgggcctcagcaagtatgttttcacaaagcttccagatcacrctgccacacaatgaggtatgagaaccactgaaccactcaatgcccacacaccttccatctatcactttgtacctgaagaactggagtcatgtgtcagctctgcagctgtcaaaacaatttcccatgatgtcagccccctggcttcctctgacctttccccagatgaagtcagggctgatgggatcagctctcctcaagatcccagttcatctgaggccaagcccc

SEQ ID NO: 257797 - DNA, 536 bp, Homo sapiens
ctagcaaactgtacacattaaataaataatggttgtcttctctgctgctggtttgctgtttttgttgttaygtaatcctttcagaaagccatcctctttgacaactttcacattgactggactcattcatgagtttgttcacataaaattattccctaacactagtcataacaatgacaaagaatccatcaatgcagaattattttaatcatcagaaaacagtggaaactctccttgttcttaattttatctttgaatcacagctgttactaataactcatacttgttacaatcatgtgtttttatcatcaacctcattgtatgacagaagaatcatagctatcaagaaaatcattaaagcaggagagaacagtcttgatggagccacatggcaaacagtgacatagtgcccagaggaccagaggtagtagtacacggagcaccgcagggtagacttgggcaagggggccggcaccaagcagcttgctggctgcatttgctcctcctcctggcttcaacacgagtggaaggaggcc

SEQ ID NO: 257798 - DNA, 549 bp, Homo sapiens
agaagacaagggcagagcacttgaagcctattttggtccccaaaggagatctgtgaccaataaggacacactcctcccccagtatgcagttttgggctcatcttgagttccaacaactggacttcttcccagcccacacctgctgagtatattcagcaactaatcctcccagggcctgtgcctagtccctccccaaggcccaccccatcacccttccccaagcagtgtgattaccttgccctgattgacaatgtgcagttacactttaatgtggcgtttgcttaaattttatgcacatttagtttaaatgtgagcagcttcagcaataatttgaaagaattgtgttccactaaaatggagagcctgctggggtttcttgcaaaaatttgcattaaataatcaaaagtactttagagctctgccagctgcttcaatattaaaagttcagaggaataatggtaggtttaaagacraaaacacctagtttatatgagatggaacttttcttacaaaaattacaagagtagattttgaaaggaagtgagggac

SEQ ID NO: 257799 - DNA, 514 bp, Homo sapiens
taaatgactggcaatgttgattacagcaaagaaagaataaataaatacttcagggtgaaagagggaacaaagctacaaatacagacagaaatgataatcagagatccttataaaactttcatggcaataattttagacaaatttctagaaaaacacaactaacccaaacataagtgacaataagtcaaaagtgctagtagtcctgtaactattaaagaaacccattattaaaattctttccacagagaaaacttccacaccagatggcttcagcagataattattttgagaccctgccttgaggaaaaaaaaaaacacttaatgaaraaataacataaaccttacacatatactttcagagtatagcaaaagggggttctccactaaataataagaacaatataatctgatgatcaaaatatgtatgtatcattaaaaggaaggaaaatgtagaccaatcattctcgtgaacatagatacaaatattccaagtaaaatggtagcaaacaaaata

SEQ ID NO: 257800 - DNA, 418 bp, Homo sapiens
aagaaccaaatctttctctaacaggaagattaatactgtaacataatgtagctaacttattgcaattcaagactgrcaaaacaaaaattgctaatcatggaacaaatcatctaaagagaaaaaaaatcaggctgctctcacaactcattatattaatatttacttaatgctagatgacaatggagagatatctacagtgttctgaggaaagggctatgtgaccacagtaacatgaccccactagtcatctgcaactggtgatgccaaaaagaaaagaaacaaccaatacatctttgaaaaacaaaacaaagcttagaaaaatcacaagcaaaagaagaaataattataaaagcctacgcattacaagtagctaacatttgcccaaggcttcttatatgacaggtcctgattttattat

SEQ ID NO: 257801 - DNA, 601 bp, Homo sapiens
tattttggatggcttccacaccttgggattttgctttcccatggtagggcaggtgtcatttagagagatatcagtggttattgtgactgtggcatcctgaaggaattgctcttagatggcacctcaacctctctgccctcaggataaggttggaaagagccctttagaagtctctcagtccactccctcccccattttacaaataaggacattgaagcccttgaatgagggtttaaagctagaaggatgtgctgtcccgttagtwattctctgcagcagattgctcaaggacactccatttctaattgcaatagaagaaatgtcaaagcagccaggcatggtggctcacacctgtaatcccagcactttgggaggcctaggtgggtggatcacctgaagtcaggagtttgagaccagcctggccaacatggtgaaactctgtctctattaaaaacacaaaaatcagccaggtatcatggtgcatgtctgtaatcccaactactggggaggctgaggcagaagaattgcttaaacctaggaggcagcagttgcagtgagccaagatcacgccattgcactccagcctgtacgacagagtgag

SEQ ID NO: 257802 - DNA, 538 bp, Homo sapiens
aatctgcttatcttggaggcagacaggaaaaagcaagctaggaaagattacattctataccacagccaagcttgggggccagaaagaaatttcctaagcaaagtagagaaaatgctaagaggtaagtaagctacactggcacattgagtacatttgcgggggaaggggagtaaagaaggaaaaaactaggagttctacttctggcattacagcatgaggagccccacagttctggctgctcaaccttgtgagtatactaaaacccagtgaattatacactttaaatgggtgaattatgtggtatatgaatgatatctcaataaagctgttcaaaacagaaagagtragtataaagagtggatctgctgaatgttaaagggtccacatggaaagcctcaacagagaatgactgcctttactcaacactcaacttctgtaacctctaggcccgtgtggaagacttttatgactttcttgaattttagatagggtagtttctacctgcactcttagatgtcaggctgaaattaaccttaac

SEQ ID NO: 257803 - DNA, 543 bp, Homo sapiens
tgtcaaggcaaacactcttcttcattaaaattttccgagtggtttgcatatcaacttttctactatgatctaaagcagtatttggtggtctaacattgcaggtctttaccactgtgttactgacagaataagggacagaagtattgactttatagtcttcttgaagcagctggtctccttttagaattttagagtctctggattcattttgcaagggaattcctggaagatcctttgaaagatgtgatgtacaatcagaaccactgttagcaatacaagattcttttacactaagtatggacaaagttttcaggttgacatctggttgtagattatcctgaggatatgataattttataaatattcgttcctttaaaggcaaatcctgaagacataaatcagtaatgccagaaagtagatgctcytcaggactaatcccatcagaatcctcatccaacactttctttatgtttgcagtgtacctttctgattcacaggacagttgttctgggatattttcaaagccatcagggatggctgata

SEQ ID NO: 257804 - DNA, 540 bp, Homo sapiens
ggcgcctgttggggattatccaggtctttcactcatttatgcattcagcaatcagcaaggattcctgaggaatactgtcaattaatcactcaagtttcaccctcagaaacataacgttctggcatcagagggacagaaagattgttgacrtgcctggtcaggaaggtgaattcggtcgagcaggattgtgctggggagctgctacagtctgaatgtcggtgtctccccaaagttcatagttgaaatcctaaccctcaaggtgatgggatttggaggtaggggctttgggaggcgatccagtcacgagtgttgagtcctcatgaatgggattagtgccttgacaaaagaggctccagaaagctttctcgccccttcctccatgtgaggacgcggtaagaagacactgaaccaagaagcaggttctcaccagacaccaaatctcccagcgcattgatcttggacttttagctttgagaactatgagaaataaatttttgttgtttgtaaaccacccagtttatgggattttgttacagcagc

SEQ ID NO: 257805 - DNA, 540 bp, Homo sapiens
ggcgcctgttggggattatccaggtctttcactcatttatgcattcagcaatcagcaaggattcctgaggaatactgtcaattaatcactcaagtttcaccctcagaaacataacgttctggcatcagagggacagaaagattgttgacgtgcctggtcaggaaggtgaattcggtcgagcaggattgtgctggggagctgctacagtctgaatgtyggtgtctccccaaagttcatagttgaaatcctaaccctcaaggtgatgggatttggaggtaggggctttgggaggcgatccagtcacgagtgttgagtcctcatgaatgggattagtgccttgacaaaagaggctccagaaagctttctcgccccttcctccatgtgaggacgcggtaagaagacactgaaccaagaagcaggttctcaccagacaccaaatctcccagcgcattgatcttggacttttagctttgagaactatgagaaataaatttttgttgtttgtaaaccacccagtttatgggattttgttacagcagc

SEQ ID NO: 257806 - DNA, 540 bp, Homo sapiens
ggcgcctgttggggattatccaggtctttcactcatttatgcattcagcaatcagcaaggattcctgaggaatactgtcaattaatcactcaagtttcaccctcagaaacataacgttctggcatcagagggacagaaagattgttgacgtgcctggtcaggaaggtgaattcggtcgagcaggattgtgctggggagctgctacagtctgaatgtcggtgtctccccaaagttcatagttgaaatcctaaccctcaaggtgatgggatttggaggtaggggctttgggaggcgatccagtcacgagtgtkgagtcctcatgaatgggattagtgccttgacaaaagaggctccagaaagctttctcgccccttcctccatgtgaggacgcggtaagaagacactgaaccaagaagcaggttctcaccagacaccaaatctcccagcgcattgatcttggacttttagctttgagaactatgagaaataaatttttgttgtttgtaaaccacccagtttatgggattttgttacagcagc

SEQ ID NO: 257807 - DNA, 540 bp, Homo sapiens
ggcgcctgttggggattatccaggtctttcactcatttatgcattcagcaatcagcaaggattcctgaggaatactgtcaattaatcactcaagtttcaccctcagaaacataacgttctggcatcagagggacagaaagattgttgacgtgcctggtcaggaaggtgaattcggtcgagcaggattgtgctggggagctgctacagtctgaatgtcggtgtctccccaaagttcatagttgaaatcctaaccctcaaggtgatgggatttggaggtaggggctttgggaggcgatccagtcacgagtgttgagtcctcatgaatgggattagtgccttgacaaaagaggctccagaaagctttctcgccccttcctccatgtgaggacgcggtaagaagacactgaaccaagaagcaggttctcaccagacaccaaatctcccagcgcattgatcttggacttttagcyttgagaactatgagaaataaatttttgttgtttgtaaaccacccagtttatgggattttgttacagcagc

SEQ ID NO: 257808 - DNA, 494 bp, Homo sapiens
ctggggggaaactgaagctggagtctgggcttctcaagtgtgggttctgcccctgaagctgttttctcacaatggaggctccaggtacttcctaagcccccatctgctgcaggagatacctgaagaaactgtggacagttcaaaggttggattatttaagaaatcttggctgggcatggtggttcacacctgtaatcccagcacttttgggaggctgaggtgggcggatcacttgagatcaggagttcgagaccagcctggccaacatgrtgaaaccccatctctactaaaaatacaaaaaagttagcctggcatggtggcacatgcctgtaaccccagctactcgggaggctgaggctggagaatttcttggacccaggaggtggaggtttcagtgagccgagatcatgcctccacactccagcctcggcaacgaagccagactctgtgtcaaaaaaaagataccttgtatcagttctgacacttgcattact

SEQ ID NO: 257809 - DNA, 560 bp, Homo sapiens
  misc_feature (1)...(560): n = A,T,C or G
atggaaatagtatgaataatactaactggaagcaacaaaccatcccttctgcctgtctattcattttagtgtcttctaaaccatagtgttactgtgaaagttttgaagaggtatacagttatagaaattttattttctacatcatcaaacaatcattyttaaaaatgtgagtggacatagttttaaagttattaattgctaactatcttataaaaaaaagatcaggttgggcacggtggcgcacgcctgtaatcccagcactttgggaggccaaggtgggtagaacgtgaggtcaggagttcaagaccagcctggccaagatggtgaaaccccatctctaataaaaatacaaaaaatggaccaggcatggtggcaggcccctgtagtcccagctactcaggaggctgaggcagagaattgcttgaacctgggatgcagaagttgcagtgagccgagaccatgccactgcactccagcctgggcaacagagcgagactccatctcaattttnaaaaaaaaaaaaaaaaaaaaaaaaaaaggatcaattctgccaagttttg

SEQ ID NO: 257810 - DNA, 503 bp, Homo sapiens
tgagcaacttttcatgtatcatttttggtcattcttttatcttctttcataaaatagcctttcaaataatttgcctatttttattgggttgtcttcttatatatatccttcaaaaatgaaatatttacatattcctcacttgttttatgtgatttcctgtgtgtttgatgaccatccactctgtctctatctgacatattttttaaagtccggctcataggtctccttctcactggaggcttttccctacctccccagtgactactttctctgggccctcacaacgtctggtktccacattcctctgtagtggtccttaccagattgcatcataattcagggttacatcctgaaccctgatagaatagagcctctatccttccctagattgtgagctccttgacagcacaagaggattaattttctcctttgaatcttcccagggcttactacaatatccagcatatttaagtactcaggcttacctgagtacttggatgatt

SEQ ID NO: 257811 - DNA, 570 bp, Homo sapiens
aaaaaagaaaaaaaacttgtattatattaaaatacacaaaggatttggggttgtttgttacaggggttatcctatcccagtttattcaaacatttagcccaagcaaggcacggtggctcacacctgtaatcctggcactttgggaggccaaggcaggtggatcatttgaagtcaggagtttgagactagactggccaacatggtgaaaccccktctctacctaaaatacaaaaattagccaggtgttgtggcaggtgcctataaacccagctactcaggaggctgaggtaggagaatcacttgaaccaggaggcagaggttacagtgagccgagatggtgccactgcactccagcctgggtgacaaagcaagactccatctcaaaaacaaaaaacaaacaaacatttagcccaatgtttagtgtatattaagcatgtaaaacatgtcagctgaggatgctataattatttgtttgttttttttattacatgagacaatatgagatagttattcaggctcaagctccgaagtcagacagaattgggtctgactcctgaatctacatttacc

SEQ ID NO: 257812 - DNA, 570 bp, Homo sapiens
aaaaaagaaaaaaaacttgtattatattaaaatacacaaaggatttggggttgtttgttacaggggttatcctatcccagtttattcaaacatttagcccaagcaaggcacggtggctcacacctgtaatcctggcactttgggaggccaaggcaggtggatcatttgaagtcaggagtttgagactagactggccaacatggtgaaaccccgtctctacctaaaatacaaaaattagccargtgttgtggcaggtgcctataaacccagctactcaggaggctgaggtaggagaatcacttgaaccaggaggcagaggttacagtgagccgagatggtgccactgcactccagcctgggtgacaaagcaagactccatctcaaaaacaaaaaacaaacaaacatttagcccaatgtttagtgtatattaagcatgtaaaacatgtcagctgaggatgctataattatttgtttgttttttttattacatgagacaatatgagatagttattcaggctcaagctccgaagtcagacagaattgggtctgactcctgaatctacatttacc

SEQ ID NO: 257813 - DNA, 570 bp, Homo sapiens
aaaaaagaaaaaaaacttgtattatattaaaatacacaaaggatttggggttgtttgttacaggggttatcctatcccagtttattcaaacatttagcccaagcaaggcacggtggctcacacctgtaatcctggcactttgggaggccaaggcaggtggatcatttgaagtcaggagtttgagactagactggccaacatggtgaaaccccgtctctacctaaaatacaaaaattagccaggtgttgtggcaggtgcctataaacccagctactcaggaggctgaggtaggagaatcacttgaaccaggaggcagaggttacagtgagccgagatggtgccactgcactccagcctgggtgacaaagcaagactccatctcaaaaacaaaaaacaaacaaacatttagcccaatgtttagtgtatattaagcatgtaaaacatgtcagctgaggatgctataattatttgtttkttttttttattacatgagacaatatgagatagttattcaggctcaagctccgaagtcagacagaattgggtctgactcctgaatctacatttacc

SEQ ID NO: 257814 - DNA, 582 bp, Homo sapiens
atctgtaaaatgaagctaataacagtgcctacctcataaggtcatggtgagcactgaatgagataaaacatgcaaatcttttgtaacacccacacatagtaagtgctcagtaagtgggagctactaaataatattgagaatggaatctgatattagggaacattgaggatttgttgmtgcatttgtacttcatgcagtcactccaggaatgttgttcttaatgcatatccgtagtattttcaggtcagtaattactctgactgacaaaaataataatgtgttaacagatcaggcctccagtgctcataaattattctttgtctctttcctcagcaagtcagggttcaagggatttgagttgttattggcctccgaggtttttcgatggctggttctcactgctaatgctcctggcatgctccattttccccagtgccacaagttgcaatcaactcgtgctggcagttgacttcttttaatatttgttgctccctttctgcctagtacttgtggctctatcttgacatgaagccattcctgttattgccattactaactaaatagcccttggactctagctgg

SEQ ID NO: 257815 - DNA, 607 bp, Homo sapiens
ataaaccaccatattttagcagatctttggagagaaaatgccaagagtggatggagaggcaatggtgaagctgaggctgaagtcggaggaagctgtgaaccctgcatggggtacctgaacaccagggcaagtttctggcccagaatggcttctgggaaaggggtgagtgagggaactgggggactgctcacttttaccgtggacctctgggatcctagctataaggggaccccacatcccccatggatgtatgagctggcaggggaaatctccctggrgtacaggcagaaataggtcttcagacagtgtggggcctgggagcttttgtgcattgggcagctccagcagagagtggccatagacacccatcacccagggctcctcatccccctccagtaggcacatgacctaactgtcctccaagccaggagagagtggagccagcttcgctgggggactgggacatctgctcggtgacgtcttctgcctggcagctcctcccagggcccatgcctagctgccctgtagaagtgagtgcacagcacagcccctaaagcccagcctgagtgcagtgctgcacctgagtactttcccagtgacccaggag

SEQ ID NO: 257816 - DNA, 576 bp, Homo sapiens
tcacccacacataaagatactgtacagagccctggccctctaaaagcattcataaatgaagccaactgactatactcaactttcaccacaattaaaagaacaccaaccccaccccccygaccaccagatgagaagaaaagagttctggcaattcaaaaagccagaatgtccccttacttccaaataagtacactagctccccagcaatagttcttaaccagtctaaaacgactagaatgattgacataaagttcagattcgatggcaaggaagcccatcaaaattcaggagacagttaaaacccaatccaaggaatccagtaaaatgatccaagagctgaaagaaaaaaaacttttagtttactttggttctttcttaaaatagctatttttgaggtttgaaaacctcactgcaagaatttcataatacaattaaaagtattaccagtggaatagaccaagctgaggtaagaatcccagagcctgaagactggttctttaaatcaattcagtcagatgaaaataaagaaaaaagaattttttaaaaatgaataaaacctctgagaaatatgggatt

SEQ ID NO: 257817 - DNA, 576 bp, Homo sapiens
tcacccacacataaagatactgtacagagccctggccctctaaaagcattcataaatgaagccaactgactatactcaactttcaccacaattaaaagaacaccaaccccacccccccgaccaccagatgagaagaaaagagttctggcaattcaaaaagccagaatgtccccttacttccaaataagtacactagctccccagcaatagttcttaaccagtctaaaaygactagaatgattgacataaagttcagattcgatggcaaggaagcccatcaaaattcaggagacagttaaaacccaatccaaggaatccagtaaaatgatccaagagctgaaagaaaaaaaacttttagtttactttggttctttcttaaaatagctatttttgaggtttgaaaacctcactgcaagaatttcataatacaattaaaagtattaccagtggaatagaccaagctgaggtaagaatcccagagcctgaagactggttctttaaatcaattcagtcagatgaaaataaagaaaaaagaattttttaaaaatgaataaaacctctgagaaatatgggatt

SEQ ID NO: 257818 - DNA, 362 bp, Homo sapiens
atcatttattatcacttaatatactaggtgatgcaaggccagctctacagtagctgaatcattctcctaatgaagggttttcttatatttccaaggcatggaacacatagaaattaataaatctggaaagagtagtaaatacttactgtgcacacaaatgacctgcaagggttcaagaaaccccaaggccaatgaagtgtgcatttcaaaaccattctctctagaaaagtggtcagcaaacattttttgtaaaggaacagttaatattttatttaagtttgttctaaatcgctctctgtctcaaatrttcaacttcaatgttttagcatgaaagcagctatatatataaatacacagataag

SEQ ID NO: 257819 - DNA, 554 bp, Homo sapiens
atatataaacacataattataaaatatatgtgtttattataatagtattattcaactaaattctactatgtttttcaaaatataagtcaagattcaagatagaaatgtgcttgaaaagaagtttcagcgcttttatttacctgtttaaacaactgatgaatttagaaacaaactttcatggggtacctgaatatggggaaagtttctgaaaatttagggtgggagagatgccatcaagatggctgactaaaggcacccaacatttgtctcccccacaaagaaggaccaaaacaacaagaagataacaatacattgaatagagtgccaaaggagaatgctagaattcagcaggaaagtgacaggaaccctctgacatataaaaactcaaaatgacagtayaaagaggaaagaaaagccagggcaaggattggctcagagccaggagtgactctctagtgcaaggaaaagaaaagcaagagatccccaacagttcacatttccaccaccaatgcctgcaatattagctacaggacaacacctcagccctcacttgc

SEQ ID NO: 257820 - DNA, 554 bp, Homo sapiens
atatataaacacataattataaaatatatgtgtttattataatagtattattcaactaaattctactatgtttttcaaaatataagtcaagattcaagatagaaatgtgcttgaaaagaagtttcagcgcttttatttacctgtttaaacaactgatgaatttagaaacaaactttcatggggtacctgaatatggggaaagtttctgaaaatttagggtgggagagatgccatcaagatggctgactaaaggcacccaacatttgtctcccccacaaagaaggaccaaaacaacaagaagataacaatacattgaatagagtgccaaaggagaatgctagaattcagcaggaaagtgacaggaaccctctgacatataaaaactcaaaatgacagtataaagasgaaagaaaagccagggcaaggattggctcagagccaggagtgactctctagtgcaaggaaaagaaaagcaagagatccccaacagttcacatttccaccaccaatgcctgcaatattagctacaggacaacacctcagccctcacttgc

SEQ ID NO: 257821 - DNA, 501 bp, Homo sapiens
atggcacctgtccatatcacccaagagcccaaaaaggggtccacatggcccactgctaccactacaaccatatggcccagctggagcccctggacacatctgcccaaggcctgctgctgctaccaccaatgcctgcatgcatttcccgggaacctgaagactgtgcatttggggcttctgccaccactgcacatgcctatatacaacaagaagtggcttagggatctcatccagggcccacgaccaccacagccagtacccaaccatgccacccaggggcctaaggtctggcycacccagtgatccattccccagcagatcctcaccacagcctccagaaacaattgcaacctaactcactgaggaacttccagaaaccgatgacattggttacagtagaaaaaaaataataacacagagactacactgcaggacccatccagaaccaaagccaaaataccctacccaactgacactatagatacatctacaggaaaagat

SEQ ID NO: 257822 - DNA, 501 bp, Homo sapiens
atggcacctgtccatatcacccaagagcccaaaaaggggtccacatggcccactgctaccactacaaccatatggcccagctggagcccctggacacatctgcccaaggcctgctgctgctaccaccaatgcctgcatgcatttcccgggaacctgaagactgtgcatttggggcttctgccaccactgcacatgcctatatacaacaagaagtggcttagggatctcatccagggcccacgaccaccacagccagtacccaaccatgccacccaggggcctaaggtctggctcacccagtgatccattccccagcagatcctcaccacagcctccagaaacaattgcaacctaactcactgaggaacttccagaaaccgatgacattgrttacagtagaaaaaaaataataacacagagactacactgcaggacccatccagaaccaaagccaaaataccctacccaactgacactatagatacatctacaggaaaagat

SEQ ID NO: 257823 - DNA, 561 bp, Homo sapiens
aacagctgcagaatacacatacttcgcatcagtacatggaacattctccaggatatgttatcccacaaaacaaatttcaacaaatacaaaatttgaaatcacatcaagtattttctcagaccacagtggaataaaactagaaatcaataacaaaaggaacactggaaaccatacaaatacataaaaattaaacaayatgctcctgaatgatctttggatcaatgaagaaaaaaacattttggaacagacaaaaatggaaacagctcataccaaaagctatggaattaaaaacattactaacagggaagtttatagtaataaatgcccacatcaaaaaagtagaaacatttcaaataaacaacctaatgatgcactgtacctcaaaaaactggaacaataagaactcaaaccccaaattagtagaggaaaataaataataaagaccagcacaaaactaagcagaacagagactttaaaaacagcacaaaaggtcaatgaaatgaaaagttggtttcttgaaaagataaacacaatcaacaaatcattaatgaaactcagaaa

SEQ ID NO: 257824 - DNA, 564 bp, Homo sapiens
tatagcagtgcaagaacagactaatacagatattataaggcaaggtatgtgtgaagaagcatggagatcccatgcctttcctggatacaccactctgtggtaatsttcatgtgttcagttatcagaaagctccccaaatcctgtcttcttttaccttttatggagatgtcattggataggcatgattgacaaccacgtagaaatgtgactggacgtaaaaggtatgttctaaacccagcaaagcctgtctttacagattcttcttggcctctctgagcagcatttcttactccagcgtttggggcaggaccctgtcttaaatgagggtcttatcacccacaattaaatacagtcctaagattctgcttcattacaacaaaaaatggtaacaagggatatgggagttataagccaaaaaccatggacaaatatacttgtcctccagaacttctcttgaactgggtttaagttggggttcccatgatcccctctttgggtttgattaatttgctagagtagctcacaaaactcagggaaacactttacttacatttaccaatatat

SEQ ID NO: 257825 - DNA, 603 bp, Homo sapiens
caaatcctgtcttcttttaccttttatggagatgtcattggataggcatgattgacaaccacgtagaaatgtgactggacgtaaaaggtatgttctaaacccagcaaagcctgtctttacagattcttcttggcctctctgagcagcatttcttactccagcgtttggggcaggaccctgtcttaaatgagggtcttatcacycacaattaaatacagtcctaagattctgcttcattacaacaaaaaatggtaacaagggatatgggagttataagccaaaaaccatggacaaatatacttgtcctccagaacttctcttgaactgggtttaagttggggttcccatgatcccctctttgggtttgattaatttgctagagtagctcacaaaactcagggaaacactttacttacatttaccaatatatttatatctaaacatatatacaaataacatcacatcaccccaggtagacaagctattatcaaaaaggcaaaaaataagaattgctggtaaggatgcagaaaaaagagaactcttaaacactattggcgccaattaaaccactacagccattatggacaatggtatgtaggtttc

SEQ ID NO: 257826 - DNA, 403 bp, Homo sapiens
cactaattgagatattcaacaatttttctctgttacctgttaaaacatgagttgttaccttcrttttcctccttttcttttttattttaaagtgctgcagttgggaaatgtggtcagaaacatgtcttaccttttagaatgatctgagattgtctttgggagtatcttgtttataaatatgcactttcagtggtattttgaagctttgacaatggagaaagaagcttgaggttatttttcttaaacttataaggtcacttgcaagtctctctgttttcactttcattgtttatctacagaataaaaggtataactatgaccaagaagtgaatcggttcaatgtggaaagccagatggcatgccactgttttctccttcgtttcctaaggaacacttttaagaa

SEQ ID NO: 257827 - DNA, 552 bp, Homo sapiens
agtcttactctgtagcccatgctggaatgcagtggcttgatcttggctcactgcagcctccgtctcccaggctcacaggctcaagtgattctcatgtctcagcctcccgggcatgcaccaccatgcctggctaattttttttttttttttgtattttagtagagacagggttttaccatgttgccagggtggtctcaaactgctgagctcaggcaatctgcccaccttggcctcccaaaatgctgggattacagacctgagccacagcacccatccaatttttttttaatattccacctttttctgaatatactcttagttccctaaaatttaaatctaatgawgatgaaagaagagtttattgaatcattacagaacatttttccaaaatgcatttcaaatggagtatttgatctttataaataattttgaacaaagttttttttttttaatctacgtagtgttttgttttctctttcaagtgtccttatgtcattaaaaacaagttgcaaggcatgaaccactttaaagttcaaatcatcccattaccca

SEQ ID NO: 257828 - DNA, 611 bp, Homo sapiens
gtacttactggagcagaaagagcagtggatgaaggaggggagagagatacttttccctcaaggcaagtgagggctgcaccaagacacctgggaaagctgtgtgccagcaggcagtcctgtgtcttacttcctgcctggaggcttgctgagctacccattgtrtatttctgatgctcccatttgtactactaccaaagcagaggactagagaactctttatagatccagatgtgagctccctcaggtgtggtaggcacagcaactagtgactgcctttgtctgggagaggtgtgaaggctagaggtggctggagctgccatcactgctgggcagaataagacagtggaaattcctctggatcaggggagccaaaataagccatctctaaataatcccacccaagagcattccacgggaattgagggtctccagcagaaagatgctgtgtgtggttaattgctggagggaaattggagagtgttctagccatatcacacagatattcaaagtaggaatccatgaaaagccacccaggcccaggactgcaaggagacccgcctttgatgcttgccatagcagggggaattcaacagctagggggaattacataa

SEQ ID NO: 257829 - DNA, 521 bp, Homo sapiens
atttttatgtatgttttaagaaaaaaaaaattacacctgcccaaacaacagcatmtaaattttagatagacattggttggtgtttcaggagataattatatatgttattgtatatatgttgttcagcaagtatggcagaaatctctgcatttggaaatacattatatcacaaaggaagatttgtcatctccatggctatttgatggtgtagacttgaggtcatggcttgctcactgtaatgagaaataacaacagatgctattgataaaagttctgccaggttcatgctatgccttattgaatgcaaaaaggcctggctcttatccaatcattatccttttcatactttgtggtttttgatgaacatgcctatgaatagaaaatgattatctacctcttcatttctttacttatttaatcgtttctatttcagtcttggtgaggaaggatcttttagtgtataaatgccgtgagcattagtaggagataaacttttttttttcttttttttttttttttgg

SEQ ID NO: 257830 - DNA, 521 bp, Homo sapiens
atttttatgtatgttttaagaaaaaaaaaattacacctgcccaaacaacagcatataaattttagatagacattggttggtgtttcaggagataattatatatgttattgtatatatgttgttcagcaagtatggcagaaatctctgcatttggaaatacattatatcacaaaggaagatttgtcatctccatggctatttgatggtgtagacttgaggtcatggcttgctcactgtaatgagaaataacaacagatgctattgataaaagttctgccaggttcatgctatgccttattgaatgcaaaaaggcctggctcttatccaatcattatccttttcatactttgtggtttttgatgaacatgcctatgaatagaaaatgattatctacctcttcatttctytacttatttaatcgtttctatttcagtcttggtgaggaaggatcttttagtgtataaatgccgtgagcattagtaggagataaacttttttttttcttttttttttttttttgg

SEQ ID NO: 257831 - DNA, 540 bp, Homo sapiens
ccataatgctgcgtgcaaagaaaataatttttctcttttcctttgcagtgtttatacttcattagctagaaatttcagaacagtgctatataaggatgacaaaagcaacatttttctcttattcttgactgtaatgggaatgctgctacagttttactattaagtatggtgttgcctgtggtgatttttcaaatttaaaatcgggataatgacgtctgttttactttgtaaaattgttataaggatcgaatgcactaataaatataaaaatgccatgtaattgtaaaaagctataccacatttgtctggcatatagtatgcactcaacaaactttttcagtattactgttcttaataataacctcctgtgtttaatggcataagaaacwgaactatgtgttctataaaatatctctttggtgccactatacagaaataagtgggtctaatggatcattaaataaatttttatttcttagtatttaggctaaaagttagaaaagtaacatgcttttcattacaaagagaagtgatatatag

SEQ ID NO: 257832 - DNA, 483 bp, Homo sapiens
gatatctgtgctgccatgtttacagcagtattattcacaatagccaaggtatggaaacaacctgtgtctgttgctgaataatggataaaaattggataaaaatgctgtgatatacacacagagaagagtatttttcagccttagaaaaggacatactgacaacaatgatgaacctggagaacattatgctgagtgaagtaagccagacacagaaagacaaatatagcatgatctcacttatatgtgkaatcttaaaaagaaaaaaatcaaatacatagaaacagtagaatagtgtttaccaggagtagggaaggaaagaaaatagggagatgtagttcaaaggataaaaacttgttgttatgtaggttgaataagtttagagtgctaatgtgctgcaggaggactatagttaataatattgcattaaaaatttgttaatagaatatattttgcatgctcttgacacacacacacacacacaca

SEQ ID NO: 257833 - DNA, 558 bp, Homo sapiens
gcctgtttatcctcacttagggtgatatcaggttctacytccgtcctagagtttcataagtacatttctgcacttttgtcttcagcctcattgttacttggaagccagtttctcaaaaagagagggcgaggaagaaaagacttagctatcttaaatgtaattagcattgctcttgtaataacacagacatttatttcattgacccagcagttccatttctaggaacctatcccaaagaaattctcattttaagtgcacaaagatgtatgtacattgatttttttcatcattatttggaaaagaaaattttgaaaaattgaggcaaatataataatcactaaaaatagagtggttgaataagttatggagcattcataccatgtaatactacatggctggcaaaaagaatcaggtgaacctaaaaactcaagctaataatcttttgtaacattgtaaactattatacaaaatcataatatttcataatattttataaaaaatattcttgcctataacttaattcattaatatctccaccaataaaacacttagccacag

SEQ ID NO: 257834 - DNA, 558 bp, Homo sapiens
gcctgtttatcctcacttagggtgatatcaggttctacctccgtcctagagtttcataagtacatttctgcacttttgtcttcagcctcattgttacttggaagccagtttctcaaaaagagagggcgaggaagaaaagacttagctatcttaaatgtaattagcattgctcttgtaataacacagacatttatttcattgacccagcagttccatttctaggaacctatcccaaagaaattctcattttaagtgcacaaagatgtatgtacattgatttttttcatcattatttggaaaagaaaattttgaaaaattgaggcaaatataataatcactaaaaatagagtggttgaataagttatggagcattcataccatgtaatactacatggctgrcaaaaagaatcaggtgaacctaaaaactcaagctaataatcttttgtaacattgtaaactattatacaaaatcataatatttcataatattttataaaaaatattcttgcctataacttaattcattaatatctccaccaataaaacacttagccacag

SEQ ID NO: 257835 - DNA, 674 bp, Homo sapiens
tgcctgtgcttgtagactattactcaagaaatctttgcccagaccaatgtcctggagagcttccccaaagttttcttttggtactttcatagtttgaggccttagatttaagtctttaatccattttgatttgatttttgtatatggtgagagatagggatctagtttctttcttctgcatatggatatctagtttttccagcaccatttattgaaaagactgtcttttcccaatgtatactcttggcaactttgtcaaaagtgagttcaytcatttgtatagatatttttctgggtttcctgttctgttccactggtctatgtgtctgttttttaataccagtaccatgctgttttggttactgtagttttgtagtataatttgaagtcaagtaatgtgattcctctacttttgttctttttgttcaagatagtgttgactattcttggtcttttgtgtactcatgtaaatgttaaagttgttttttctattcttgtgaataatgccattggtattttaatagagattgcattgaatctatagattgtttcaggtagtgtggacattttaacaatattgattcttccaatccatgaacatgaaatagctttccttttttcgtgtgtcctcttcaatttatttcatcagtgttttataatttttattgtagaga

SEQ ID NO: 257836 - DNA, 571 bp, Homo sapiens
cttccttcttgtcttccttttcatgaaggtaattttcactggtgacatgttttaatttcttgcttcttaggttttgtgtatctgtgcatgttttctgatttaaggttaccatgaggactgcagataatatcttatactcccattaatttaaactgatggcaattcaacactgattgcacaaacaaacaaacaagcaaagaaaactaatgaagactctacattttaacttcatcctcccactttttaatgttttgttgtttgtatttatatcttattgtactgtctacgaatgtcttgaaaagttgtagtaattttttctgattggttcatcttttagtctgtctacttaagatataagaaatttatataccacaattacagtactatagtattctgggttttgttgtgtacttactataccagggagttttgtaccctcagatgatgtttttattgctcattaacattgttttctttcagattgaaatatttcctttarcattgtttgtaggacaggtctggtgttgatgaaatctctcaacttttgtttatctgggaaagcatttttcct

SEQ ID NO: 257837 - DNA, 368 bp, Homo sapiens
acaataatatctgcactgccatgagaagtaaatgagctatataaaaaatgtgagatasgcaatagtcaaccaattgaaattgtttcactatccctttctagccaaaacagaacccaaatttctctctacattcggttacaggacctttgacactgatctggtaagtcctttaggcttattaacagttctttagattctgaatgttaaagactatttttgtaaattttcagtgttgaatgagagatacttggtgtttagtatttctttgatcaatttccacaactttctccatttgtgagttattgagttggttgtatctgttataaaccactcaagttgtgaataaatggattatccagaaggcaata

SEQ ID NO: 257838 - DNA, 368 bp, Homo sapiens
acaataatatctgcactgccatgagaagtaaatgagctatataaaaaatgtgagatacgcaatagtcaaccaattgaaattgtttcactatccctttctagccaaaacagaacccaaatttctctctacattcggttacaggacctttgacactgatctggtaagtcctttaggcttattaacarttctttagattctgaatgttaaagactatttttgtaaattttcagtgttgaatgagagatacttggtgtttagtatttctttgatcaatttccacaactttctccatttgtgagttattgagttggttgtatctgttataaaccactcaagttgtgaataaatggattatccagaaggcaata

SEQ ID NO: 257839 - DNA, 644 bp, Homo sapiens
gttcagctgcatctctgctttattcttggagtagagactgctcttgaaagcaattcctgctgccttgacaatttccctttctcttttggattatggaaatcactactacagtagacttgttattcttgttctgcattgcagtctttctccccatctgtgtttctttcttaattagaattatctgccatctctcactactaaaagttaggtaaaagtcatgattctccaggcttctaagcagcaacatgatcagtaagaccagcttctggcaggaaaatgaaattatttttaatgttaaacaaggtaactgcaggattccacctgcagcccaagtatcactgggaactgataaaagatgaagtcaagatatttccctctgatcaaatggattgcctttcaacatagctttttaaaaagaatctcatcccaaaagccacacagctgtaagcccaagatgtagtaagaaatgagccgcttataggaattggagattagcagagcctcattagggatccaggcagsgtaagccacagagaggcagctgtatttttctgtggatgggcctgaaccctggaacagatgcattttggggatatgcaattttattttgggccacatttgcctaaggaataaaatgttccaag

SEQ ID NO: 257840 - DNA, 640 bp, Homo sapiens
atctgggtcatttttgtcattatttccatctaaacaagtttctagatgtatggttggacataaaaataatcttgtggaatgtagttcttggagccatgagaaatatgggcagaccctgggaagaaatagcgtcctattggtgatgtcttcagggcttgctgactcagaaatcttcaaaatgcagagcacaggaaagctgtgcgagatccaagaaccctcttcactttgcacaactgcttcctcatatatttgtgccatctggttgaaagtgattactgtgactaccgaggaaaataataccccaaattatccactcagcttcagttggcagaacagagaaacaaagcataaagaaaatttgcattatttcattgagattacatgtatcaatgcaaggtgatatggtttggctgtgtccccacatgttgtgggagtgacctgctggaaggtaattgaatcatgggggcaggtctttcccaggctgttcttgtgatagtgaataagtcttacaagagctgatggttttaaaarggggaatttccctgcacaaactctcttctcttgtctgccgccatgtaagacatgcctttcaccttccgccatgactgacaggcctccccagccatgtggaactgaaaag

SEQ ID NO: 257841 - DNA, 608 bp, Homo sapiens
tgtgtgttgtccccttccctgtgattcatgtatgcacgtgttcattgcagcactagtcacaatagcaaggacatggaattaacccaaatgcccatcartgatagactgaataaacaaaatgtggtacatatacaccatggaatactatgcagccataaaaaggaatgagatcatgtgctgtgcaggacatggatggagatagaagttattatccccaccaaactaacacaggaacagaaaaccaaacaccatatgttctcacttataagtgggagctgaataatgagaacaccgagggatttcaagtgcaacagtcacactactcacagactgaatctgtttcacacacgtgtgccacaactgtccatatgcatgtaaatcttgaaaatgatacagacatgcattgaacatgttaataaatgtctggcagctttctgtcatgaggagagggatggtgacatacgttgatgttaaaagtccttatctctgaaaatattagaaactactgcctgctctgcctttctgattttagatttatttgtacaaatttgagttcctattctttcttctacactaagaataaacaaaactttacgaagaggaatatg

SEQ ID NO: 257842 - DNA, 608 bp, Homo sapiens
tgtgtgttgtccccttccctgtgattcatgtatgcacgtgttcattgcagcactagtcacaatagcaaggacatggaattaacccaaatgcccatcagtgatagactgaataaacaaaatgtggtacatatacaccatggaatactatgcagccataaaaaggaatgagatcatgtgctktgcaggacatggatggagatagaagttattatccccaccaaactaacacaggaacagaaaaccaaacaccatatgttctcacttataagtgggagctgaataatgagaacaccgagggatttcaagtgcaacagtcacactactcacagactgaatctgtttcacacacgtgtgccacaactgtccatatgcatgtaaatcttgaaaatgatacagacatgcattgaacatgttaataaatgtctggcagctttctgtcatgaggagagggatggtgacatacgttgatgttaaaagtccttatctctgaaaatattagaaactactgcctgctctgcctttctgattttagatttatttgtacaaatttgagttcctattctttcttctacactaagaataaacaaaactttacgaagaggaatatg

SEQ ID NO: 257843 - DNA, 576 bp, Homo sapiens
ttgaacaggggtgagtcaaagccatttgttatgtggaggtggaagcagctgtttactaccagaaatgctatcctgctagaggaagaaaacgtgtctcctaagtgaatataaataatccaggttatgaagagctttatttcctgtctatttggaatacctcaactatagtgtacaaaatccaataaggttgttttacccaaattktgtcaaacaattaatctcagttattgtatttctaatttaaaagagccactatatgtatttagcttggtttagcttgaggtatggggcaccagctgtggcctgttgctcatgttctgtgattgctgtgattgccattgtaggcaaaaatttaaagaatattgcctttggtaaaggtctgattctgtattcaagcaccagatatctgagtactcttataatcacccctagatggattgctaatcagccctgcattgactctggactttcttttgctcctctccttacttttttcataacagaaatacttattagagtaaggattaagatggcggataggcagttggactagcttgcagctcccactcagatgga

SEQ ID NO: 257844 - DNA, 608 bp, Homo sapiens
tgtgtgttgtccccttccctgtgattcatgtatgcacgtgttcattgcagcactagtcacaatagcaaggacatggaattaacccaaatgcccatcagtgatagactgaataaacaaaatgtggtacatatacaccatggaatactatgcagccataaaaaggaatgagatcatgtgctgtgcaggacatggatggagatagaagttattatccccaccaaactaacacaggaacagaaaaccaaacaccatatgttctcacttataagtgggagctgaataatgagaacaccgagggatttcaagtgcaacagtcacactactcacagactgaatctgtttcacacacgtgtgccacaactgtccatatgcatgtaaatcttgaaaatgatacagacatgcattgaacatgttaataaatgtctggcagctttctgtcatgaggagagggatggtgacatacgttgatgttaaaagtccttatctctgaaaatattagaaactactgcctgctctgcctttctgattttagatttatttgtacaaawttgagttcctattctttcttctacactaagaataaacaaaactttacgaagaggaatatg

SEQ ID NO: 257845 - DNA, 502 bp, Homo sapiens
ctttttccttcagtgaagcagccaacacaaagaccactggggcaagtcttcaaagggggagcttctctgcagaaagtggctcagtgggatttacaacaaaggacttctcaagatcaacagcactttgctgacattggagtggattggaggattgaaaataggattaaaacaaaattaagacacaatagcaatagtggagagatcccgtggggcctgtaatggggtcctgtggaagaagaggaataatcgagcagttttcctgagattctaataggaagctgttgaagttgataaactgaagtagtgtttctttcttgcatgcttgaaaataattatgatttccccccatagataccagtacatataatgtctgtatgtgacatatttctaagamgttttaaaatagttgaattgattagctgttattatatgcttgagtaaatatagttccttaaattcaactatttttgcagctctccagttcagttaatataatttacat

SEQ ID NO: 257846 - DNA, 591 bp, Homo sapiens
cctatgatggacacatagcatgaggcagatataaaactgctgtggtttcaaactgctgagatctcgagggttgcttgttattgcagcataacttgcccaatgtaacttccttagggaaacttgtgagggcattacacagtgttggttctcagacatgctgtgagtgaaagtggcagattatgttctggagatggtcagtgtgtggcattccttgtatatattaatcttctgagttttttaacattagaaaatctaggaattatgttaataaattatatagtaagccttgagtaattaatattacatattaaaacataattccatgtcttaaaattaaacatkggacctctaataaattaatcttgcctagttaagtctaactttttttttcttgagttgagaacagaatagagtccaacagactctagttaggttgaatattgaatacatttcaatatgtttgaggttgaatatgtttccgtatatgacccttaatctcttgtatttctgaagaattccaagtaaaactgattgaggataaaagactgcaaaactactaattttctcaagagaaaataggagaatattaga

SEQ ID NO: 257847 - DNA, 358 bp, Homo sapiens
ttccaactttttcattattgttatatctgttatggtaatctgtaatcagtgatttttgaggttactattataattgttctggggcaccacaagctgcaaccatataagacagtgaacttaataaatgtgtgtgttctgactgytctgctatctggctcttcccttatctctctccctctattcaggcctctctattctctaggacacaacaatattgaaaataggccagttaataaccatacaatggcctctaggtgttcaagtgaaaggaagagtgacatctctctcactttaagtcaaaagctagaaatgattaagcctaatgattgaggcttgtcaaaagctgagataagcggag

SEQ ID NO: 257848 - DNA, 571 bp, Homo sapiens
atcctttctcagcacatccctactctcagattcatccacatttctaatttgtttacgtctaactaatgctttatttatagttttcttgacttgttatttgcaacttatttaaacagtattataagctagtcattgtgtgcctactgctgtgtaactatcactggagtaagttaaaataccaggtgtattccctatgaasagttaggcccatcaaattatctcagtgcaaacatgaacaataagaacaccttgtgttgcagtccctttttttctgcttatctgatcgccgtacaactaaaacatttcccaagtaataaataatttagttataaaatttgggcagctttctgtcataagatataatatttattttgctgctgaattaattaatgtttgggaaatgccgtgtaaatgttagctcttatcctcttcttatttatagtaagtacataacctgaaactttagtccatgcaacagaaaatgctgtggactgtaagtgataatgatggattatttgtccttatgattttatctgtaacctgcatataaaattcagaacttgaaatgatg

SEQ ID NO: 257849 - DNA, 582 bp, Homo sapiens
actctgtgagggagggacatattcacttttgcatgcccagaatctagcatgatatttggcagacagtgggtgccagagaagtgtttattaatttggattttttaatgtmccttaattgtttaatgtctgtcttccttagcataggtatttcctagtctctacaaactgtgaataatgaggtataaagcacatacttatggtaacatcatacacagtgtcacaagattgatcctaacatagcttcacttttatgtaccttttatttcacttattacatagatgtgagtgaacaccccaaggaaagacaggtgttagggctttagacatatttaagaacgtgaacatgcacattagcctatagtttgggagcaacataaacactagaaaacttcattagtctccttcaagggtgtgttcatagtaggtactcaatagatgtcaagtgactgactgctaaagcaataatgggggctttgggcacttgtcaaaaataaaagctgaattaatgatgagaataaatttctgaccaacatgggaaaaatacctgtactattaaatcctggataactataattgtgccca

SEQ ID NO: 257850 - DNA, 639 bp, Homo sapiens
acaggtttgtctcacacaaagagagtttgtgttcactcatggaagacaaaacaacattgcatggctcatgtatttgtttcctgggactgctttaagacattaccacaaattgagtggcytaaaacaagagaaatttattctcttctggttcggtaggccagaagtctagaatcaaggtgtgggcagggctgcactccttctggaggctctagggaatcatgcatttcttgccttttcagcttctggtgactgtaggcaattccttggtgtgttgtctcatctctccactctgtcttcacaccaccttctctctgcagtctaactccaaacttcctcgtatacaggccacataggataatccatggtaaatcctcctctcaagacccctaacttggctgggtgcagtggctcaagcctataatcccagcactttgggagaccaagtttggcagatcacttgaggtcaggagttcaagtccaggctggccaacaaaatgaaactctctctctactaaaaaatatacaaaaattagcagggcctggtggtgggcacctgtaatcctagctactcaggaggctgaggcaggataattgtttgaaccctggaggcggaggctgcagtgagccaagatcacacta

SEQ ID NO: 257851 - DNA, 639 bp, Homo sapiens
acaggtttgtctcacacaaagagagtttgtgttcactcatggaagacaaaacaacattgcatggctcatgtatttgtttcctgggactgctttaagacattaccacaaattgagtggcctaaaacaagagaaatttattctcttctggttcggtaggccagaagtctagaatcaaggtgtgggcagggctgcactccttctggaggctctagggaatcatgcatttcttgccttttcagcttctggtgactgtaggcaattccttggtgtgttgtctcatctctccactctgtcttcacaccaccttctctctgcagtctaactccamacttcctcgtatacaggccacataggataatccatggtaaatcctcctctcaagacccctaacttggctgggtgcagtggctcaagcctataatcccagcactttgggagaccaagtttggcagatcacttgaggtcaggagttcaagtccaggctggccaacaaaatgaaactctctctctactaaaaaatatacaaaaattagcagggcctggtggtgggcacctgtaatcctagctactcaggaggctgaggcaggataattgtttgaaccctggaggcggaggctgcagtgagccaagatcacacta

SEQ ID NO: 257852 - DNA, 639 bp, Homo sapiens
acaggtttgtctcacacaaagagagtttgtgttcactcatggaagacaaaacaacattgcatggctcatgtatttgtttcctgggactgctttaagacattaccacaaattgagtggcctaaaacaagagaaatttattctcttctggttcggtaggccagaagtctagaatcaaggtgtgggcagggctgcactccttctggaggctctagggaatcatgcatttcttgccttttcagcttctggtgactgtaggcaattccttggtgtgttgtctcatctctccactctgtcttcacaccaccttctctctgcagtctaactccaaacttcctcgtatacaggccacataggataatccatggtaaatcctcctctcaagacccctaacttggctgggtgcagtggctcaagcctataatcccagcactttgggagaccaagtttggcagatcacttgaggtcaggagttcaagtccaggctggccaacaaaatgaaactctctctctactaaaaaatatacaaaaattagcagggcctggtggtgggcacctgtaatcctagctactcaggaggytgaggcaggataattgtttgaaccctggaggcggaggctgcagtgagccaagatcacacta

SEQ ID NO: 257853 - DNA, 561 bp, Homo sapiens
attataacaaaagaaaaggccaagtatatggatacaggcacaggtggactcatagtggtaggaaataacagaaattatcttgtgtktgtctttattctctcagtgaaatgaaacaagaccatcaattaaatgtgaagggaaagggtgtcagatgctggaggagcaagagaagatgtgaagcagtgtcccagagggtgctggactgagctgaccagggaacactaacagctgtccaggcagggcaaactgcccacttgagatttatggtcagaagctagatgatcctctgactatcattgtttcagcaatgttaatggatggaaaatttggatataatctttatattctaagaaggctttttaagtttattttaaactgagggggataaaaatagaatagaaatcatgttatcataggcaactatgcacgaatggaaggatgcttaaaaccaaactttgtaacctaactttaaaataataataatgatctttattctcatttccctctatacataaatttgccccatataagattagagggccattttctttgatttaaaga

SEQ ID NO: 257854 - DNA, 561 bp, Homo sapiens
attataacaaaagaaaaggccaagtatatggatacaggcacaggtggactcatagtggtaggaaataacagaaattatcttgtgtgtgtctttattctctcagtgaaatgaaacaagaccatcaattaaatgtgaagggaaagggtgtcagatgctggaggagcaagagaagatgtgaagcagtgtcccagagggtgctggactgagctgaccagggaacactaacagctgtccrggcagggcaaactgcccacttgagatttatggtcagaagctagatgatcctctgactatcattgtttcagcaatgttaatggatggaaaatttggatataatctttatattctaagaaggctttttaagtttattttaaactgagggggataaaaatagaatagaaatcatgttatcataggcaactatgcacgaatggaaggatgcttaaaaccaaactttgtaacctaactttaaaataataataatgatctttattctcatttccctctatacataaatttgccccatataagattagagggccattttctttgatttaaaga

SEQ ID NO: 257855 - DNA, 560 bp, Homo sapiens
ctcatttccctctatacataaatttgccccatataagattagagggccattttctttgatttaaagagtactgtaccatcaagggatatacttctaatctctgccactagaaaactgtaagatcctaagcaattatttaatctcactgcagcagagatagtaggttagcacctcaatgtcttgtttgcctttctcttagaaagaactctcaactccttagctgagcagatggctccaagaatcaagactacatttcccaacttcttttgcagctaggtgcrcccatggaactaaatttggaccaatgagacataaagaaaaatggtatgagacagcttctagaaaacttcctttaagaacgtgacaggttctccttatctaccttttaatatcttcctccacacagtggctagagttctagtcatcatcctggaccgtcctaaaagtggcaaaacagttagctagatagagtatgagtcactaacagttttttagaagccacatcaaccctggaatacaaacctccagccttcaataatgtgagagagaatgctatctct

SEQ ID NO: 257856 - DNA, 560 bp, Homo sapiens
ctcatttccctctatacataaatttgccccatataagattagagggccattttctttgatttaaagagtactgtaccatcaagggatatacttctaatctctgccactagaaaactgtaagatcctaagcaattatttaatctcactgcagcagagatagtaggttagcacctcaatgtcttgtttgcctttctcttagaaagaactctcaactccttagctgagcagatggctccaagaatcaagactacatttcccaacttcttttgcagctaggtgcacccatggaactaaatttggaccaatgagacataaagmaaaatggtatgagacagcttctagaaaacttcctttaagaacgtgacaggttctccttatctaccttttaatatcttcctccacacagtggctagagttctagtcatcatcctggaccgtcctaaaagtggcaaaacagttagctagatagagtatgagtcactaacagttttttagaagccacatcaaccctggaatacaaacctccagccttcaataatgtgagagagaatgctatctct

SEQ ID NO: 257857 - DNA, 656 bp, Homo sapiens
cattctgaataaaatgatcagtatctgccataaagtttattaactaaggaaggatgcctttatttttagttctaaaatgctaccacaaaaagtacaaaaggaaacatgccagatgaaaacaattattcaaaacaagtttggtaaaacctatgatctttaggaaataaaatattgaacttayattattttgataatttgtaagtaacggtgtaaaaatgttttccacattgctgaactagaaccctttccctatcatttattaaaagtctccctggattttcaggcaatttagagaaatgtaacttgcaggagaaaaaacttataaaatatagtgttttaacaaaatttctctttttgcacactacacaaataatactgagccaacagaaactttcgtaaaagccagcatggaagtctgtctctgtatttttttttaatctctctctggatttaatgccctcatgaagcttgaatggaatatatgcatgtcacagcatggcagagggataatatatttccccctgcttcactgagcatgagttgtgtatcttgccatcttgagagtccacagtgcagcacgtttatccctattagaaaagctcagtctaataatatatggatgctgcagccatttatgacaaatatgtaaaatcata

SEQ ID NO: 257858 - DNA, 584 bp, Homo sapiens
aatatgtaaaatcataaccttatatattctggagatggatgcatatacattgaatctattaactatgcactgacagatttttgttaaaactaggttttcaacctcaaagactaaaagggcaaataaattgattatatttgtatatttatgtagcctcaaactttaatttcaaggcagaaaaaaagagcagtgccactgttgccacttcggccatacttggattcactttgcccaccctgagcacacagctattcagatcaaggcatatgtttataaatactgtttgattaattttgataagacattcagctttttatcatctcattttagaaatgaaggtcacagcaatgaaagagtatatttgtaaaagtgaccaaaaaataagcaaatatttacggttcaaatcccaacattttctaatyatataaccttgggcaaatttacttaacccaagtctagtctcaatttgctcacctgtaaaacggggatgataatcatacctaactaataggattgtatgtaaagtgtttagcatgtcattgggactcaataaatgttggctattttcatcatgactattccct

SEQ ID NO: 257859 - DNA, 572 bp, Homo sapiens
cctggtatgaaacccagttgattatggcgtattgtctttttgatatactgttggattcagttagctagtattttgttacagatttttgcatctatattcatcagagatattggtctgtagcttcctttttttgttatgtcaattcctggttttagaattagggtgatactggcttcatagaatgatgtagaggggattcccttcttccctatcttgtggaatagtgttgatagaattggtgtcaattcttctttgaatgtctgatacaattcagttgtgaatccatgttgtcctgactttttttgttggcaattttwaaaatcactctttcagtctgttagttgttattggtctgtttcaagtttctatttcttcctggtttaatctgagagagttgtatatttccaggaatttatccatctcttctacgttttctagtttatatgcataaaggtgttcatagtagccttgaatgatcttttgtatttctgtggtatcagttgtaatatctcctgtttcatttctaattgagtttatttggatcttctcccttcttgtcttggttaatcttg

SEQ ID NO: 257860 - DNA, 594 bp, Homo sapiens
cctctgcaacattcacaccatttgtgttttgctaattaaaatagattgaaggtctagtactgtaagtcttagccatagcaatctgacaagagaaagagataaagggtatccaaatcagtaaagaggaagtcaaactgtccctgtttgctgacgatatgatcatttacttagaaaaccctgaggactcctccagaaagctcctagaactgataaactaattccacaaagtttccagatacaagattaatrtacacaaatcagtagctcttctatacaccaagagtgaccagagaatcaaatcaagaactcaaccccttttacaatagctgacaaaaaataaaaaataaaaatcttaggcatatacctaacaaaggagtcaaaagacctctacaaggaaaactacaaaacactgctaaaagaaatagacaacacaaacaaatggaaacacatcccatgatcatggatgggtagaatcaatattgtgaaaatgaccatactgccaaaaacaatctaaaaattcaatgcaatctccatcaaaataccgccatcattcttcacagaattagaaaaaacaatcctaaaattcatatggaa

SEQ ID NO: 257861 - DNA, 594 bp, Homo sapiens
cctctgcaacattcacaccatttgtgttttgctaattaaaatagattgaaggtctagtactgtaagtcttagccatagcaatctgacaagagaaagagataaagggtatccaaatcagtaaagaggaagtcaaactgtccctgtttgctgacgatatgatcatttacttagaaaaccctgaggactcctccagaaagctcctagaactgataaactaattccacaaagtttccagatacaagattaatgtacacaaatcagtagctcttctatacaccaagagtgaccagagaatcaaatcaagawctcaaccccttttacaatagctgacaaaaaataaaaaataaaaatcttaggcatatacctaacaaaggagtcaaaagacctctacaaggaaaactacaaaacactgctaaaagaaatagacaacacaaacaaatggaaacacatcccatgatcatggatgggtagaatcaatattgtgaaaatgaccatactgccaaaaacaatctaaaaattcaatgcaatctccatcaaaataccgccatcattcttcacagaattagaaaaaacaatcctaaaattcatatggaa

SEQ ID NO: 257862 - DNA, 561 bp, Homo sapiens
tgaaactggatcctcatttctcaccttacacaaaaatcaactcagatggattaaggacttaaacctaagatctgaaactataaaaattctagaagatgacattggaaaaacccttctagacattggctgaggcaaggatttcatgaccaaaaacccaaaagcaattgcartaaaaacaaagataaatagctgggacctaattaaactaaagagcttttgcatggcaaaaggaacagtcagcagagtaaacagacagtgcacagagggggagaaaatcttcacaatctatacatctgacaaaggactaatatccagaatctacaacgaactcaaacaaatcagtaagaaaaagacaatcccatcaaaaagtgggaaaaggacatcaatagacaattttaaaagaagatagacaaatggccaacaaacatatgaaaagatgctcaacatcactgatgatccaggatatgcaaatcaaaaccacaatgcaatcctaccttacttctgtaagaatggccataatcaaagaatcaaaaaacagtagatgctggcatggatgtggtg

SEQ ID NO: 257863 - DNA, 561 bp, Homo sapiens
tgaaactggatcctcatttctcaccttacacaaaaatcaactcagatggattaaggacttaaacctaagatctgaaactataaaaattctagaagatgacattggaaaaacccttctagacattggctgaggcaaggatttcatgaccaaaaacccaaaagcaattgcagtaaaaacaaagataaatagctgggacctaattaaactaaagagcttttgcatggcaaaaggaacagtcagcagagtaaayagacagtgcacagagggggagaaaatcttcacaatctatacatctgacaaaggactaatatccagaatctacaacgaactcaaacaaatcagtaagaaaaagacaatcccatcaaaaagtgggaaaaggacatcaatagacaattttaaaagaagatagacaaatggccaacaaacatatgaaaagatgctcaacatcactgatgatccaggatatgcaaatcaaaaccacaatgcaatcctaccttacttctgtaagaatggccataatcaaagaatcaaaaaacagtagatgctggcatggatgtggtg

SEQ ID NO: 257864 - DNA, 558 bp, Homo sapiens
aagacaaccccaagcattttgcccaagcaaatgaaagaatgtagttgccaggccttagataaaagctagcttaggttttgcacttagcccttctaagaattcctcagaaaaaaatggactacagttgaatttatagtccaaggaatgctggttctccattaaagtcataatattgttacttataattagtctcctctaagaaacaaatttattaacatatattctttccaggaatccctattatgtgctcctgcttatacagcacttcattgtcttctacatgcaagcagtgagtaaaaatgtgctccctcttaaccatggaagtttaacatsggcatcatcacgcagattttcattactacaaatctgtaacagctgccactgtgctttatttctgtatttttactggttaccaacattatggaccattatcttactactccaaacaattactaataacgccctttcacttgcactgcatcctaacttctgcacattacagtggttcaacaactgtgcaagaaaattcccattagccttattacttccaacaactga

SEQ ID NO: 257865 - DNA, 615 bp, Homo sapiens
aagttaaacccacgctggtttccagaagtcagctacaaaaaatgaacctctaggaccagatggttttatggctttggtaaacaatagatttgcataatgcttcctcaataattctgtcaggaagagtgctgagctaaaaaacaacgtgcaattgtgccttttttgaaagaccagctctctaaatggccaactggtaattaggagaatctaatgctgagaaggacagagtatataaaggactattatcttgamtaagtaattgtaaatgccagtatatttggtagtattaggtctccactggtggccacattatacactgattatcaaaggggaatgaaggcgtctctgattttgggcaccacctccctaaagtttctttgtttgttctgctttgtagcttcctttgacttttgtttctaaggcttgcggggggctgccatttggtttctcttcaagaattaacaaaccacttactcttgaattctcttctagttaacacaggcatcactacttccaattgatctcaggatgtgggatcctcatacacattttgaacaaaatcctctgtttcagcaagtgagtgagaaacctcttctaattcatttaaccaactaa

SEQ ID NO: 257866 - DNA, 423 bp, Homo sapiens
agatagtacaccatgaagtctcaaaacatacaacttaacctggcataagcttaaagcttcacacrttctctgtttttttatttactgaccttttatgtcagatcacctttcttaaaatcctggactcgggataaggcctttctttgtgttagctatcaagagtcttaattttaaagccaagacttgtcgagctccctcagtgttgagccaaacttgtcaaggtcaccccatgtagccggtttttcctggtaccttcttgtacgatctttccctagattttatcagtggccttgcaattaaatgtagattgcaaagcagtaacagcagcagtgctcaggagcgtctaaaaagtctacaatctttagtcccacctgtggcctatcattcttacacaaatcacgtttgagaagcagtacttcccga

SEQ ID NO: 257867 - DNA, 544 bp, Homo sapiens
cactttttaatgggattttttgttcttgctgatttctttgagttccttgtagattctggatattagtcctttgttggatgcagagtttgcaaatattttctcccattctgtgggttgtatgtttactctattggttatttcttttgctgtgcagaagtttttttagtttaattaggattcatttatttatttattttgttgtttatgcttttggggtcttagtcatatattctttgcctatgccaaygtcccaaaaagtttttcctattttctcctagaatttgtatggcttcagatcttatatttaattctctgagccatcttcagttgatttttgtatatgataagagataggaatccagtcccattcttctacatgtggctatccagtttgcccaacaccatttattgaatagggtgttatttccccatttttatcttttcatgttttgttatagatcaattgattgtaagtgtttatggctttatttctgagttatctattctatttcattggtctgtgtacctacttttataccagcac

SEQ ID NO: 257868 - DNA, 544 bp, Homo sapiens
cactttttaatgggattttttgttcttgctgatttctttgagttccttgtagattctggatattagtcctttgttggatgcagagtttgcaaatattttctcccattctgtgggttgtatgtttactctattggttatttcttttgctgtgcagaagtttttttagtttaattaggattcatttatttatttattttgttgtttatgcttttggggtcttagtcatatattctttgcctatgccaacgtcccaaaaagtttttcctattttctcctagaatttgtatggcttcagatcttatatttaattctctgagccatcttcagttgatttttgtatatgataagagataggaatccagtcccattcttctacatgtggctatccagtttgcccaacaccatttattgaatagggtgttatttccccatttttatcttttcatgttttgttatagatcaattgattgtaagtgtttatggctttatttctgrgttatctattctatttcattggtctgtgtacctacttttataccagcac

SEQ ID NO: 257869 - DNA, 560 bp, Homo sapiens
ttctttttgactataggcttctgacctccctttgcttacagaatttaatttagaaaacctgtcattgcacattctttctcatccttttgaaatgtatgtaaaatctgccacccttttgacagttttaccacccaggactgtctttctcaagaacctggagccacccctttgaaatgtaaccaaggacaatagcacccytatctcctggtctctgtggagggtagcaatctacttgttgtcaagtagcaaacacagatggactaatcacacagaaaaacattcctgcaaactcaggaataactctatttacttgacacattccatttatcaccctccctcccaatatcctccagtacttttctactagctcagcccagctcttaaaacccccctgccttttgtttccgagaagttgagttcaatctctctctcctattgcaatagtcttgacgaaagtcttccttacttgtttaactttgtcctgtgcaattttttattgacaggaccatgttccctgggagactgtgagaacttttcaaacccaaataagcaccaagcat

SEQ ID NO: 257870 - DNA, 445 bp, Homo sapiens
ttgccgactccgggagcaccgcctgtgagttatccctgccctgtaaagagcagtaccattcgataaaagattacaatctaataccacgggcttgcccttgaattctttcctgggcaaagccaagaaccctctcaggctaagcccaagttttgggactagtctgccttgcatcaatctggttctgtctgaagcaaacagtaggtatccactccctgaatccttaraagttttgtatccctcctttacactaggcaaagaagttgtgtgattatgactaggtgtctaggtcacagctttagagggctagggtttaactaacatgttatgggctgataattctcagactacacactcagcactcagccttgatcttctcaaatgcttgctgcacatctccacctggatgcatctgtgcagattttttatattgtccagaaataaattc

SEQ ID NO: 257871 - DNA, 605 bp, Homo sapiens
ggactagtctgccttgcatcaatctggttctgtctgaagcaaacagtaggtatccactccctgaatccttagaagttttgtatccctcctttacactaggcaaagaagttgtgtgattatgactaggtgtctaggtcacagctttagagggctagggtttaactaacatgttatgggctgataattctcagactacacactcagcactcagccttgatcttctcaaatgcttgctgcacatctccacctggatgcatctgtgcagattttttatattgtccagaaataaattcaaaccaaagcatgcttctcagcctacatttcgtccagctttcaggaaaaataccgtacattcaggtaccccaagcaaaaacatctcaattttgttcttgaatttttctcctccataatatatatccaatcacttaagtcctcctaaatctttcttagtttgaygcccactgttttatctatacaccaatactttttagctttggtccttggaatctctcacttgcactattgcaaatctttgctactccgaaacctcaactttaatgtatatctgtgaccatgtccttttccttcatcacactgtaaatttt

SEQ ID NO: 257872 - DNA, 533 bp, Homo sapiens
ggctgaaactggaggtcattattttaagtaaaataaaccagcacgtaaagacaaatatcccacttatatgtgggaacaaaaaaagttggtctcatggaggtagaaagtagaatgataaataccagaggctgggaaaggtatgtgtgtgrgaggaagggatgaatagaggttggctaatagctacaaacttatagttagttagaagaaataagttctaatgttccatagtaaagtaaagtgactacagttagcaacaacatactgtatatttcaaactacctggaagagaagacttaaaatgttctcaacacatagaaatgataaacactcaaagtgacagacaccataaataccttgagttgatcattacacattctatgcatttaataaaaaattataggcgccccaaaaatatgtgaaatagtatatatgaattgttttaaaaacttaggggaactcaagtgtccaacatacacacacacaacatgaaattctattgtgtgaatactgtaaagtaaataatctacttataa

SEQ ID NO: 257873 - DNA, 570 bp, Homo sapiens
gagatatttcatagattttgtgtaatatattcatctaacattcctatatagctaagtcttcagattccttcctgtatggtgccaggaaagttctagcactttatcttattaacttggttatctttccatcccaggcttcaatgacccaagctatcggaatatttagatgactctctgaggcttaaacacacatattaaatcctaataccttatgaatttacctttattgatgaagatttgacccaactgagcatatttccttgytcttggtttatcatctttcaaacatactcctactcatatgaccaatgcccctgacaatacagatattgaaatcttgtgacaattgatttaagaccccctccttgcaaagcaagattttaacttcttatggctatgttggtatgtaattaatgaggacacaaaggtaataagaaatcagggtggatgttcaaaagatcttcatcagctcctgagacaattgcctgtcatgtaataactgaatactttaactaaaggagggctgatagagggacaaggctccctcaccaacaaggggattttacaggt

SEQ ID NO: 257874 - DNA, 523 bp, Homo sapiens
ctgtgcacagagagttatttgttcttccctcccctccgctgatgtactcatagtacatgtaaatggattgccctctcctctgagaaaatgtggaaatatttagaaaataattatttttagtattctaaatggaggtttaaagattaaaaatgctgaaactattgcttacagtaagactgtgaagtaactgtgaatttcattaaaccatgttatacctagccttgagctattccaatcttcacaccttttcctcactaccttctctcctataagagtaactcttaaatataacatttatatactttcattgggatagaagatgtactccatgarcaaaatttaaatgtgtagttgcaacaaatatatatacagatagtacgtgtgtgtgtgtgtgtgtgtgtgtgtgtgtggtgtatatgtgtatgtatgtgcataggtttaggcagaattgcaggaattacatcattctcttatttgataagcaattctggacacgtggggatctagcaataaacaagacaga

SEQ ID NO: 257875 - DNA, 591 bp, Homo sapiens
acattcctagccatagcaatttggggaagagttgaggaaaacagggtattcatctatcctttcctgtatctctcatgtcgaaaagggagctaatggaagttgttatttttgaccatcactaagtaaacatggtttaatatttcaaagaggtcttacgtctgagatgttaaaataaaatatctattaatcaaggcagtatattatgaggtcaatttcaagaaacagtttcccaataaaggtttaccaagtaaatctttaaataagttttcaggacacagcatgctttgagcttttccagttaattaaatataactaattttcccagtagaggattttaagtcagttaaagctaccttcggaaatattataggaaaagattgtattatattaatttatttgaagtattaaaaattrtagatagcgcatgatttaaatggaatcctcttctcagaatgttaaccactataatgtctagagactacacacttacagtactctcaggacaaactctgaaaaatagaccataaatcccacagggtggatataccaagttgcatataaagcaaaccaagcccttaagacaggaaacag

SEQ ID NO: 257876 - DNA, 592 bp, Homo sapiens
atggtggcgggcatctgtaatcccagctactcaggaggctgaggtaggagaataacttaataacttcaacctggggggcagaggttgcagtgagcagagatcctactattgcacttcagccagggcgacagaggagactctgtctcagaaaaaaaaaaaaaaaaaaaaagaaaagaaaaattaatgattaacatatatatttgagaagtgaaacaaattgccaacaaaataaatacaagtgaatctacaccaagtcacatcatagtaatactgctgaaaaacaaagacaaagaaaaaagaccaaaatcagcctgagggaaagcaaaaacacagtacattgaaagggcaagagtgagagtgacatatgacttctccataaaaactctcaaagcaagaaggcaaacraatgggatcttaacagagctgaaggaaaacaactactagaaaagtattgttatacttagtgaatatattctttaaaaataaggtaaaataaagatttttcagacaaaggctgagaaagtttatctcagcagacttccactataagaaaaagataaaagggaagatttcatcaggcaggagaaaattt

SEQ ID NO: 257877 - DNA, 556 bp, Homo sapiens
aaatgcagtataaagtttagattattgcactagtatcagaattagagtgtaatgggttaaagatgaatattatagtctctagtgtaacaattaaagagtagttaaaatatggatttctaacaagttacttgtagaacttgataagaatgaatgayaaaattatccaatctattcaaaagaaagcagcagtcaaagaagatagaacagcatacagatggaccaaatacaaaaagttatatagtggtagattaaaaccacccatatcagtaattatattaactataaatggactaaactctccaagaaaaagattaaattattgcattagatttaatgaaaaagtgctgctacttgaaagagacaaacattaaataaaaggatgtacaaggtttgaaagaaggatggaaattgatataccatgtaattacaaactaaaagctgggggggccatattaacctcaggaacactagattttaaaaaagaaatattgctgaagataattaaacataagacataccataatggtaatgggaatgatccaatagtaatgtatca

SEQ ID NO: 257878 - DNA, 526 bp, Homo sapiens
actgggcaagatactacataaaaaccctactaactttaatattctatacagctaaattttctagttttatgtcagaacactgtttatcttataatcctattcagtctaaaccatctgattcctyagtgctggctcctttttgtgaaccctacccattatttgattacaaactacatacacatggagacttcctcgatagtgactcaagggtctctttcaggaaatggaaacagcactaaggcagtttgctgctcacccagagcaccagtcctcagacagcacattcctggtgtttatgtcacatagcatcctgaatggaatctgtgggaccaagcactgggatcaagagccagatgttcttcacgatgacaccatctttgaaattttcaacaaccgtaactgccagagtctgaaagacaaacccaaggtcatcatcatgcaagcctgccgaggcagtgagtccccaattagaaagctgtaaatcttgattttgagaccccagggagtggctgtgcacttttaaaaa

SEQ ID NO: 257879 - DNA, 346 bp, Homo sapiens
gaatgtaatgaatttcaaaatttctcatatactggacatttcttgaaataaaggcagccattaagttctgataagacaaataggtcaaatacaaggccmaattagactcaaattcaataccaaaatcctttctcacatactctagttataccttattagaatatattagttttaggaaatttaaatctgatgccttaagcatattctacccaaattttctcagggttgttttatttgtattgcaacttcggcattattcattttaggtatccaaaaggatggatcagagtaattcacagcattagacttgcatgctaaataagtttatgcatttttctcacacaaa

SEQ ID NO: 257880 - DNA, 603 bp, Homo sapiens
gagaactggctaaaatgcacatcctcttacatttctttcttatgtgccaggccaaacttttgagggtacttgttgaatttcactctggttcactgcaccttagcaccttagagtacttccactgtcactttgcggaaagattgctggatggttgaaacatggtgatttaggacatgaaggctgctgcccaggtgacctgggtttaaatgcaagaagttactcaacctccctatgctccacttaaaaaagaatctgtaaaataaaaggtaatagtaacaatatccacctcacagtgttgttgtgacaattaacgaagctaataacttttagaaaggttgaaacaatgccgagaatatagtaatcattatctctattagctatagttcaagggctgtagcccaagtaaaggtaagccattttctggtgatgcagagtgagctggccttgaaggccaataaaatatatgtgagtacaccctgcacactgaaggatcaggtaaagagatcaaaagaattgccagaccacactcataggttatctgatttttggaatggactctaagcctagggctggattgcttstagagatgtctgccagtaacat

SEQ ID NO: 257881 - DNA, 576 bp, Homo sapiens
acagtgccaaactttttatcaacattgtaaatttgcacaaaactgcatttttcattattactttaagaagtttgtcaaaataccttattygccatagtttttttagacgtgtttcaccatggtgcttcttaacaccttggagtcaacctcctaaagaatcacattcacctttcatttgtctcttcgtggtctcttctggctcatttaatggccagaaaatttgttggtaccattagttttacttctgattgttttattactataatcaacacatggtcatgacctttatttttcatgccatatgttgtgtttttctgtttctttagttcttgctcatcacagctgcaaagtgaatacaaacatgctgaccaatatattactatcacagagtagcattttctgatgttctgactttctgcgtctgattttcactgtcaccagagtagtagctttagatataaaaatattttcatagtttaattaaaaccaaggtcaaaatatgaagtgtaaaagaatgccaaatgcagtaaaatattattaaaaatgcaatagtatatcagcaaacagaaagggcac

SEQ ID NO: 257882 - DNA, 576 bp, Homo sapiens
acagtgccaaactttttatcaacattgtaaatttgcacaaaactgcatttttcattattactttaagaagtttgtcaaaataccttatttgccatagtttttttagacgtgtttcaccatggtgcttcttaacaccttggagtcaacctcctaaagaatcacattcacctttcatttgtctcttcgtggtctcttctggctcatttaatggccagaaaatttgttggtaccattagttttacttctgattgttttattactataatcaacacatggtcatgacctttatttttcatgccatatgttgtgtttttctgtttctttagttcttgctcatcacagctgcaaagtgaatacaaacatgctgaccaatatattactatcacagagtagcattttctgatgttctgactttctgcktctgattttcactgtcaccagagtagtagctttagatataaaaatattttcatagtttaattaaaaccaaggtcaaaatatgaagtgtaaaagaatgccaaatgcagtaaaatattattaaaaatgcaatagtatatcagcaaacagaaagggcac

SEQ ID NO: 257883 - DNA, 660 bp, Homo sapiens
ttttcactgtcaccagagtagtagctttagatataaaaatattttcatagtttaattaaaaccaaggtcaaaatatgaagtgtaaaagaatgccaaatgcagtaaaatattattaaaaatgcaatagtatatcagcaaacagaaagggcacctgtgactgttggaagcacacatataaaaattgtgactctgtgcagattagatttttttagtcaaattaatgttggcataaaaattgtctttaaaaatattttcagagattatcagattttgaaattataaatgcagaatatgaacccacataaacaaaatattagtaaaaattaaatattcatcattagagtcttgattaaatgaatygtggaacatgttctatggtgtaatactatgtagctctcaaaaagaatgagaaaactatattttcatatcaaaatatccctaagatttattaagtgtgactagcaagatgctaaataatatttgtagtctgtctctatttctgtagagaagggaaataattataagaaaacagaaagtgatgtatgagagagggtggaagagaagcttttcactctatggttttaatttggtagttttgcgacttaactatgtacagctttacataatgctgctaattctacttaggcaattaaacacttg

SEQ ID NO: 257884 - DNA, 572 bp, Homo sapiens
tagccactgtagccatccaatttaggggaagcctccactaacaaataaaccaataaccattgccttctggcataggttaattccagtgctttattagaacatcatcattgccatttacagcagaagactaacagaatacctttgttttatcagtggggaagtgggagaaaggagaatctaggatggaatatggctttcatgtaactgagattttgtaagtttgagcacttccacttctaaggtgcataggctttaggctcttattcccaaaagtacatggcagacacagacattctcccaatgtcctagtagtgtcaggagctgagttgcaattaggatgaatcatttaaactattctgttgttagttgttagactggtaggtcaaagaaagttcattgacagagtttagctagcattttcaaaggatttgacagtgtctccagtggtggcctgctgaatgtgattgaaatatgtgagctctatagcactayatttaggtagatctataactatttaaatatttctaggaaataattgattaatggatccttgttgaaaagaaagaaggcta

SEQ ID NO: 257885 - DNA, 543 bp, Homo sapiens
ataatgaagaggaatctaagatctagacagatgcattgactattaagagtctattaaaagtcaagttggagactagtggaagcttggcaaaagcagtgctcctcacattttaatatgtatatgagtcacctggaggacttgttaaatgaagtcaattaaaaatgcagactctgtttcagtccctcagagaagagcctgagattctgcatttctattgagtgcccaggtgatgctgtgctgctggtccctggtgcatactcttgtaggacagtcttctggatgaccttggaccaatccagctctaccctattcttgcaggtagtccttcagaataactctagaatgttctgggaatkaaacatgctgagatagggaagggctgactagaaaaactctgacttgtttccagccccgcttagaagcaggatgtccttcaacattttaacccagcatgtcttattgctcccagggtataaaacccaaagagttgagctgcttttcagagtccctgagctgtggtgcagttgggacatgcacagacca

SEQ ID NO: 257886 - DNA, 479 bp, Homo sapiens
ctggtcattatgtccttgtgtattttttaagtgaatacatgattgagaaagaagaatacattagtttagacaacataaattgacaatttatgtcctgattccaaaaaaaggagagaaatgcttatggctagagatgtgctatagatccattggtgtttcttcccactttttacccgggactaagatttctctgcaagggcatactaccttccagtgaaaattccgttctaacatgacacatgccacagagagtaaaaacctttgattatgcctattttgagcatctatagcagctattttattcaatattaagccccacagtcaatcatgtatactaaaagtgaagcctatgkaactcattgagatacagtgagaaccaacgcattgtaagctaccagagcaactaaacaactaaatgactgtcatttttgtatggctctatgacatgaaatttatattttactttaatatagaggcaa

SEQ ID NO: 257887 - DNA, 588 bp, Homo sapiens
ccacctccacactcaataaaaccttgcactcatcctccaagcccacctgtattccgattcttctggttcactgggcaagaacccaggctgtcacactggccccctgtccttgcaataaggcagagcatctattgagctgattracgccagccatctgcagatggcaaagctgaaagagcacactgtaacacacgcccacttgggcttcaggagtagtcctagatactgctgtggggtcggagcccaaaagctctctccagggcctcagcacctgcccatcttcatgcttcccctaggggtttaggcagtggggcacctaaggagcaagccatatccctgtcacacaccctgcgagggggacgggaactctcccgtttcaatggtaagcatggtccccagtgatagaaggatactttcagtgctaatcacaagaatgaattgtctttccacatatcacaaaaagattattaaaaattattgtattgagtaatttgccctacctaattaaattttctattgtccttgcttcgctatgtttaacctgaaacttaagccaaaatatacagtttattggaaaatcttgatcct

SEQ ID NO: 257888 - DNA, 588 bp, Homo sapiens
ccacctccacactcaataaaaccttgcactcatcctccaagcccacctgtattccgattcttctggttcactgggcaagaacccaggctgtcacactggccccctgtccttgcaataaggcagagcatctattgagctgattaacgccagccatctgcagatggcaaagctgaaagagcacactgtaacacacgcccacttgggcttcaggagtagtcctagatactgctgtggggtcggagcccaaaagctctcyccagggcctcagcacctgcccatcttcatgcttcccctaggggtttaggcagtggggcacctaaggagcaagccatatccctgtcacacaccctgcgagggggacgggaactctcccgtttcaatggtaagcatggtccccagtgatagaaggatactttcagtgctaatcacaagaatgaattgtctttccacatatcacaaaaagattattaaaaattattgtattgagtaatttgccctacctaattaaattttctattgtccttgcttcgctatgtttaacctgaaacttaagccaaaatatacagtttattggaaaatcttgatcct

SEQ ID NO: 257889 - DNA, 588 bp, Homo sapiens
ccacctccacactcaataaaaccttgcactcatcctccaagcccacctgtattccgattcttctggttcactgggcaagaacccaggctgtcacactggccccctgtccttgcaataaggcagagcatctattgagctgattaacgccagccatctgcagatggcaaagctgaaagagcacactgtaacacacgcccacttgggcttcaggagtagtcctagatactgctgtggggtcggagcccaaaagctctctccagggcctcagcacctgcccatcttcatgcttcccctaggggtttaggcagtggggcacctaaggagcaagscatatccctgtcacacaccctgcgagggggacgggaactctcccgtttcaatggtaagcatggtccccagtgatagaaggatactttcagtgctaatcacaagaatgaattgtctttccacatatcacaaaaagattattaaaaattattgtattgagtaatttgccctacctaattaaattttctattgtccttgcttcgctatgtttaacctgaaacttaagccaaaatatacagtttattggaaaatcttgatcct

SEQ ID NO: 257890 - DNA, 588 bp, Homo sapiens
ccacctccacactcaataaaaccttgcactcatcctccaagcccacctgtattccgattcttctggttcactgggcaagaacccaggctgtcacactggccccctgtccttgcaataaggcagagcatctattgagctgattaacgccagccatctgcagatggcaaagctgaaagagcacactgtaacacacgcccacttgggcttcaggagtagtcctagatactgctgtggggtcggagcccaaaagctctctccagggcctcagcacctgcccatcttcatgcttcccctaggggtttaggcagtggggcacctaaggagcaagccatatccctgtcacacaccctgcgagggggacrggaactctcccgtttcaatggtaagcatggtccccagtgatagaaggatactttcagtgctaatcacaagaatgaattgtctttccacatatcacaaaaagattattaaaaattattgtattgagtaatttgccctacctaattaaattttctattgtccttgcttcgctatgtttaacctgaaacttaagccaaaatatacagtttattggaaaatcttgatcct

SEQ ID NO: 257891 - DNA, 629 bp, Homo sapiens
tgtgacaataaataagtaattatagtatcaggtggaaataagatttttaaaggaaaaaaaacagtagtgttagggaataaagagtattgggtatgttttaaatcatatgtcagggaagggaccttgacagaggtggcatttcaacraagcccttgaataagtaagggagcactgcaggtatttggtaggagacttgcctgggcagagggaagagtccttgcctgggcagcacttaacattatgtgttgaataaagttaatctaaaataaccccaactagatgcattagcattatctacatgcttagaaaactgctttcatcctggagtaaaaatgccccgaagaataaaacactatacattaaaggcaaagaagatcttaaaaagaacttagtccaaccacctcaatttgccactgagaaaactaggttatgaaaaacaaaactattggcagaactgggctggaactagaaattaggccctttcaacctcagattgtttattatttttctgtgatctctgctggtgcataagaaaaggtctcaggagctgtcttggcatactatctagtttagtaccaagtacagtgagctgcatgatatatgaaccttgttcaaaatgacatgacaat

SEQ ID NO: 257892 - DNA, 584 bp, Homo sapiens
aagcttgaggtaggtagggaaatttttacaaagggaacayataaagcacttcttataaatgtaatttaatgaattagaatacattaaaattaaaaattctctgtaaattcaaactaagagttaaatggtaatccgtgaagtagacaaaataattctaacacaataattaacaaagggcctgtatcctaaatatagaaaagtgtctaaaaatcagtacagaaaatacagaaaatccaataacatgtcaatggaacagacatgttacaaaacagcatatctacatggcaagtaaatatgtgaagagataatctcattggtaatcaaaagaatgttgattaaaattgtaatagaatgtcattaaaactccagtaaatgaataaaagtaaatagacaaacaatatggagaggcaagaggtggagcagccagaatccttatgctctgctgctccaaggtagaactggcacagtgactttcaaaaacgttttaaccagtatttactaaagctgaaggtgtatgagcttcattatgattcagcaattctacttctgggtatacacccagcaaaaacaactgatgatacata

SEQ ID NO: 257893 - DNA, 608 bp, Homo sapiens
atgtcaatggaacagacatgttacaaaacagcatatctacatggcaagtaaatatgtgaagagataatctcattggtaatcaaaagaatgttgattaaaattgtaatagaatgtcattaaaactccagtaaatgaataaaagtaaatagacaaacaatatggagaggcaagaggtggagcagccagaatccttatgctctgctgctccaaggtagaactggcacagtgactttcaaaaacgttttaaccagtatttactaaagctgaaggtgtatgagcttcattatgattcagcaattctacttctgggtatacacccagcaaaaacaactgatgatacatagatgatrgatagatagatagatagatagatagatagatagatagatagatagatagatagggaagttggcattatcttttaaaatcacagttatatataccctttgacacagaaattttatctctagtcattccaaagtttactagtttgtatgtgaaaggattatccactgctgttttcttaaacaggttcaaaatcccttatctgaacctttggaataaatgtgttatcaaatagagattttgtgtttatttttaggaggata

SEQ ID NO: 257894 - DNA, 510 bp, Homo sapiens
gaacatcttcttttctgtacttttcttcagacagggaagatcagtgaagtaataagaaatacacatattggtctstaaccccagtccctagcacagaactcctaaaactattgcaattttctgagcaatagaggtgctaaaagaatcttttgttctaatgtttagtctctgccctgattcctgagacaaagctcctagtaacattgtagataaaggtggtaggttaattgtttgttctaatatttggtctttgatgtagggtcttggcacagaggtcctaaatccttttgaatttcctgggtaatagaagtatctttggttgtaatgaggtgacttggtgggttttaggatggggctggtcaccagaaagactaaaccgtggttatatgcttggagctctcatccccaccccccattcctcaaagagaagagaagggctgcaaatggagtttataatcagtcatggctacatgatgaagcctccctaaaaatctttgaactatggggttc

SEQ ID NO: 257895 - DNA, 510 bp, Homo sapiens
gaacatcttcttttctgtacttttcttcagacagggaagatcagtgaagtaataagaaatacacatattggtctctaaccccagtccctagcacagaactcctaaaactattgcaattttctgagcaatagaggtgctaaaagaatcttttgttctaatgtttagtctctgccctgattcctgagacaaagctcctagtaacattgtagataaaggtggtaggttaattgtttgttctaatatttggtctttgatgtasggtcttggcacagaggtcctaaatccttttgaatttcctgggtaatagaagtatctttggttgtaatgaggtgacttggtgggttttaggatggggctggtcaccagaaagactaaaccgtggttatatgcttggagctctcatccccaccccccattcctcaaagagaagagaagggctgcaaatggagtttataatcagtcatggctacatgatgaagcctccctaaaaatctttgaactatggggttc

SEQ ID NO: 257896 - DNA, 516 bp, Homo sapiens
ctatcctgtgggttttgcctatatctcacatgcttattttccagcatattgttgtccatgtttagcacttcttatgaattccatccatcctatttgttttttaatcttctatagcagaactgaatattctcaacagtacagcaaaatcccattacataatgccattagccaatccmtctaatttgattactgttataatcacaaaatttgttcattgtattccccaatatttttccagaccaaaaaaagagagcttgcattttttaaaggaattaagagacatttgtcatacttcaattgagagatgatttttgccttagcctgggcctaccacaccagatgtggaaaaatggatgaaactgagagaaaattagcagaactaggtgactgattttatgtgggatttgcaggagaaaaagatatcaaggataactccaagttttttggttctgtataagtatcactcactaagaagtgtgggaagaatgaaggaagagttaattgaggagtagaaag

SEQ ID NO: 257897 - DNA, 637 bp, Homo sapiens
gaaaccaatccaattctcatattagtaaatatctttaattatttaattcccaatattttagtaaatgtggtaataattaagtaggtcattttaatattaattccatttactcagagaactgtatgagatattgagggttagggaaaagaataagaaatgacaggtctcatcacataacatgaaatttaatggatttgtttatgaaactacatgaaatttaaggtaaacataaaattttataagtgaaggttgtatgttaacaccatggggcagttttttatttgtttgtttagtttttaaaaaatgctttattttcttctatgtgttcagtacctggcatttagcagtcactcaatacatgtttgtttaatcagtgaggtttcacgttggaaacagttaactgtatccatttagattcttaaaagactatttggtaaaagttttattttccacatgtcttataaaattaaattatactcccaaataaaatgtgaaggctggtcaataatacagaaaaaggagccrtgctcttacaaatatcacataaggacaagacactaaacattagtaaggatgtactatgtgactttcaatgataattgtagaaagcaacaggagtttttgaatattgcatgcc

SEQ ID NO: 257898 - DNA, 582 bp, Homo sapiens
ctttcctaaaactataagcatttattagggtaaacgatcccccttttattctcatctgcacagaacctaccaaattatataaaatagaatttgtgctcagaaatacttagggaatggaataaattctcaaataaagcrtatgttcccaaaatgtatatggattcatcatgttaaatataccagagattaggctagatgggaaagaaatcacatcatttatagataagaatttaaatatcttttaggattcaagttcaaagtgttttattgtcatggcaaaagagtaaatgaccatgattagatgcatttactccattatattttcaagagtgttaaacattaatcagaacttccaaataatcatgtttctctcccttctatttaattgtgaacaaactaagaagtccacaccctattcagatagttagaaataagcaaaactcctttaccattaagttggtgtcctaagattattgtgaatatcttttgcctgaaagtgaggcactctcccataatagcacccttcccctggctgcattcacagaccctaatgtggtaaaattatttcatagcagagaagag

SEQ ID NO: 257899 - DNA, 527 bp, Homo sapiens
tctgtaagtttgactttttttagttccacatatgagtgagatcatgcagtatttgctttttgagcctggcttacttcacctaacaaaaatgttctccaggtacatccatgctgtcacaaatgacaagatttccttgtgtttaagacttctttgtgtttaagattaagcatgtaaagcatggtattctgttgtgttatatatatatacacacacacatatatatgcacacatatatayacacacacacacacacacacacacacagcctatatacaaagggtcatttaactggccaaaaaaaggcacttttgacactcagtgtacattgacccaggtttctgtatacatacatacacatttacacacatgtatatatcttagccattctaacagttgcaaagtaatatctcattgtggttttaatttgcatttccctaattagtaaggccgagcattttttcatacaccagttgtccatttgtatgtcttcttttgaaaaatgtctattctgctcctttgcccatttt

SEQ ID NO: 257900 - DNA, 527 bp, Homo sapiens
tctgtaagtttgactttttttagttccacatatgagtgagatcatgcagtatttgctttttgagcctggcttacttcacctaacaaaaatgttctccaggtacatccatgctgtcacaaatgacaagatttccttgtgtttaagacttctttgtgtttaagattaagcatgtaaagcatggtattctgttgtgttatatatatatacacacacacatatatatgcacacatatatacacacacacacacacacacacacacacagcctatatacaaagggtcatttaactggccaamaaaaggcacttttgacactcagtgtacattgacccaggtttctgtatacatacatacacatttacacacatgtatatatcttagccattctaacagttgcaaagtaatatctcattgtggttttaatttgcatttccctaattagtaaggccgagcattttttcatacaccagttgtccatttgtatgtcttcttttgaaaaatgtctattctgctcctttgcccatttt

SEQ ID NO: 257901 - DNA, 458 bp, Homo sapiens
ggcttttgacaaattaaatcagagaatatgtcagactaattttcaaacagaaaactgcatagggttgactgaaagagaattgttagagcaaaagagatggaagaagaattacaatgaggtgctaaaagctgatgaaacaaggtcgttgttgttactgtctatgcaatrcatgtaaatccccccttcccattttaatgaattacaatccacacatcatgtaaaccaatcctttcactaaagagtgaaaagtttatttatatgtgacataagctttcctcgcactctgtgtcctaaccaaatcaggtgtttgaggaattagttacagaaacagcctcaaaatcatggaaggacattcagaaaaatgttatccaatctggtaggaaatgagttttgaaattaagagcatcgtgggaaatgtgtaattcagtcataggaacaggctaaaaaaggctattgaa

SEQ ID NO: 257902 - DNA, 361 bp, Homo sapiens
ctacacacttttaaacaaccaatcttgtgagaactcactcactgtcatgagaccagcatggggaaaatctgcccccatgatccaataacctcccactasgtccctcccctaacactgaggattacaattaacatgagatttggatggggacacagagccaaatcatatcactgacctaatgattaaggctgaatgtgctgcaaacttgggttagttttgtttctccccctcccttcttccctgattaactttataaagtttgaaggaccagtttcatattctttttctactgaaatatcttggcattcttgtggaaagttaattgaatgtaacaatttatttctggactctcaatttcatt

SEQ ID NO: 257903 - DNA, 604 bp, Homo sapiens
ctattaacagctacatacaccataatgtccaaaaacaaaatttgagaagtgaaaccactgcatttatgaagggctgagtgtacctatgcattgtctgcacagcctcccaactcgtgctagtactccactccgacatttacggggggatagaacgtgccctctgggagaaaacagcctgtctcctgtgtcaaaggcatgcacttaatgggagacctttcagttcctttatgtataaaaaccmttgagattcaccaaaacaaagaatgttctctcactaattagggcttatgttgccaacatttctgcaaagctggagatcgtgttttccccctaattagtggccttcagatgggtttgcagttggagcctctagaattgtgagaggatctggctgctccagtgctttgtgtctttctggaggcacgccacgagtcaagggtgccctggcatcttttttctcagagctgtgtggcttccatcgtggacacaaagtaaagtaaggcaaaaaaaattcttcagcatcttggagaatctacaaatgacagcttctaactgatcctgtttatcatcccccaaatgagttagcaacactgctagttaactg

SEQ ID NO: 257904 - DNA, 604 bp, Homo sapiens
ctattaacagctacatacaccataatgtccaaaaacaaaatttgagaagtgaaaccactgcatttatgaagggctgagtgtacctatgcattgtctgcacagcctcccaactcgtgctagtactccactccgacatttacggggggatagaacgtgccctctgggagaaaacagcctgtctcctgtgtcaaaggcatgcacttaatgggagacctttcagttcctttatgtataaaaaccattgagattcaccaaaacaaagaatgttctctcactaattagggcttatgttgccaacatttctgcaaagctggagatcgtgttttccccctaattagtggccttcagatgggtttgcagttggagcctctagaattgtgagaggatctggctgctccagtgctttgtgtctttctggaggcacgccacgagtcaagggtgccctggcakcttttttctcagagctgtgtggcttccatcgtggacacaaagtaaagtaaggcaaaaaaaattcttcagcatcttggagaatctacaaatgacagcttctaactgatcctgtttatcatcccccaaatgagttagcaacactgctagttaactg

SEQ ID NO: 257905 - DNA, 489 bp, Homo sapiens
tagctatccctgagaagtaaatgagaaacctgataagcaagaaggtaacagtaacttaaaacaatagccaagggctgggcacggtggctcatacctgtaatcccagaactttgggaggccgaggtgggcagatcacctgaggtggggagtttgagaccagcatgaccaacatagtgaaaccccgtctctactaaaaacataaaaattagctgggcagggtggtgggtgcctgcagtcccagctacgcaggagactgaggcaggaacattgtttgaagagctgagatcacaccagtgcactccaacctgggcgacagagtgagactccatcaaaaaaaacaaacaaacaaamaaaaaaaaactatagccaagaaagagtaaaaagatgtatgatttcctatagaaactaaagatagcatcttaacatatgttcctggattgctttttagaaaccccgagcccccaccaaatggatccactggcaggtaga

SEQ ID NO: 257906 - DNA, 500 bp, Homo sapiens
tgaaaaaaattgaagcccaggttgtttcactggtgtattgtaccaaaaatctaaagaagaattaacactaattctacaaactagctttgtgaattaaatagaaaataraagaggaattaacacatctcaattaaatttttaaagttagtattgctcagacaaaaagcaaagataatagaaaaggtgaaaactatagattaatacctctttataaatataaatacaaaaattatcaataagttattagcaaagaggattcagtaatatgtaagaattatatccacatgcaaaaaataaaaataaaattgggcccttgtaccacatataaaaattacctaaaagtagattaaaggcctaaaactatgaaattcctaaaagaaatcagaaagaaatttcatgacattggacttggcaatgatttcttggatatgagaccaaatgcacaaagaataaaagaaaaaaagacaaatgatagtacatcaaattttaaaagttttttg

SEQ ID NO: 257907 - DNA, 384 bp, Homo sapiens
tgtctgctctcaccatcctattctccataatgctgggagttctagtaagttcaacaatgcaagaataggaaatagaaagcatatagatcagaaggaagaaataatactttccctatttgcagatgacataaatgtctgcataaaaaattccaaggaatctaaaamaaaacctcctagaagaaataagtgaggtttgcagagtcacaggagataagatacatacaaagcagcaattacacttatatatcctagtaataaacacagggacaccacaatttaaaacacaataccatttataattgtcccaaaacacaatactttcctgtaaagctgacaaagcatgaacaggaattgtgcatttaaaactacataatactgatgaaa

SEQ ID NO: 257908 - DNA, 384 bp, Homo sapiens
tgtctgctctcaccatcctattctccataatgctgggagttctagtaagttcaacaatgcaagaataggaaatagaaagcatatagatcagaaggaagaaataatactttccctatttgcagatgacataaatgtctgcataaaaaattccaaggaatctaaaacaaaacctcctagaagaaataagtgaggtttgcagagtcacaggagataagatacatacaaagcagcaattrcacttatatatcctagtaataaacacagggacaccacaatttaaaacacaataccatttataattgtcccaaaacacaatactttcctgtaaagctgacaaagcatgaacaggaattgtgcatttaaaactacataatactgatgaaa

SEQ ID NO: 257909 - DNA, 640 bp, Homo sapiens
ccatttacagcattgtttctgtaggggaaattcacctcaagttccaaacaacctagataaaaagcaactttgggaatatgtgctgcatggaagctggaaatgctttactagtgatggtctacccactgtgggctctgttttgtagaggtcattttcagttcattctgctttagaaattttttctgttggtatgtctctatattatatagatagctatttgcctgtgtggttattaggagaagatgaaagtttaattcactgaaatctctccttccttcccttcctcctttcatcatccctcctttcccccttttcaccttcctcttccagcccttcatctccgctgtaggcaggcagtggagcgaaggccrcaggctccgtggagcctcaccccatcatgtctgactgctcagagccctccgtgttgttaggagcccaggacagtccctcctgaagcacatggactttcagaatgagttctctctgctaacaaggcttattctttcatcatcaaaatgttccttaaattatcccaggccaaagccttaaatataaagccagctggtgcaactttattataacacgtagtttgaatttaagcacctggatttgaaatgttggaaaataagtgtgattgggt

SEQ ID NO: 257910 - DNA, 640 bp, Homo sapiens
ccatttacagcattgtttctgtaggggaaattcacctcaagttccaaacaacctagataaaaagcaactttgggaatatgtgctgcatggaagctggaaatgctttactagtgatggtctacccactgtgggctctgttttgtagaggtcattttcagttcattctgctttagaaattttttctgttggtatgtctctatattatatagatagctatttgcctgtgtggttattaggagaagatgaaagtttaattcactgaaatctctccttccttcccttcctcctttcatcatccctcctttcccccttttcaccttcctcttccagcccttcatctccgctgtaggcaggcagtggagcgaaggccgcaggctccgtggagcctcaccccatcatgtctgactgctcagagccctccgtgttgttaggagcccaggacagtccctcctgaagcacatggactttcagaatgagttctctctgctaacaaggcttattctttcatcatcaaaatgttccttaaattatcccaggccaaagccttaaatataaagccagcyggtgcaactttattataacacgtagtttgaatttaagcacctggatttgaaatgttggaaaataagtgtgattgggt

SEQ ID NO: 257911 - DNA, 472 bp, Homo sapiens
tttttaaaaaaattatgtcacatgtgttttgactgtcaatagtgttaatagcaacagtaatgattactattagaactacttttcagtgttgtttgagaattaaaagaaaacgaatataaaatacaacagcacckaatacttaaaagaacttgataaacattagctattatgacacaagccctctctaatctcatcttcttccatttttttttactttatttattttgctctagtcaatttggacttttgtgtccttcaaacatttaggacttatttctatctttgcaaaggcctgagggtagaaataagcttactcattcttactcctctgcctaggatactcttcacttccatcatcacacggagtttgggttgttttctcatgtttaatgaggagagctttagagcgagtctgcaccacttactagctgtgcaaccttgcataaatcacttaacctttttatgcctcatg

SEQ ID NO: 257912 - DNA, 472 bp, Homo sapiens
tttttaaaaaaattatgtcacatgtgttttgactgtcaatagtgttaatagcaacagtaatgattactattagaactacttttcagtgttgtttgagaattaaaagaaaacgaatataaaatacaacagcacctaatacttaaaagaacttgataaacattagctattatgacacaagccctctctaatctcatcttcttccatttttttttactttatttattttgctctagtcaatttggacttttgtgtccttcaaacatttargacttatttctatctttgcaaaggcctgagggtagaaataagcttactcattcttactcctctgcctaggatactcttcacttccatcatcacacggagtttgggttgttttctcatgtttaatgaggagagctttagagcgagtctgcaccacttactagctgtgcaaccttgcataaatcacttaacctttttatgcctcatg

SEQ ID NO: 257913 - DNA, 332 bp, Homo sapiens
tgtaaggaaatgaccttttccagcccctatgaatcattttctgcttttgctgtttctgaaggattagtcccacatagtcagctgttattttttctatgttaataaatcattttcacttagagaatttaagttggaggctaaaacaggattaaataagccactctgatatcagttygtctttatagcttagaaagataagatgatgaatacaaattggtcaaaataccacaaaatatatcttcatattggaaccctttgtgccaggagcatcattacgactgagtaatggacaataaaggtactgccgggcccaagtgacagggcagaagtgt

SEQ ID NO: 257914 - DNA, 621 bp, Homo sapiens
tttgtagagaaaagggatatttgaatagtttcaaataacatctccccaaatatttcttaatcgcaaaggatcagatagtgcttgtgttcattttctgttgcaacataacaaatgaccatgcattttctagcttggcatcacatctgtgggccaggagtccaggaagggtgttctgctcagagtcttatgggttgaaatcaggaggaccacaagttgtgttcttatttgctgctcaggtttcacgytgctggcagaaccagttctggtgctgcagaatggaagacccgcatgttgcaggctgccacccagcaccttctcagctcctggttgctgttccccattccctgccacaggacctgcaacatgcagttgctccttcaggccagcaggagaatctcccccatgtccacttcccccacccattttgaggcatttcattagttcaggcccacccaggaggatctctctttgattaacccagaataaactgatcagggattctaattaaacctgtaaaatcccttcggcagtataacaacacaatcacaggaactctctgtttcattttttgcagactttatattaagtctaaaattattccagaataaaatgttttttaaa

SEQ ID NO: 257915 - DNA, 577 bp, Homo sapiens
ggactgatagcaacctaacacattaagctcccagggtggggaagggcagcagctatctctattgctccaggccacacttttcccctgctgaagccagggaggctggacggcttggtctccaagaggtgtcccccacagcccaacacaccagctgtggcagactgcggccagagcacctcttcaggcctgaccctgacacacccttcctcactgggtggggcttccctgcaggaactccaacaactccagccagaagctcagggacagaacccggatctccctrggcctgagcacttagagggaggggtggtcacagtctctgcagaccagcagacttagcctttcctcctggtagttctgaggaatcccagcagtccagatgagtgggttttccccccagcgaagcacaccccctccaccaagggaaagtcaaagtgcttcgttaaatgggtcatgttccctgtgccacccaactgggtgagaccctgtctgttgtcagacatcctatacaggagcattcctactggcatcaggtcagtgcccctcaaggtagaagatcccagaagaaggagcaggc

SEQ ID NO: 257916 - DNA, 600 bp, Homo sapiens
ccctcctcagagattggggtttcagttattatgtgtctggttgtatagactgtcttggaaattactktctgttttgtttatttgtttgtttgtttgtttgttttttgagtgtctagattttgtcagcgttttgtagtagattgaaatcttctaagggtgggggcatagaacctgtctctttcttgtgtctttcaataaagcccaatgcagttctgtgcatggtgcaaaatctttgttgaataaatgtgtttgaagaattaaaaatgtcagaaagctaagtatcattagtaccagagacctaaatggttatagatatcacttcatttaagaaatgtacataggagccatctaacttctgtgaggtaatttactgccaccaggaaactggatcacaggaaactggattacagagagtgcaatgacatctcttaagcctctaattccctctgtctctcttttcttaagtataaggatatgttctccttcttacagtcatgaggatctcatatcagatatgtgtcctcttagtacattaatcctgggcaaattagaattagaggaaacctagactggaaagagaaactaagtctggtgaatggc

SEQ ID NO: 257917 - DNA, 600 bp, Homo sapiens
ccctcctcagagattggggtttcagttattatgtgtctggttgtatagactgtcttggaaattactttctgttttgtttatttgtttgtttgtttgtttgttttttgagtgtctagattttgkcagcgttttgtagtagattgaaatcttctaagggtgggggcatagaacctgtctctttcttgtgtctttcaataaagcccaatgcagttctgtgcatggtgcaaaatctttgttgaataaatgtgtttgaagaattaaaaatgtcagaaagctaagtatcattagtaccagagacctaaatggttatagatatcacttcatttaagaaatgtacataggagccatctaacttctgtgaggtaatttactgccaccaggaaactggatcacaggaaactggattacagagagtgcaatgacatctcttaagcctctaattccctctgtctctcttttcttaagtataaggatatgttctccttcttacagtcatgaggatctcatatcagatatgtgtcctcttagtacattaatcctgggcaaattagaattagaggaaacctagactggaaagagaaactaagtctggtgaatggc

SEQ ID NO: 257918 - DNA, 600 bp, Homo sapiens
ccctcctcagagattggggtttcagttattatgtgtctggttgtatagactgtcttggaaattactttctgttttgtttatttgtttgtttgtttgtttgttttttgagtgtctagattttgtcagcgttttgtagtagattgaaatcttctaagggtgggggcatagaacctgtctctttcttgtgtctttcaataaagcccaatgcagttctgtgcatggtgcaaaatctttgttgaataaatgtgtttgaagaattaaaaatgtcrgaaagctaagtatcattagtaccagagacctaaatggttatagatatcacttcatttaagaaatgtacataggagccatctaacttctgtgaggtaatttactgccaccaggaaactggatcacaggaaactggattacagagagtgcaatgacatctcttaagcctctaattccctctgtctctcttttcttaagtataaggatatgttctccttcttacagtcatgaggatctcatatcagatatgtgtcctcttagtacattaatcctgggcaaattagaattagaggaaacctagactggaaagagaaactaagtctggtgaatggc

SEQ ID NO: 257919 - DNA, 595 bp, Homo sapiens
cctgggatcatgtgagattctcctgcctcagcctcccaaaattctaggattacaggcatgaaccactgtactcggcctgattctagaacttggttgtaagatgcatataatgtccttcattttaatttggaattaatatgatttggaagacacaaaggggccacagctccaaagagctcccctttggtcttgccacggggccayaggtgggagagagtcctgggtctgctgggcctcctgagcatcttcctccggtacaggccccaggcagatgcactcccgttttcttccctcctcccaccctgatcaccagaggtaggaacaggccttgcagtctatctttatcctcatcgctgctgcttgccaggcattctgttgtttgttttggtgttttccccacctgtttagacaaaatggcatatgcagagtgtgccttaaaagaaaacaaaaaattgacacttgcttgaaatgtttaaagttcaaagtctgttttgtgcttgaacaaggcctagaaataacatgatgtggcaccgccattcttgccgcctggtatcaggaagtctggcggccctctgggcggtgagaaccctgatgc

SEQ ID NO: 257920 - DNA, 547 bp, Homo sapiens
ttacttttgtaccaacctaataaaacatgaaaaagactgtagttgatgacttatgctttgggggaaaatgacttcaaataaggttttcaaagatggagatgccataattattgttacactgaatttatcctcaaaagtttatttaaaaatttttttctcactagaaagtattctacagtcatgtatctccacacctttccttgtcacaatttctgccccaggtattagcaagctcagtggagttggcaatccctctctcctttcattatgttattactttttcagcaggcacagacattccttggctagttgtctcagcaaatttatgcaccgagattccatccaaactcatttyaattatcctaaaccagagaccgtggtttctatttctttattggtcccaatgtgcctggaacatggctgggcccattaaatatttgtggaatgattgagtaacaattaaagaagattctggagaatctgcaacatatctatgaaaaactcaagaagtggtagattgtattaatagtatccagcgtttttccaa

SEQ ID NO: 257921 - DNA, 458 bp, Homo sapiens
aaagagtggaaatcaatagactatatatctattaaccagggcttttgacaaattaaatcagagaataygtcagactaattttcaaacagaaaactgcatagggttgactgaaagagaattgttagagcaaaagagatggaagaagaattacaatgaggtgctaaaagctgatgaaacaaggtcgttgttgttactgtctatgcaatgcatgtaaatccccccttcccattttaatgaattacaatccacacatcatgtaaaccaatcctttcactaaagagtgaaaagtttatttatatgtgacataagctttcctcgcactctgtgtcctaaccaaatcaggtgtttgaggaattagttacagaaacagcctcaaaatcatggaaggacattcagaaaaatgttatccaatctggtaggaaatgagttttgaaattaagagcatcgtgggaaatgtg

SEQ ID NO: 257922 - DNA, 557 bp, Homo sapiens
  misc_feature (1)...(557): n = A,T,C or G
ttcagtaagcagactgccaatgaaaaatttagcaagagtaataagaatcggacaaaattaggacagtgaagacagaaggaaagaaaaggagataagagaaaggatatagtctcatgtagattcatgttttaggcaagacaagacaggaaattaagcaaacttwgtttgacatatgcagcaaataaaaggagttttgaaatatcacactttacattgggatattcaacaagcagaacttttttttttgtgtgtgtgtgtctttttaaacgttgttttccaagaatgttgccagggactgcttggcctcgtggaggagatggcaaggcatcttggagcagacagactttgctctggaaatatcgacttgagacgcttctcgttatggttctattttttaaaaaacaacacacacaatatncctagggaagtatataacaaggcaatattttcatttgtcatggaatccttatttataacttgctttgtgaaatggtgtgtggctccaggagaagtggagattttaataaggaaatatttagtcttctaggaggaaaaag

SEQ ID NO: 257923 - DNA, 568 bp, Homo sapiens
agtagtaaaacaatgaagacttgattcctgttacatccaattttaaacatatttgatgtgccaggaaaattcctcagcaagctgggagtgccttgctccagatgtgataacagaatattttatcataatacaaataagtgtaaagccctgccctttacttgctctgaatttcaaagtttctttatggaatgttctgaattcctgatccctctctccrtgtgaaatgcttacctcagcttctttacacaggtcttgtcaaaggttaagatttttgactccgtttttggaactaaatcaaatgtaattataatctttattctgtttttgaaactaaatcaaatttaaaagtatcaatgtcttttaagagtctttctatgagtgtcacgcagagccttcttgcatgcttgtggtttacagggctgaaattgcttagaaggtggttctgaggattgttgacaagacagagaaatgtccagtgtctagatcttctctcttatccaaagccagataaaggaccactagaaggcagcttttcctgccagacttgcagcaggaaggtgtttagctc

SEQ ID NO: 257924 - DNA, 496 bp, Homo sapiens
attttgaaatgtggtagtgaacacatgggcttcttacaaactggtaattcccaaagctgtgtgcaaattttcctaactgaagttgctgtttcaggaaagagacaatatgaaatttatgaaaatataatctttttgaagtgtttaaagacttgtgaattakaatgttttgtcaagagttccaaagaaaattatacattactctgatgctgggacaccttaaaaagtcagaatataaattggtttgagtgatatgatatataaaaataggcatttcttcagcttaagctatagtcccacaaaaatgttttcctttataagaaagaacaaaagttataaagtacggaggagaaaaatgattaccagaattttcttgtcttaaatcaaatcaccaccagagagctataaaagtgtcttttgtgctttcccaagcattaataagaatgtttatgattggaaaaattcatttccaaatatttttatgtatttactttgccat

SEQ ID NO: 257925 - DNA, 654 bp, Homo sapiens
aaactggtaattcccaaagctgtgtgcaaattttcctaactgaagttgctgtttcaggaaagagacaatatgaaatttatgaaaatataatctttttgaagtgtttaaagacttgtgaattagaatgttttgtcaagagttccaaagaaaattatacattactctgatgctgggacaccttaaaaagtcagaatataaattggtttgagtgatatgatatataaaaataggcatttcttcagcttaagctatagtcccacaaaaatgttttcctttataagaaagaacaaaagttataaagtacggaggagaaaaatgattaccagaattttcttgtcttaaatcaaatcaccaccagagagctataaaagtgtcttttgtgctttcccaagcattaataagaatgtttatgattggaaaaattcatttccaaatatttttatgtatttactttgccatatgtttgaaactaggcttctaactgtctccttggatacatcagtgagtttacaacagtgattatttccaaaggmatcttggagaaatacaagaaaaataacaacaaatgaaacaatacatgtgtggttttcaaatgtggacaggtttaatattaagtgaagtgtttggtttactttcccttttgtaaaaccttag

SEQ ID NO: 257926 - DNA, 556 bp, Homo sapiens
tagtggagcaatcttggctcactgcaagctccatcacccacattcaagcgattctcctgccttagcctcckgaatagctgggactgcaggtgtgcaccatcacacccagctaatttttgtatttttagtaaagatggggttttgctatgttggccaggctggtctcgaactcctggcttcaagtgatccacccacttcagcctcccaaagtggtgggattacaggcatgagccactgtgctcagccctttgcctagttttaatggagctgtttttttttttttttttctctcttgttggtttgtttaagttacttattgattctggacattagtcctttgtcaaatatatgctttgcaaatattttctcccattctgtaggctgtctgtttactctgttgatagcttcttttgctgtgtatatattattctctctcttttttgagacagggtctcactttgttgcccaggctggagtgcagtggtgagatgctggcccactgcagcctcaagctcctaggctcagtgatcctttcacctcagcccccttagtagtt

SEQ ID NO: 257927 - DNA, 674 bp, Homo sapiens
tttgttgtgtctttgccacattttggtattgactaggtttgcagaaggagttagggaggaatccttcttcctcaattttttggaatagtttcagtaggactggtaccagctcttctttgtatatctggtagaatttggctgtgcacccatctggtccagggctttttttgattggttggttttttattactgattcaattttggaactcaggattggtctcttcggggtttcaatttcttcctttttcaaatttgggaggtagtgtgtttccaggaatttatccatttcctctagattttttagtttctgtgcatagaggtgttcatcatagtctctgaggatgttttgtatttctgtgggattggttgtgatgtcacctttgttgtatctgattcagcaatgcatttatgatgtgctttggaggggtttatctctattttgcttggggcgtgttgataattttgtttcaaagatttatatttttcattacatttggaaaaatttcagccaatgcttctacaaatagtttttctgtgcttctcttcccatttgggaccyccatctaaatgtatattggaatactgatactggctttcgcgtcatgatgctctgttcattttttttctaattttttttctcagtttttcattttggatagtttttattcctgtgt

SEQ ID NO: 257928 - DNA, 360 bp, Homo sapiens
tgtatttttaatttcagatattgtgtttttaatctccagaggttttttttaatcttctgtgtgtcttccatttctctctgcatcatattsttgttttcttttactttcttgagcatagagaccatatagcagctcttttaatgtccttatctcctaatactatcatctctataatttctaggtctgtttctattgattgagtgttctcctagctatgggtcatattttcctgcttctttgtaagcctagtaaattttgcttggctgctgaagattgtgaattttacactgttgggtgctatatttcgttgtactcctgtaaatcatatagaaatttgagaatagttaatttacttggaag

SEQ ID NO: 257929 - DNA, 579 bp, Homo sapiens
agtacccaataggtaatttttcgatcctcatcctcctcccaaccttcaccctcaagtaggacccagtgtctcaaaaccgatattttttcagatccttctgtatattggatattgtgctaggctgaattcttgtattagggaaatacaacaaacacacatttatttattcaataaatattgagtacttactatatgccagaccctgtrttaggtcatgggatatgctactgcactgaataaaaagacaaaaaaaaaaaaaaagcaagcaaaaattcctgctgtcgtggggcttatattctagttggctaactggggacgacaatgagcaacataagtaaattgtagataaattagatagtgatgaggagtatgtgctgaggatgaaacatagcacagggaatgaagggtgggagaaggagttgaagttatagacagggtggcccagaaaggccccgtgaagaaggtgtcacttgaataaagacccaaggaggccagagagggagccctgtggatatctgggggaagaggcctgggtaggaagcatgcctggcatgttggaggaatggctgggagatggaa

SEQ ID NO: 257930 - DNA, 579 bp, Homo sapiens
agtacccaataggtaatttttcgatcctcatcctcctcccaaccttcaccctcaagtaggacccagtgtctcaaaaccgatattttttcagatccttctgtatattggatattgtgctaggctgaattcttgtattagggaaatacaacaaacacacatttatttattcaataaatattgagtacttactatatgccagaccctgtattaggtcatgggatatgctactgcactgaataaaaagacaaaaaaaaaaaaaaagcaagcaaaaattcctgctgtcgtggggcttatattctagttggctaactggggacgacaatgagcaacataagtaaattgtagataaattagatagtgatgaggagtatgtgctgaggatgaaacatagcrcagggaatgaagggtgggagaaggagttgaagttatagacagggtggcccagaaaggccccgtgaagaaggtgtcacttgaataaagacccaaggaggccagagagggagccctgtggatatctgggggaagaggcctgggtaggaagcatgcctggcatgttggaggaatggctgggagatggaa

SEQ ID NO: 257931 - DNA, 393 bp, Homo sapiens
atcttccttaccacacaattactggatcatgtgcttctcttgtgcttctgtgctactccagcatgatccaacttttgtttgggagraaatagatgttgtttgtgtcagcaacaaacgaatcactgtcttttatggtaatctaaaacattgaaacttgcattctttttatgaaatcaaggatgtggaaactatgccttagaagtattgatttctattgtgttaccaaacatttattgattatgtgctagatttagcatttttatataatttaatctaggcatcactcctttgaggtagattctaaatttaactccattgtgaaaagaaggaaactgtttaatagtaattcctgtatcacccagagtcacacagtaagtagggatatgaaaataa

SEQ ID NO: 257932 - DNA, 599 bp, Homo sapiens
cattttttgttaaccccaaatcttacagatattttaactgaagtcctaaattcttttaaattgtctatatttcagtggaaaccatgaacaaattaacatttttttcttaattagctgttttacttgattactaggtttcatcatgccaaataaataatggggccagggcaatgaattaaatggtcacatagccctgggagaaagctgggatatcttaagggtgattttgaatctcatatcttatttgcttacattggagaatgtaaaaagtggttaagaattttctgtaagggttgtatgatggatacttacagatgcaaatggattgaaacaatccattaacaataatgtctgaagttaagraaagatcatcatttatatcatgaaaaacatgaataaacactgagaaaatagtttcaccttgtaattttaaaaagggctttgaagatgtttgtagctttggcagtgttccagaagcagcagatcagagtgatccagtggagcagagtgatcccgcttaatatagaatgctgcagccctgaagtctcatgaaagccatgatattgtctggagcaaccaaatgtgtggttaatacacat

SEQ ID NO: 257933 - DNA, 517 bp, Homo sapiens
tgaaaacaatctgtaagtctaattctatccatgggctgccagtttgcagcctcaggtttaaaacatcakttgacttccctgaaatagctaaggaaatcattaaaaaacaaaccaaaaaacccacccatttgcaatgaaacagaaatcaatgaaaataaaaagcttttaaagtttcccacctcaaggctgttgtctggggtgtgatttcttcctaaaaattaattttgaaaaggataaaggagggaaatttccaaacaacacaatattgttttgtaaaaatttcaacttaagtcaaaggagtgaggtttgtgaagggtcctgagagtcagattatcctcccatccagatcctctcctcttatcatggtgcaggagcattgttttatcaggtggactggagagtaagaagttacaccagatgacagttttccagataacaagctttcactttaaattctctttctaaaattttatttttttctaaaatacttcctatcattagggtatactttcatcaa

SEQ ID NO: 257934 - DNA, 613 bp, Homo sapiens
gacaattaaaattacactgataaaagcagaaaaaaccagcaagtcttgcagttttccattgatttctctgttgtggcagcatttattgacatgataaagccctcttcctgcatcatccagaattctccacaatattttaaaatcaaatatatatatatattttaaattacatatatatatttgtatacctacacacacatggcttatcttggctaatcaggcaacatttttctaaattctagygcttacaaggtcattactgtcagattggggaggtatgataataactgatatgtattaactgccctgtactattaaaggcacttagcatatactcaagcattttacactttaatgaaggtcacaactgcccattttgttttcctcaataagttatatttctggcctcatactgcccagttcatttaacgattgttgcctctagcaaaaatttcactagaaatatttttagtaactggtggcatctgtcaattacatttcttagaacatagggtttagatggacaataattttctgattaactagaaatgagtcagaagaccccgataagcatttctggaaatgagcactcctggctgtctttgtggtacgt

SEQ ID NO: 257935 - DNA, 563 bp, Homo sapiens
attgttgagaaaataacaagacccactattttctttaattagaattaattttatgataaactgggcgtggtggcatgcacctagaatcgcagctacttgggatgctgaagtgrgaggatctcttgagcccaggagttcaagtccagcctgggcaacatagcaagaatctgtctcttaaaataaaaatgtatgataaactaaaaagacatttctttctcatctaatgggcttgaaatcagataatcactaaaactatgcctagaacatttctttcttcaaaggctggacattaaaaatttggatttactaagagaactataaaatacagcaacacctgtagtaggaagtgtctcacgcaatgccaagagcataaaaaaaagtgtacaaatccctgtgttatcagaaggccctgcatgttgggcatctattatttgctgtccagcatcatcctctgctttctggaaacagcatcctaaaactacaacccccattcccagccaagtggttggcgtaggattgatctttggatctggagtgagcctttattggttttccctgatcac

SEQ ID NO: 257936 - DNA, 563 bp, Homo sapiens
attgttgagaaaataacaagacccactattttctttaattagaattaattttatgataaactgggcgtggtggcatgcacctagaatcgcagctacttgggatgctgaagtgggaggatctcttgagcccaggagttcaagtccagcctgggcaacatagcaagaatctgtctcttaaaataaaaatgtatgataaactaaaaagacatttctttctcatctaatgggcttgaaatcagataatcactaaaactatgcctagaacatttctttcttcaaagrctggacattaaaaatttggatttactaagagaactataaaatacagcaacacctgtagtaggaagtgtctcacgcaatgccaagagcataaaaaaaagtgtacaaatccctgtgttatcagaaggccctgcatgttgggcatctattatttgctgtccagcatcatcctctgctttctggaaacagcatcctaaaactacaacccccattcccagccaagtggttggcgtaggattgatctttggatctggagtgagcctttattggttttccctgatcac

SEQ ID NO: 257937 - DNA, 560 bp, Homo sapiens
gacaatgccacgataaggaaagaactgaaggaccacttgtactaaagctgctcacttatcagaaattcctgtgatttgaattgaggaagaaattaaaagcaaaaaaccattatgtgaaaaccactgatgtgggggaatttgtctggtactttagcaaacagtattaattcttcaacacasttttcttttctcccaaactcttagtaatttttcaaccactcacacaaatgagacatagttaaaaaccaaaaagatttgtatttttctttttatttgtgtttctttacgagactgatgctgggaacatttaatgtgatacggcagtgcagggcaaagttataggcatgggcttaggagttaatcagacctttgtttgagtgcctgctcgaccacatactaacagtgtgaccaaaatatagttttcttatctgtacaatcagaatatcaattcctacattagaagtttttataaggcttgcataagataccatttaatgtactttgcttagttcctgacccagtaggaataaatagcaacaagtactattactccatctcct

SEQ ID NO: 257938 - DNA, 586 bp, Homo sapiens
gaagtttcgcataagagaatctagttatggcaagcgaggaggctaccgccctctagtggtgtcctttctacttctcaggtactttagcatatcccggagaagttgcctcttttacttatttttttttttcaagtttaccatctattgccaatcccatcttcacatcacaaaagtctttcatttaccttgttaaaaggcacatattctcattgtatttttatgtattggtgggttgtgttcgttgctataaaaaatttttacatttaacaaaatgtaaaaggtactaagatagttctagttcttactcccgaagaagcctgcaatataggtgatgataagtacaaagataaaatttatggtacatcttttcccatcaaggtcaaagagtaattatatatatatacatatatatrtgtgtgtgtgtgtgtgtgtgtgtgtgtatatatatatatatatattttttttttttctgggacagagtcttactctgtcacccaggctggagtgcaatggcatgatcttgggtctctgcagcctcgacctccctggggtgaagtgatcctcccacctcagcctcccgagtagg

SEQ ID NO: 257939 - DNA, 563 bp, Homo sapiens
atagcaatgtgtgctagcttccacaggctgctgtaactttgtggcataaaacaatagaaattgattctgtcatagttctggagccagaagtttgaaatcaaggtgtcatcagagctccacttcctctgaagactctaagggagcttccatttcttgcctcttccagcttctggtggctccaggcattccttggcttgtggctgcacctctccaacacctgcttctgtgatcacattgccttccccacgtctgctgccaaatctccactgtgggtgtcttataaaaatatttgtcattggattcagacctcagcttggtaatagaggatgatctcttcaaattaaaatccttaacctaattacagcttcaaaaagcatttttccaaatgagttaacattcacagggtctaggaattaagatgtggacatctgttattgggcttctrttattcaacccgctaaaatgcaaataaattttgtccatagatatgcaaattcaatttttctggtaaagattcagttgacttccctacctctcaacccttttggaaaaatcaggtttgc

SEQ ID NO: 257940 - DNA, 584 bp, Homo sapiens
tatcccagcccatgattttaatttgaatttgccctttgattttgagtcacacttcagtgcaagcttgagcttttaagacaagaatttrtgctctgccccatggcaatacttaagagcaataggcttttgatgccttcccaacacaggctggggaatagttcgtgtagtggccatggtttagtttttaaaactaagagtatgggctgattttgtagcctgtgttccagttgtggtagattaaaggatttttacacaatcctttttgataaacctctaagcaatgggcactgcacttgctccacccccacaacatattctccagtggagttggggcttcggagaagctctttaattctgccaatagacaggggttaaaactgttatctaagtggaggatttgaggatgtgctactgtttctatacagaaaaaaattgtagtagtcagaacccaaattaaaatgaaaagcaagttagttgaattctcctggcttacccccttagactctattctttatccaataaataatgggaactgagataggctggatttgaatcctgtcttcccattaccattgtgttgtcct

SEQ ID NO: 257941 - DNA, 584 bp, Homo sapiens
tatcccagcccatgattttaatttgaatttgccctttgattttgagtcacacttcagtgcaagcttgagcttttaagacaagaatttatgctctgccccatggcaatacttaagagcaataggcttttgatgccttcccaacacaggctggggaatagttcgtgtagtggccatggtttagtttttaaaactaagagtatgggctgattttgtagcctgtgttccagttgtggtagattaaaggatttttacacaatcctttttgataaacctctaagcamtgggcactgcacttgctccacccccacaacatattctccagtggagttggggcttcggagaagctctttaattctgccaatagacaggggttaaaactgttatctaagtggaggatttgaggatgtgctactgtttctatacagaaaaaaattgtagtagtcagaacccaaattaaaatgaaaagcaagttagttgaattctcctggcttacccccttagactctattctttatccaataaataatgggaactgagataggctggatttgaatcctgtcttcccattaccattgtgttgtcct

SEQ ID NO: 257942 - DNA, 568 bp, Homo sapiens
tctagtttcagtctcagaaccatttagtcctcactctatgtcatgtctgtcctatatatgaggttctgttttaagacaatgcacctctgagcaaataccgcattacaaggctttttatctaagtcttgctatctggtacatcaggtcctcctctcctgttctctttttttstttgtcttggctattttggtccttagcatttccatttgaaatctaggatccagtttatctgtagaatctctcgaagtttaaatatagacaatcattttggacacagcaaatggatgctgtgtcgctcccttcctactacttaacaaatgttatttattgttgtcttacattattgaattagctaggctgtccagcattatgctgaatagtagatgttatagtgggattcttgttacttctgacattaaagaaaatgcttttattgattcaccattatgtattatatttgctataagtttttagtagagactctttatatggttaaggaagtattcttctattgctagtttgataagaggtattttattttgttttttcattttgctaagaattttga

SEQ ID NO: 257943 - DNA, 383 bp, Homo sapiens
ctaggagatgggtcaggagctatgaatacaaagacaaggacctgccttccagagctagttggttcctaaagggcagccaccttgttggccctcggagcccagcacagtgccaggtacctgataagcacttattaagtacctggaggatgttttaatgtgagagggggggacrctgcatcccgcaaactgcaatgcaatatgagggccctcacacagtcctgaaccaagtcctgagagcagcgtactcttccagggttgaggcagcaatagatgagcgttttggagccacaggctgtcagcagaaccctaagcaaaggcacctggtgaagccttgtcatctcactggccttcgtcttcatgcatcacctgagttaagtttcctc

SEQ ID NO: 257944 - DNA, 565 bp, Homo sapiens
ttacaggtgttaatggagtctggaagctggacacttgaggaaagatgaagatggtatggtgatggcctgggggctgtaatgggtggtggtgctgatagtggaaactgtgttgagatgaagtttcagaggtggcaagaagcagaaaaaaaatggtgctcaattctcacagcacctggactgtggtctctaaataaatatgaatgctattacccactaaaagcaatcagagctccttggagaaatggctgattttagatctaaaaatatatagaacaaaaaatagatgagaagagcctggaactagaaaccagtaagcaatagatttctactagatagggttgtatcaaagaggcttccaatggccaaggacagaaaaatttgagcatcaataaggatatcagcaatggaccaaaacacatcaaaaatatttaaatccatgagttaataatgacactagaaaaacaatatataacacattgctastcacctctggaggatgctaggaaacccactcattttgaaaactggtaaataaagggaaataatctaacatttatcctgtttt

SEQ ID NO: 257945 - DNA, 553 bp, Homo sapiens
tgttaatctaagtactttacatgtagtcactttttaagtattcacaacagccatctgaggtcggagctatgatcattcmcacttttcagatgacaaagctaagaaagaggctaaataacttgcagcaacagggaataagttaacaagcaggattcaacaagcaagcaaccgtgctcataagtccaggttcttaccactgtgctcctttatctggatgagtatcatgaaactgacttactatgttagaaggaaagaacatttcaatccaaaaaaatgctacatcaattcaaattcaccctattcgtatttgacagcaccagcttctgaaacacccttgccaataacatatgttatcagcttttaaataatttaaaaacataggtaaaaaattattttattgttcacttaatttgtatctcctggttaactgggacattgagctttttttccattgattcttggccatttgtatttttcctgtgagttgccagctcattttccttgctcattatttttcttttgggttgtcttttaattatttttttggaacact

SEQ ID NO: 257946 - DNA, 553 bp, Homo sapiens
tgttaatctaagtactttacatgtagtcactttttaagtattcacaacagccatctgaggtcggagctatgatcattcacacttttcagatgacaaagctaagaaagaggctaaataacttgcagcarcagggaataagttaacaagcaggattcaacaagcaagcaaccgtgctcataagtccaggttcttaccactgtgctcctttatctggatgagtatcatgaaactgacttactatgttagaaggaaagaacatttcaatccaaaaaaatgctacatcaattcaaattcaccctattcgtatttgacagcaccagcttctgaaacacccttgccaataacatatgttatcagcttttaaataatttaaaaacataggtaaaaaattattttattgttcacttaatttgtatctcctggttaactgggacattgagctttttttccattgattcttggccatttgtatttttcctgtgagttgccagctcattttccttgctcattatttttcttttgggttgtcttttaattatttttttggaacact

SEQ ID NO: 257947 - DNA, 553 bp, Homo sapiens
tgttaatctaagtactttacatgtagtcactttttaagtattcacaacagccatctgaggtcggagctatgatcattcacacttttcagatgacaaagctaagaaagaggctaaataacttgcagcaacagggaataagttaacaagcaggattcaacaagcaagcaaccgtgctcataagtccaggttcttaccactgtgctcctttatctggatgagtatcatgaaactgacttactatgttagaaggaaagaacatttcaatccaaaaaaatgctacatcaattcaaattcaccctattcgtatttgacagcaccagcttctgaaacacccttgccaataacatatgttatcagcttttaaataatttaaaaacataggtaaaaaattattttattgttcacttaatttgtatctcctggttaactgggacattgagctttttttccattgattcttggccatttgtatttttcctrtgagttgccagctcattttccttgctcattatttttcttttgggttgtcttttaattatttttttggaacact

SEQ ID NO: 257948 - DNA, 572 bp, Homo sapiens
agaactcaaagtgttggatgaaataaacaggatgacacatcaagcctttcctacactttcattaatctccccatctcattccttctactctatataacaattgtttgtttctcccaccttaaattttcatgtgaagatagtctttaaatatatcamctaggttcagaacatggttttttcatcctccgtagatgtcctgcagacttcgataagatggataatctcatagaaatagcagcagctgaagtaacgatattattaaacaaagaaatttgaaggtctatgtgaagagaactttttaattctcctgaaggatacaaaagatgacttgcctcagtggcaagacaaaccacattcctgagtaggaagactcaaaaggatgccagttgtccctgagtttatttctgtattaactccataaaaataccaataagttttttaggactaaacaaggtaattctgaagtttgtgtgaaagaaaaaagcaaaaatatccaggaaaactcttaaaaagacaaatgtggagggaactaagattagcagatttttaaaaattcttcttattattatttg

SEQ ID NO: 257949 - DNA, 624 bp, Homo sapiens
acttgcctcagtggcaagacaaaccacattcctgagtaggaagactcaaaaggatgccagttgtccctgagtttatttctrtattaactccataaaaataccaataagttttttaggactaaacaaggtaattctgaagtttgtgtgaaagaaaaaagcaaaaatatccaggaaaactcttaaaaagacaaatgtggagggaactaagattagcagatttttaaaaattcttcttattattatttgagacagggtctctctctgtcacccaggctggagtgcagtggcaccatcactgcagcctccaacctcctgggctcaaaagatgctcctaccttggccccccaagtatctaggactacaggtggccaccacacctggctaacttttaaattctttgtagagacaaggtctcgctatattgcacaggctggtcttgaattcctgggcttaagcgatcctctcactttggtgactttgaagtgacacctcaaatcagtggtgagagatagaccattcaagtgattgtattagaggagctatgtagttatcgtgaaaaaatatatacagttgattctcatgattagcagtagttctataaagatgctgcaaacatgaattagt

SEQ ID NO: 257950 - DNA, 624 bp, Homo sapiens
acttgcctcagtggcaagacaaaccacattcctgagtaggaagactcaaaaggatgccagttgtccctgagtttatttctgtattaactccataaaaataccaataagttttttaggactaaacaaggtaattctgaagtttgtgtgaaagaaaaaagcaaaaatatccaggaaaactcttaaaaagacaaatgtggagggaactaagattagcagatttttaaaaattcttcttattattatttgagacagggtctctctctgtcacccaggctggagtgcagtggcaccatcactgcagcctccaacctcctgggctcaaaagatgctcctaccttggccccccaagtatctaggactacagktggccaccacacctggctaacttttaaattctttgtagagacaaggtctcgctatattgcacaggctggtcttgaattcctgggcttaagcgatcctctcactttggtgactttgaagtgacacctcaaatcagtggtgagagatagaccattcaagtgattgtattagaggagctatgtagttatcgtgaaaaaatatatacagttgattctcatgattagcagtagttctataaagatgctgcaaacatgaattagt

SEQ ID NO: 257951 - DNA, 624 bp, Homo sapiens
acttgcctcagtggcaagacaaaccacattcctgagtaggaagactcaaaaggatgccagttgtccctgagtttatttctgtattaactccataaaaataccaataagttttttaggactaaacaaggtaattctgaagtttgtgtgaaagaaaaaagcaaaaatatccaggaaaactcttaaaaagacaaatgtggagggaactaagattagcagatttttaaaaattcttcttattattatttgagacagggtctctctctgtcacccaggctggagtgcagtggcaccatcactgcagcctccaacctcctgggctcaaaagatgctcctaccttggccccccaagtatctaggactacaggtggccaccacacctggctaacttttaaattctttgtagagacaaggtctcrctatattgcacaggctggtcttgaattcctgggcttaagcgatcctctcactttggtgactttgaagtgacacctcaaatcagtggtgagagatagaccattcaagtgattgtattagaggagctatgtagttatcgtgaaaaaatatatacagttgattctcatgattagcagtagttctataaagatgctgcaaacatgaattagt

SEQ ID NO: 257952 - DNA, 624 bp, Homo sapiens
acttgcctcagtggcaagacaaaccacattcctgagtaggaagactcaaaaggatgccagttgtccctgagtttatttctgtattaactccataaaaataccaataagttttttaggactaaacaaggtaattctgaagtttgtgtgaaagaaaaaagcaaaaatatccaggaaaactcttaaaaagacaaatgtggagggaactaagattagcagatttttaaaaattcttcttattattatttgagacagggtctctctctgtcacccaggctggagtgcagtggcaccatcactgcagcctccaacctcctgggctcaaaagatgctcctaccttggccccccaagtatctaggactacaggtggccaccacacctggctaacttttaaattctttgtagagacaaggtctcgctatattgcacaggctggtcttgaattcctgggcttaagcgatcctctcactttggtgactttgaagtgacacctcaaatcagtggtgagagatagaccattcaagtgattgtattagaggagctatgtagttatcktgaaaaaatatatacagttgattctcatgattagcagtagttctataaagatgctgcaaacatgaattagt

SEQ ID NO: 257953 - DNA, 506 bp, Homo sapiens
ctgcagaccactgggcatccctgactgcctttcccttgccctgaagcctggcccgggtcccctgccctgtgtccctgtcaagtgccccagcccagcctcctctctccccagagatgacaaggaaagtgactgtgaagctggtcagccctgaggctcatgcttagcctggttctgatggcctctcgtaggctgccacatcctgctcgctacacaaaggcatttgaccagaaagcctgctctgcctgttgaacatgtcctgccatctgattcttccagacgtgtgcactgacacccccaatttgaagtcctggcagtttacacaggaacacagyaggatatgaagggagttttgtgcttctccaggagtgcttctcccaacagcaagctaggatcagctagctcacgctccaggtggcctgcccattttggtagccatatttctccttgaaattagttcagcctctgtccctctggctacagtgctgggctccttcacttcccagggc

SEQ ID NO: 257954 - DNA, 540 bp, Homo sapiens
cagctatttgggaagagtgatctagatgttgtaacagcatrggcggaggccaagcatggcccatggggagggtagtgaaaggaagccacagtgactgtgatacatagtgagggaggcagtgtggtaccaaatgagagtgggaaggtaggcaggtcgggtcaggttacgccttacaaagccacaatttaggattttggaccttctaagggaaatagttgtatggccatacaagctgtgagctacacagctccaagaggccctgtttaccttgcagtccatgacagtggtgccctggaagtgtgaatgatgtgccttggagttgtgcagtgtacatcctgcacagccatgcctggaggcctatcatagtctggctccagtaggtagaatggtttggaaagggtaaggggagcttattaggagcctgttgcaggagctccaggcccactttaccttcccctttacacccaactcccttggcaagctcacctttgcccctctctgcctttctagcagttcctccctggagtaacttcctggtat

SEQ ID NO: 257955 - DNA, 540 bp, Homo sapiens
cagctatttgggaagagtgatctagatgttgtaacagcataggcggaggccaagcatggcccatggggagggtagtgaaaggaagccacagtgactgtgatacatagtgagggaggcagtgtggtaccaaatgagagtgggaaggtaggcaggtcgggtcaggttacgccttacaaagccacaatttaggattttggaccttctaagggaaatagttgtatggccatacaagctgtgagctacacagctccaagrggccctgtttaccttgcagtccatgacagtggtgccctggaagtgtgaatgatgtgccttggagttgtgcagtgtacatcctgcacagccatgcctggaggcctatcatagtctggctccagtaggtagaatggtttggaaagggtaaggggagcttattaggagcctgttgcaggagctccaggcccactttaccttcccctttacacccaactcccttggcaagctcacctttgcccctctctgcctttctagcagttcctccctggagtaacttcctggtat

SEQ ID NO: 257956 - DNA, 609 bp, Homo sapiens
caggcacaccactacatattatatatatataaccttacttaattgtatttgatgtttartgaagcaggcactgttaagaaaccagaactggtcactcacttgctaaaatcctctaatgactttccatatgtccttaggaaaattcataggcttccagtggccctgcaaggccctgtgggacctacctttggcccaacatctagcaccatccccctcggcctctcccaggtcctccgtgcttcagccatgggggcctccttttggttccttgaactctcgtggctgtacctactgacccctctttctggaacattcattcccaagatcatagttagtcccacttcactattccaatccccactgaaatatctgtcctcagggaggccttccttagccatctgctctgaagtgaccaccccgcttcccaccaagccactattatctaaaattatcattatttgttttatattgcctgtctggtccatggggtcagaaacctagtctaccctattcactgctatatcctccaacccctaacatagggcttagtaaatagtagggtcttaagaaatatttgttaagtgagcagttctgaactggataaatgaa

SEQ ID NO: 257957 - DNA, 609 bp, Homo sapiens
caggcacaccactacatattatatatatataaccttacttaattgtatttgatgtttaatgaagcaggcactgttaagaaaccagaactggtcactcacttgctaaaatcctctaatgactttccatatgtccttaggaaaattcataggcttccagtggccctgcaaggccctgtgggacctacctttggcccaacatctagcaccatccccctcggcctctcccaggtcctccgtgcttcagccatgggggcctccttttggttccttgaactctcgtggctgtacctactgacccctctttctggaacattcattcccaagatcatagttagtcccacttcactattccaatccccactgaaatatctgtcctcagggaggccttccttagccatctgctctgaagtgaccaccccgcttcccaccaagccactattatctaaaattatcattatttgttttatattgcctgtctggtccatggggtcagaaacctagtctaccctattcactrctatatcctccaacccctaacatagggcttagtaaatagtagggtcttaagaaatatttgttaagtgagcagttctgaactggataaatgaa

SEQ ID NO: 257958 - DNA, 557 bp, Homo sapiens
tggaagattttgcaatgcctccactgacccacctcttaccaacagcactgcctgatgtcctcctgtgtgttcccattaacaatctggattccgcttctgccaaatccttaccatttggggccaacctcaacatgcccctctctgtgaggaaaccatgagcaaagggatgctggggggttagggggtgggtaggaagctgcaaacctgcctccctgaagccaccacatggtgtctgaagtgaggacctcaagattcagctcaacaagcattcatggagccaggttcagtactacaaaggcacgctgaaaatgacatgaggcaaacrggaatgagatagtaaggcagtaaaatgggagcacagacaacaagcaagtggtgacaggactggtaaggctttggagaagaagcagggctcaacctagaacttgaaggtagaggagaagaagcaagcccagaagcaaagtcttcagagcaggaatcagcaatggtggccatattgcctaagggtacaggcaagggaaaacaaaaattatgctacacctgtttccatccaagca

SEQ ID NO: 257959 - DNA, 549 bp, Homo sapiens
tccagcagcaggaaaacccttccctcctctgagagcaagtcataaggctttcgaaggtgcctgaaaatctggggtttaacatactcatgagcttttagctgctagagatgagatgctctccttgttttgacaagccccaggagaaaccagagaactctcaataaacttccactagtttggggaccctgtatagtgataaggaccagatcctctcatggggcagttttgaggtctagtggaaagaaagagccacaggaaagcatcagggcaagaaaaacacagcacactgaccaagccacagctaggcctcaactggtccttccagggtgtgatggttaacatagagtrtcaacttgattggactgaaggatgcctagatagctggtaacatattgtttctgggtgtgtctgtgagggtgttgccagaggagattaacattttgagttagtggactaggagaggcagacctgccctcagtctgggtgggcaccatctaaatgagctgccagcacagctagaataaagcaggtaggagaagatggaagagc

SEQ ID NO: 257960 - DNA, 558 bp, Homo sapiens
tgagttacacaccagccctgatggggtgctgtttatgaaagggacacagggcaaggtatttgaaaacatcacatttgcataatgaattatctcctctcctgaccccaccctcacttttaagattagcatttaaggctttaaaaataccaccaaaaaaaatacactagagattatactggcttttccctacagtgagacatggcagggttgtgtcatgagattgacctttacatgggttgacctgagcaattttacagtcaagtataaactgctacattacagggtttgagtaacacatagatggaacctcatcacctgttacagccaggtgcctgggcatgctcatcagtcacatttaggacatagagaggagacagagagccaagcatataacacaggcctggaagaagttactcatcctgtatgggaatttttctaaagacacaaccaacatttaccctgagacttaacctakagacttataggagtcatagccatgttcttaattttctctatttttatggaaaacctggctacattgagaatgtacgaaaccaa

SEQ ID NO: 257961 - DNA, 605 bp, Homo sapiens
caaaaaatattttcaagtcatatatctgataaggggtaaatacctaaaatatacawgatattcatgcaactcaatagcaaagaaatcccaaataatctcttctaaaaagtgttacaaagaacttgaattgatacttttccaaaggagacatacaaatggctaacaggtacatgaaaaagtactcagtatcactaatcatcagggacatgcaagtcaaaactacagtgagatgtcacctcacacctgttaggatggctattatcaaaaagatgaagtaagtgttgttgaggatgtggaggaagaggaatccttgtatacagtgggagggaatgtaaattagtacagccattatggaaaacaatatggaggttcctcaaaaaactaaaactagaactaccatgtgatccagcaattccacttctgggtatatatctgaacgaagttagatcagtgtctctctgcactcctatgttcgttgcagcattattcaaattgccaagacatggaaacaaatggataaagaaaaagtggtatatatagacaatgaaatattatccggccataaagaagaaaaaaattctgccattcctgacagtgtggattaa

SEQ ID NO: 257962 - DNA, 568 bp, Homo sapiens
cccactgcatgataggccctgctgaagaaagatgtgagcctatctccaagatgacacgcccttgcatgggcacccaaggactggtcggtgcacacagtcagtgcatacactttcttccatctggacatctctgaagggaagaggctctttcaagatcctccctccagccccagagctccaggtrggagcagttgaggccaccctcactgcatatcacagcctagctcctcaccctgagctctcgctccctcactggtgttgttcctgggctcactccccagtaagccacctgctcatatacctccatctcagaacctgcctccctgagaccagaacgggggctgcttgaaaagaaaagagaaagaagaatcctggaggtgggacgctcagcgttcttagaaataatcgcatctagccccaccactgcagaggggagagagtttgcccaaggtcacagagcccgttgatggcaaagctggctccagggacctctgaccccccattccctccattcttggggctgatattaaaactgctgacatgtttgaatgttatttgtatgtaagca

SEQ ID NO: 257963 - DNA, 551 bp, Homo sapiens
gtgactctggtccagacacataaacgtccccttggttgagtttcataaacaattctaggccagcatggtggctcacacctgtaatcccaacactttgagagtccgagttgggtggattgcttgagctcaggagtttgaaaccagccttggtaacatggcaaaatcccatctctacaaaaaatacaaaaattagccgggcatggtggcgtatgcctgtagtcccagctactcggggagggggtggtgggtaaggctggaggatcacttgagcccaggaggtcaaggctgtagtgagccgagactgtgccactgcactccagcctaggygacacagtgagaccctgtctgagaaaaaaagagagacttcttccccactgtgtggctacattggtaatatctgggccccacctctggccattgtcaagtgcaagatccgtcagcacttgttctcagcactgtttttgtgggcctgaactattcatttaagatgggaaaatctaatttttttaaaccatcattatttgaacccaagagaagcccatgacagtttc

SEQ ID NO: 257964 - DNA, 546 bp, Homo sapiens
atatgctggaccctaaatcagtctgaacgtattttaaaagatttaagtcatacaaagtatgttctctgacaaaattaaattagaaatcaatttttaacaagatagctataaaacctcccaagcactttgaaattcagcagcaaactgccaaataacctatgggttaaagaagaaattgcaagaaaaaattagaaactatgtttttaattgaatgaygaaaacatacccaatcaaaatatgtagaattcagctaaaacagtgcttaaagggaattttatagctttaagtttttttaagtttaaaatataatcaaatttcctaccttaagaagctaaaaaaatgagggcaaattaaactcctactaagtagaaggaaggacgtaataaagctaagagagggaatcaataaactaaaaagttaacaaacaataaaggaaatcaaagaaataaaaagtggttctctgaaaagattaataaaggtgataatcccacagaccagctgacaagagagagtgagagagggatggagggagagagaacacaaatt

SEQ ID NO: 257965 - DNA, 545 bp, Homo sapiens
ggactgaagcaccaatctaagcaagggttggcctggctagtgagggatcctcagacgaatgcctgcaggagtcctccatctcattggaatgaacctgtcttacccatcccaccgtgttcagtcattagctgctagcaggcccccgggtgaaacatagccttggtgcaaatgcagtggtagatccagagggactgcagctggggcagtcatttatggtcccagcaggagatgtgagaggtgcattttcatggtccccataggcaactgtcctgagaagtttttctccaagyggtgattcagagatccagattccttctaccaaatccccactacctcttcagagtctccccttcagagacatggctaactcaactgatctatcaggtgttctgtgttaggccaccaaagagcaaagggaaaattagatttcatgggagactttttagggaccaagactggaagtggtaaacgtaaattctacacacattttatggcccaaacctgccaaatatccccttctaagcacttttggtgaagacataatg

SEQ ID NO: 257966 - DNA, 506 bp, Homo sapiens
gacaagtctcttgtcagactggtgatgaacttattttttaaaggcaaagatttctgtactrtgtaaacatttgcaggatttagaagaataaagaaatctcctccattgatgttataaagttagtagaacccggagatcaaaactggagaaatataatccagaaaagtaaagtagacaactttatttctaagtataacaataaaatgtattgaagtagaacttggaatattattcctaagagttgaagatatgaggatagtggcaatacagtatgagtgaggggcacaacaggagcaggatagttatacattctataccaacacacattccagatcattaaagagctaaatattatttctgtctaacagatctacagtaagtaatgttataatgaaggaagcatcataaattgaaatgtagtgtgtattctcatgttcttgtttataaacaatgcaataaattgtgcaatccatttatacttggagaaggaagcaaaatttgcccag

SEQ ID NO: 257967 - DNA, 582 bp, Homo sapiens
cagtaataaaaaaaattgccaacaaaaagtcctggaccagagggattcacagttgaattctatcagacattcaaagaagatttgttaccaatcttatagaaaatattccaaaagtcaaagaggaaatcctccctaaatcattttatgaaggcaatatcaccctaatatcaaaaccaggaaaagacataacaacaacaacaacaaaccatagcccaatatgaaaatagatgcaaaaatcctcaacaaattaccagctaaccaaacccaacagcatatcaaaaagataatccacagtgatcaagtgggtttcataccagggatgcagggatggtttaacataagcaagtcaataaatgtgatacactacataaatagcattaaaataaaaaattacatgatcatctcaacagatgcaggaaaagcatttgacaaaatccagcatcactttaaaactaaaaccctcagcaatagaagggacatatcttaatgttaaaaagccatctatgaagatcccatagccagcattatactgaatgggaaagagttgaaagcattttrcctgagaactggaacaagacaagg

SEQ ID NO: 257968 - DNA, 524 bp, Homo sapiens
tggtatctggttttctgcttctgcaaatttgggcaggataatggcctccagctacatccatgttgctgcaaaagacatgatttcattcttgttatggttgcatagcattccatagtgtttatgaccatattttctttaaaatgggggtatttcttcaatttctgggtaaattacataacattcaagcggacacaaatttgtagtaatttaggtatggaagcaaagctatgtgatctgaaatgataaaaatcacccagttaagtaaaaattagtaagaaatattgaagcatctgagtatctgcttatatcactctaaaaatcaggaagtacaccaaatataaaaaccattcaaatcaagcttctcttttcctccctgcacatacacttcaagacatttttcaagatggcaacaaacctactgtctctgtccacttttctggattagcacctttctgcctttcatccattttaaaactaaaakggagaactaagacttgaggtagactgaaacagtttgtagatca

SEQ ID NO: 257969 - DNA, 574 bp, Homo sapiens
cacaataaaataatttgagaagaatgaaattaataaatagatataattcttaatgcttttgaaaaaattagactgtggagtaaaattaagagaaaagmaaaattaaaaataataagtaaatttaaaatgtttaatacgtctaagtaaaaatgcttaaagctaaaaggatgctaataattttaaaaatacaaataatgtgaaaagtgtcaaaaatataatttgtttagaataaaaagcaaagggaaaatctgaatgatttgaaatataatttttaaaaatttaaaataacatgtatagtgaagactaggatatttaattggtatttctttgtaattctcacactagaaatacacgttattttaaaaaattcataatatagaaacgttttaaaatgtcccttaacagaaaattatatgtccttctcatgtgtaaatctgaattaaaaaaaagtttgttaatctcttttaaaatttatataaatgagtaaatcatgtaaaataaccagtttttctttacaaatacagtgtcaatgtgatgttagaagaccgttattatactaaatcatttcaatgga

SEQ ID NO: 257970 - DNA, 546 bp, Homo sapiens
tgtatgtgaaaaaaaaaaacaagcagctctattttagaagcgtctatgagtgaatgggggtgttcatatgtgtatgtaaacacacacacccacaaagcacatttctccatatgccgggattgctttattatgtaataatcatctttctgcagacaaacagcatgcaggaaatggaagccagatgtttaaattaagtgcagccaaggaaagacttccataagcaattattttgaccaattatacatgagacaatattgtcacctacaagataagacttgaagttcagtagtttaaaaattatatactcatacaagtcaagaaactaayttgagagttttcttcatcattgccctaaggaaactatcatcagtattgtcatttaaaattttatgtagtaacaactgtaaataaacattttttatttatattccagatgcaatgtgagatttgcaataaccactttatagtttaaaaccagggacctataactgaatttaaatctgaactaacattcttcaaattgaagttcaaatattgcaaatgctt

SEQ ID NO: 257971 - DNA, 520 bp, Homo sapiens
caccctaattctgtatgtcctgattttaatttaattacatctgtaatgaccctattgccaagtaaagtaatattcacacatactgaacatacctaacatatcaagttaggacttgaacacaatttttgggggaatgcaattgaamccaaacaattcagaagttatatcttaagtcatgctagtagattatgataagaaagatatgtgttagttaatagtgttcacgtgcaactctaagattaataaaatatttttctgattatagttttcttaatgtaattaaagtaactgagaaaatatacacatgatttccagctttttacacttacagggatatgtcaacttgaatagagaaaaattaagtcatgttcacagttgagtataatttacatagtattttgagtaatgaaggatttgtttacttctgcatggatgattcctgtatatgatacatatttgaaaagcacaaaaagaaataatctttcatccttcttccagccatttccttccctagaaacaa

SEQ ID NO: 257972 - DNA, 476 bp, Homo sapiens
actgaacatacctaacatatcaagttaggacttgaacacaatttttgggggaatgcaattgaacccaaacaattcagaagttatatcttaastcatgctagtagattatgataagaaagatatgtgttagttaatagtgttcacgtgcaactctaagattaataaaatatttttctgattatagttttcttaatgtaattaaagtaactgagaaaatatacacatgatttccagctttttacacttacagggatatgtcaacttgaatagagaaaaattaagtcatgttcacagttgagtataatttacatagtattttgagtaatgaaggatttgtttacttctgcatggatgattcctgtatatgatacatatttgaaaagcacaaaaagaaataatctttcatccttcttccagccatttccttccctagaaacaatcatggtattagtactttgtgaatttttccagaaata

SEQ ID NO: 257973 - DNA, 476 bp, Homo sapiens
actgaacatacctaacatatcaagttaggacttgaacacaatttttgggggaatgcaattgaacccaaacaattcagaagttatatcttaagtcatgctagtagattatgataagaaagatatgtgttagttaatagtgttcacgtgcaactctaagattaataaaatatttttctgattatagttttcttaatgtaattaaagtaactgagaaaatatacacatgatttccagctttttacacttacagggatatgycaacttgaatagagaaaaattaagtcatgttcacagttgagtataatttacatagtattttgagtaatgaaggatttgtttacttctgcatggatgattcctgtatatgatacatatttgaaaagcacaaaaagaaataatctttcatccttcttccagccatttccttccctagaaacaatcatggtattagtactttgtgaatttttccagaaata

SEQ ID NO: 257974 - DNA, 564 bp, Homo sapiens
catcactctggaagcacatcaggaatctgtgtaatcagggcatggtaagaacagagctgcaagtcaaaggacattttattttttactggattcagttttaccattacatgaaagataataaaaatgtcctgggctgtgagcagttcaaaggggcaatattaagagagaaaactgaaatagaaatatcctattgtatcatgagtttaaaaagttattaaatattattatacttatacatattatttattagtaaatcctactactaattactacccattgccactgtttactacaattgttgctttgtttaaatcatagcattaatgtaatagaaaagaaaataataagacataatatataatttcatataaatacccattttaataacacacatgggcataattccttattatatgttatattgttatgttctttctgtttggcatggccaggtctcaaacyagctctctaacaagttagtcaccctatacctaagtctgaattctggttctgccaagcactgtagccttgggtacgtcacttaacattcttcagcccaatatg

SEQ ID NO: 257975 - DNA, 518 bp, Homo sapiens
ctaataaacaatcacaacactagcctgaactgagtgtggaaggcagttgactacttcattttccaatttgggaccgtataagactttaggcttcataaaaactcyagggagacagggagagactggaattcttgccatcaaggttaggtattgaatcaatgaattaaaaactgaaaattagtagaggcaagactatactttcaccctatgttatagagtatacattcagcttgcaacaagaattacttatttataaaggaatgtacatttctaacaagctaggtttaaatattcctagaacctcctagtacattccactagaatataagttccaggagggtaaaggattcagtgccatattctcaaaacttgggaatatagcaggctgttaatgagtatttattgtataagtgaataaaaggtgtattgattataatattttgagcttcttaaatactaattaaatagatggatcattacaaggtatggagaaaaatacaaacacatgatttatttct

SEQ ID NO: 257976 - DNA, 554 bp, Homo sapiens
taaacatctagcaagagagaaatagctaaataatttgtagcaatttcgtaagatgaaatagaatgtatctattaaaaatattgttttaaaacatatttgatgttattaaaattatataattttaactgcaataattgagctatgaaattattctatgcacatagtccctgaaggttatctggaatttgatcaacagtgttttgaataattcaaacatttttatctcaaataacctctcccctgcacacacacagrcacaatgaaatattacaacacaatcagcagaaacagtatggagctctatgagatggaacagtgattggtaaatgtgggaagttgtaaacgttggggtgaatattttttggggggttgaaccatgtttttatttttctctataagaactgcttcatttttcaattgggttgttatggtttttcttaaaacttaaaaaactttatgaggagaatatgccttttggcatatttattgtagatcattcctcaatttagaatatatttactgacataataaacatgtaatttttccatgcctaa

SEQ ID NO: 257977 - DNA, 569 bp, Homo sapiens
tgtatttttggacctctactttctacctctgtttattgtcaaggtttgagtgttaagtgtagccacacaaaattaaggattaattaaaataatttttacagtattagtaaataagtttttgatagcttattgtcaacaaacttttaaatatattcttgtgtggatttaaaaaataactatatctcaagaatacttattcttcaaaaaaacataaaagtataaggtaaatgattcattaagaagaaaaagggacaatggaagataaatttttgaaggttctgtttgctttggagattctgaagatatctgagaatttttaacttgggatttctttagtttctacaaggatgcctwaaattatcacaagattattacttccacatgtatggctagtatttctgaaataatattttaagggtcttgaaagaggctcatttcagaaaacaatagtgatcctgagttaatgaaagtcttcaacggttggaaggtagggaatttttactcgtccctccaactctattattgatctggtatgcaaccttcaggaaattggtttatcctttcgcctt

SEQ ID NO: 257978 - DNA, 525 bp, Homo sapiens
aagaatactccaagatatatttctaagtaatattccttctcttgttgggggaaattagagaagatttctacctggtgccatatcaactcaaggatggagtcaaatactgagaggctctgtcatctgtctttggatctccttctgtgagtatttatgctgaggctccacagtaggaccacatttctgtaacagaccagcagtgggaaaccaggactagacycacaactcatactttccagcttgttgtaacatcctttgaaatgttcagcattgatcccaaaaaaatcttagccaggatttccaaataacatcattgttcaatacaaaatgtatgtatattattcttccaatgaatctttctacagggcaaaaagaagcaatggtccacaatagccattactgcctgttcaaagaacttacattagctattttagggtaggcgtattagaaatacattaccttggtttttcttcttagaatattttgatttttcctcattcctgaaggatattttctcctgatgta

SEQ ID NO: 257979 - DNA, 457 bp, Homo sapiens
cctataatatatatctattcaaattaatacgatttttttcttatagctatctaaaaggtatattttgttgaaactcttctttgaggaattttatttgtaagttttagagttgtttataaaatatagatatgggtttcatataaaactttagatgggcacatatgttattgaggttctatatatggtttaaaagatttagtcttycaaattacctccctatggagtgaacatgactaactcttcttttccaattatataattctattttaaagtggcctttcctcaataaatcacatgtgaaaaccatttaaaagaaaccatttgcttatgagcccttcacaaatataacagtgtgtgtatcatttttctagtcatgtattctttcattttctaccaaagttatttatgtaaatgtcttctcctttactagtctcttagtttggtgaagaaaggatgt

SEQ ID NO: 257980 - DNA, 552 bp, Homo sapiens
atgtgggcatatgtttatgtgtgtatacatacatacatgcatatataaatacatatacatatatgttcacatgcatatatatcatcagccttcttacaataaaactgtgaaaagaaagaggagagtcaggagagataagagaatgaaaaaaaaaagaggtagagtttaaggcgcagtagtgatagcttttagaaatggcaatgagagaatgaggacaagtcagaatagtcacaaacagggccagaggcaaaaagaaaacacagaactgctgtatgcatttgaaaacaaagatggctgtgaaaggattatctgcacttcaattgtccttgaaggcaccatcatggcagaaaaaaacaaaaaacagaaarcaaagcaaggcccactaggacttcagtagctctctagggcctggctggctctcagccaccctagactccagggtaagtgtaatttatttcttatcaatgtgcttgctggaggcacaacaggcagtaaaacagcataaaaagaaaagaagcaaaaagaaactgaaaaaataaggtacaaaaagaa

SEQ ID NO: 257981 - DNA, 568 bp, Homo sapiens
ctggttgagaattaaatgagccaatgtagataaaaagctcaacagaaggtctagaacttattagaagaataatcaatgctggaggagatgttaatcctcgaccacactccttctttatcactatgcccctgttcatccccackccccttctttctctccttggactcaccaggctcattctcattttgtactctgattcttatcttttgcccctcttatcctccatgcatatagaccacctttcctgtcctttctgctctttggaaagcaaagcttagttgggtgttaggacattttcttttacttttcctgttgcctgggtagttctttccctgatcttcatgtggctacattcttctctttggtttgatctaatctttcatgtcacatcctcaattacacttttcctgaacactgtaatggcagtagccgcccagctctctagacactgacattgcccgatgttgttttctttaaagcctgtgtcactaacttacattgatttcctgcctccctccactggaatgtaagctccatgggacctcttccgcatgcccagcatctaaac

SEQ ID NO: 257982 - DNA, 568 bp, Homo sapiens
ctggttgagaattaaatgagccaatgtagataaaaagctcaacagaaggtctagaacttattagaagaataatcaatgctggaggagatgttaatcctcgaccacactccttctttatcactatgcccctgttcatccccacgccccttctttctctccttggactcaccaggctcattctcattttgtactctgattcttatcttttgcccctcttatcctccatgcatatagaccacctttcctgtcctttctgctctttggaaagcaaagcttagttgggtgttaggacattttcttttacttttcctgttgcctgggtagttctttccctgatcttcatgtggctacattmttctctttggtttgatctaatctttcatgtcacatcctcaattacacttttcctgaacactgtaatggcagtagccgcccagctctctagacactgacattgcccgatgttgttttctttaaagcctgtgtcactaacttacattgatttcctgcctccctccactggaatgtaagctccatgggacctcttccgcatgcccagcatctaaac

SEQ ID NO: 257983 - DNA, 604 bp, Homo sapiens
catccccacgccccttctttctctccttggactcaccaggctcattctcattttgtactctgattcttatcttttgcccctcttatcctccatgcatatagaccacctttcctgtcctttctgctctttggaaagcaaagcttagttgggtgttaggacattttcttttacttttcctgttgcctgggtagttctttccctgatcttcatgtggctacattcttctctttggtttgatctaatctttcatgtcacatcctcaattacacttttcctgaacactgtaatgrcagtagccgcccagctctctagacactgacattgcccgatgttgttttctttaaagcctgtgtcactaacttacattgatttcctgcctccctccactggaatgtaagctccatgggacctcttccgcatgcccagcatctaaacttgtgtatgacatgcagtacatgttcaaaaacttgtcttgaaaaaaggaatgaatttattgagtctctaccatgtgctaggtactaccggggactaggaatctggcagtcagaaaaatggaggcctttcatgtatgtatggaacttataacgcagtggaacagatacag

SEQ ID NO: 257984 - DNA, 615 bp, Homo sapiens
ttttctcttgttcatacagctcttactcattgtgctgggaattgctttcaagtcctgtgactccaggtgatccttcttcagcctatctctaatgaccataatctttcaagtgactctctcttttcatacatagacatggtccatttgggggcaaaattttttcctggacaaaagataaaacttaaagaacagttatgactgtttataggccgtacactgtttatgtatgtgtttcagatgtgattttgtcttcataggacattagataatgtcygagtaatgttggaaataattaaagtataaggtttagttagcatccaataaataaaaggtttaaactgcaaataggggttgcatggattctaataaaccaattttttagaaataatatgtcccaggttttaacgatctttcagattaaatttagaccttcttataatcttatttcatctaatgatttatgagatcacttcctgttacagcagccatttccataaatggcaatatttatgtttccagtattaaaatcacaactcccttagtctaaaggtactcaaatttaacaccaggttgccagatgaacccctgaaatagcacctggccacctaccttcat

SEQ ID NO: 257985 - DNA, 536 bp, Homo sapiens
atggtatcaaattagaaatcactaatagaaataaaaccaaaaatatctcttcacacttggcaacaagacaacctattactaaataatccatgagtcaaaaaggaattatcaagagaaagaaaaaaatacatcaaattgaatgaaagttaaaacatgtcaaaatgtgtagaacacagtgaaagccatgctgagaggaaaaattatagcactaagtgcatacattagaaaagagtttgaaaaggctcaaaacaataatgtgagctttcacctcaaaaacctagtaagtgactaaaaaataaacccaaaacattataagtcattagagaattgcaaattaaaacaacaatgaaataccattatgcaagcattagaatgaataaaaatccaaaaactgacaatactaaatgctgttaaggatgtggaacaataggaactctcctycattgctagcagtaatgcaaaattgtacagctaatttaggagatcatttggtggtttcatatgaaactaaacatagtcttaccacacaacccagc

SEQ ID NO: 257986 - DNA, 569 bp, Homo sapiens
ccactgataatgagtatacagctaactaarctgattatcttttgagtcaactctacttgtttatttatttaatgttgatccaaagattagcgctacaggcaagtttaaaactttgagtcctcccttcaaatttgaaaacaacagcttaaattgtccctttcttattgcttttattcttgtaacctaatgtcaagtccctcattattctaggtggtctgctttagacaaattccaatttgtgaaagtttctctgtaagttgaacactaaatacaacacaacatattaactggatattgtatgattatttttcctcccttctggacacatatttcaattaatacataataacgtaattaacttttcttagcaattactatacaaagggaaatcatattgagtttactgtcaactaaacttaaatgtttcccaccaggctactaaggcatcagacccgtattttatagttgtgtaaatggttttgtataccacaattagaacttttcattacatacctgttaaataacatctgggtataattagtctcttgttttaatctgttgatattgct

SEQ ID NO: 257987 - DNA, 575 bp, Homo sapiens
atagcacattgataatctgtaatattatttatattgtatctttaaaatacattgcccctttccctaagaaagtcagagctctcacagctttcatttcatatatccttttctctctcattgcgtttactcactcatcattgtgttcatattttttaaactacaaactaagattcatagttaagaaaatttagaagtgatgtctgatattcagttttaaggtcattttccccctaaatcttttgcaaaaattcatttgagatgmtttgcctgatgaagtagaataacttgcatcaatgcttgagtcaagggacatagagaggttagcagaggatggctgggcatggtggctcatgcctgtaatcctagcgtttttggaggccgaggcgggtggatcacgaggtcaggagttcaagaccagcctggccaacatggtgaaactccatctctactaaaaatacaaaaattagccaggtgcagtggctggggtgcctgtaatcccagctactcgggaggctgaggcagggaattgcttgaacgtgggaggtgaaggttgcagtgagcaaagatcgcaccac

SEQ ID NO: 257988 - DNA, 576 bp, Homo sapiens
tagggttgttctgaggaataaatgaattaattataaaccttagcttagcacacagaaagtattcaaagatgttagtaatcataattacagctatattctcatcgctattctttatatataatcagtggaggcaagacaagaaaaattggttaaaaacatkaacattggaataataaaaatgacaagcctcatatctccgcaaatgaaaaaattgttctagtcatgatctttaaggtaaaagtcttattactttacggctactttacagtagaaaagattaaatgagataccttacttaaaagaatacagccagtggcaacttctactattttcataaatatttacacctttataatgtcacagatttagaaactagggcatgaaaagagtaaatggtttttccccaatctattgtttctttcaagaaataaacaaaaaaacttagttacttcaaaataagtatattaaaataataataatattgatatcacttcttacatttacaaaggagttccacttttagaaacctcatgtatcctctaatgaggtccgtttttgtttttctacctgcctggt

SEQ ID NO: 257989 - DNA, 576 bp, Homo sapiens
tagggttgttctgaggaataaatgaattaattataaaccttagcttagcacacagaaagtattcaaagatgttagtaatcataattacagctatattctcatcgctattctttatatataatcagtggaggcaagacaagaaaaattggttaaaaacatgaacattggaataataaaaatgacaagcctcatatctccgcaaatgaaaaaattgttctagtcatgatctttaaggtaaaagtcttattactttacggctactttacagtagaaaagattaaatgagataccttacttaaaagwatacagccagtggcaacttctactattttcataaatatttacacctttataatgtcacagatttagaaactagggcatgaaaagagtaaatggtttttccccaatctattgtttctttcaagaaataaacaaaaaaacttagttacttcaaaataagtatattaaaataataataatattgatatcacttcttacatttacaaaggagttccacttttagaaacctcatgtatcctctaatgaggtccgtttttgtttttctacctgcctggt

SEQ ID NO: 257990 - DNA, 544 bp, Homo sapiens
gcaataatatctcaaaccatataacacttcagtttctctttggcatgactgcgcagagtaccacacttgatgtgtatctacacacaaatttgttcacagttacataaggaaaaaaattaaactwggcatatgtgaggtttttctgagtctcttagtaataatgaaatctgattattatgtcttaagtgacactataattatagatgaacaggttttctgttgctgacccaacctgttccttaaaacacaaaaggcaacttttgtagtcttcagcaaggaaaccccccattaaacaaataagactaaaaaagctatgcctacattttcaaagaagacctaacaatataataataataataaagtaactcccatgcaaatacacaaaacagataaaaactagaacattaggttttctaaagaagtttagccttagttgtcaccaactttaagaaagcaagatacaagtgacagcgatgtgcattctcaggctacaaaataacttattcagtgcctctatctataactacatctaagacattctaag

SEQ ID NO: 257991 - DNA, 598 bp, Homo sapiens
tttcatgtgggttagaaaatttgctgtttggagcaacatggtgaaacacaggacttttgaacctgcttatggtgcaaaaggggaaattatatttctacttcaacactggaggaggggggacttctgggagcaaaagagaaaggaaactgagatgagacatgttttttactccatgacagaatacaaagaaatacaaggatgatcctttaatgttagaaacagtagaataaccatcctggtaaataaaaaaggagaaaaaatgttattttacattagatacagaaaaacagaatggctaagaaaactcacaaagcaatggtcaatctataactcragtccaaataaattgtgatataacactaaattaccactgatttggcctaattgactatcactggataacattataacatgaatgataatatttaaaattttaaagcactgtaacaaacaccagatcatgttaaaactattcaatcatgttgtcagctttcaactgccagtagcatcctaaccacatttcaaactatggaaattactaaaaaatcattattgtaataaaaagttaatagttcctcatttagaataccattgatat

SEQ ID NO: 257992 - DNA, 521 bp, Homo sapiens
aaatgaagagagaataaaactaccctcagtttacaagggaccaccatataaatgggggaaaaaatgtaaataaattaaacagctaggttaaagaggaagcgagaacattttatgaaaataactgatgactaagctatggtgtgcatgaaacacaaagtgcataaagccagaaacttagaattaaatgaaagaaagattttaaaaggggaaaagayctttagggaatgcctaataactctaactctgtccatttatttacaaatggaatatttttgctcagaaagagcaagtggtttgtttaaagctacactgctgattagcctcagcatcaggacccaagagcaaggctcccaacttctgatctgcttctgccactcccttatgcttcacaaagcacatttccagtgaaaacattcttatcatccaaagaaaatgttttataaacagatgaatagataaatgtggggcacacacatacaatggaatattattaaatattccttcctttaaaaaggaagaaa

SEQ ID NO: 257993 - DNA, 549 bp, Homo sapiens
ggttgtcccaaacaggggtgctctacaaacaggttcattgtcacaggtttttttcttttttctttttttttgcggcaktgtctccctttgtcactcaggctggggtgcaccggcaggatcatggctcactgcagcctcgacctgctgggcttaagtgatccctcccgcttcggcttcccaaactggtggattataggtgtgagtctctgtggttctgggcctgctttttccattaaataagctgaaagcatcaatgatagcctcttatgtcctgcccacccattatcattgtatctcagaaaactcatgctaattgcatttttaattaaaactgtttcagtcatcttcggggtccttttgaagtacagagaaggtttcattattttgcttagaggctgaaataatgggcaccctgcaaggtgtggttttccttatgtaacagctctcattgtggttgcatttttatttgaaaacgtaggttttaaaagggaaactacacatttcatatttaaaagaaagcattgacccattttctctagtgattagaac

SEQ ID NO: 257994 - DNA, 549 bp, Homo sapiens
ggttgtcccaaacaggggtgctctacaaacaggttcattgtcacaggtttttttcttttttctttttttttgcggcagtgtctccctttgtcactcaggctggggtgcaccggcaggatcatggctcactgcagcctcgacctgctgggcttaagtgatccctcccgcttcggcttcccaaactggtggattataggtgtgagtctctgtggttctgggcctgctttttycattaaataagctgaaagcatcaatgatagcctcttatgtcctgcccacccattatcattgtatctcagaaaactcatgctaattgcatttttaattaaaactgtttcagtcatcttcggggtccttttgaagtacagagaaggtttcattattttgcttagaggctgaaataatgggcaccctgcaaggtgtggttttccttatgtaacagctctcattgtggttgcatttttatttgaaaacgtaggttttaaaagggaaactacacatttcatatttaaaagaaagcattgacccattttctctagtgattagaac

SEQ ID NO: 257995 - DNA, 494 bp, Homo sapiens
ttgtgataactgtatatgatatggacactttcctggatgtgttacatttcagtaacaaatagaaaatttagaaacgctatttctcttctgtctccctctcctcctcctaccacccaccacacacacagcatggacatttaggggcaaataggaaaaaaaatagcagcagtgcggaattataaaccgtatcctctctcccactgcaaaacagaaatagaacagtttgcatgcaaasaggagcaagaatgaacctctgtatcctccatcttgaactgaaaagctgcctagggtgggccatccccagcaggagcatcccccggctacaggaaaggggcaagacccacccagaagacagaagaggcaggtttgggcctgtgtgagtgcagaacacgggggaaatggcagtaagctcccctccagatgttacaaaaataattctgacctacagttttatgcattgtttccggaaagcagtcaacagaagatctatagca

SEQ ID NO: 257996 - DNA, 554 bp, Homo sapiens
aaagattccctccctccccacaaacaccacagcagcgattccacaggcaaaattatagccagatcaaggacagcaactggggattaaaaactttaaacccattaggtttgctttcagcatttgatcccaaagccaaagcttccccagggacccaygttttggttacatgagtcaaattcttcactgtgtgtccaccacggggaaaccccaggaattgtccgcatcccttactgggcagaaagcagcccaggcttgagtaaaggaagagctggtgccaggatagccacctctgaccacaccaaacccttcatttccagagggaggggactcactagggaccaatgcttgcccaatggagccatgggacctgaaaggcctcataagctcttcttatatttggggaaactgaggctcctggtatttaagcagtggatactgactgctttctagggttttaagccagtagttctacctggcttctaagctttatgggaaagttatgcatggtgataaagtgtaagaagcacaggcagtaacatagggtttaagtcctg

SEQ ID NO: 257997 - DNA, 520 bp, Homo sapiens
tatagtggccaaggggtccagttgtcccctgagtccggaggggtgggcctaagaagggggcagctctcccccattaagcaccataagccgagtggtacagagcttgtgcccaaccccagcagagaagcactaagggggggttggtgccctccttggccacatcctctggaccagagggtataaacagccacayagtggtcacttcttgataggagagagagttaggctgcgggaagttcccccgttcaaggtcgtgcctcatgggggcccaggtgacagccaggccggggttgattttattgtgtattcaccagcctgagcgtccttaggggtggcaggcagggaggtcgaggtcactgatgctggtgctctcagcatgtagttatgcaggagagtcactgctctgtattggacagaggctgatggaaaagggtggtttgtggatcgcagtactcaagcattcctggaaaaggggactctgagaccagcccactaagaatcatgctgttcaggagatcag

SEQ ID NO: 257998 - DNA, 528 bp, Homo sapiens
gaagatattctatgaaaaagaagtgttgctttaaacactggcatcagactatccagttgtgagacaaatgacacctgcctgaattgccactgcatttcccactgttctaaccctctcctcagtctgattttccctgtctcttgccctcagacagagggagaaacaatggctgcagcagtaacaactgtttatcttaggttttgtgtacacatgaattgcctgtgggcgtttygcaaaatgtcactcccccgaataaactactggagccagaacatttcctgttcatcgaaagaaataagcttttccgtcttaattccccagtctaccaaaaagaaaaaagaaaagaattctttctgaatcattccctaaaaggcttttaaaaaaaatcagaaagaaggaaaatgaaatgagactctagcagaaaagcaagacagaatacacttatcttaaagggaaaagaacaagaatgaaaagagcaagataaacagagagtagaagaaaccttctctcaggttttattaaagggat

SEQ ID NO: 257999 - DNA, 528 bp, Homo sapiens
gaagatattctatgaaaaagaagtgttgctttaaacactggcatcagactatccagttgtgagacaaatgacacctgcctgaattgccactgcatttcccactgttctaaccctctcctcagtctgattttccctgtctcttgccctcagacagagggagaaacaatggctgcagcagtaacaactgtttatcttaggttttgtgtacacatgaattgcctgtgggcgtttcgcaaaatgtcactcccccgaataaactactggagccagaacatttcctgttcatcgaaagaaataarcttttccgtcttaattccccagtctaccaaaaagaaaaaagaaaagaattctttctgaatcattccctaaaaggcttttaaaaaaaatcagaaagaaggaaaatgaaatgagactctagcagaaaagcaagacagaatacacttatcttaaagggaaaagaacaagaatgaaaagagcaagataaacagagagtagaagaaaccttctctcaggttttattaaagggat

SEQ ID NO: 258000 - DNA, 528 bp, Homo sapiens
gaagatattctatgaaaaagaagtgttgctttaaacactggcatcagactatccagttgtgagacaaatgacacctgcctgaattgccactgcatttcccactgttctaaccctctcctcagtctgattttccctgtctcttgccctcagacagagggagaaacaatggctgcagcagtaacaactgtttatcttaggttttgtgtacacatgaattgcctgtgggcgtttcgcaaaatgtcactcccccgaataaactactggagccagaacatttcctgttcatcgaaagaaataagcttttcmgtcttaattccccagtctaccaaaaagaaaaaagaaaagaattctttctgaatcattccctaaaaggcttttaaaaaaaatcagaaagaaggaaaatgaaatgagactctagcagaaaagcaagacagaatacacttatcttaaagggaaaagaacaagaatgaaaagagcaagataaacagagagtagaagaaaccttctctcaggttttattaaagggat

SEQ ID NO: 258001 - DNA, 544 bp, Homo sapiens
ctttgttaaattctatagcttgtagttgtttcttggaaagcttaaactctactctttccgcattggttaatttcactttcttcttggagtcaaagacattttggtccttgttaatggtaatgatgttatttgcaattacatctagtaaccctacatccgttggttttagtagtaktatttgattgtaaagttgcagagcctcctctgtttgaccctgaagctgcagaatataggccatctgaccataagtgatggccagtcctgcctgtgggtcttcctcagtctcatcagtgtcttctgataatgaatggtggcaaagaccttcagctttttgtaggatgttcatggcctggttcagctggccgtggtctatcagtgcacatgcagtgtttagcacagctcatgtgtgccttcttggaagcccaggctctctggagccactttttcccaattgctttgagctgcaacaactgctgaagggtttgttttcctctcctcatcataagcatcgtgggagtttcggacgagatctctttatgccact

SEQ ID NO: 258002 - DNA, 501 bp, Homo sapiens
atacaaccatcttccctggctctctgtgggcagatgtgtctgctgtaaaggtggcagcttcctacagttaatcctactagtctctaaccattgctctgctgattgagataaataacatttgcagctctgctgtataagtaaaacaaatttttcagacattttccatctgtatataatcagtacctggacagaccttttcctttataattttatttttaaagcctctcctatgayggaaacctaccagtgcagctgagtttgagatgcaacagtaatccatttaagcagctttgggttcatgcctcaacacacacactatgtgagcctcctctgaattctcaaggtaaatacaatgtttaaatcaagccattaactatcatacattttctgcctagcacatgaatgatttttgtttaaaaataatctatttatatcagagataattatttttaaaaacagagccaaaattcaatccaaggaattaatatctggtggcctgaa

SEQ ID NO: 258003 - DNA, 621 bp, Homo sapiens
aaaattaaataagataagtagttaagtacttgattcatattttaaaacttgataaatgttagatttggtagtcatcttaaccacacgaagcaaaatatctacaatataaacctgaaatacttgttggaaccttaactccaacaaacttttgggccttacctggtcttataattattgatcctatcatcttttatctggktcccatttctcttctagccttactaccttttctaccaagcttaaactctaggaaaattctttataaccagttccattacatagaacctcaactttcttatccctctttcagtatattgatttcataggatttacagttcagtaagaaaatcatgtattaaatagataattgtaaacaatgaaatgctcaaggacttgatctttaagctttttctctacttcagccagtgatcaaggctttacataccatttctattttgatatcttcctgagactctggacttatatatccagtggcttacttgatgtcttcagtcagatgtctaaaagatatctccaagttaacatgtccagaacctaacttctttttttaaatttatttttttttgaaaatttatacatagtagatatacatatttttgg

SEQ ID NO: 258004 - DNA, 663 bp, Homo sapiens
gtgcatgagtatgtgtgtgtgcctgcacacwtgtatgtgtttaaataatggctgacatgttgagtaccttctgaatgagcaatgagatactatacggagcagatttttgtagattggaaagcacaattaaaatatgggtaattgtcattgtagtattataatagtactataaaagtatatgtagaaatcttttatttcatttttgtctgtttccaggtaggtatatataccaatgttttaattctagatgtggccaacttctagaaaattattacaataaccctcctgtacattaagaaatttgagactcttacctactacatgtttcatttaatgccttcattaaaaaaagatttaaaaataatttgtttttatttgccttggaaaataaatatttttcttactttcactagtaataatttgaaaaataatacttatatttagaaaagaaacaacaggtagtcaagaatagtgggtctttgttgttactgtgtgaaattcagtttttaatttactcatgttattaccatatttgttcacagacctctcattctgccccctctacttttagcagtacaatttatttgttcattcaacaagtaatcctgagcacctgctttatgtgccttggggacacaagcactgccattgctcttaaacata

SEQ ID NO: 258005 - DNA, 546 bp, Homo sapiens
tttcatatatttggatttgaagaataatttttattcttcatattaacattgttgtcaataacagcaccatcacaatcaaaagtagatttactgtgaagataatgaggctgtagcttcagcccctctcatttkcagggaccccttctaaaactctgtgtttgctttgttttcatttttttttctttttcttgaagagggttgccactgctcccaagcccaacccaaaattgttttacttcagggtcctcaaaatctgaacctgccttaattgcactgattgggaaataggggggtattgttaaggccacacattctggagtcagaatgacctgagttcaagtctcagctcagctatttgctaactaggttactttaggcagatgatttaaactttctgagcctaggcattctcatctgtccaaggagaataatggcaatgtcttcttcttcttcttcttcttttaatttaaataggtttttgggaaacaggtggtgttttattatatgaataagctctatagtggtgatttctgagattttggtgca

SEQ ID NO: 258006 - DNA, 623 bp, Homo sapiens
tgaaagctgtccctgcctactcctgttccctgtaccctttatctttcataggcattttccttctaatttggtctttgtgtctgttttgcagaggacccaaattaatacaccataaattctagttttagtgaattacaaatctcccagggtgaagactctagcatcttgtcagatgtttgagctcacattgctgcaaacccaggaagcaatatataagagatgctataaagcaaaaggaggctgggcacagtggctcacatctgcaatcacagcactttgggaggctcagtcaggaggaytgcttgatcccagagtttgagaccagcctgggcaacatagcgagaccccctcttcaccaaaggggaaaaaattagctgagtatggtggcgcaaatctatagtccttgctacccaggaggctgaggcaagaggattgcttgagtccaggatttcaaggcgcagtgagctacaatcacaccactgtgctccagcttgggcaacagagtgagaccctgtctctagaaacagaacaaaacaaacaactaccccctgtcaaggagtggttggactcctggatgaaaataccaccaatacatactttaagtctaaccaggagaacacaaa

SEQ ID NO: 258007 - DNA, 595 bp, Homo sapiens
gggcaaactcctcatgaatggaatcagctccttataaaacaggcccaaggaagcttgttggtcctttccaccatgtgaggacacagccagaggtgccatctatgagaatgagggctctcaccagacactggatctgccagtgccttgatcttgctcttcccagaccccagaactgccagaaagaaatttctgtttatcagccacccactctatggtattttgctatagcagcccaaattgaccaatacatccttcttcagtttctctccactactcctcatcccatggttccttcttcctcacatatttcctgagcgctgttctggcccaggctccatgctgaacattggagcaggagaattttaaaatttcacaaccttgtccttaaggaaatttcagtcctgagagtagactgaccccaaagcagtctttttaaacagctttttattttcatatctgwaagtatgaaaaaagacaccagagattgtttttctggagaaaatattctcaaaatttggatggatgatggctaataagcatttgcagtaaggagaatgagtgggaggtgaatgtagttatgttggacactgagatg

SEQ ID NO: 258008 - DNA, 595 bp, Homo sapiens
tgagatctttgttctagataggctgagtcagtatattcccttacagtttttttttttcttctagagatagggtcttgctctgttgcccaggctgaagtgccatggcatgatcatagctcactgcactcttgaactcctaggccaagagattctcctgccttagcttcctggtagctaggactgtaagtgcacaccaccatgcctgactaattaaaaaaaaatttagagatggggtctcactatgttgcccaggctggtcttgaactcctggcctcaagctattctcctgtcttggcttcccaaagtgttgggattacaggcataagccaccatgcctggcttacagagcctgcagttttcttaaagcagaaaaastttgccatagatattttttatttatatgttatatttgcttttttaaaagagatggtactattatttccctgttgaacctctaaagacatgggcctctgtagacctgtgtcactgagatacaaaagtgaaatattaagagtatcctctcatgtttctggaggtctcttacagcaacatcatctatcacaaacatagctgataatcttgaaatcagcagaca

SEQ ID NO: 258009 - DNA, 504 bp, Homo sapiens
aatgtttattgtgttaaaaaaagatattgtacacagttgatcaaatgaagttcttgacagaaaacctacacaaaaagtattattcagaggctccccatatagctgaggagaagctcaaatggaggaactattgtatttagaagactcttaataatgatgaatgaaggggtgtcctctggcctcagactgtgcactgctttaatgactgtctcctgtcatgtattaagttgaaccacataaacttgctgattccgtcggtcaaaaatgggaaaatattgtcaatttgtatatggttcagcctaatagtttctttgcatcatgattactaattgtaaaagttcacamaaaaaagtgcttttggtgtgaaaatgaaattaaagatgaaaggaaagaggtaggcagacaagtaggctgagtattttcacaaaatgatagttgattatttgcaaaataattcaaataatgtccattcttcctttcatatctatgctaaagctacagtgc

SEQ ID NO: 258010 - DNA, 555 bp, Homo sapiens
aaatgagtttgaaaccaatatgagtctcctgatactgatctcttatttctcaactgcatacaaggtaactcacattaaaaaaaaaaaaaaaacctagttgcaaaagactgtagataattttaccactttcttatgttatattaccttcctgcaggtcattttaataagcttttggtatgcatgagccttgacagcagatggagatgtctaagccatcccttgtattttgatactcacactgcatcttttaataacaattttcggccaagcgyggtggctcacacctgtaatcccagcactttgggaggctgagacgggtggatcatgaggtcaggagattgagaccatcctggccaacatggtgaaaccctgtctctacttagaaaaaaaaaaatacaaaaattagctgggcgtggtggcacgtgcctgtaatcccagctacttgggaggctgaggcaggagaatggcttgaaccagagttggaggttgcagtgggctgagatcatgccattgcactccagcctggtgacagagtgagactctgtctcaaaacaa

SEQ ID NO: 258011 - DNA, 518 bp, Homo sapiens
acatttttaattggttcttatgtgttgtgttcatcatttcatctttcctctgttctcatctctccagtgttctattatatttaacggtgatttcataaacccatttctttgttgtgctttagggaaagacttacttgtattgtggactcctgattacagagctctgtatctggtactacagagagctgctgtgaaattactattggttggaataccttaggtgtgaagaaagcaatgtggtttggtcaattctcagtggagcttttcattttattggcatttgtctattctattttaataaaccattgggtagatgcaggcagaatgtgccacaaatcaattatatgatccatgtagcagcttyagtgggctcaaactgcaaaggacatactttgctgaaattgtatattcaattgctgaggtctacattgactctatttagatctattctatcttttaaaaccctgaaaacactggagcaaactcttttgacgaggacttgttcagaagaagcacac

SEQ ID NO: 258012 - DNA, 607 bp, Homo sapiens
agacctaaagtgaaatagttctcgcataacaatgagagaacaacctgcctacttatttttatttgaattgtacatttattttgaaaatttagatgaaaatttgaatagctatgactgaaaacagtaagttttggggaaaagctcccccaaccctaaatcagagtgtgttttcagaagctaaagtctaaaaatacaaagagtcaagcagaatttaaacgtgaycaaagtttgaaaatagagcagtataaaaagccacaaatatgttaataggatctagagcataaattcagcataatcattattccttggtcacggggaagttaatgatgctatttttctttttcttttctttattcagtttaacaagaatatcacctagcttttggcattttaaatgtaaagctcacagtaagttgacaattatttctctactttgggaaatcaatggctatagagtcagaagataagtatttgaacctctgcatcctttaatagccctgtaatcttggacaacttaatctctcaggcttcacttttttccatcaattaaaagggagcaacactactgaccttacaaggctgccatgaggattaaatgaattactca

SEQ ID NO: 258013 - DNA, 509 bp, Homo sapiens
caaaataatgctactgtggaaaaatgaagcttggtaacacaagatgaataaagaactgcagaaaagagaaaccaggaggttacccagacacttgactcagcacttcccaaattctacctcgtttattcttaggtattaagtgaaatacagtgtacttgggaatggcaggcatgaacctgtcaaaaaggtcacaaaataggcaaagctaaggcaactaagatcacttggcccagggaatgctgaagtggagggaaactacaaaaacaattcttcaaattggcaaataaatattctccagatgaagataagcagctgttttagtcagctgggtagtatctgggcttatattacagaagagagaattatagttaggcttaggaaaaacttcctggtacctggcagttggaaatgttccttctctggrgatctttaagcacagggccgaatactgccttgagatgattttagtgtagccttcttgaagttgtgaggataaccaaatgttgcat

SEQ ID NO: 258014 - DNA, 617 bp, Homo sapiens
ctgggggccacactgttttaggggtggtggtctgctctcctttctcatggcggtggaggttgatgatacgtttgcccttctccagtccatttggaactggctggctcaactgccctctagccaygagagttactacaatttagctcttttatatggctcccaggctcagcagcacctgtaatgaagagcaagccaatcatatcagtaagtccaacaaaaaaaatctaactttccctggatgataaaagatagccagggagagagaggggagaaagatgggaaagggaggctgagagagaagtaaacatgctcctgatgtctctctctcctctttcttgccttgctagcagaaccaagccaaaggagcacaaagtactctctgccttttggcattctacctccttggctgcgtgtctactgctggtcccaggtcaagaactaggcctcactattcagagggaccacctgcagattttacttgctttttaaaaatctcagatctagttcttatatataggttacagcagccaaaattcagctatgataacactcctcaccaaatatgtcctgggcaactttgttacctccaactttatctacggcagggacttttgtag

SEQ ID NO: 258015 - DNA, 588 bp, Homo sapiens
attcctggttaatctactagaccatatttgtcaaatgcagggataatatcatattaacttccttatgtgttaagaacggggcttgacatataaaatacatgtatcttgaatgaatgacttaagagtttattattgatgtgccattttaagtacccaagcatcaggaacaggcatttattaaattctacttatttaggacttttgctgcttatgggagggtccttgtttctcaattttgagagttttcaatgcycctatgtgacctagatttgtttagaagaataccttaactttttacaaatacagatatgtaactcaaattccttaatgtactattcaatataatttattgaatattatttcctagatattataatttttaaataatattcagttcttctgtcctttaatgaacattttaattttccttcagaaaacttcaaattgtattggatgttgaattccaggagttctcccaatttcccccctactcaccccttttaccataaccttatggttgccattgatttgtaaggtaaatttcacctttaggaaagacacacttcagagaaatgcacttctgattat

SEQ ID NO: 258016 - DNA, 540 bp, Homo sapiens
gatttaatttgttcaaaataactacattgtgggtttgaaagtataagagaggttgctctgtgatcctttcctgccaaacaaagcctcactatgggttgatttttagcaataaatataaagagacttgaaaatgtcagttttgtataaagctaggatgattgttattcagtgttttattcttttactattaaattttagaaatgcaattttacatttctaatagtaactactttggggtttggcaattggtaagcaatgaataattgttgaatacttggatgaakagatgaatgaatgaggtatcagttctgttctcaggacctaagaagtatggatagataaagcaagatttttctccatctactgaatgaacacggcagggtcagcagtactggacaaagctatgacacatttagaatctgacagcattgaatgcacacagcagagcaattacagctctagttccataggcaaccctaagaaacttttctatcattgaggtggaaatactagcttttaaaaaaccgacacacctattag

SEQ ID NO: 258017 - DNA, 556 bp, Homo sapiens
gttgcccaggctgctctcaaacccctgagctcaagcaatccaccctcctcggcctcccaaagtgttggaactacaggcgtgaaccactgtgccctgcctccactcacttttatcttaggcttttgtgattgrgatgtagatagaaagtctgaactaaattccttagatttatgcatgactactgggttcattgagaaatttgggtgtgaattggcctgatgtcaagatattatgagcatcctgatttatctggagatgcttccaaacactaacaggtgattattacagatcgcaagatgccaagtaaccataagaagaagaaaacatataaggattgagaatgactaggggtgaagtcaacatttgtaggcctcttgtctcttctgataatgccttggtttactacttattatggaatgtgggttgctatcatgacaaaagaggtaacggggattgtgcaaagtgagcttgtagattaagcttcacaaaacttggtttaagtttcttcctgggagtttagcttgaaacatctcattgacagttgtcctgatagcag

SEQ ID NO: 258018 - DNA, 557 bp, Homo sapiens
gatactgacaaagcaagcttggccaaatgtgatgggtacatgagattatctatgcttttttgtgtttgagattttcatgaatacaaagttagaaaataggctacagagtttcaattttccactgtataaacaacacagcattaaatatcagtcgttcagtaaataattatggagaatcaactatatactctttggtgctgacctttgggtgacccaccaaagaagatgggacagattcctatctagtcacccttaatgaagagatccattggttgaagtatcctgcttgtaggtaaaacattccaattagctttctagtttttaaatctattcatatgtctggacatattaggactggacragacttaagtaaattgtaacatgaaaatacagataccaaagttaacaaacagaaatgagaaacttggagaaagcagagatgacataggaacagaaaataaagtaaaatagaaacaaaagaaatacttaatatccttgtagagttaagagaagatattacatccatgaaataagaaaagaatatcaccaaaagggat

SEQ ID NO: 258019 - DNA, 600 bp, Homo sapiens
  misc_feature (1)...(600): n = A,T,C or G
tgccactgcacttcagcctgggccacagagagaaaacccatctcaaaaaaataaaaagaaaacaaggaaagcaaagtcacttgcccagggaccacagatccagaattgatgataacatccaggcaggctaactccaaagcccaggnttgtcactttctttgctctgtagcactccagtatgtgtaatgagtaaccagagttctttggtggaactctttttctctgagatcttcttcatgggtgggaggaaggacacagattttggagtccaaagacctagattcaaatctagaccctgccattaccagctaggtggtattgggaaagcactatacaccttgttggtgcttggttggtttgctcatttgtaaaatgggatagcaacagccacctccctgggmtgctgtgagaactaaatgagatggtggctttaaaaaacaatgaggcaccaaaagtagtcagtgactgttaatgagcaacatgactatttcctcaactgagactgatctgtggtggtgcagattaagtagatagcccaaagtagccaacttggatctgcaggagccctgcaaggccctgtggaaatgtcctcagtgtgga

SEQ ID NO: 258020 - DNA, 536 bp, Homo sapiens
ttcctgaaaactccatctaaagaagtccccctcccccaacatcattcatcaatgactcatgccaagataatgtccacatagcatgtatcaccttctgaaatgatcttatttactattttttcatgtattttattgcctgtcttcctctaccaaaaagtgagccccagagatttgggtctgtttattcattctgcatccctttttgggccaaggacagagtttgtcattagcactatctcttatctcttaatacttattaatgcacaaaaaactaagaaagcataaattaaaaataaaatacacatctacaatatttgcatatatgggtttgctgggggagaaacttctttttataatcacagataatctagtgtctgaaataccaggcatgtgcagtcagctaacacaagattcagtatttactgggtattcatcacagagttyactcattcttatttcctcaaaatatcacctataacccaatgactcccacatatttatctctagccactgactctcacctccagtttccaatt

SEQ ID NO: 258021 - DNA, 575 bp, Homo sapiens
cttgaacttgattcttctttatcaaagttgttgtggccattgtagatattttgcatttcatatgaattttagaatcagtttgacaatttctaccaaaaataaagccaactgggattttgattgggattgcatagatcaatttggggagaacagacatcttatcaaaattgaggcttctcacctattaacaygatatatttcttcatttatttaagtcttttttaattttttctttaaatgttttgtagctttcaatgtatagttctttcaccttttttggtcagatttatccctaagtattgaatttgttgtaaagggtattttaaatttcaatttccaattgtttgttgctagtgtatagaaataaaattgatttttgtatattgatcttgtgtcctgcaaatttgctaaactcattaattagatatggtagttttatgtagattacataggattttctacataaataatcatgctgtcttcaaataaagatagttttactttccaatctggatgccttttgtttctttgtcttgccttatttcaccagtgaggacctccagcatattgttaaa

SEQ ID NO: 258022 - DNA, 551 bp, Homo sapiens
ctgtatgtacagcctgcagaactgtgagccaattaaacctcttttctttataagttactcagattcaggcattcctttatagcaacacaagaatggcctaacacacccagtaagtagagagagtagaatgaacycacagaggaaataagccaggctagagcccagctagtccccaagcctgcttaattcccaacagtttccatttcatttctggctcctgttcacagctatctcttttcaaaacagctttttctgttttgaaaataacaagtaacacattatcactgggaaaaaaaaatcagaagaaccccagagaagaatctaaatgtaacacaaattctcatcttcccagaatagtgcatttccttcccgtcttttttccacacaattgcagacatttttttttccagaaaatttagatcatactatttattagacattttatttgtttactgtaacttaacaatgtatcatttcccaccactttaggaggccaaggtggtaggatcacttgaagttgggagttcaagaccagcctgaccaacatggtg

SEQ ID NO: 258023 - DNA, 643 bp, Homo sapiens
tttaccctgtgtcaaaccctggccgcatctgtccagtgctaaagggacctgaggttctaggggtcacccaggttgtcactggtgaacatgagatttgaacccactttgcctgaccttgcaacagtgccttcctgctatcattctaccattcacaccaatgaggcgaggattaagtcccatttctggtcctgttccttcctcttaaggagtagtctagaattctctccaaatagccaaagtgaaataggacttacctgcttatgcttacttgagcttcttggcctgatatctattagtcactcaataaatgtttgttgaatgactgcttgattggctactacagatacagccactgtagatccaagattttaaatacaaatattccaattttgaaatttttgtttcactatcaaatcattttgtattttaaaaaaggtggaaarggcctggggtcttcacattgtagaagaaaagagactactaggggattttaatgcaaaagagatggccttggacaaatcacttaacctttcggagtttccattgattcaccaggaaaactggggtgataacaccaacctaagctggttcccttcacaccctcacacctgcttccttcagcgtcacacacacatacactcac

SEQ ID NO: 258024 - DNA, 643 bp, Homo sapiens
tttaccctgtgtcaaaccctggccgcatctgtccagtgctaaagggacctgaggttctaggggtcacccaggttgtcactggtgaacatgagatttgaacccactttgcctgaccttgcaacagtgccttcctgctatcattctaccattcacaccaatgaggcgaggattaagtcccatttctggtcctgttccttcctcttaaggagtagtctagaattctctccaaatagccaaagtgaaataggacttacctgcttatgcttacttgagcttcttggcctgatatctattagtcactcaataaatgtttgttgaatgactgcttgattggctactacagatacagccactgtagatccaagattttaaatacaaatattccaattttgaaatttttgtttcactatcaaatcattttgtattttaaaaaaggtggaaaaggcctggggtcttcacattgtagaagaaaagagactactaggggattttaatgcaaaagagatggccttggacaaatcacttaacctttcggagtttccattgattcaccaggaaaactggggtgataacaccaacctaagctggttcccttcacaccctcacacctgcttccttcagcrtcacacacacatacactcac

SEQ ID NO: 258025 - DNA, 653 bp, Homo sapiens
cgttgtcaaccaagataaatgaatgaaccactcagcaaaccagggcacttccaccccagagcagaactgtcactggtaaataaatcatcgaagctctacactggacgtgccaatttcagcaggagatsatgagtgcatttatctgcttggcgacacgctggatgtcttcaggctgtgaggggctatgaaaatactcctcagcatgcactccgcccgaggctggttccgcggcatgggtggcgggagtgggaagagcatctccttccagaactgtgttcatcttaaacttcccacagtccccctgattcaggggcctgatgctttctatgccttttaaaataataataaccatcatcgtcatcataagtagcgtgtattgagtgcttactatgtgccaggcattgtgattttaaaaaatatacattatctccctaactggctaaaatgttgagtctctgctgcataggaaaatgactcctttgaggttgtctattctttacaatgattcccaaacactgagtgatatctaagagaggtggtccagctccaggtcagagcttaacttccaagaacttccctaagttcccactatcaccagcagcagtaaccaccaccactccaagcctcctctctctgattagactcccaaaagg

SEQ ID NO: 258026 - DNA, 653 bp, Homo sapiens
cgttgtcaaccaagataaatgaatgaaccactcagcaaaccagggcacttccaccccagagcagaactgtcactggtaaataaatcatcgaagctctacactggacgtgccaatttcagcaggagatgatgagtgcatttatctgcttggcgacacgctggatgtcttcaggctgtgaggggctatgaaaatactcctcagcatgcactccgcccgaggctggttccgcggcatgggtggcgggagtgggaagagcatctccttccagaactgtgttcatcttaaacttcccacagtccccctgattcaggggmctgatgctttctatgccttttaaaataataataaccatcatcgtcatcataagtagcgtgtattgagtgcttactatgtgccaggcattgtgattttaaaaaatatacattatctccctaactggctaaaatgttgagtctctgctgcataggaaaatgactcctttgaggttgtctattctttacaatgattcccaaacactgagtgatatctaagagaggtggtccagctccaggtcagagcttaacttccaagaacttccctaagttcccactatcaccagcagcagtaaccaccaccactccaagcctcctctctctgattagactcccaaaagg

SEQ ID NO: 258027 - DNA, 597 bp, Homo sapiens
ctcttgttacttattcatcatcaacaataaaaatatatgataagcttaagagaactatattgttcaactagtaaatcttgatcaagcatcagttaaagactgagaacacagcagggaacaaaaatgggcataaatccattactttaggagtttatggtcctgtctcactttccaaggatggaagattattgggtcagtttgaaggctttctttgctttctagaatctggataatggataaatgtgaaaactcaaaagagatagaaaggctcagtagattcataggagaaattgctgcatgggaagagaagactagggaacacaagccagggggcatggctaggtttgaagattttagggagttcataaaagagaagagaagaatgtagtggagckttttgtggggaacacaatgagaagaaggaagtgcattttaagctttgctctgttgtgtgaatggaatgcctctgtgctctgtgatattttttaagagacttcagtaattgcagttttgtggtatttttttttcttttttttcttttttttatttttttagatggagtctcactctgttgtccaggctggagtgcagtggcgt

SEQ ID NO: 258028 - DNA, 591 bp, Homo sapiens
gggatactggaaagaagcaccaacgcgtgttctctgtctgtagtctaccaggggaactatctgggtgtctgggaaaaatcatactcttttgagatatttaaataaaaatgactcatactcctatgaagtaccctctccaagagcctctcaggagaccattcttgtggttccgtctccaagttcctgcccatgaagaattctctccatttaccttgctctggactatccttgaccttgatccatcctcacccaccaagaccgctcatactaascacctaagggtgtgtaagacttccctaaaagtggtactggcatatgagttttataccacaatgcaaagaatttaaaattaaatactgtgcaccatattttagtttctgattccccccaccacctggccttcctcactgatcacctctcactgaaactgcctttgcaaaattataactgaggaaattgtgacagtgaaagaaatcagacctaaccgactctatcttgcttctaaccctaaagctgcccttgttcattcctgggtgtaggccgaactaactttgggaaggaattcagttcatggtttgactctgacacaaa

SEQ ID NO: 258029 - DNA, 561 bp, Homo sapiens
tactgccagttttagcagcgccagarcaaaaaaaggatttgtatcacatccaggctgtgatgcaagcacctataccacttgggtcatgtgttccagcagcctagattgtgccttagcagtctataccataacgagatacagtctgaagccttcagcaactcccaatagaagaatcacagtgaagacccacaaatgttgaaataaggtcatggtatattctatattctgctgacaaaaattttacatttagcaaaatagtttctatcttgcaattgcatcaagatagagccatagtgcctgatcatagaaaattaaatgaatgtgaaacccaagatgcccaatattaaatgtgaatttgatccactcaatcagaaagttggacatagaaagataaactttctattaaatgaaagttgtatgttatgaatgtacccaaggaagtcttgaaggcacaagcaagttggatacaaatattgctcatattcatatgttacctgctccctgctctaaacacttcactacttctctttatacctaaatgtgtggcctcatgtggagttt

SEQ ID NO: 258030 - DNA, 570 bp, Homo sapiens
tattcaaatgttatcaaagagtattatataggacaacagttcatctgagtcaggtattttctctatagaaagcacttatgatgctcagcagtaggcacagactttaacctcctctacttctcaagtgcctgagctatagcatcaaactgtgcatccccttccagttcactaaatgtgaacattttagcaattgtactttgtcatgccagggatcatcaaaattttacctttcaccagtaatgggrtcctcagttatatggccagagagtgagtcaactctaggatcctgttcttagagtctgtttcttaggatcctttgtgttattaactgttttagttcagagcccaaataagcagagcctgagatgagaatatcatgagatagatttctggaatgtttgctcttaatgcagaatatgtaaaggaatgagagtatgtcaaagaaagaagctaggcaaagaagtgtgtttagcttaagtctagccttagcctgactccataaggaactctatggtaccacaaaattgtctcatttagaagaaatgaggctggacttctgaaccccatttc

SEQ ID NO: 258031 - DNA, 570 bp, Homo sapiens
tattcaaatgttatcaaagagtattatataggacaacagttcatctgagtcaggtattttctctatagaaagcacttatgatgctcagcagtaggcacagactttaacctcctctacttctcaagtgcctgagctatagcatcaaactgtgcatccccttccagttcactaaatgtgaacattttagcaattgtactttgtcatgccagggatcatcaaaattttacctttcaccagtaatggggtcctcagttatatggccagagagtgagtcaactctaggatcctgttcttagagtctgtttcttaggatcctttgtgttattaactgttttagttcagagcccaaataagcagagcctgagatgagaatatcatgagatagatttctggaatgtttgctcttaatgcagaatatgtaaaggaatgagagtatstcaaagaaagaagctaggcaaagaagtgtgtttagcttaagtctagccttagcctgactccataaggaactctatggtaccacaaaattgtctcatttagaagaaatgaggctggacttctgaaccccatttc

SEQ ID NO: 258032 - DNA, 611 bp, Homo sapiens
attatgagggtacttggaatgaaggtaactatggtcctayaatttctttattggaaggagaagtaattatcttttaaaatagtctgtgaagaacacattttagtatggatccattatgaatgcagtctagttttgtatgtagaaagggattgaatctagttttctgagtggaaagggatttaaatcagaaagttagaggcttataaaactttcggaaggacagacgggttgaagataaaagagtaagaaaggtaaagcaagtaacatctagcattcaggaatttagaaatggtagaaactacttctgatgaactcaactgtctgtagcaccaaaaagggatgatttgccagaggatactcaaagctactggcaaaaaaaaaattctttcatgatgtctgctgaagccttcacatgcttgccaatgccacatcaggcttgttttgtatctttcaaatcttgtaaggaatggctttacttggcaattttcaatttgaaattctgctagcagggtttgtaaagtgttagtttacacactggttagtttcctagcatcccagccctgtgataggaggacactggcaaagacaatctggcctgctacctcattcac

SEQ ID NO: 258033 - DNA, 611 bp, Homo sapiens
attatgagggtacttggaatgaaggtaactatggtcctacaatttctttattggaaggagaagtaattatcttttaaaatagtctgtgaagaacacattttagtatggatccattatgaatgcagtctagttttgtatgtagaaagggattgaatctagttttctgagtggaaagggatttaaatcagaaagttagaggcttataaaactttcggaaggacagacgggttgaagataaaagagtaagaaaggtaaagcaagtaacatctagcattcaggaatttagaaatggtagaaactacttctgatgaactcaactgtctgtagcaccaaaaagggatgatttgccagaggatactcaaagctactkgcaaaaaaaaaattctttcatgatgtctgctgaagccttcacatgcttgccaatgccacatcaggcttgttttgtatctttcaaatcttgtaaggaatggctttacttggcaattttcaatttgaaattctgctagcagggtttgtaaagtgttagtttacacactggttagtttcctagcatcccagccctgtgataggaggacactggcaaagacaatctggcctgctacctcattcac

SEQ ID NO: 258034 - DNA, 567 bp, Homo sapiens
tattgaagtctctgttatcatagagctgacttttctctcttcaattctgtcagtgtttgcatcatgcattttgtggctatgtttggtgtatgtatgaccataattgttacagcttcttgatttgatccctttatcaatatgaaatgtcctttgtctcttatgacacttcttgacttaaaatctmtgtttgtggtaccagtatagccactctacctctcttggttactatttgcatgggttatctttttctgtacttttgcttttaaccaatatttgtcttttgatctaaggtgagtctcctacggtatacaactggatgatgttctctgttctaagctttgccttttgattgaagagtttaatccactgtcatttcaagtgattactaatgaagaaagaattacttctgccattttgctatttgttttatctatattttatatctttttggccattttccccattactgctttcctttgtatttagtgtattgttttgtaatgacccattttggttcccttctcattttcttatatgtacatttttattacaatgtaggttggtatc

SEQ ID NO: 258035 - DNA, 627 bp, Homo sapiens
tgccatccatgtaagatgtgacttgctcctccttgttttcctccataatcatgaggcttctccagccatgtgaaactgtaagtgcaattaaacctctttcttttgtaatttgcccagtcccaggtcatcttcagcagcagtataaaaatggactaacacacttcccattattaaaaactattgtagtataactaggattggaacaccatttttcaatctcttagactgtgggaaacttcagccatcttataatgtcttatgtaacataacctaaaaagcagagattattggaagaaaaatgtataagcattgcagataagaaacttaaactttaacaaatgatgagggatcagttcagtgactgatagaagaggggaccaatgaggttacttacaggagggttttcagatgaggcaactagagttgtgtcatggcagatagtagaaagaaatggatttattcatttatttrgcggatatttgtttaatgctatatgctagatactattctagctgctgggaatacagtgttaaatgtcatagataaaaactttattcttattccgttaaaatagagctgaacttgaataataacaatgaaaccagtttggagaatggccgagggaaa

SEQ ID NO: 258036 - DNA, 569 bp, Homo sapiens
atatagttaattgatattatgaaactgtgttctataatgattgccaaataatgtgggtctaccatggctaatgaatatggaaaaatatttattaattataatgatacaaaacttcaaaaatacattttttaaaacagrgagttttctatattttcaatgtctcatctatttttatctttctactaattttaatcttcatttttttttgtttttatttatttatttattttgagatagaatcttgctctgttgcccaggctgcagtgcagtggtggaattttgactaactgcaacctctgcctcccgggtacaaacaattctcctgcctcagcctcctgagtagctgagactacaagcacatgttaccacacctggctaatttttgtatttttagtagagatggggtttcgctgtgtttcccaggctggtcttgaactcctggcctcaagtgatcctcccaccttggcctcacaaaatgctgggattacaggcatgaaccaccatgcctggccttcatcttcatcttaatttacccagacatcaccatttgcatttgggcatttttgtca

SEQ ID NO: 258037 - DNA, 569 bp, Homo sapiens
atatagttaattgatattatgaaactgtgttctataatgattgccaaataatgtgggtctaccatggctaatgaatatggaaaaatatttattaattataatgatacaaaacttcaaaaatacattttttaaaacagggagttttctatattttcaatgtctcatctatttttatctttctactaattttaatcttcatttttttttgtttttatttatttatttattttgagatagaatcttgctctgttgcccaggctgsagtgcagtggtggaattttgactaactgcaacctctgcctcccgggtacaaacaattctcctgcctcagcctcctgagtagctgagactacaagcacatgttaccacacctggctaatttttgtatttttagtagagatggggtttcgctgtgtttcccaggctggtcttgaactcctggcctcaagtgatcctcccaccttggcctcacaaaatgctgggattacaggcatgaaccaccatgcctggccttcatcttcatcttaatttacccagacatcaccatttgcatttgggcatttttgtca

SEQ ID NO: 258038 - DNA, 580 bp, Homo sapiens
gcatatgactgggttctgtcaacaaggctcccccaggaatgacagatgccatttttaagtcagacccttagttcttgaggatggtgatattttgtatttttcctcttctccttccacagtgatctcaaaagtcacattattgtcctggcaatgctattatgtgaaaaaatcctggattcttatgctatcatttaaaaaattgctgcctgatcaacatgaaagagaaataaaagttaataatgttmagctgtggaacttttgagaatatatataatacctattatgactgtgagtgaggggtccagctccaggcaaaatcttatgtaaaatatttgattgactataggcagttgcaaaggctttgccttccaagcctcatgagggaaagctacccttcccacagcacacgtggtggtgccttacagttttctcaaaagagttatactcaggactcagtccctcttagccatccatagtcataggcatgtttgcattaccagctcaggcacttcaatttagagattccttatcggggaagggatgcttcagctcaggcacttttcaggtgcccctgtgaaga

SEQ ID NO: 258039 - DNA, 487 bp, Homo sapiens
ccagctccaggcaaaatcttatgtaaaatatttgattgactataggcagttgcaaaggctttgccttccaagcctcatgagggaaagctacccttcccacagcacacgtggtggtgccttacagttttctcaaaagagttatactcaggactcagtccctcttagccatccatagtcataggcatgtttgcattacyagctcaggcacttcaatttagagattccttatcggggaagggatgcttcagctcaggcacttttcaggtgcccctgtgaagaccgccttatctaaacacttttctccattcttactcagtacttctctttactcagactctccacctttccctaccctcaaaccaaggaagcagtgtctctttcagagaaatggaacacgagggaagtgacatcatattttgtccctcccttacatggccacggtaagaacaggcttgatgattatgttcagtttgattcattatactgt

SEQ ID NO: 258040 - DNA, 487 bp, Homo sapiens
ccagctccaggcaaaatcttatgtaaaatatttgattgactataggcagttgcaaaggctttgccttccaagcctcatgagggaaagctacccttcccacagcacacgtggtggtgccttacagttttctcaaaagagttatactcaggactcagtccctcttagccatccatagtcataggcatgtttgcattaccagctcaggcacttcaatttagagattccttatcggggaagggatgcttcagctcaggcacttttcaggtgcccctgtgaagaccgccttatctaaacacttttctccattcttactcagtacttctctttactcagactctccacctttccctaccctcaaaccaaggaagcagtgtctctttcagagaaatggaacacgagggaagtgwcatcatattttgtccctcccttacatggccacggtaagaacaggcttgatgattatgttcagtttgattcattatactgt

SEQ ID NO: 258041 - DNA, 534 bp, Homo sapiens
tgtggctggggaggcctcactatcattgcaaaggtgaaaggcacttcttacagggcagtggcaagagagaatgagagagccaagcaaaagggatttctccttataagaccaccagttctcatgagacttatttactaccatgagaatagtattgatgaaaccacgccaatgattcaattatctyccactgggtccctcccacaacatgtgggaattatgagacctacaattcaagatgaggtttgggtggggacacagccaaacgctatcacctgtgttacccctcccccagccccaggcagcacagcaaggagggacataaccaccacttgggagtggagagcaaagtggagcactagactttgcttgggccccaatactaggcctctcccagtaaaatctaatatcagcagactgagcctccaggcctactccagtaccaggtcagcccccaggtaaggctagtcctggtggtcctagtttctagaccacccccagcaccaggctggcccacagagccccaggcttcaggcc

SEQ ID NO: 258042 - DNA, 534 bp, Homo sapiens
tgtggctggggaggcctcactatcattgcaaaggtgaaaggcacttcttacagggcagtggcaagagagaatgagagagccaagcaaaagggatttctccttataagaccaccagttctcatgagacttatttactaccatgagaatagtattgatgaaaccacgccaatgattcaattatcttccactgggtccctcccacaacatgtgggaattatgaracctacaattcaagatgaggtttgggtggggacacagccaaacgctatcacctgtgttacccctcccccagccccaggcagcacagcaaggagggacataaccaccacttgggagtggagagcaaagtggagcactagactttgcttgggccccaatactaggcctctcccagtaaaatctaatatcagcagactgagcctccaggcctactccagtaccaggtcagcccccaggtaaggctagtcctggtggtcctagtttctagaccacccccagcaccaggctggcccacagagccccaggcttcaggcc

SEQ ID NO: 258043 - DNA, 649 bp, Homo sapiens
gacactacaagaaagtaagttacagatcaatattctttgtgaacatagatgcaaaatcttcaactaaatactagcaaaccaattcaatagcacattcaaagaatcatttatcaaagggatgcaaggacagcacaacctacacaaatctataaatataatacaccacatcaacagaataaaggacaaaaacatatgagcatctcaataaataagaaaaaacatttggcagtatttaacttctttcataatcaacactcttaacacattaaatatagaagtatcccacattcttaattttgtatgtgtgttttcagcagaggcaccgtaacacaagtagaaaaattgtacccgacattatgaactcaggacttttccttcacctgggaaaaaatcatgataattaaaaagaagcagaaacctatttaatttcttctsaagtccagtatagttaaatgattggtacttcatccatttgacatagtggaaaagaaaaaactagattagagtttggtagacacagtatggcatctgcctttgatcaattttgttgcatgatttgaaatgagtcacctctttctaaatgtcatctcatttgaataagtaattttaaactatttgcagcaaaacattcagtaactcatttcactat

SEQ ID NO: 258044 - DNA, 345 bp, Homo sapiens
tcacaggtcatgaaacctaaataaggattttccaagttaccaagtatatcttcacattatacatctggagagcagacaactcactgcaggctgggtctatgaatccactggaaacactgtgttatacattttggccaaaaaaaatcatttatcatctgacctctattagccccattccaatcagaaatgatggaatattgcattccatagtwttaatcttgtttcagaccttatatgtcctgtcttgaaaagtcaaaatatttcccattctctagggcataggtgccattgaaactggctcaggtccctttggggaaaatagtaggcattttttttaacatgtta

SEQ ID NO: 258045 - DNA, 345 bp, Homo sapiens
tcacaggtcatgaaacctaaataaggattttccaagttaccaagtatatcttcacattatacatctggagagcagacaactcactgcaggctgggtctatgaatccactggaaacactgtgttatacattttggccaaaaaaaatcatttatcatctgacctctattagccccattccaatcagaaatgatggaatattgcattccatagtattaatcttgtttcagaccttatatgtcctgtcttgaaaagtcaaaatatttcccattctctagggcataggtgccattgaaaytggctcaggtccctttggggaaaatagtaggcattttttttaacatgtta

SEQ ID NO: 258046 - DNA, 555 bp, Homo sapiens
aattccaacataactccataattaattgataatatacaatatcatctatttttttttactattgttaaaaatttgtttattgtttctctcaagtcaagaatctactatagctgtttatggtctatcatattagkccttaccgagaccagctcagtcggggagaccctaacccagtggcgctagaggaattaaagacacacacacagaaatatagaagtgtgtagtaggaaatcaggggtctcacagccttcagaggtgagagccccaaacagagatttacccacgtatttattaacagcaagccagtcattagcattgtttctatagatattaaattaaaagtatcccttatgggaaatgaagggatgggccgaattaaaggaataggttgggctagttaactgcagcaggagcatgtccttaaggcacagcttgctcatgctattgtttgtggcttaagaatgtctttaagcggttttccgccctgggtgggccaggtcttccttgccctcattcctgtaaacccataatcttccagcatggacattatggcca

SEQ ID NO: 258047 - DNA, 604 bp, Homo sapiens
acttttcttgatctcagtttattttttttgttttattttttatatagatggagtcttgatattttgcccaggctagtcacaaactccaggactcagaggatcctctcacctcagtctcttaaatagctgagtcctgggatgacaagcatgggccccacaccaggctgaattttcactattgcaggctgattcttgctaaggaaacaactggaaacaaagttgaagcagcatctttttaaaattttttacattagggaatagtagcaacagcaatagtagcaacaaacaataatccagtttaaaagttcttaacaaaatcagaaaagaacaagtccacaacaaaagagctaagagaaagcccatgagctactcatactgcttcttctgtagccctacactgacaaaatttaagacttagccacaaaaagaagaaggggagcaggctggggcaaacacctgtaagccagggatatgagcrctctttccccagctttcacactggcagtagtgatgaagaagtcgtctcagaattctacattctcctggcaggaaatctagccttatttcttctccacacatacagggggcacttctactctccatg

SEQ ID NO: 258048 - DNA, 511 bp, Homo sapiens
aaaatgttcccttcttgctgtaacagaaatttaatctttctttgaagatactacttctgcagcctactcaaatagtgaaygttttctctaccatataccctgaaaatagaatgggtgcccttctgactgttgactcttccaatcactttcattttcttattcttgaaaagctgtaccattgtagagattttctatgactcttacttgttgaaatcatctacaaaacctacatcacccctttatcttttaaaaattagttcctgattttttttattactatccccaacactcctgtcatatttttgggttacttcgctatttgtgtagatcatagaactatggttgacttctcaaattcttgatatcttcatccccatttatgtggactttactgagacagtcattcccaacacacacgctagatccagttattaccaacaactgcaacctcatcataatctcaatttcaagaatctcactctctgatgtgtcttatatatccatgtcatgc

SEQ ID NO: 258049 - DNA, 511 bp, Homo sapiens
aaaatgttcccttcttgctgtaacagaaatttaatctttctttgaagatactacttctgcagcctactcaaatagtgaatgttttctctaccatataccctgaaaatagaatgggtgcccttctgactgttgactcttccaatcactttcattttcttattcttgaaaagctgtaccattgtagagattttctatgactcttacttgttgaaatcatctacaaaacctacatcacccctttatcttttaaaaattagttcctgattttttttattactatccccaacactcctgtcatatttttgggttacttcgctatttgtgtagatcatagaactatggttgacttctcaaattcttgatatcttcatccccatttatgtggactttactgagacartcattcccaacacacacgctagatccagttattaccaacaactgcaacctcatcataatctcaatttcaagaatctcactctctgatgtgtcttatatatccatgtcatgc

SEQ ID NO: 258050 - DNA, 602 bp, Homo sapiens
cctatccctctagagaaccctgaccaatacagtatataaagacgaaattttacatattacagcatgaatgaaagcagattgcaagagagaagggacgagacataaacatgggaatatatcatgtgtttagagctttcagccattgattttcttttagcatttgtgtttttgccatttcccttccattgcacaatgtcctcatgtgacttgtttgctaatttgaaaattmtcatagcatatacaggacttttttgcatactgggtacttgggaatagttatcaactgacaaagtcaggttttgactcctaatccttggactctgcttctctatatatgtaatatgtagccatttgggtgcaacatttaaagagtatcataagtactttaatagctgccaatactagctattaataatgggctagatttgcatttcttctctctatcctctcctctgtcaagtatagatctgctaatcaagtacaaaacatattatctgagagaaaatgactataaaagcagcattctgtccacctattattgggtggcaaaaattcagagagtaggtctatggatgaataagtaacacaaagcaaattaacac

SEQ ID NO: 258051 - DNA, 575 bp, Homo sapiens
gtgatgtgaagtagttcaggatatgaatctttatgaaacataagaacatgggttgttattaatggaatcttacaattcgatggcctccgagtcattagttctcactttatattacacattgggaaactgagatgcagaagattttaaataaactgcttgaggtcacagagaatgttggtagcaaagccacaatgaaaacccaggtcttggcatttccagtgaagtgttttgtttttcctgttttctttttcttttcttcttctacctactaagacctgctttctttgatctgctcagttctattcttttctatttagctgtagaaagaaacacctaatacatggtgagcaatcatgtattaattagtgataataatgscaaccgtgttggtgtgatggagttgtatgacaagctatttctctggctcaccatttaatttattctgccatcggacttagaagagattgattttattgctttacattttggaacttagtgagcatttctattataaccctagagtcacatcacaacatcagcctccatgcagttacacttcataaagaggctaatag

SEQ ID NO: 258052 - DNA, 575 bp, Homo sapiens
gtgatgtgaagtagttcaggatatgaatctttatgaaacataagaacatgggttgttattaatggaatcttacaattcgatggcctccgagtcattagttctcactttatattacacattgggaaactgagatgcagaagattttaaataaactgcttgaggtcacagagaatgttggtagcaaagccacaatgaaaacccaggtcttggcatttccagtgaagtgttttgtttttcctgttttctttttcttttcttcttctacctactaagacctgctttctttgatctgctcagttctattcttttctatttagctgtagaaagaaacacctaatacatggtgagcaatcatgtattaattagtgataataatggcaaccgtgttggtgtgatggagttgtatgacaagctatttctctggctcaccatttaatttattctgccatcggacttagaagagattgattttattgctttacattttggaacttagtgagcatttctattataaccctagagtcacatyacaacatcagcctccatgcagttacacttcataaagaggctaatag

SEQ ID NO: 258053 - DNA, 589 bp, Homo sapiens
gtagagaagaacaacacatactggggcctattggaggctggaaggggggatgagggagaggatcaggaaaaattactaatgggtgctaggcttaatacctgggtgataaagtctgtwcaataaagccccatcatacaagtttccctatataacaaaacctgcacatgtacccctgaatttaaaataaaagttaatttaaaaaacctcatagtggtctataaattcaatgagaactactggtagtttacaaacaaacagtcctcatttttgtgctattcccaatgatgttgcaacagataggtttaatttgaattattaatattttcttaaacttacaaagtcaacaaagcaataaatagagccctagtaaaagatagcacattctatggtgtaaatatttcaactacatttaattttaacaaagcactgaacagagttaggaaaggatgcacagtaacagatttatgcagtatttttatcagaaatgaaatagacataaataacctcaagagcaaagttaacagtaaaataaatatgaagtgatgtgttttaagtatatattacccttgtttttgatatgacttaattt

SEQ ID NO: 258054 - DNA, 598 bp, Homo sapiens
aactgtttctcataccttaacattgttaaaatagtatatccttaatttcatagaatattcaatattcaatctcttatytgttagtgttttcacaaatagggataacacatttactaatggttgtggtggacattgtgctaaggtagttgagaatcttaatttactctctcacaagtaaataatgaaagtcacactgggtttgattggcttcagatatataaaatactgtagcacttattaccctgaagtgatgaggtggaatgtaggtcagaatttagcataaagatatgaatgtaattcctgaaataattgactgggtttaaattctaactttttaatgtattggcttttcaaccttaagcctgttgtataacttctgtgtgccccaggaaattgggaataaaaattacaaatctttcatatgattattttgaggattaaatgggtcaatatatataaacttggttaaaacagtacctgttgcaccaaaagcacccccaacaatattaacaaaaactaatatgtggggcatgtaggaaatatcttttcacatagggtgctccaaggaggtcctttaagtattgtctttctgaggatc

SEQ ID NO: 258055 - DNA, 481 bp, Homo sapiens
aaatgttaatgacttctaaatccctattttctggcagaatgccactcctgctcttcaaattartatctccaactgggtgtagtactcatcataaaaatcaccaatttttaaaatatttaacctcctcccatacacggtcttccctgtgtccattaatggtatctttattcttttagttcctcaatccaaaaaatttgtagtcatctatgaactttttccttttctcacatcccacatgcaacctgtcaataaatcctgttggctctaccctcaaaatatttctaaaatcacaatgttcttaaccaacattgaaacaatttttcccctattatcagatttactggatttttgcaaaagtcttctacactgatcttcatggcaatccctttttaatctgtagtttaatttcaatattgttgccagagtgattactaaaacgagcctccaaatggctttctcttgctttctataaaggcccata

SEQ ID NO: 258056 - DNA, 533 bp, Homo sapiens
tcaagtttctatatcttttagtaatagatgtatgttctttcatacacttttcattcaaaaagcatttatttattcaatattcattgttgtcaggttcctctgacaggtatcatgagaaacgcaacaaagaataaggctcagtttgaattttgaaagatyattctcaagtagagagttaagaaaatgacaaaatgatgacaatacagggaagactgtggtaagaaccataatagaagcaaaaatgtgaggaaactttttaggttgagaataatttattgaaaaaactttaatcataaaaaatattcaaaaaattaacattgaactccagtctgagttactgtagaatcggtctctaaattaagggttatgtttactctctacttctttccaaggacagtctcatggataatatattaattactactagctccaggaaaattagattgctcatgaccttaaacatacacaaggcatgccaatttatttatatttagccatgatatagattaatcttattccctatagtgaggcaa

SEQ ID NO: 258057 - DNA, 593 bp, Homo sapiens
actggatagtactttttagcacttgtacttggtgtagttataggaagagcactgaaatgaaaaaataagcatacttgggtcctagttctgggttttatctgaattgactctgggatattaagaaaatcacgttgttaggaatcagttttctcatttgtgatttaggggactgagctgctaggtctgtcaggtccctttrgcttcatagtgctgtgatctctgctgaattgcactaacatttctatgaatggcattttcaaacccagaagcgtttgaggaaatgacaagtgaaatgatcaggggtgaaattttgcacaagtgttacaacagggttggaaaaacaccatgtatttatatggctacaatgttgctggctgagaacttcatgttattgttagtattttgtgtaacttattttaattatttgagcaaattattcaaacctatttaaaatagcattagaacttaacttccttaaatatgcaaaacatagtttaggttttctggattttcatgtcatattatgttttgattaaaaaatcttcaactgataaaatagataaaaatgtgaatgaatgttcagtagttgattg

SEQ ID NO: 258058 - DNA, 543 bp, Homo sapiens
atcttgggttttaacatcctatgtggatgatcaccacagactgtattcaaaaaacacatgtctgaaaaataagaatttattttttaaatctcaaagcatggtagatatagatcttttcaccatcaatctgagacatctgtatatgtttattagataaatccacacgcctatgatatcatttttatgattactatcatatttactgattgatgcataaattttctattatcccttatgaagcaaaattcaataaaatatgaaaaagaaaaagtgattttttccacatatttaaatcccacgtgttatgtacatattctatacaagagtttattccagttatcgaattaataggaaacaatgttatactttgtgccgcatctattgactacaygctgttatttgtgtgctgtcccttctcagtatcaaacaggctcagtctcaatatatttttctttcttcctgagaagaatgtaggagaagttgaataaacggaagaaaaatgctatatattggttcacttctccaacttggtgtttattgttt

SEQ ID NO: 258059 - DNA, 617 bp, Homo sapiens
atacaattattttgtcaattaaaaaatcaatcggttgcaggacaaatgtatatgcatttttttgtaaactaaaattttgcaatgcttgattggaaaagctattcattttatgtataaaacaataaagaactttcaaataggtaaatagagaccgtcatttcatataaccgagtgtgttagctagctcatkttataacataattttatttttgagccaacatgtatataaattaaaatataaacataggtagactgtagagttgcactgtctactacagtagccactagctacatgaggctgttgaaaacttgaaacatggctagtctgcaatgagatgagatgtaattttaaaattcatgctggattttaaagtcttactatggaaaaagaaagtaaaatatcccagtaataacatttctatgactacatactgaaacaattttttggatatgttgggttaaatgtcttgctaaaatttataaaatgaataattactctaatcacgttaaatcatgtgtatacacacaggtagtatgcacacaaaaagaaactcacagaaatgaaattaaagcgaagcagagctgcattctttcaggactcatcaactactaagggc

SEQ ID NO: 258060 - DNA, 600 bp, Homo sapiens
ccattatctatagaaaactaaaacaggaatagaaaactaaatgccacatgttctcacttataatatgtatgtgggaactaaatgatgagaacatgcaggcgtataggggaacaacacacactggggcttattggaggctggaaggtgggaggagggagaagtgagaaaaaataactaatgggtactagcttttgtacctgggtgatgaaataatctgtacaacaaatccccatgacrtaggttacctatgtaacaaacctgcacatgtacctctcaacttaaaagttaaaaaaaaaaaaaaattcataatttggtgaagtgtgttttacttttttacttgaaagttaatggggaataattcaaaccttttcgtgttccaagttacagtatgtttctttgtagaacagaaaaagtagtatctttccttacccattgctattctacggctgccattgctataacaaaagacaggttaacaggagaaaagcctacaaatttagtgtgtgtgacatgggagccttcagaaatgaagattcaaataaacaggaaaaattgtgtacattttatgctaagtcagaagaagtggacagttgaggagaa

SEQ ID NO: 258061 - DNA, 600 bp, Homo sapiens
ccattatctatagaaaactaaaacaggaatagaaaactaaatgccacatgttctcacttataatatgtatgtgggaactaaatgatgagaacatgcaggcgtataggggaacaacacacactggggcttattggaggctggaaggtgggaggagggagaagtgagaaaaaataactaatgggtactagcttttgtacctgggtgatgaaataatctgtacaacaaatccccatgacgtaggttacctatgtaacaaacctgcacatgtacctctcaacttaaaagttaaaaaaaaaaaaaaattcataatttggtgaagtgtgttttacttttttacttgaaagttaatggggaataattcaaaccttttcgtgttccaagttacagtatgtttctttgtagaacagaaaaagtagtatctttccttacccattgctattctacggctgccattgctataacaaaagacaggttaacargagaaaagcctacaaatttagtgtgtgtgacatgggagccttcagaaatgaagattcaaataaacaggaaaaattgtgtacattttatgctaagtcagaagaagtggacagttgaggagaa

SEQ ID NO: 258062 - DNA, 559 bp, Homo sapiens
gaaggttacctaggttttatggcctgctttaggggagaagcgtgggaaatttttgagggcttgcttctgttgtttcctcaaatgccactgttatattttgtggtaggctgtcctgaaccccatcatctttgtgcccatcaaaaatgaaatcartgttattgtctatgttaaataggttttcccatcatgtacaggaatagtatttgaaaggggaaaaataagtcaagcatcagtcaggttaacaaatcttactcatgctttcaaattctattgcacaacttttgcaatacaggactaatgaaattgtcccaatagttgttgccaaagaagatgtttagctaagtaggtggggatgagtagcagcatttgcattttcaagggggaaagggaatttgttaaatgcatgttcacacgtaggactcaagggaacttattttgagagaaatttgaagaaggtgttttcacgaggcacttaaaattcaatgctttgagatatcatacagtatgttgtttttaagttattttggtttcactcatgtgctttgttattatctccctt

SEQ ID NO: 258063 - DNA, 654 bp, Homo sapiens
actctgtgggtaatctggttgtcttttttttttttatttttgatacctctttgggacagtgtattctagtttgtgtgttgaatgctaattttttaaaaatgttccaaaaactatgtggtctaccatgttctgctttgtaaatactatgacatttaaaatgaatgcaaagtggacaaaatatactctttatcaaaggaagttaacaatatagcatttaagtttcttctttggtgatgcttggccaatttgcttaatgttatagtgtgaaaaaaaaaaaaaaaaaaacacacatgaccaaaaagttctgtctaaagaattgggaaatttgggcttgaagatgtaatttaagatagaggaattcagtttattcatttaragttcttggcatatcctcctgtattgactgcaggtatgtgggccgagggtaatttttgcctgaagatggaaagaatacctcttacttgctgacgtataaattgatgataaaaacaggatgaaaaaagggatttgtagaacgtagagctaaacatatttagatgtggtttctattgcagttatttctaggcatgtaactttgagcagattactcaccctctttgacttttgtctccccgtatagcaaatgcagaaaataatgtgaaacttacagtgttg

SEQ ID NO: 258064 - DNA, 616 bp, Homo sapiens
atggactggggaaggtagattgctataggaaacattactgttgaaatggagaacagcagccagacctatttttctagaatacacaaaggtgttccctattacagtgtacagccactttactctagacttcctagtagccactttgtatatctcttgggtgatatttattattgctgtgtttttctgaggtaagattgtcttggagaatcctcagtccagggctkggtatttcatgtaccattcattgaggaaaggtgtagggcctcagacaaaatcctgaaactgagaagaaattcctgtctttcactgtactttaggcttggttgttgaagaataaaatggtgtagaaagtactggaaatcaggggaaagaaggacttgttcacaggagaggacaaattggtaacttggaagggtgtctgccttacagaggaccacatgttctagatgaataaactagatgaatgaaatatacctgtacactagaggacatggtatattaagtttctttctgcaagctttttcgttgttatttctgattctttcaaagctgttttcattttccatctgaggtcttccccacttcctacccatgaggataatgcagtagctaccac

SEQ ID NO: 258065 - DNA, 616 bp, Homo sapiens
atggactggggaaggtagattgctataggaaacattactgttgaaatggagaacagcagccagacctatttttctagaatacacaaaggtgttccctattacagtgtacagccactttactctagacttcctagtagccactttgtatatctcttgggtgatatttattattgctgtgtttttctgaggtaagattgtcttggagaatcctcagtccagggcttggtatttcatgtaccattcattgaggaaaggtgtagggcctcagacaaaatcctgaaactgagaagaaattcctgtctttcactgtactttaggcttggttgttgaagaataaartggtgtagaaagtactggaaatcaggggaaagaaggacttgttcacaggagaggacaaattggtaacttggaagggtgtctgccttacagaggaccacatgttctagatgaataaactagatgaatgaaatatacctgtacactagaggacatggtatattaagtttctttctgcaagctttttcgttgttatttctgattctttcaaagctgttttcattttccatctgaggtcttccccacttcctacccatgaggataatgcagtagctaccac

SEQ ID NO: 258066 - DNA, 551 bp, Homo sapiens
tatcagcaccttatcacttggtaaacaaagaaacctcctagccctcctgaagaatattgtcagcttctgatatcttggtctttcataataaatccattttagcatacccacttctgtgagcctttattctcatcctttgtggtttaccatgagaattttagcatctaatctaatgagagtgctagccattttccaagcttccatcagtcatctgaaaagagcgttacaactgtctcccagagcccttaaaatgatgttaaatcttgtggcaagggagagttctcccacactaaaaaaatctcccttctgcagcaccctcaggatctatytgtaggcacactcccattttttccccagtagttgttaaccataacctggcgtgacttgtggaatataattattctcctcccttagcaactttggtgcttccttcttgggacttgcttggatttgactcaatttatttatttggtggctaaacggttttctaggtggcttcatacttggactgacacaattctctcctgtttcttgcttttagttttcaagaa

SEQ ID NO: 258067 - DNA, 579 bp, Homo sapiens
ctgttttttcttcagtatcagtgtgtcctttcactgatatatgcttatctagtgtagcagttgcttttccmaatttttaaaactgcttttgtagggggtaatttttttctgaaaatgtatgcatgttgtcagttgagtaggatattttggctttgattttggcttcctttggtagtataatctttgtatgatgtcttcagcagtacacagcagtacacattgcaaaaagggtcagtggtatctgtgatttcctccatggctcagagtatagttatcacttgagcttgcattgaagttttgttcagcagttggacacaaactgagccagtctttaggccccagtggtagcagcagtgggacaaatgtgcctgattttaggcctcagagcagtttacattgctctgatgttagtgagtcctggaaggttgatgcttgaacctccaggcaacctgcctcaaatacaggagtgggagttggggggcaggtgttcgggcagtttttcagtatctggacagctagtatgatgtgggtgatggcagtagtggtggcggagcagcccactgggactcaagtgtttca

SEQ ID NO: 258068 - DNA, 579 bp, Homo sapiens
ctgttttttcttcagtatcagtgtgtcctttcactgatatatgcttatctagtgtagcagttgcttttccaaatttttaaaactgcttttgtagggggtaatttttttctgaaaatgtatgcatgttgtcagttgagtaggataytttggctttgattttggcttcctttggtagtataatctttgtatgatgtcttcagcagtacacagcagtacacattgcaaaaagggtcagtggtatctgtgatttcctccatggctcagagtatagttatcacttgagcttgcattgaagttttgttcagcagttggacacaaactgagccagtctttaggccccagtggtagcagcagtgggacaaatgtgcctgattttaggcctcagagcagtttacattgctctgatgttagtgagtcctggaaggttgatgcttgaacctccaggcaacctgcctcaaatacaggagtgggagttggggggcaggtgttcgggcagtttttcagtatctggacagctagtatgatgtgggtgatggcagtagtggtggcggagcagcccactgggactcaagtgtttca

SEQ ID NO: 258069 - DNA, 542 bp, Homo sapiens
ccggcttcacgctcaggagagaacgctgcgcctcctccttgtggtttctggtgttctacacattcagagaaaattctctagtaacgaactatacaaatgatccctgaaagtatagtcttcctttttttttttcttttacaaaatgtgaaaactgaagagaggttaatttacgaatttaattttacccaagcttgtaaaattagtcagtggcaggaccaggttcttgtggtctccattcatcacactttcggttacattgggttgcctccatgtgaccatgcttcatattctcttttgtgccccaaagcaccacatctagatagtcagtgaaaattatggaggttcattattgtgattataaaccaaatgggtcagaattcttactgtatgcatattaacaattgacaactatacttctcaacaatgcaagtagttttygactgatatcattctaggtcagtgttcctcaatgtatagctagtgaaatacctgcattagagttacttaggatgcttatcaaaaccacagagtccccagcctgg

SEQ ID NO: 258070 - DNA, 526 bp, Homo sapiens
acactcatatcccccatatctctctccctagcacaatcactaactatatgttcactaagtatacttttctgaagtgtattgttcagatatcttttgaaaaatataaaggatatattaaaagtcataatcaatattctaaaagatgaaaggtgaggatgccattaaacaaaaactagaataatttattggaaattaaatatgtaaagtagaagaaaaagatgaagagtgtaaaatcagagaaaagataagaattataaaataaaaccagataatttcacagaactgaaggacataagtttctacactgaatgtgatcacacaagtagccagcccaataaacagagcaagactcacacaaagatatatcagatactgaaatgtcagaacatcaagaataagrgaagatcaataaacttcagagagaaggaagaggttatatacaaagtttctggagtcacagtaacatcagacttctctataattacctggaagctagaacacaattgaataattactttaaaatgaa

SEQ ID NO: 258071 - DNA, 587 bp, Homo sapiens
tgttgcaacttttgcactgggccagcagaaacctgaggtcaggtctcctgcctttatttctcatgctcagtttggaatccatgttcattttcgcgttgtgtcatccttgtggctccagcctgcattaatagccccctttgctgcatgagcaacaaccgttagagacccatacttgtagtgactgagacacagtgacattatatcacaacctcagaaaccacracataaaccaaggaataatcaatgccatagtttttaatagtgcaactagaaatggattgtctgctgctaagtatagggaaacagttatagctggagctgctgcagaggggagggatgatgtttaataatgtgatataggaaatctcacgatgctacagaaattgattatctattcttagcttcaacctgcatctgacttttcccacataaagggggaataaactccatcaaaaatcagagcccttaaaatatcagcttctggccctcaaattactaatcctcacagaggaaaggcagctctccaatcactctcttcttagagccacaaaactcagcgatctacatgaccataggcagcatgatgg

SEQ ID NO: 258072 - DNA, 566 bp, Homo sapiens
gaagacagtgaagacctcctaggaattgaaaatgttttagacaattttcacagcattggagccatacagcagtaaaattagaccaatctgaattgggtcgaaaattaggaatgttcactcatgctctaaaccagtgctgaaccctggttttagtgcctaacttgagtctgggaaaggacaagggtctggggaagttggcaggtgccttgtgaatatgtgaaccattgagtgaaatgccattcaacactcagtcatggctgtggctccagttagaaactcatgtgatggttagagacaaaaaaaaaaaaaaatgacactcagtagataagmtgaaagctcctagtcgagctgatgcccatactgacctcctgttccaggatcctgagggaaagctgcccatgcaacagcagcaactgaggtaatgaaggctccacataacaatgcatttacattcaaaatccactctgctccacattgttcttagcaatcactcactcatcttgctaaatgttacccacgcgatctgactctgcatgtttacattgcaaaaggtaactgtgaaatat

SEQ ID NO: 258073 - DNA, 577 bp, Homo sapiens
ttccctcaccctttctatagaagcattaagtaatgaagtcataaagaagcaaaacattggactcttttaatctgtgtattttatttttctagtttaatagtggttttatgtgaagctgtagctttgagtatctattgtgtttagttgtaaagacatactctttcactttattaggcataacaatcatttcatttatgttcagcccttggattgtctcaggatgttgcaggcrcaactttcatggcagcgggcagttcagctcctgaattagttactgctttcctaggtaaatattgctccttatacttcttgcttactcagtgtgatttttattttcttcaagttaacactaacttagctggtactatcttgcacataggtgtatttatcacaaagggagatattggcattagcaccatccttggatctgcaatttataatctccttggcatctgtgctgcctgtggtttgctatctaatacggtatgtaacaaaaccattcaacaaaatgtattgtcttaaaaaattctaaagataactgttcgtcgtctgggatggacaacagggcactaataat

SEQ ID NO: 258074 - DNA, 616 bp, Homo sapiens
aagcccccaaggcctggagtcatgactggggaaggtccactggactcctgcatggtcctttctgccagggcagaaagagggcagggggaaggcacaggtgatggtgctatcctttaggactagtcattaactttttgatatagagtctattccttctctgatcatcaaagctgttttgtgcaggaacagatgtatgacttacactttaatctattctttcattcagtaagtattcactgagaacataccttgcctggggccttagagtggaagtgttggaaacaaggtcaagtgaagtggaggagasaggccatggcttatgcagtgcctgggcttgggcgggcctcagagaatggctcttaaataggatcaggcaaccctcatataagaaaattaaaggctgtgtagatgctatccataaagtatgaaaggataagaaaatcttccttggctgaagcatctggggaggtctcaaggtagagacagtgctgtggttgaccttgaaggacacgtgggccctgtgaccagacaggggaggtaaggactgagcagtgagacagtcagagcagaggtagggagatgggaagcttctggcatgttcaggaagtgaacaatg

SEQ ID NO: 258075 - DNA, 554 bp, Homo sapiens
tggggcatttcagagaaatctagaaagaaatgacaatccagctgaggagacagcaaagattcaaaagcaggaaggtactgcagtgttgcaagacaagacatgcggtgctcctgaggcaggtgcaaaggaggcatggcagggataagtctggggagcaagaggctagatttggaaagatcttttaggccacactaagggatttggccatcactctgcaagaagcctttggaggattttagcagaaaatgaaaatggtgctttctggatggttgtgctggtggttggaggaaagaaatcctgaataggaaagccactagaggaaggcctgtaaggagaccatctcagaaggccagacaaggatggggcagcactgctggttgagaggagaggagtgagttgagamatatggagaaagtgagaatcaataagatgttttcttggggaatggaaagtaagggaaaacaaggagtcgagaatgcaccgaaatgtctggctcaggtggctaaccacatggctgtattgttaactaaaatattgagcatgggggcagaagg

SEQ ID NO: 258076 - DNA, 579 bp, Homo sapiens
gctaagttaacagctacctaacctctcacatcctgggctcatttgtatagggtttttttgtcttctccaagtgtaaggccttattcttacatctactcattgctgtcattaaattaggcttgttgtccttgtctgtggccttttccataatctctttatgtcatcagatgtattcattatcccatcctgcactatgtcattcacaaaatcaataatcctgccttctatagaaggcttcatccaaakaactgatttaaaatgttgatcaagaaggtttacatagagaaccctagagacataacagaaaatgtcctcttaattaatactgatccacttaattatattagcaatcagtccatatttttctatctggccatcaaaacccttataagacaaggtaaaatgtcctgctcagttttggtttagctttgcttgttgcatttccatgatctgccaatctacaaagcttttcaaagaagtgagatagaagtgagatagtctgacatcacttgattttagtgaacacatggtagcatcaaacaacttgtacatcttctctcagatgctcacaaaccactc

SEQ ID NO: 258077 - DNA, 579 bp, Homo sapiens
gctaagttaacagctacctaacctctcacatcctgggctcatttgtatagggtttttttgtcttctccaagtgtaaggccttattcttacatctactcattgctgtcattaaattaggcttgttgtccttgtctgtggccttttccataatctctttatgtcatcagatgtattcattatcccatcctgcactatgtcattcacaaaatcaataatcctgccttctatagaaggcttcatccaaataactgatttaaaatgttgatcaagaaggtttacatagagaaccctagagacataacagaaaatgtcctcttaattaatactgatccacttaattatattagcaatcagtccatatttttctatctggccatcaaaacccttataagacaaggtaaaatgtcctgctcagttttggtttagctttgcttgttgcatttccatgatctgccaatctacwaagcttttcaaagaagtgagatagaagtgagatagtctgacatcacttgattttagtgaacacatggtagcatcaaacaacttgtacatcttctctcagatgctcacaaaccactc

SEQ ID NO: 258078 - DNA, 488 bp, Homo sapiens
tgactaacagttgaattatttcctaagaggacgtcctcacagtaaagatgatactggcatgctagacctctatagcaaaatctgaattaatatcttctaagaatggttccagttggtattcagtgtagaaaagttataggataatcttttcttaggctatgtggatgtctagtttttgatattttcagattaagggaagttgaacttggctatccttatataacttccaaatgtattacattatgtattgtggtgtttccaagaatttgcaaacactaaaatgtaaaaagrttaggaactgcttagaaaaattatagtgaccattgctattcttggaaaagtaattacaccaacattgtattttaattccagagccaaaaaaatgtgtgtcagagtcagctagcaaacaccaggaaagcggctgtgaaggaagattgaaatttaaattcatattagcctcttgagccagtatttttgtgcatggccca

SEQ ID NO: 258079 - DNA, 561 bp, Homo sapiens
agatagatagataaatagatatgtatattttcatttggttggttcaaatcggaattcaatcaaggctcttacattctatttaaccgacttgtctctttcatctcttttactgtacagattgcatcccttacctcccccctcttttttktacccttaaaatttatttgttttggaaactgaatctttggtcctgtggagttccctgttttctggatttttgctgtttacatccctggggtatcatttaacatgttcctctgtccctgtcccctttaggttctataattggtagttagatttagaggtttcatcagatttacatctgtttgttttttggcaagagtactttatctggttttttatgcttttaacaggatgcccataatatttggttgtctctctttctataatgttaagatggatcagtgtattcagctgttggtagccttatccactgatgtgctggtaaatatttagtaaccagcttggggcaagttacaggggtcaaggagaggggatcctgatttgtagcatttccctgatttgtaccaatccccataa

SEQ ID NO: 258080 - DNA, 561 bp, Homo sapiens
agatagatagataaatagatatgtatattttcatttggttggttcaaatcggaattcaatcaaggctcttacattctatttaaccgacttgtctctttcatctcttttactgtacagattgcatcccttacctcccccctcttttttgtmcccttaaaatttatttgttttggaaactgaatctttggtcctgtggagttccctgttttctggatttttgctgtttacatccctggggtatcatttaacatgttcctctgtccctgtcccctttaggttctataattggtagttagatttagaggtttcatcagatttacatctgtttgttttttggcaagagtactttatctggttttttatgcttttaacaggatgcccataatatttggttgtctctctttctataatgttaagatggatcagtgtattcagctgttggtagccttatccactgatgtgctggtaaatatttagtaaccagcttggggcaagttacaggggtcaaggagaggggatcctgatttgtagcatttccctgatttgtaccaatccccataa

SEQ ID NO: 258081 - DNA, 536 bp, Homo sapiens
cccgaatccaccatgggatgacttgagagaagtctgggtactaactgctggagattaaattaatctgaaagtcattctgtcatctagaaactttgctactgttctaccaactgatttacaaaccagactccctttagcatttcatttcatattcataatctyttttgctataggtcaaaagttaagagtgagcactaacttttagatcctgggataaccacccacatggaagaaatgacatctgtcctgacattagaccctgctgggaggcatctttttttttttttttttttttgagacagggtctcactgtgttgcccaggctggagtgcagtgatgcggtcattgctcactgcagcctccaattcctggcctcaagggatccttctgcccagcctcctgagtagctgggactataggcacatgccaccatgcctggcctgggaggcattttctttaccccttctggaaaccacaggaacatgtcattttcagggggactgaatgaatctctggcttattgttgagtggaaata

SEQ ID NO: 258082 - DNA, 561 bp, Homo sapiens
ggtttcactcctgttacccaggctggaatgtagtggcataatcatggctcactgcasccttgacttcctgggctcaggtgatcctcctacctcagcttcctgagtagctgggactacaggtatatgctgccatgcctggctaattgtttttgtgtttttgtagagacgaagtctccccatgttgcccaggctggtcttaaacttctgggttcaagcaatcctcctgccttggcctcccaaagtgctgggattacaggtgtgagccaccatgctcagcccatttcaagatatttttaaactttcttcttaatttcttcattgactcactgatcattaaggagcatattgcttaatttccatgtgtttgtatagtttccaaaatttctcttgttatttatttccagttttattccattgttgtcagagaaaatacttgatatgatttcatttttttgaattttcaaagactttttgtggactaacatatagtctattcttgagaatgatctataggctgaggagaagagtgtgtattctgcattgagtgaaatgttctgtaaa

SEQ ID NO: 258083 - DNA, 561 bp, Homo sapiens
ggtttcactcctgttacccaggctggaatgtagtggcataatcatggctcactgcagccttgacttcctgggctcaggtgatcctcctacctcagcttcctgagtagctgggactacaggtatatgctgccatgcctggctaattgtttttgtgtttttgtagagacgaagtctccccatgttgcccaggctggtcttaaacttctgggttcaagcaatcctcctgccttggcctcccaaagtgctgggattacaggtgtgagccaccatgctcagcccatttcaagatatttttaaactttcttcttaatttcttcattgactcactgatcattaaggagcatattgcttaatttccatgtgtttgtatagtttccaaaatttctcttgttatttatttccagttttattccattgttgtcagagaaaatacttgatatgatttcatttttttgaattttcaaagactttttgtggactaacrtatagtctattcttgagaatgatctataggctgaggagaagagtgtgtattctgcattgagtgaaatgttctgtaaa

SEQ ID NO: 258084 - DNA, 598 bp, Homo sapiens
ttaaagaaaagtaattctaacccagattttcatatctagccaaacaaagtttcaaagtgaagaagaaataatattcttttcagacaagcaaatgctgagggaatttgttaccaccagacctgccttacaagagtacccaaaggagctcctctggtattaaatatggaaaggaaagaccattaccagccactacaaaaacacactgaagtacacagaccagtgacactctgaagtaaccacatatacaagtcttcaaaataatcggctaacatcatgatggcaggatcaaatctgcacacataaactaaccttgaatataaacaggctaaactgcccaatttaaaggcacagagtggcaagctaaataaaaaagcaagatccattggtatgctgtcttcaagagactcatctcacacacagtgacacacataggctcaaaatacaaggatggaggaaaatctaccaaacaaatggaaaacagaagaaagcaggggttgcaatcctaatttcagacaaaacagasttcaaaccaataaatatcaaaaaatacaaagaaggacattacataatggtaaagggttcaattcagcaagaagac

SEQ ID NO: 258085 - DNA, 510 bp, Homo sapiens
atgctgagggaatttgttaccaccagacctgccttacaagagtacccaaaggagctcctctggtattaaatatggaaaggaaagaccattaccagccactacaaaaacacactgaagtacacagaccagtgacactctgaagtaaccacatatacaagtcttcaaaataatcggctaacatcatgatggcaggatcaaatctgcacacataaactaaccttgaatataaacaggctaaactgcccaatttaaaggcacagagtggcaagctaaataaaaaagcaagatccattggtatgctgtcttcaagagactcatctcacacacagtgacacacataggctcaaaatacaaggatggaggaaaatctaccaaacaaatggaaaacagaagaaagcaggggttgcaatcctaatttcagacaaaacagagttcaaaccaawaaatatcaaaaaatacaaagaaggacattacataatggtaaagggttcaattcagcaagaagaccta

SEQ ID NO: 258086 - DNA, 605 bp, Homo sapiens
gaagctgattattgagtctgaggaataaggttagattattagtaggaaagtgaggaaatagtttagtatctaggaaaatcaataattggttggtaaacataataagaagtggcttaggcaaggagtcagaatggagatcatgaatcgtgtaaacatgttgagtcccatttyaaagcactgctggttgcatgttttgaagatgggcattatggcttaaaggctagactatatcacaccactgaacttggcacttcacctttttcttttttttgaaaagtacgaagacatcaacttattttttcaatgtttccaactccatttatcatttgagatgggcctcccttgttgatagcctgctacacatacatgtatatatgtgtgtatgtatgtatatttggtgcatgtgttcacatgaattgtgactgttaattattggcaggtaatgaagtttagtcatgggtacctacttcagtaaactgatttgctgtaagaataagtggtccatttgtgactgaagcaacaataggttatcttaagtctttacatagaaagtgaaactggccagatgtggtgaggcatgcctgtagtcctagctccttgggcga

SEQ ID NO: 258087 - DNA, 381 bp, Homo sapiens
caaatggctaagatactaagcataaaaggctagtaaaatcttccagcagtttcacagggttaggaaagcaaaacttgaaatttagtcaatgattcaggaaccaagagtattaagtaaagggaagcacagaaaagcaatcytcacatgctgtgctgcttttccccttgggacatttgtttatttctaagctaggcaggcaggaagttacaaatccaagtagaaagaaagtgggagctaaaaatgtaggctagatttggtggtctcatggtgctcctgggaagacagaaaacaggaggaggcactacccagaaagagggacgctggtaaacacttcagattttcaggaataagaacaaatgggaaatacatcagcaatcacaa

SEQ ID NO: 258088 - DNA, 623 bp, Homo sapiens
ttgtagtcctttattcctctttcccttccacccattccccctgagtcttcaaagttcattgtgtcattcttatgcctttgcttcctcgtagcttaggtctcacatatgaatgagaacataagatgtttggttttccattcctgagttacttcgctaagaataatagtctccagtctcaaccaggtttctgtgaatgccattaattcattcctttttattgctgagtagtatttcattgtagacatgtaccacagtttctttatccactcaytgattgatgggcatttgggttggttccacatttttacaattgcgaattatgctgctataaacgtgcgtgtgcaagtatctttttcatataatgactacttttcctatgggtagataaccagtagtgggattgctggatcaaatggtagttctactttaagtttttaatgaaatctcgataatgttttccatagtggttgtactagtttacgttctgaccatcagtataaaagtgttccctgttcactgcatccacactaacatctattattttttgattttttgattatggccattcttgcaggagtaaggtggtatcacattgtagttttgatttgcatttacctgatcat

SEQ ID NO: 258089 - DNA, 623 bp, Homo sapiens
ttgtagtcctttattcctctttcccttccacccattccccctgagtcttcaaagttcattgtgtcattcttatgcctttgcttcctcgtagcttaggtctcacatatgaatgagaacataagatgtttggttttccattcctgagttacttcgctaagaataatagtctccagtctcaaccaggtttctgtgaatgccattaattcattcctttttattgctgagtagtatttcattgtagacatgtaccacagtttctttatccactcattgattgatgggcatttgggttggttccacatttttacaattgcgaattatgctgctataaacgtgcgtgtgcaagtatctttttcatataatgactacttttcctatgggtagataaccagtagtgggattgctggatcaaatggtagttctactttaagtttttaatgaaatctcgataatgttttccatagtggttgtactagtttaygttctgaccatcagtataaaagtgttccctgttcactgcatccacactaacatctattattttttgattttttgattatggccattcttgcaggagtaaggtggtatcacattgtagttttgatttgcatttacctgatcat

SEQ ID NO: 258090 - DNA, 411 bp, Homo sapiens
ctgctgctgaattattacagtttttgtttgtctgaaatgtattttgttatttttgaatgatttatttttgagtatagatttttaggctggtgattattttcagcactttaataatattttgtttttttagactttccatcttttccattgagaagtaagctgtccagcttattgtttctccttccagagatattgtctttggtttttaacctttgatgtgtctgaagtgttgttttctttttaatacattagcctgaggtttgcagaacctttgaatctgtgggtttatgtcctttatcggttttaaatwattcttggctattatcttttatgtattttgtcatattttttcttgctgtctttctgagactctcataaatatatgtgttagaactattcaccatgcctcga

SEQ ID NO: 258091 - DNA, 595 bp, Homo sapiens
agctgttgctagcaggtgtgagttttgctttgccaagtgcatgggagctggacggggtttactgccacctgctactcctgactccctgtacaaactcatttgtacatcagaggcagatatgctcctccatagaacattactctagtggccaacgaattcctctgatgctcactggggccactgctgccctscatgggtagagtcagagcgtggagctacctgatggagcccccacctggctttgctcctccgtttgccctaatagcttaacacaaaggacagaaatgtttgggagctctatagctctgcccgtcacctgagaaaccacagtatctcccctgggtaacataaggcaagtacaaatcccaccactactaccacaactgagactcttttgcaagcaccacctcctggctggaggctgactgacacaatgcattacagtatctccaagtagaacaacaatgtgcccagaaaggagaaaacttgtgcatgacctctgctatcactattgtctgtatcattctggctaccaacctggctaaccagaggtcctgagtctgtccatgtgaccagttcattactaccaccacca

SEQ ID NO: 258092 - DNA, 608 bp, Homo sapiens
atcccagcacacagacaattaaaattgctgattaagggcacactaattgcaacaaatcatgatgacagatggggaaaaggcaaaactttataaataatatatacaaaaattaaaatatagtttcctacagttatttattgtggcgtaaaagtttgcatatcagtcatttctaagataattactactcgatgtctaaaaaaacttaaaaacaattatttaaatgactcttttcaattatgtatagaatatatgtatgtggaacaccaaattctcctatgaagaataataaattagatagtacagtgcaagtgttttacarcttatgatcaatatatttatatagatgatccattatactaaattgcacaaacatactcatatctttatttatacattttaatacatttttaaaaatgtaaaaatgtttggttacttaaattctgaaattcagtggcataaagtggttgtcaccctacagtcttgtgctgcataatgatattttggtcaacaatggactgcacgtatgatgatggtcccataagattataatactgtatttttactgtactttttctatgtttaggtatgttcagatacacaaatactat

SEQ ID NO: 258093 - DNA, 608 bp, Homo sapiens
atcccagcacacagacaattaaaattgctgattaagggcacactaattgcaacaaatcatgatgacagatggggaaaaggcaaaactttataaataatatatacaaaaattaaaatatagtttcctacagttatttattgtggcgtaaaagtttgcatatcagtcatttctaagataattactactcgatgtctaaaaaaacttaaaaacaattatttaaatgactcttttcaattatgtatagaatatatgtatgtggaacaccaaattctcctatgaagaataataaattagatagtacagtgcaagtgttttacagcttatgatcaatatatttatatagatgatccattatactaaattgcacaaacatactcatatctttatttatacattttaatacatttttaaaaatgtaaaaatgtttggttacttaaattctgaaattcagtggcataaagtggttgtcaccctacagtcttgtgctgcataatgatattttggtcaacaatggactgcacgtatgatgatggtcccataagattmtaatactgtatttttactgtactttttctatgtttaggtatgttcagatacacaaatactat

SEQ ID NO: 258094 - DNA, 565 bp, Homo sapiens
agaagcacaggctctctggcttctggctgtataataatcagcaatactgttcaaaaggttaaatcatttaaatacttatctttaatagctaaataaccctggttggctcattggattggcattttctttaaaattgaatatataggaactatatccatatttctgctgtaagtttacttcaagctcaaataattgttttagtgtttacattgaggagtttcagagctttatcaatcactcttctaaggtacagttccagcattgctttctgtaaaaagcctacctctctctaataaccacatatacttttaattttccactgtgtaagtgttttcatataaagagaatgattgactcttagagaactacactaattgtttagatttctaaaaakgagaggggtgagaaggaaacattttctgaatgtgttgttttagttgatgaggccatgtttaaatgttagaaacattttctcgatgtgttgttttaattgatgaggccatgtttgaatgttgagtcttttgacatccataaatgccaacctcttaaaaagagaattggattt

SEQ ID NO: 258095 - DNA, 579 bp, Homo sapiens
tttgttctttctttccttttgctagctttgggtttggtttgctttggtttctctagactcataaggtgtaacagtaggttactaatttgtggtgtttctttttatgtttgcatttaacactataaacttccctcttaacactgtttttgctgtgtcccagatgttctggtatgttgtgtccccatttttattcatttcaaaaaaaatcaatttttatcttaattttgcattcttcaggagcctgttgtttaatctccatgtatttgtaaagyttcaagagcacctattgttattgacttctcttttaattcaatatgggttaagaaaatatgtattataattttgattttcaaaaatttattgaaacttcttctctgacctgaaaaaatctatcttggaagtgttccatgtgctgatgagaaaaaatgtatatattctgcagttattgagtagaatattctattaggtccatttggtctaaagtccaatttaagtccagtgtttctttgttgattttctgtgtcaatgatctgtctagtgttgtcagtggggtgttgaagtcccccactattatcaaat

SEQ ID NO: 258096 - DNA, 587 bp, Homo sapiens
atctaggtatattagaccaatatattcaaaattttgtaaaatgtattagttttcttggttagttatgatttttttccaattcagatcattattataaacctatctgaataattattacaaaaagaaaataagatctggtatttattgaacaaaaagctaaccctaaaaaaaagtttcctgtgtagtctatgtaccattaaaagtctaaaattccaaatcaactattatcaaaataagaggaaaatagccctatgctatttatatcataaaataatcagaaaagggcataaagatctatgaaaacaaaaaggaagcttcttttcattgaaattcagacaacctcaagaaagaatcagaaactaaataagcagtgagcaagagccccagctttggagttagacagcctaataagatcccagcattgctayctactgctacctattggttatataaccttatgcaaactaacttctctaagcttcagattcatcacccaatgaatctggtgattggaaactggtaattggaaatagtaataaccaattctcaaggttgcaatgattaaagtagacaatatatgtaaggtg

SEQ ID NO: 258097 - DNA, 532 bp, Homo sapiens
tgggaaatagaaatacctattaaaaattaccttaactaaacagattgaaaaaatgcaaacatcaccaatggtcattacrtaacttcatattaatgtaacctttaaacagagttagaaatacttaacaataaattaaacactaccctagttcattttattgctaatgcttaaagacaggatcagtcttttaatgacagagaaattatttgtgacatgagaaataatcatctttcctttatacccactacaataaatgttaaaattaagcatgaaccataaaaagtttaagcacactgtttcaccagaaactaaaacaataaagcataacacaacagtagcttcttttttacaggaatcctcttgacctaaaacattcttagttgagaaatcatttaagaatattttaaaacatatttttaagctaatggtatttactacaatttccataacatatagtttaacaatgtgtcaagttgttacagcaggtagacagcctgacatgagcagggtaagagagagcccccccagccaa

SEQ ID NO: 258098 - DNA, 558 bp, Homo sapiens
aaaacatagcatattgacatttgtaggataaaatcttgtatttagtgggtaatatatagaattaatgcttatattagaaaagaagaaagatgtaaaatcaatgtactcagctttcacacttaggaaatagaaaataaaaaagagaaactaaactccaaagaggaagagagataactgagtggaagtaggtgaaataaaattctgtagctctgttctccacaacgaaacaaggaactattaaatgaggttcaaaacatctactatargaaaataaaactaatttattcatatctctaaaaagaaaattatcctaaacagactgttggtagaaatatggacgttaaagatacttactgctagtgaaggatcagaagaaaatgaggaagacattatttgaaactattggaaaggggattcttgttatagagtggtagaaagtgtagctaaattgtgtcctacataattatgtggaaactagactttgtaaggaatgtccttggatttggataaggagactgccaagtgttgaaggtgtgctgaggtttcttctttctgctt

SEQ ID NO: 258099 - DNA, 558 bp, Homo sapiens
aaaacatagcatattgacatttgtaggataaaatcttgtatttagtgggtaatatatagaattaatgcttatattagaaaagaagaaagatgtaaaatcaatgtactcagctttcacacttaggaaatagaaaataaaaaagagaaactaaactccaaagaggaagagagataactgagtggaagtaggtgaaataaaattctgtagctctgttctccacaacgaaacaaggaactattaaatgaggttcaaaacatctactataagaaaataaaactaatttattcatatctctaaaaagaaaattatcctaaacagactgttggtagaaatatggacgttaaagatacttactrctagtgaaggatcagaagaaaatgaggaagacattatttgaaactattggaaaggggattcttgttatagagtggtagaaagtgtagctaaattgtgtcctacataattatgtggaaactagactttgtaaggaatgtccttggatttggataaggagactgccaagtgttgaaggtgtgctgaggtttcttctttctgctt

SEQ ID NO: 258100 - DNA, 606 bp, Homo sapiens
tgactttggcaacatttggttatatttatcattgaaaacacaagcaatgggagaaatggtgtttcgttgatttaattttataggacatatggatttgaaaactttcattgagwtcagcagtgacctattaatgttatggaagggtgttatgtaaataataggtgttccagttgggtagctatccacactctgatttgttcatggaaaacatttgataatcagcagtgaaactactagacaagaggaatgatgatagcatgatgggagaataggagtttccaatgcacactcctctgtattagtctgttttcacagtgctataaagatactacatgaaactaggtattttataaagcaaagaagttggtaaggagccaagatgtctgaataggaacagctccggtctacagctcccagcgtgagtgacacagaagacaggtgatttctgcatttccatctgaggtaccaggttcatctcactagggagtgccagacagtgggtgcaggacagtgggtgcagcgcactgtgcgcaggccgaagcagggtgaggcattgcctcactcgggaagcacaaggggtcagggagttccctttgctagtcaaag

SEQ ID NO: 258101 - DNA, 606 bp, Homo sapiens
tgactttggcaacatttggttatatttatcattgaaaacacaagcaatgggagaaatggtgtttcgttgatttaattttataggacatatggatttgaaaactttcattgagatcagcagtgacctattaatgttatggaagggtgttatgtaaataataggtrttccagttgggtagctatccacactctgatttgttcatggaaaacatttgataatcagcagtgaaactactagacaagaggaatgatgatagcatgatgggagaataggagtttccaatgcacactcctctgtattagtctgttttcacagtgctataaagatactacatgaaactaggtattttataaagcaaagaagttggtaaggagccaagatgtctgaataggaacagctccggtctacagctcccagcgtgagtgacacagaagacaggtgatttctgcatttccatctgaggtaccaggttcatctcactagggagtgccagacagtgggtgcaggacagtgggtgcagcgcactgtgcgcaggccgaagcagggtgaggcattgcctcactcgggaagcacaaggggtcagggagttccctttgctagtcaaag

SEQ ID NO: 258102 - DNA, 606 bp, Homo sapiens
tgactttggcaacatttggttatatttatcattgaaaacacaagcaatgggagaaatggtgtttcgttgatttaattttataggacatatggatttgaaaactttcattgagatcagcagtgacctattaatgttatggaagggtgttatgtaaataataggtgttccagttgggtagctatccacactctgatttgttcatggaaaacatttgataatcagcagtgaaactactagacaagaggaatgatgatagcatgatgggagaataggagtttccaatgcacactcctctgtattagtctgttttcacagtgctataaagatactacatgaaactaggtattttataaagcaaagaagttggtaaggagccaagatgtctgaataggaacagctccggtctacagctcccagcgtgagtgacacagaagacaggtgatttctgcatttccatctgaggtaccaggttcatctcactagggagtgccagacagtgggtgcaggacagtgggtgcagcgcactgtgcrcaggccgaagcagggtgaggcattgcctcactcgggaagcacaaggggtcagggagttccctttgctagtcaaag

SEQ ID NO: 258103 - DNA, 621 bp, Homo sapiens
acaggtgttactccatataaagtttaattttgcaatttacattttttacaatttactccaaagaatcaaaatacaaatgaggacagttgttcttcaaaaggaacacccctaaattattatgaatgtgaggaaaaataacctttgcattggattataattgtgagcaaaaataactaatataacaagcttgttttgttacagactattaaatgtgaccactcaagatacttagagctcaaaattctttggtaaatcatctttattttatctgctaatgttttaactcaaaaattgttattaaaaattttaatcttaataaattctacatttactgtaaaataaaattcttataactgagatccatcttgcatccatccagaaagtttgttattgaaaatattaacaaatcactagctctgaaaataattaaaataatgaggcttgtgtatattctattcagtgatttgatgcaattttcctttggtggagtttctttcacaatatttcaataagttataagttcagccataaaatgactgaaacatgctaaatatttaataaaattttttattatamttttgagcaaaatgtcttatagtcaaaaacctctgaagtctacag

SEQ ID NO: 258104 - DNA, 510 bp, Homo sapiens
atgctgagggaatttgttaccaccagacctgccttacaagagtacccaaaggagctcctctggtattaaatatggaaaggaaagaccattaccagccactacaaaaacacactgaagtacacagaccagtgacactctgaagtaaccacatatacaagtcttcaaaataatyggctaacatcatgatggcaggatcaaatctgcacacataaactaaccttgaatataaacaggctaaactgcccaatttaaaggcacagagtggcaagctaaataaaaaagcaagatccattggtatgctgtcttcaagagactcatctcacacacagtgacacacataggctcaaaatacaaggatggaggaaaatctaccaaacaaatggaaaacagaagaaagcaggggttgcaatcctaatttcagacaaaacagagttcaaaccaataaatatcaaaaaatacaaagaaggacattacataatggtaaagggttcaattcagcaagaagaccta

SEQ ID NO: 258105 - DNA, 605 bp, Homo sapiens
tttgatcaatgagttggcattttctaagcctagttatagtattatcatgatgaaattataatgtccatgtttataagtagcagcagggtttcatgatctttacacacactaatagctctgaaactaggattgcattggtctgaagaaatctctgaagtgctgtataggaaaagggcccaattactcatatttatttaagtaaattattatgtggtaataagaatactgagtgacatcaaataatacctgatagcgtaaaaagactgattttgtctttgcaattctcattgttataaaacataatacctaacttcctattatattcacaagttagtgaacataataaattagaatttcccrtatcttctgctcaaagaagtatacggaggatgggcaatggcaatcagaaaaagaagtaggaaagtagctcagctggccagatgtatagacccctcaagcagatgaataaggtcatcttattcatcttattaaaatgaagatgaggtcatcaagtaataaaagtaccagaataagaactttctctgactctgtgtgctggaatgtcaatatggatttcatatggatgtagggtcaagaaaatgatg

SEQ ID NO: 258106 - DNA, 605 bp, Homo sapiens
tttgatcaatgagttggcattttctaagcctagttatagtattatcatgatgaaattataatgtccatgtttataagtagcagcagggtttcatgatctttacacacactaatagctctgaaactaggattgcattggtctgaagaaatctctgaagtgctgtataggaaaagggcccaattactcatatttatttaagtaaattattatgtggtaataagaatactgagtgacatcaaataatacctgatagcgtaaaaagactgattttgtctttgcaattctcattgttataaaacataatacctaacttcctattatattcacaagttagtgaacataataaattagaatttcccatatcttctgctcaaagaagtatrcggaggatgggcaatggcaatcagaaaaagaagtaggaaagtagctcagctggccagatgtatagacccctcaagcagatgaataaggtcatcttattcatcttattaaaatgaagatgaggtcatcaagtaataaaagtaccagaataagaactttctctgactctgtgtgctggaatgtcaatatggatttcatatggatgtagggtcaagaaaatgatg

SEQ ID NO: 258107 - DNA, 628 bp, Homo sapiens
tcatatggatgtagggtcaagaaaatgatggagaaattctcattccctaaattgagactacttgtaattacctaagaacattaagacaaacaacaaggcaattaacactgaagatgaaggaaattctttgcttatgtctttaataacagcgttttttaaagttttttaaagtgcacactcattaatgggtaattagygcacatgaagatcatcaatttaagtactttttaaaaaatgtttcttaattttggtaataaaaaccagccatacatttttaaattagcataaaaataagttttatttcaatgagaaggataatattgtttgcagtctttcaccaaggcagctatatgcaactcaatggtgggcagcttaatttataatttaggttatatttgcagttcatttctcttgctagcttctacttaattagaaaattctgaattcacaatcattgatcactacaaatagtgccaacagtttaatggctgtctgataagtctggatattcatattaaacataaatggcccagaaattatggagtgctggctcaaagactactgtcagcactctaacagatgaaaagttgtaatattttacaggcagaagctggaaggttgggtgttt

SEQ ID NO: 258108 - DNA, 628 bp, Homo sapiens
tcatatggatgtagggtcaagaaaatgatggagaaattctcattccctaaattgagactacttgtaattacctaagaacattaagacaaacaacaaggcaattaacactgaagatgaaggaaattctttgcttatgtctttaataacagcgttttttaaagttttttaaagtgcacactcattaatgggtaattagtgcacatgaagatcatcaatttaagtactttttaaaaaatrtttcttaattttggtaataaaaaccagccatacatttttaaattagcataaaaataagttttatttcaatgagaaggataatattgtttgcagtctttcaccaaggcagctatatgcaactcaatggtgggcagcttaatttataatttaggttatatttgcagttcatttctcttgctagcttctacttaattagaaaattctgaattcacaatcattgatcactacaaatagtgccaacagtttaatggctgtctgataagtctggatattcatattaaacataaatggcccagaaattatggagtgctggctcaaagactactgtcagcactctaacagatgaaaagttgtaatattttacaggcagaagctggaaggttgggtgttt

SEQ ID NO: 258109 - DNA, 628 bp, Homo sapiens
tcatatggatgtagggtcaagaaaatgatggagaaattctcattccctaaattgagactacttgtaattacctaagaacattaagacaaacaacaaggcaattaacactgaagatgaaggaaattctttgcttatgtctttaataacagcgttttttaaagttttttaaagtgcacactcattaatgggtaattagtgcacatgaagatcatcaatttaagtactttttaaaaaatgtttcttaattttggtaataaaaaccagccatacatttttaaattagcataaaaataagttttatttcaatgagaaggataatattgtttgcagtctttcaccaaggcagctatatgcaactcaatggtgggcagcttaatttataatttaggttatatttgcagttcatttctcttgctagcttctacttaattagaaaattctgaattcacaatcattgatmactacaaatagtgccaacagtttaatggctgtctgataagtctggatattcatattaaacataaatggcccagaaattatggagtgctggctcaaagactactgtcagcactctaacagatgaaaagttgtaatattttacaggcagaagctggaaggttgggtgttt

SEQ ID NO: 258110 - DNA, 625 bp, Homo sapiens
attaacatgtacatcacctcacataactacgtgtgtgtgtgtatgtgtgtgtgtggtgagaacaattaagagctactcttagcaactttcaagtgtaaactgaattaatagagttactatactataacattagatcttcagaacttattcatcttgcatacctgtaatgttgtaycctttgacccatattctccacctcccagcccctaacaaccactattctactctctgcttcttgaactttttaatatttcacgtaagtgagatcatgcatctttctgtgtctgtcttatttcacttagcataatgtcctccatgttcatccatgttatcacaaataataggatttccttcttttttaagtctgaataatattcctctgtgtgtgtatgtgtgtcacactttctttatccagtcatccattgatgaacattaggttgattccatatcttgactattgtgaatcatattgcaatgaacatgggagtacagatatgtcttcaacatactgatttcatctcctttgtctatatactcagaagtgggatttccagatcatatggtagttcgatttttatattttaaaaaacttccatactgtttcccataacggctgtaccaattt

SEQ ID NO: 258111 - DNA, 528 bp, Homo sapiens
ggagacctggaatccagcactgccatgaggatggggacggggatggggatctcaggggttgccatccattgtccccacaccagacgatgtgccagcattgtccctggcatgctgtgggggctctaagagatggtgattccttctgaataaggaaatataaaaatgtctcttaattcccctaggcagtaggagctggttacccacaagcgaagcctcagttagattctcccagcagagaaaaggagatcttcaggctagtcccaataggaacagaactaagcagaagaactttgtacttggatgctggagatgatactgcgtatctaatgctyacgactctcactttgcacagtaatgtgggaccataaaaatggccctgtgaattgaaaccatgcaaagtgatgttaatagcaagaaaaatttaattgctgccctgacctttaagcatatttttggtcacagcattaaaaacttttctaccatcaattgtaaatgcatagggaaatggcaagtgatagtagaactggt

SEQ ID NO: 258112 - DNA, 596 bp, Homo sapiens
tctgttaccttgcttttcttgtctatcttccatgtgaacactcttcactcattttttaaaaataaatgtacattttttattttgtatataccagggattgtttatctttttgctatggtactaagttcccttgtgttcccctagagagacttctcagggcaaaagaagcatctgataaacttacatttatctgtcaggaatagatttcctctctgatgtatttgcatgccccaaaagtggtgaaaggtagaatttgaagcacagtggatagataaggtgtatttgggtatgtttacatttttagtgttttgaaaatttgattgctgacccacagtaggaaatgcattttatgtcataactgaattcacatatgaatacatatatgtgcaaatataaytgaaaatatattttgatgcaataatgcttacattataaggtacaaatctactttctataatttttcagttaacaaaatgcaatttgagagcaattacattgagttcacagaaataaattagaattaagaatttgaaaatcacttgttgttttctctatgtactttgtgatgaccattatgtgagatcccatgttagtga

SEQ ID NO: 258113 - DNA, 480 bp, Homo sapiens
acatgggacttggtgtgaagcaaagcaggtgttttcggagaaggtgagggtttgtcctcatcacaccacaccatcttcccgaggggaactgcacaattagtgaaggcttttcctgatctgtgtgttcagatttgggaatgatgacttttcattgttgttgttgttttcacgtggagaaaaatacatgttccttgcttcagagtaaacattctggaagcctttgcgattgttcagatttctttagaggccttgatgccacttaccattgctttttaggctgcagggaacataatgaaactgaagtctcttgtggagcttttattcctcttctttcagacttaacagaaagcagtaggggacacttgggccaccgatgtcagtgtcgtttcagggtctgctttggtgttattcttaagaaaaatggcattrgattaatatttcttttttttttgtaaacagatgttttgctcagacgagtct

SEQ ID NO: 258114 - DNA, 547 bp, Homo sapiens
agaaaagagagaaagaagaatggaatataaagatgaagaaatgccttaaaaactagataccaacaacgaaacataaaaaacaaaaacaaacaaaaaaaactctgccagatgtagccagctaaagtcaaactgaagtttcacttgctggcattttatctgtcatatcaaaacattttcaataccatctaccaatacagcactaaattctggactgccattaatgtcaacccatttataattttggcctgcagcactacaaaaaggcagatgacagcttactatttcacacctgctgttgaaatggataaaaatgactgaaacccataaaagcagaataaagagaaagggaaaaaataaagtcaacaataaggttggagagaattccctgcctgccttgagttttgaatactaggattcgacrgatgtatcctttacaaatctaaaagcaatgagtacagcatatcccaggtggggaaactgacatgcctgggaataatttcctatttttggttggcattattttacccacccattggatttaaatgac

SEQ ID NO: 258115 - DNA, 531 bp, Homo sapiens
cttgatggaacttatattgagaaataaagtttatacatttattttttaattcttatcttttaattccagtttttcaaaaactttttgaagtctctttgtattacccaggattagaagtgagagtgatgagaagctaagccatagaggacatcctctacatcaggaaatttatctcttttaggacttaacatgtgcccctctgraccgcaattgaatgcctaccacatagaggttctctacagggtcatgattatgtaagggatacttgatcttttccaccgatttcccaggaatccacccaccagaggagaaagaagaaacaaaaggagaggggaggtagaagggcagatcctattctctaaaaataaaaatactccctaaaggagtggattgtgttttaactaccaaaaagagactttgttaacccttggagctacttctgtatcattaggagatagaaaaatttgacagagcatagttgaagacaatgatcagaaaaaaataaatacctatttcaaatttgttgcccca

SEQ ID NO: 258116 - DNA, 578 bp, Homo sapiens
ttttaaaaaatccctcaggttgtgctataaaatgtatctaaaactgacatttcttctctcttgcctcttcagctccctacttcrctagaggcaactaatttcaactcctaacagtttattctggtaatttcttccatattttgttaacactcactttaaaactttttgatttaccagttttatatagtatttttctccatagaagataagtatttcaccttcttactcaatatccctattcaccttttcctatccttctcaaaagatatatatcaaaaattttagttgactttatttttgtcatttaatcaattattattaaatagggttgcaccaagttgcatatcagtattctgttttgtttttgtactgtgtcagtcctctgagcccaagcctgcacgtatacatccagatggcctgaagtaactgaagaatcacaaaagaagtgaaaatggccggttctaccttaactgatgatattatcttgtgaaattccttctcgtggctcaggagctcccccactgagtgccttgtcaccctaacccctgcctgccctttgactgtaattttccactacc

SEQ ID NO: 258117 - DNA, 566 bp, Homo sapiens
catatgatccagcatattcacttctgggtatatacccaaaagaattgaatgcaggttctcaaacagatatttatctgcacaaccatgttcatagcagcattattcacaatagctaaaatatataagcaatccaagtgtgcattgacataaataaacaaaatgcagtatatacaaatagagtaattttcagccctaaaaggaaagttggacatatgttacatgaatgaaccttgargatgtcatgctaagtaaaataagccaatcataaaacagacaaattctatatgatttcacttatatgaagtccctagaatagtcaaaatcagagacagataatagaatgttggttttcaggacctaggaggaggtgctaggagttattgtttaatggacataaagtttcaattttgcaagactaaaagggttctggagatggatgttggtgatggttttacaggaatataaatgtacttaataccactgaattatacacttaaagatgtttaagatggcaaatacaatgttatgcatattttatgacaatttaaaaaattaaagtgaaggaa

SEQ ID NO: 258118 - DNA, 605 bp, Homo sapiens
aaaatcattttgtaaataaagttttattggaacccagtcacacccatttgtttatatgttgtttatggttgcctttatgctataaccagagagttgagtagttttcacaaagatgctatagctcccaaagcctaaaatatttactatgtggccttctatgggggaaaaaaaaaatgccaactctgatttagaaagtaagtttagtaaaggtttgaaatgccttagagaaaaagtgaaaacagacagatatttacagattggcagcttctggagttaaaaaggagaaagagagcatgcttgtagaaggaagcaatgggaatgaagccatgcattgaaaaacagctatgaaatagagatttctggatgaaaggaagcagatttctcatggacaggagaggtaaggggtaactaggtggcatgaagccaaaccacagagatccctgagccaggcagaaaattaccaactgttcaggcaagaaatagaaattggtggaaaaatttggggtaygtaacatgtagaaagcaatgttaaaagaagtttaatctgactgagacaggaagtagaatatgcagctagatgccactctgatgactcaaaatagtaa

SEQ ID NO: 258119 - DNA, 614 bp, Homo sapiens
ggaaaatgtggtcaaaaaaatattaagtcttcttctaccctcagcactctgctggagaaaaaatgaaatcttgaatgggcagagctaagactttagcaattgtgtcaaggtggatttctctatactgaaagtaacttctaaaggggactagtatgtaccactatttcatggaaattcagacataattcctttctgcttcaagcttgtattcyaatgaatgatacagaccaaaaaaccaaatgcctgcaaattaaatcccatatagttaaaaagaactacaatcattaaaaaaaggagatgatagagaataatggaaaatttattttagatgtgataatctagaaaaattttattaataaggtaacattgaagttaggaaccaaacaattgtaaatatcaggagaaggcctctgaaaccctgagacaggtgaaaccttgacataatagaaggatggaaagagcaaattataagagggtagcaagaaaaaggaagagtgctgcaagacaaagttggagtgagatgtaggaccctatcactgggtaagagggctggagtcacagaacatatgcagtcactctgggtgtttgaggggcatggcccaatcaaatttaca

SEQ ID NO: 258120 - DNA, 572 bp, Homo sapiens
ggactaacattttataaaaagtttttaaaatcccttttctttatagagagattgagaaatgtgacacagttatagcagataggcttaaaagcacaagagaacaaactatttttagaaatgttgattgttaataaacactgaaatttcagaccgtcacaaacacaaatataattagttacttttagtaataattatatagatytgctatacactcaagcatacatatataggtattatatatgtgtttatgtgtgtgtatatacacatataaacacatatatacacatataaacacatatatacacatatatgctagttacaaattttaagctgaagaatatcatatgtgctaaataatactaatgatttctatgtcagaaagattaaggtccagttatcataagtacttgaaagtaatggaattgaatcaaactgcccacaagtctgacttcattaattcgcaatgtcttgccctctaactagagtgaattgatgttttgttctagtgtgtttaatcaaatgctgaagaagcaagacagaagataggatggagaaggaaaaggaatgcagac

SEQ ID NO: 258121 - DNA, 572 bp, Homo sapiens
ggactaacattttataaaaagtttttaaaatcccttttctttatagagagattgagaaatgtgacacagttatagcagataggcttaaaagcacaagagaacaaactatttttagaaatgttgattgttaataaacactgaaatttcagaccgtcacaaacacaaatataattagttacttttagtaataattatatagatctgctatacactcaagcatacatatataggtattatatatgtgtttatgtgtgtgtatatacayatataaacacatatatacacatataaacacatatatacacatatatgctagttacaaattttaagctgaagaatatcatatgtgctaaataatactaatgatttctatgtcagaaagattaaggtccagttatcataagtacttgaaagtaatggaattgaatcaaactgcccacaagtctgacttcattaattcgcaatgtcttgccctctaactagagtgaattgatgttttgttctagtgtgtttaatcaaatgctgaagaagcaagacagaagataggatggagaaggaaaaggaatgcagac

SEQ ID NO: 258122 - DNA, 517 bp, Homo sapiens
tccttcatacagttagacaaatggcatttaaggttttatctgtttacttcctgttctatactaggaagatggaaagtgatgcttaaaaccttcagcagctatacatcaattggttaggccaattacagaggagtkttcacattgttatttcacctccttccccatacactcaagtggctcaggtagttccaagataccaccccattgaaaggctgggaggcaagtctatctatgctgctgtgatttgggaatccatctgtggtttctacctgtggcagagtctgaggttagaaggatgattaggagcatttatcagataccctatcaaggaaataagactttaaggagaagggagtgtttttaaaactaaagttatgtttattgataatttcttcaccataacaaccaaatttgcccattttcattgattcaagcagagatctatacttgtttttaagtttctggagcctgtcagtcgcatatgtggctcccaacctcggctgtcattttgaatttt

SEQ ID NO: 258123 - DNA, 453 bp, Homo sapiens
aacatctcaggacttgaataacaacattaactaaaaaagagttgcttccctgggttttcatgttgttttattggtttaattatttaaatttttgcctcatgtatcccagacttggagcmgaagacactgataactcagaagcaccaacatgtgcagacaaaaaaatgtcccaagaaaagcctgtccttgctaggtaaaagtgtagcaaaagggaatcctaaaaagagaccattttgggataggaatttctatactttagccaaataccacaggaaaaaaaataaaatgttgctgaacctcttccctgatcagccagctctgaatgagaggcctacatgtcctccaaactcatgagactgtgatgagatgctccaacatttctactggatcatgtcagagaaggccagtggtggagcctggacttttatcctcactggatagtaatgagcacca

SEQ ID NO: 258124 - DNA, 453 bp, Homo sapiens
aacatctcaggacttgaataacaacattaactaaaaaagagttgcttccctgggttttcatgttgttttattggtttaattatttaaatttttgcctcatgtatcccagacttggagccgaagacactgataactcagaagcaccaacatgtgcagacaaaaaaatgtcccaagaaaagcctgtcctygctaggtaaaagtgtagcaaaagggaatcctaaaaagagaccattttgggataggaatttctatactttagccaaataccacaggaaaaaaaataaaatgttgctgaacctcttccctgatcagccagctctgaatgagaggcctacatgtcctccaaactcatgagactgtgatgagatgctccaacatttctactggatcatgtcagagaaggccagtggtggagcctggacttttatcctcactggatagtaatgagcacca

SEQ ID NO: 258125 - DNA, 453 bp, Homo sapiens
aacatctcaggacttgaataacaacattaactaaaaaagagttgcttccctgggttttcatgttgttttattggtttaattatttaaatttttgcctcatgtatcccagacttggagccgaagacactgataactcagaagcaccaacatgtgcagacaaaaaaatgtcccaagaaaagcctgtccttgctaggtaaaagtgtagcaaaagggaatcctaaaaagagaccattttgggataggaayttctatactttagccaaataccacaggaaaaaaaataaaatgttgctgaacctcttccctgatcagccagctctgaatgagaggcctacatgtcctccaaactcatgagactgtgatgagatgctccaacatttctactggatcatgtcagagaaggccagtggtggagcctggacttttatcctcactggatagtaatgagcacca

SEQ ID NO: 258126 - DNA, 472 bp, Homo sapiens
ctccagggtatgtcagaggccttcacggcagcccctcccatcacagacccagaggcctaggataaaatggttttgtgggccaggcagrgtccacatgctgtgtgcaatctaaagacttggtgctctgcatcccagccactccagccgtcactaaaaggggctaagagacagcttgggctgttgcttcagagagtggaaaacccaagccttggcaggttccatgtggtgttgagcctgtaagtgcagagaagtcaagaactgaggtttaggaaccttggcctagatttcagatgtatggaaatgcctggatgcccaggcagaagtttgctgcaggggtggggccctcatggagaacctttgccagggcagtgcagaagggatgtgaggttggagtctccacacagagtccttactggggtaccgcctagggccaccatcctccagaccccagaatggtagatccactgacagc

SEQ ID NO: 258127 - DNA, 472 bp, Homo sapiens
ctccagggtatgtcagaggccttcacggcagcccctcccatcacagacccagaggcctaggataaaatggttttgtgggccaggcagggtccmcatgctgtgtgcaatctaaagacttggtgctctgcatcccagccactccagccgtcactaaaaggggctaagagacagcttgggctgttgcttcagagagtggaaaacccaagccttggcaggttccatgtggtgttgagcctgtaagtgcagagaagtcaagaactgaggtttaggaaccttggcctagatttcagatgtatggaaatgcctggatgcccaggcagaagtttgctgcaggggtggggccctcatggagaacctttgccagggcagtgcagaagggatgtgaggttggagtctccacacagagtccttactggggtaccgcctagggccaccatcctccagaccccagaatggtagatccactgacagc

SEQ ID NO: 258128 - DNA, 472 bp, Homo sapiens
ctccagggtatgtcagaggccttcacggcagcccctcccatcacagacccagaggcctaggataaaatggttttgtgggccaggcagggtccacatgctgtgtgcartctaaagacttggtgctctgcatcccagccactccagccgtcactaaaaggggctaagagacagcttgggctgttgcttcagagagtggaaaacccaagccttggcaggttccatgtggtgttgagcctgtaagtgcagagaagtcaagaactgaggtttaggaaccttggcctagatttcagatgtatggaaatgcctggatgcccaggcagaagtttgctgcaggggtggggccctcatggagaacctttgccagggcagtgcagaagggatgtgaggttggagtctccacacagagtccttactggggtaccgcctagggccaccatcctccagaccccagaatggtagatccactgacagc

SEQ ID NO: 258129 - DNA, 472 bp, Homo sapiens
ctccagggtatgtcagaggccttcacggcagcccctcccatcacagacccagaggcctaggataaaatggttttgtgggccaggcagggtccacatgctgtgtgcaatctaaagacttggtgctctgcatcccagccactccagccgtcactaaaaggggctaagagacagcttgggctgttgcttcagagagtggaaaacccaagccttggcaggttccatgtggtgttgagcctgtargtgcagagaagtcaagaactgaggtttaggaaccttggcctagatttcagatgtatggaaatgcctggatgcccaggcagaagtttgctgcaggggtggggccctcatggagaacctttgccagggcagtgcagaagggatgtgaggttggagtctccacacagagtccttactggggtaccgcctagggccaccatcctccagaccccagaatggtagatccactgacagc

SEQ ID NO: 258130 - DNA, 539 bp, Homo sapiens
aggagtacctattttcaaaattctccccagataactgtgatgagcaaccatatttggatatttgattcagcagttctggagtcagagactttgcatttctaatcagtttccaggtaatgctcaagatgctgatggcagaatcacattttgagaaccgctggcctaaaccaatgtttctgaacactggttgcacrttcagatcacttaggaatattttaaaaattcaatgtctagactgtgacttcatccacttacgtcaactctggcgtgggactccaggtatctgtggcttctaaagctcctcaaattattctagtgtgcagccagggttaaggatgtctttgttcaaaccagctttagtgaattcaattcaattgtcatctgttatgggcaagacatgtattgatatactctatgtagtgactcatattacaaattaatacttaagcttaattacaggattttttaaatgttatttttgctgattaactatactttcttttgacaaaaaaatgaaataatagaactcaaaatgccag

SEQ ID NO: 258131 - DNA, 548 bp, Homo sapiens
agatgtccgccaccacgcctgactaatttttgcattttttttgtagaaatggggtttcaccatgttggccaggctggtctcaaactcctgatctcaagcaatctgcctgccttggcctcctaaagtgctgggattacaggcgtgagccactgtgcccagcccactgatctcccattcttcctattgaccaattttaatatatagccaagaagctttgtgagtcttatgttaatcaaatctaatatawgtaaatcataatttattttaaaaagtaatttttgtttgctttacaaaaggatacatgacatgatttctttaaattataaactcatttcatgtatgcaaaaaatttagctacacaaaatcttttaggaatatagagatcctgtaaaatgcaggtagtcttggaaatgtaggaagcaatttatattctgtgaggcaaagaagaaactcaggataggaaatcatcactctcttggtaatcttttaaatatgaaagtcaccataaagaaatccaaattctaaacatttattttctcctctaacct

SEQ ID NO: 258132 - DNA, 598 bp, Homo sapiens
aaattcactggagtagaccataaaatgtctcatgggttgccagaggtcatacccacttttccttatgagacacaacacagttaaagtgaaagcaaagataaatgtgttagtattaaatagtctgtgatcacatcttttatttccctggctattatgcttttctttaacatgtcagagcactgtggaagcayggtagactccaacaccacctttactgtttctagagcacatggcaaattcttatcaagagaatatttgctatatgtactgcattgatactacacctgattgtttctctccagatggaaattgacttcaggattcacagttcagctaattgggaagaggactaaggcaggtggttataacatagaactaatgtcccaaactcaatacaaatctcaaatattttatgccctgggaaccagaatgctctatctggaattctgttcaaggtgctagaaggacaaagaagcttccatttgaaattctgtttggaatatctgtgcttatattgtcctcattgttctttcatattaaaaaaaaaccttccccaaaattacttcagctagattccaaaaataacctagctggttgt

SEQ ID NO: 258133 - DNA, 598 bp, Homo sapiens
aaattcactggagtagaccataaaatgtctcatgggttgccagaggtcatacccacttttccttatgagacacaacacagttaaagtgaaagcaaagataaatgtgttagtattaaatagtctgtgatcacatcttttatttccctggctattatgcttttctttaacatgtcagagcactgtggaagcacggtagactccaacaccacctttactgtttctagagcacatggcaaattcttatcaagagaatatttgctatatgtactgcattgatactacacctgattgtttctctccagatggaaattgacttcaggattcayagttcagctaattgggaagaggactaaggcaggtggttataacatagaactaatgtcccaaactcaatacaaatctcaaatattttatgccctgggaaccagaatgctctatctggaattctgttcaaggtgctagaaggacaaagaagcttccatttgaaattctgtttggaatatctgtgcttatattgtcctcattgttctttcatattaaaaaaaaaccttccccaaaattacttcagctagattccaaaaataacctagctggttgt

SEQ ID NO: 258134 - DNA, 602 bp, Homo sapiens
aatagggaatatggctaaaggatggagttatccctatttcactttaaactcagatcaacctctctggaggaatttaagaattggatatatatgggaacaaacatgatcaggcataacagctttggaattacatcctattggggaagtatcaagagactaggaacagccagaacaaagacaatgagaaaattaaccctgcactgactccttgtcaatggagataaccaattgttcttagaaacaagtttcaaatgcatcactgttttaatgagctctgactgcaccccctcctccttgccattagycaattttcattggcttagaaccacccacctttaagaacaatgaggcatcaagtcactctcatttttttaaaaaatgcaattcttgatggatattttaagagtcaaggtaaagtcaaacgtcgtgaacagaagggtcttatcattataacgtttgtcaccagctggagagaaatcagggctggagcctctgttagctgtgaaagaaatgtttgcaggtgtggcaccagctcagtatgtgctcacagcgactactatggaaaacttggaaacagatcctggaaggggcaggaaagggtt

SEQ ID NO: 258135 - DNA, 578 bp, Homo sapiens
aactcctaaccatgactggccttcctcttccctagcctctgcaatagaaaatctggacatttccatgtgcaggggacctatgtttctcaggaaataggcaagtggagtcctagatttaacttagacaacaatttgataaatatttttcccactaacttttaagaagtgtcttataacatggatttatggttctcttttgctccccatacctctctctgtgttaagtattttgttcattcatcaggacagccattagaaaaatatggtagatgaaattaggggagaaaatattttccctcttaattttcatatatctgaatgcattgacataggattttacattaagtttttaattttaactaaaaaatattaaaaataacaatgacatatctttgttgcttatttctaacttccattaaaatttagattttgtatatgcaagggattaaaatagctcaaaacccaaaagagaagtatggtgaatagtctccacatgaactcayatgccaaccagttccccgtctccacaaaaacctgtagtctcaggttcttgggcatccctccagagatacaccaag

SEQ ID NO: 258136 - DNA, 534 bp, Homo sapiens
aaatttctgtttctaatctgtcacatcatctaatcccagtaaccaatggtctttctatcatagctgactacttcttagtccaaatagtggctcaaataacatatctaggccaggcacagkggctcacacctgtaatcccagcactctgggaggccaaggcaggcagatcacctgaggtcgggagttcaagacctgcctgaccaatatggagaaaccccgtctctactaaaaatacaaaattagccgggcgtggtggtgcatgcctgtaatcccagttactcgggaggctgaggcaggggaatgactttgagtctgggaattggaggttgcggtgagctgagatgacgccattgcactctggcctgggcaataagagagaaattctgtctcaaaaaataaattaagaaataacaacaacatatctaggagtccttcccagaactcatcaaattgaccaccttattcagctagccctgggtatcagatacgtttatatctggtaacatttaatgaaaaatctaacaaaatacaaca

SEQ ID NO: 258137 - DNA, 534 bp, Homo sapiens
aaatttctgtttctaatctgtcacatcatctaatcccagtaaccaatggtctttctatcatagctgactacttcttagtccaaatagtggctcaaataacatatctaggccaggcacagtggctcacacctgtaatcccagcactctgggaggccaaggcaggcagatcacctgaggtcgggagttcaagacctgcctgaccaatatggagaaaccccgtctctactaaaamtacaaaattagccgggcgtggtggtgcatgcctgtaatcccagttactcgggaggctgaggcaggggaatgactttgagtctgggaattggaggttgcggtgagctgagatgacgccattgcactctggcctgggcaataagagagaaattctgtctcaaaaaataaattaagaaataacaacaacatatctaggagtccttcccagaactcatcaaattgaccaccttattcagctagccctgggtatcagatacgtttatatctggtaacatttaatgaaaaatctaacaaaatacaaca

SEQ ID NO: 258138 - DNA, 534 bp, Homo sapiens
aaatttctgtttctaatctgtcacatcatctaatcccagtaaccaatggtctttctatcatagctgactacttcttagtccaaatagtggctcaaataacatatctaggccaggcacagtggctcacacctgtaatcccagcactctgggaggccaaggcaggcagatcacctgaggtcgggagttcaagacctgcctgaccaatatggagaaaccccgtctctactaaaaatacaaaattagccgggcgtggtggtgcatgcctgtaatcccagttactcgggaggctgaggcaggggaatgactttgagtctgggaattggaggttgcrgtgagctgagatgacgccattgcactctggcctgggcaataagagagaaattctgtctcaaaaaataaattaagaaataacaacaacatatctaggagtccttcccagaactcatcaaattgaccaccttattcagctagccctgggtatcagatacgtttatatctggtaacatttaatgaaaaatctaacaaaatacaaca

SEQ ID NO: 258139 - DNA, 534 bp, Homo sapiens
aaatttctgtttctaatctgtcacatcatctaatcccagtaaccaatggtctttctatcatagctgactacttcttagtccaaatagtggctcaaataacatatctaggccaggcacagtggctcacacctgtaatcccagcactctgggaggccaaggcaggcagatcacctgaggtcgggagttcaagacctgcctgaccaatatggagaaaccccgtctctactaaaaatacaaaattagccgggcgtggtggtgcatgcctgtaatcccagttactcgggaggctgaggcaggggaatgactttgagtctgggaattggaggttgcggtgagctgagatgacgccattgcactctggcctgggcaataagagagaaattctgtctcaaaaaataaattaagaaataacaacaacatatctaggagtccttcccagaactcatcaaattgaccaccttattcagctagycctgggtatcagatacgtttatatctggtaacatttaatgaaaaatctaacaaaatacaaca

SEQ ID NO: 258140 - DNA, 545 bp, Homo sapiens
ggggcttggaaactcaaggtcaaagcactagcatattcattgtatggtgagggctcactctctgcttcatagatggagccttctcactgtgtttgcacatgatgagaggggcaaacaaactctcttgggcttcttttataatggcactaatccactcatgccctaatcatcttctaaaggtccacctcttaatactattacattgggcattagatttgaacctgtgratattggaaagacacaaacattcagaccattccacagtgttttttatctttagcatttctttttgattctctccatttctgtgtttacataattaatatgttcttgcatgtctttttttccattaaagacctcagcacattaattagtttttaaaaagtggtataattccaaccttcctgccatatctgttattctgcttctcattcagtcccttcaaactgtgttttccttttagtgtattttatatatattttttcctgatggccagacgttatgtactgggtaataggaacagctgtaaataagtctgcagtgat

SEQ ID NO: 258141 - DNA, 573 bp, Homo sapiens
gtttataaacaacagtaatttattactcacagttctgggggcttggaaactcaaggtcaaagcactagcatattcattgtatggtgagggctcactctctgcttcatagatggagccttctcactgtgtttgcacatgatgagaggggcaaacaaactctcttgggcttcttttataatggcactaatccactcatgccctaatcatcttctaaaggtccacctcttaatactattacattgggcattagatttgaacctgtgaatattggaaagacacaaacattcagaccattccacagtgttttttatctttagcatttctttttgattctctccatttctgtgtttacataattaatatgttcttgcatgtctttttttccattaaagacctyagcacattaattagtttttaaaaagtggtataattccaaccttcctgccatatctgttattctgcttctcattcagtcccttcaaactgtgttttccttttagtgtattttatatatattttttcctgatggccagacgttatgtactgggtaataggaacagctgtaaataagtc

SEQ ID NO: 258142 - DNA, 577 bp, Homo sapiens
tgatggttgtgagtttggtggttgtgatgatggtgataatagtaatgttgagggtggtgatgagggtgttgataatgatgayggagaaagtgaaggaggaaaagtggcaggtgccactacagcagctcttacagtcattgcttccttctgctaacaggcaaggaatatcacagaactagaatcagaaggtttgggtttgaattccagcagtgatgtgttagctgctcatctatgagctgatcactttggctttccaaaagatcacagcttcctcattaatatcatagtaacaaatataatccttgcctgcctaataaactcagtgagggacaaatcagcacatggattaaaatgaaaagcactgcatgtaccaggctcacaattactatcataagtctcttctctgccagacttgccctactgagtcctttgtaggatctcattcttcctttagatgattagctttgaaagagagaagctgacccaaaagtcacttaaagtagcagcaattattatcagttcaggcatcactgtataggaacatatcatatattttatctgtcctagtctgcccagc

SEQ ID NO: 258143 - DNA, 577 bp, Homo sapiens
tgatggttgtgagtttggtggttgtgatgatggtgataatagtaatgttgagggtggtgatgagggtgttgataatgatgatggagaaagtgaaggaggaaaagtggcaggtgccactacagcagctcttacagtcattgcttccttctgctaacaggcaaggaatatcacagaactagaatcagaaggtttgggtttgaattccagcagtgatgtgttagctgctcatctatgagctgatcactttggctttccaaaagatcacagcttcctcattaatatcrtagtaacaaatataatccttgcctgcctaataaactcagtgagggacaaatcagcacatggattaaaatgaaaagcactgcatgtaccaggctcacaattactatcataagtctcttctctgccagacttgccctactgagtcctttgtaggatctcattcttcctttagatgattagctttgaaagagagaagctgacccaaaagtcacttaaagtagcagcaattattatcagttcaggcatcactgtataggaacatatcatatattttatctgtcctagtctgcccagc

SEQ ID NO: 258144 - DNA, 493 bp, Homo sapiens
tgcctaacaaacacttactcatccttaaagaccaaaatcaaatgttctctcctttgtgaaaactgtcaaacctatccataagaaaatttgttccttccaatatgttcacacaatcctttatatagcttcaattccaacacctctttcattgttttgtgataaaccatttgattcctttcttccttrctgaccatagactccaagagtcttactcattttatatttgatatttttacattgcaccatatctagacctcagtagacattcagtaaatcttcctttgaaaggaagaataaataaattttgagtagatagatagataaatggatggatggatacatgactacctatagtaatggtctggagtttcagcatctttcttcgtggcatctgtataagcccattctcagagacacacctcacatctgatgtttggggaccatcaactctgatagctttatatcttggaagaaccattgatttttcttcctt

SEQ ID NO: 258145 - DNA, 493 bp, Homo sapiens
tgcctaacaaacacttactcatccttaaagaccaaaatcaaatgttctctcctttgtgaaaactgtcaaacctatccataagaaaatttgttccttccaatatgttcacacaatcctttatatagcttcaattccaacacctctttcattgttttgtgataaaccatttgattcctttcttccttactgaccatagactccaagagtcttactcattttatatttgatatttttacattgcaccatatctagaccwcagtagacattcagtaaatcttcctttgaaaggaagaataaataaattttgagtagatagatagataaatggatggatggatacatgactacctatagtaatggtctggagtttcagcatctttcttcgtggcatctgtataagcccattctcagagacacacctcacatctgatgtttggggaccatcaactctgatagctttatatcttggaagaaccattgatttttcttcctt

SEQ ID NO: 258146 - DNA, 641 bp, Homo sapiens
cacactgctcattgttttccacaaaagctgtgacaatttatactcaggaaaaaatcatgaagttcttctgagggatgagcatcaagagtcatcctaataataacaaaaagttttaaatcttactaatcgtatttaatagtgtcaatattgtattaaggctgtttcatatataaattataaatattaaaatgctggtatatttcataaagttttttgtgccaatttattacttaattctcacaaaactctgaggggtaaattttattgctgtytcattttaaagatgaaggaactatggctcagaaaaactgaagtgtcctgtctatgtcacctgactaacggccaacagatagtcttccttacccatggcaggctacaccttgcctaaattgctaaagaagcagcccagattcttcaggctaaaataggtaccagggagaaggacatgtcgcccttttgtatggaaatgagcatccttcaaagcccagttcaaatggcaacccctttcccaaaggactcttccctccctacccaccctattggaagtaatacaaccacaacttccttctggaagccacacccctatactgggaaggggcccttgcctacaagatcctggaatgtcactgctgagatcattt

SEQ ID NO: 258147 - DNA, 583 bp, Homo sapiens
tgatgaatgggctcttcgtttctgccttcacgtctggaaggtccagatccccaactgggatgactgatccacctggggaaatggcatttgacagacccacagcttcctggggccactgaggataaggttgcagacagggctccggacaggaaaaaaaaaaattaacatctttttgctcaatctggatgtcatttgaaacaatactcttcaagctctctaccctggggatttattaagttatcagtaagcaactctgaaataaaccacactcatggctttatgttctttccctgccccacccycaacccagacttctcctccacttaacctgttacattccaggtaggaaagagggaggacaggacctgtggtctgcagatcagagttcaaatctcctctcaaccaagtttattattatgtggtttcaggcaaaactctctgaagagcctgttttctcacctgcaaaatggatgtgaaagcacttccccagggttgatttatttattcatgtattattcctctaattcactgtatgcttctgtgccagacccagttctaaaggctgggagtacagagatgactc

SEQ ID NO: 258148 - DNA, 501 bp, Homo sapiens
atatgcttgtgatttctacattctgtaagtatgggactgataccaggtgcttcttagagatagtgttgactaacgtggccttactcccacatttgctcaggaaagtcccagtctgttgtcctgacttcctgtctggtttagcattcatccaggatatatgttatttttactcctaagggggttacttcctctgccatgcacactgcaggcacctgtctggtgagctwgtttgtataaagtatctgagcatatttccagatggaagttagaacaggtgagactatgtgactaattaacatggaaaccatgaggaaaatactgagcttcccattcattggcttcacatctagacataagagaagaggaaaagattaaagtccaaatgaagaattgagcaagagttttctgattctcttgatttttctgtaccaaggataacacccacgtccctgagttaaagagagaaggtcaaattatgagggtgtgttggctgcaggctcc

SEQ ID NO: 258149 - DNA, 553 bp, Homo sapiens
gctgagcttgtgcccaaactgtaaagtaaagctctggtaaacttggctgagagtgtgaccgaggcccaaagcttaaggggggcttctctcaatggtgagggctaaactcaagtcatatgaccagtctgcatcagcctcaggaggtcagaggctgtcttagcctgttcaggctgctataaccaaaaactataaactgggtggtttatcaacaatagaaatttatatctcacagttctggaggctaaaaggcacaaggtgccagtagatttcatgtctagtgatgacctgtttcctggttcatagattgtgccttcttactgtgtctttatgtggtggaaggagtgagggtctttccgggacctcttttataagacaccaatctcattcatgaggaccctacccccatgacctaatcacctttcagaggccccttcctaataccatcrccttgggagttaggatttcaacacatgaattcagatcacagaaacattcagaccatggcagaggccaaataacactcatcagaaagagagagtgaactgcaggatca

SEQ ID NO: 258150 - DNA, 607 bp, Homo sapiens
ggttcttctgtgtttcttattggctttggatgccattagctgtttattgaagattcatgtggagatgagcagaagtgagctggaagagtctgaaactttgggttaggtttcttgtctctgaccctgtttcatcaaagccattatttcctttacactggatgcttattttcctgcaatgtttggtccatggtgttcacagcaagtccttttaaattacaggctcactggcaaatagcaaattctgcttcccaagmcttgatcacccatctcgactctagccattgctcttaaccaggagttgatctcggaaaatggaaatggtggatttcacctttagctccaacttcccagatgttctctaggacgcgttggtcctccacagggacattcctatctacccagtggcccatccagccttagagcgggtcattctaatcaaaggctcctttcgggatggaagcactcacatttagagaaatcttccctgctcaagccctgaggtgatccctattcctctctcatttttctccagatttcacggtgtggttcatagtttgtggtttggggctgtggccttttccttgttccactaaataggaagagtttt

SEQ ID NO: 258151 - DNA, 607 bp, Homo sapiens
ggttcttctgtgtttcttattggctttggatgccattagctgtttattgaagattcatgtggagatgagcagaagtgagctggaagagtctgaaactttgggttaggtttcttgtctctgaccctgtttcatcaaagccattatttcctttacactggatgcttattttcctgcaatgtttggtccatggtgttcacagcaagtccttttaaattacaggctcactggcaaatagcaaattctgcttcccaagacttgatcacccatctcgactctagccattgctcttaaccaggagttgatctcggaaaatggaaatggtggatttcacctttagctccaacttcccagatgttctctaggacgcgttggtcctccacagggacattcctatctayccagtggcccatccagccttagagcgggtcattctaatcaaaggctcctttcgggatggaagcactcacatttagagaaatcttccctgctcaagccctgaggtgatccctattcctctctcatttttctccagatttcacggtgtggttcatagtttgtggtttggggctgtggccttttccttgttccactaaataggaagagtttt

SEQ ID NO: 258152 - DNA, 604 bp, Homo sapiens
atctattaatttattgtgagcctaagcactgtctccatggtgttgtacgcattctcttccagagctgatctcaatatctaaccatgaacttcatctttgtacccatctctccaattccccagcatctcctagcactacatctgrcacagaggaagagctgggagtaggcagaatgatgagtaatatgttactttacatggcaaaagggaattaaaatttcagatgcaattaaggtggttaatcaactgacctcaaaataagcgagattaacccagtgggcccaatctaatcatatgagtccttaaaagtggaagaagaggcagaagagaggggcaaagtgatgcaatgtggagaaggactcaacccaccattactggctttgaagatggaggaagaggccatgagccaagaaatgcaggtgaccactagaaactggaaaagaggggaaaatggattctcctctaaagcctgcagaaagaatacagccctgtcaacactttgatcttaacccagtgagacctgtgtctgacttctaacttacagaaccatcagataatatatttgtgttgttttaagccaccctgtttgcggaaattgttacagc

SEQ ID NO: 258153 - DNA, 604 bp, Homo sapiens
atctattaatttattgtgagcctaagcactgtctccatggtgttgtacgcattctcttccagagctgatctcaatatctaaccatgaacttcatctttgtacccatctctccaattccccagcatctcctagcactacatctgacacagaggaagagctgggagtaggcagaatgatgaktaatatgttactttacatggcaaaagggaattaaaatttcagatgcaattaaggtggttaatcaactgacctcaaaataagcgagattaacccagtgggcccaatctaatcatatgagtccttaaaagtggaagaagaggcagaagagaggggcaaagtgatgcaatgtggagaaggactcaacccaccattactggctttgaagatggaggaagaggccatgagccaagaaatgcaggtgaccactagaaactggaaaagaggggaaaatggattctcctctaaagcctgcagaaagaatacagccctgtcaacactttgatcttaacccagtgagacctgtgtctgacttctaacttacagaaccatcagataatatatttgtgttgttttaagccaccctgtttgcggaaattgttacagc

SEQ ID NO: 258154 - DNA, 598 bp, Homo sapiens
tcaatacaataaaagttttttcattcaggtgaacatccaacacagatattgacagttggtgggccaccttctgggaacccaaactctttccatcttgtggttctgttcttgtctcctagggcttcagggtcctcttcattctgtcagcagacgaggaaaatgaaagaagaaagaagacacacacttatttcttaaccgccacagctagaaagtgacattcatcaattccattcacattcccctggagagaatccatttcatggtacaccttacttcagaagaagctgggaaacacagctctaagtttggtgagcagctagccagcctgccacatatacaaatataattaatagaagaaaacacagctaagtcttctcttaatgtcgtctataggttcttggaaactgtgactttaagcaaaatgacatactgtatgctgtagcaatttaactcttgtttatatcaattagtctatggtaaaattggttctatcacactgtacrtcattttgcttaaagttgaagtttccaagaaactatcaatgacattaactgaggacttactgcatatgccaagaatagatgctaagattgagcat

SEQ ID NO: 258155 - DNA, 598 bp, Homo sapiens
tcaatacaataaaagttttttcattcaggtgaacatccaacacagatattgacagttggtgggccaccttctgggaacccaaactctttccatcttgtggttctgttcttgtctcctagggcttcagggtcctcttcattctgtcagcagacgaggaaaatgaaagaagaaagaagacacacacttatttcttaaccgccacagctagaaagtgacattcatcaattccattcacattcccctggagagaatccatttcatggtacaccttacttcagaagaagctgggaaacacagctctaagtttggtgagcagctagccagcctgccacatatacaaatataattaatagaagaaaacacagctaagtcttctcttaatgtcgtctataggttcttggaaactgtgactttaagcaaaatgacatactgtatgctgtagcaatttaactcttgtttatatcaattagtctatggtaaaattggttctatcacactgtacgtcattttgcttaaagttgaagtttccaagaaactatcaatgacattaactgaggayttactgcatatgccaagaatagatgctaagattgagcat

SEQ ID NO: 258156 - DNA, 330 bp, Homo sapiens
ctagggttctatatcaaatcagcatgtagaaacatgcagcccataccccttgtgtacatcagcatctcaaagagtctgagaagtcctgcagttgaaaaaccaacactttaacccttttaactcagtatttcctgaacttattccataagtttgaatatacaaaaataaagttttttgcttaatactcagcaacamccccttccacaagatatactggaataaatagtgtttggtggtcatgagtattttaggaaaagggcaggagaagcttgaatttcccccagtgtgccttgggtgagcactgtggttatagccacttgatgagaacag

SEQ ID NO: 258157 - DNA, 520 bp, Homo sapiens
aaaaacaatcccaccctgggtctamcatagtctcggggacttttaaaccaatgcccagctagaaaaaacatctcaggcagtttgcggatagaagaggaaataatattaagagcctgccatatgttgaatgtttactatgtctcagcagaatataaatgctttagtttcttacagaagccctccaaggtgggtactcttattatcccctttttactaatgaagaaactgagacttaaggaggttaaatacctggtaagtagatagagtagggatctgacctaagctgtccaactccagggctcatgctcttaacagtgtttatcctgctttcccaggaaactacagaggccctttggtgctccccagctctccttgttttcctgtttctaagcatctgagtgcatcctgatagctgtggacagcagagatttggaacaggagattgaagaagtctcatctactgccatgcttggcacatagtaggcactcaacacatgctagactctccccacctcctgtt

SEQ ID NO: 258158 - DNA, 520 bp, Homo sapiens
aaaaacaatcccaccctgggtctaccatagtctcggggacttttaaaccaatgcccagctagaaaaaacatctcaggcagttygcggatagaagaggaaataatattaagagcctgccatatgttgaatgtttactatgtctcagcagaatataaatgctttagtttcttacagaagccctccaaggtgggtactcttattatcccctttttactaatgaagaaactgagacttaaggaggttaaatacctggtaagtagatagagtagggatctgacctaagctgtccaactccagggctcatgctcttaacagtgtttatcctgctttcccaggaaactacagaggccctttggtgctccccagctctccttgttttcctgtttctaagcatctgagtgcatcctgatagctgtggacagcagagatttggaacaggagattgaagaagtctcatctactgccatgcttggcacatagtaggcactcaacacatgctagactctccccacctcctgtt

SEQ ID NO: 258159 - DNA, 520 bp, Homo sapiens
aaaaacaatcccaccctgggtctaccatagtctcggggacttttaaaccaatgcccagctagaaaaaacatctcaggcagtttgcggatagaagaggaaataatattaagagcctgccatatgttgaatgtttactatgtctcagcagmatataaatgctttagtttcttacagaagccctccaaggtgggtactcttattatcccctttttactaatgaagaaactgagacttaaggaggttaaatacctggtaagtagatagagtagggatctgacctaagctgtccaactccagggctcatgctcttaacagtgtttatcctgctttcccaggaaactacagaggccctttggtgctccccagctctccttgttttcctgtttctaagcatctgagtgcatcctgatagctgtggacagcagagatttggaacaggagattgaagaagtctcatctactgccatgcttggcacatagtaggcactcaacacatgctagactctccccacctcctgtt

SEQ ID NO: 258160 - DNA, 520 bp, Homo sapiens
aaaaacaatcccaccctgggtctaccatagtctcggggacttttaaaccaatgcccagctagaaaaaacatctcaggcagtttgcggatagaagaggaaataatattaagagcctgccatatgttgaatgtttactatgtctcagcagaatataaatgctttagtttcttacagaagccctccaaggtgggtactcttattatcccctttttactaatgaagaaactgagacttaaggaggttaaatacctggtaagtagatagagtagggatctgacctaagctgtccaactccagggctcatgctcttaacastgtttatcctgctttcccaggaaactacagaggccctttggtgctccccagctctccttgttttcctgtttctaagcatctgagtgcatcctgatagctgtggacagcagagatttggaacaggagattgaagaagtctcatctactgccatgcttggcacatagtaggcactcaacacatgctagactctccccacctcctgtt

SEQ ID NO: 258161 - DNA, 597 bp, Homo sapiens
atttaaaggtaaacaataaaaccacacaagtaccaagagaaaatgtgggagaaatctttcataatcttagagtgggaaagtctttcctaatcctgactcacaaatcaggaactataaaataggaaattgattaagtcaactaataaaagttgaaaaaaactttttaagctcttgcatgtgaaacaaacaaaaatcaaacctgtatataagcaaagtcgaaaacaaatgcaaatctgtaaaggatacacaaaactcagcaamgggctaatttctttaaattataaagatacataaacctctaaagaaaagaccaatgaaaatacgagcaaagcatgtgaaaaagtggcttatagaacaatagtgaaaataaatacaaatggctagtaaacatatgaaaagatgttcaacctcttcatgataagaaaaatgcaaattaaaagtactgacatgccttgtttttttttgttcatttctcacatttgcaaaaacccaaatttgaaaatacgcagacatttccatatattgctggtgggtatgtcaactagtacagcccctaggagggcgatttagcaatatttaccaaaatagcaaatgcat

SEQ ID NO: 258162 - DNA, 597 bp, Homo sapiens
atttaaaggtaaacaataaaaccacacaagtaccaagagaaaatgtgggagaaatctttcataatcttagagtgggaaagtctttcctaatcctgactcacaaatcaggaactataaaataggaaattgattaagtcaactaataaaagttgaaaaaaactttttaagctcttgcatgtgaaacaaacaaaaatcaaacctgtatataagcaaagtcgaaaacaaatgcaaatctgtaaaggatacacaaaactcagcaacgggctaatttctttaaattataaagatacataaacctctaaagaaaagaccaatgaaaatacgagcaaagcatgtgaaaaagtggcttatagaacaatartgaaaataaatacaaatggctagtaaacatatgaaaagatgttcaacctcttcatgataagaaaaatgcaaattaaaagtactgacatgccttgtttttttttgttcatttctcacatttgcaaaaacccaaatttgaaaatacgcagacatttccatatattgctggtgggtatgtcaactagtacagcccctaggagggcgatttagcaatatttaccaaaatagcaaatgcat

SEQ ID NO: 258163 - DNA, 602 bp, Homo sapiens
tctgggggaatgagattggtgaacttgaaacagaggaagaacaaaactgtgtgtatgaagtatattaataattatttttaaaactatacagtgggtaggatttacatacaatgaaatattatttagccttaaaagagaaggaaattctgacatgagtgaaccttgaggatatcatgcttagcaatgtcaatcacaaaaggacaaatattttatgattccacttacaggaggcacctggagtagtgaaataataaagacagaaagtaaaatggtagttttcaggggttggggagaaaaaggaatggaaagttagtgggtacagagcttcagtcgcggaaaaagttctggagatggatggtggtgatagttgtacaacaatgtgaatgcacttactgccacagaactgtatacttaaaaatggctaaaatggccaattttatgttatttatattttatcacaatattaaaaatatctaggccaggaaaaaaataaaaacacacagtcgtaaataagagcacagattcatktcgctaaaaagttgttcggcccggctttgcgggtgatgaggctggaggtgtctgcatggcctgatgagaaagca

SEQ ID NO: 258164 - DNA, 428 bp, Homo sapiens
caagaaaccgcctttccttttgttcctaagcagacagctacagataaaaggttaaatatctccacaggtagctgctttatcttcaccttaccttatataaagtgtagctttactgagcgcaagatgaatacagaattgactactcccctacctgctccttttctcctgcaacatatagactcagtaatgtgaccataccctctctcttgccccaccaaccrcttttcccctttaagtatttgaagccctcaaaatcacctttggaaaaaggcaggatcacaggttgttcctgtggatttatgtttcttttttcagggcatgtccttaacgttggcaaaataaacctctaaattgattgagacctgcctcagacactttttggtttacaaagtaaatacattaagggtagtggatgccactgtcaggaa

SEQ ID NO: 258165 - DNA, 428 bp, Homo sapiens
caagaaaccgcctttccttttgttcctaagcagacagctacagataaaaggttaaatatctccacaggtagctgctttatcttcaccttaccttatataaagtgtagctttactgagcgcaagatgaatacagaattgactactcccctacctgctccttttctcctgcaacatatagactcagtaatgtgaccataccctctctcttgccccaccaaccacttttcccctttaagtatttgaagccctcaaaatcacctttggaaaaaggcaggatcacaggttgttcctgtggatttatgtttcttttttcagggcatgtccttaacsttggcaaaataaacctctaaattgattgagacctgcctcagacactttttggtttacaaagtaaatacattaagggtagtggatgccactgtcaggaa

SEQ ID NO: 258166 - DNA, 570 bp, Homo sapiens
cagatctgctggcatctttaggggtgtacagccaccatcccagagctccagggcagggctggtattttcttccccacttcatatgcctcagctcccagagtggcatttgtggaagttcatcaagtggacaggcagagccagcctgagctttcttcttccctgagctctggtccacagcaggagtggmctttaccctgaacttccctcgagagataagactgttgcccttatctttggtgattcctgggggttgagttcccagtgtggaaaggttggtttggaatgttttctcagatgtactctgacatgctaacacccacattcctgcctaaactaaatagtcctgccagccctgccagatgtcatggtcttttgttgccatagatgcccctggaggaaaggggtaaagggctgacctggaataaacatgagcccttgatagccatgtccttaaaagactgagaagccacaccaagcaaagtgtggctatcaagacctctagttccagatatagtcattgaacataattcctggcaagaaaggggtaatccaaagtcaggcaaaggttag

SEQ ID NO: 258167 - DNA, 562 bp, Homo sapiens
atgctgcccaaatagcccctgagctaactctggggctgttgtcccctgttccctagaaagagggctatcaggaactagaaaagacaacgccctccattcaggatgctaatgaaagaatccttaggaagaaagctcactctcagagcagcatatacagtctcagacagcagagcaggagtggctccattcacaactgcaagaaatcttccaagtaagcgtccaaraagaatgtgcaagacatactgcccttaggcccaggcaagaggggaccatgctttggaggactccacatgtcacaaacacaaaaaagacataatgttaaagaacacatggacagctttgtccctcagctcttgcaactgagaccctgaccctaaacatcagatctcctgaccttctctgttcaggcttcagggaaatgttccccacatctcttgcctcacatccaaatgccatcagagatgtggatcttgctgctgtggacttcagagatggacactgctgcagaggttttatgggtttgagtggctaaaacacaagagaagacaacttgcccaacctt

SEQ ID NO: 258168 - DNA, 594 bp, Homo sapiens
gtaactccttaaaatcattctttttgggggctctactgttgaaaagaatgaataatttttctatctcaaagcactcaacaagagttaatgaggaaagtaagagtgccatagggctatgtttgtaataataagtatcagcttcgtggtgacacctgcaaaggtccccatattctgtaggaagtaaaagaatagaaccgggtaatagttcactatttgaccatatttgagcatcttttatttggaacacaaatggctttctctgctttcctggatcaacatatgaaaaatttgagcaaaatayttttttcttgccagtacgttgaatttccaaaaacatcagttaaattcctaattgttggaatattactgtccccaattaaaatgttttcagttttcatccacttagggaagcaatgagtaatgaaaaccaatctcaaagacaaagggaaaaacaataagaaagtcccattccaaatggagtcaagcatctggaattgggttagattcatttttggtgggagactctcccagacacctgtctttccatttctttttgtactgtgtaactccactggaggctgagaagtgccggaa

SEQ ID NO: 258169 - DNA, 627 bp, Homo sapiens
ataattacatatgtgtgtatatatatgctagagagagagagatggattgatcacaaatgtagaacaggtctgagttgctaaagtggagtggagttgaaatttttttgataaggctcttatcaaagaatgcytctggaagattaatctttttttctggaaggaaatagaggtaagtgcaccacttagcaggctgatgtaatggtccagatcagaattagtaaacacacagaatgcaagttgcagtgacccacctgtgcctctggcaatcgtcaccaatggacaaccacactctgctgctgaactcaaaatctttctctacacagtgctcgggcagccactaccaattagttggaattggcccaggagatggaaactgctttcagttctggtctggatgaaaggtaataagcctggcctaggtttttagcagcaggcatgaagtgactgcaatgtggagcccaccacagggtaagagaaagaacatctcacagccagccagcctctgatcactgggttcccagaaccctgagagagctgagggtggtgccagaaacgatctctggactcagaattgctctggggcacacccagaaggccagttgctactgaagcacccgagctcacctg

SEQ ID NO: 258170 - DNA, 555 bp, Homo sapiens
ccctagggtcaaggataggatgtccacatttaagtgctattatttaatcataacagcctgtgtggcatttttcagataatggagctaaagcttagagagattaatgtcacccaaagtcacacaggtgagggctgggctttaaactcaggcctgctcatgtccacatggggaggaccagaactcccaagggcttccccagatggagtgtgtctggcccacagcatgagagaaggggcactgctacctttggcttcttgggcagggcaactgttctcttcaggttttgatttcttattacatgcagagaactcctctgttttccgggtctatttgtaaattacytagaaaaacctgtctgggtgtccattctgctgtcagggcaatgggaagtgggaagccagcaggtgagtggggtgccagtgatttcctgtcatggggggctggactgggttctgacgccactctgctatcacttcccctgccttctttccctgtctccccacgcctcttcccgcacactcagtccataggatcggggagacaccacagtggtcc

SEQ ID NO: 258171 - DNA, 619 bp, Homo sapiens
atgcagtcatggagacacctctaaactcagccttgaatgtatatctttgctttaagaaattccaactcctacttggaggaaaacaacagaaaaagaccccctctgttgatgataggtctgaaggaacttcttatgtaaaggatagccatattttaattttatttctttcccaagaacaagaaccttctcctgacctgcaacacagcccctcactttgtccrtagagtgctggaggcttcgtgctatcatttgtgtctcatttttattctattcacatatgtctagggagtgggtcctttgagatttcttcttggctctgcttcaggctccataatagcaatggatccacatttcttaatacagtgagggcaggtggcagcaagccaaagctgcctccgggtgtatgtgtgcaggagtggtgttttcagcatgcattgaaaaatcaggagccagccaggacaaaagcccagagtgacagtgtggccctcagaaggatgcctgcaccaagttaaaaaaaaaaaatcatttttttctattgaattcagttaagattctgtgccaggttttgttcctaggagcatcgtgtatgggtgcgtgtgtgtgcccacgtgcacacggc

SEQ ID NO: 258172 - DNA, 582 bp, Homo sapiens
aattttaaaaatctagtgaattattagtctcccatcaggcatgggggaagtgggaggtaatggaagtgagtatggaaaagtttcaatatcaaggttatttaatgggagacataaaatgcataaaagcctctttattaaattttctttaacttttcaatgttagagacatattttgttatagtggttactattgtagcatctgctaagatcaaatcttggctgccgggaacagtggttcatgcctgaaatcccagcactttgggaggctgaggtgggcagatcacttgaggccaggagttcaagaccagcctgactaacatggcgaaaccccgtctctactaaaaatmcaaaaaaaaaaaaaaaaagtagccaggcatggtgatgcacacctgtaattccaggtactctggaggctgaggcaggagaatcgcttgaacccaggagtcggaagttgcagtgaatcgagattgcgccactgcactccagcctgggcaacagagcgagaccctgtttcaaaagaataaaaatagaataaatatcagaggtacctcgaaccttgctttttttggcaatttcctgtaa

SEQ ID NO: 258173 - DNA, 546 bp, Homo sapiens
tcaagtccctctccaaaggtggagagaaggtggcactactggttgctctccctccctccctccctctaggtactttagccagactgtagaaggcrgctgcgcagtggtaactggtttagaaatttccctactctgcacaacaggcctcggttttctgctcaagatccttgctccacatgatctcattctaattttccctactttacttattgaaccaaaaaaactccatagggacttatgtctattcttattttaatccatctcttgagcttttcactccaatggctttttaaagactttctatttagttttttttattactagtcagttggtcacttttattcttatatatgttcatcaataaaagagacaaatagtcctagaaggcaatcttttgttcccttccccacagaagtcactttcagttctttttagctatttgggatttattgctatgtctctaaataacatatttgtgttgtttcttgtctgtttatagtttgctttagtggttgacatcatgctgctattccactatgaaaagca

SEQ ID NO: 258174 - DNA, 595 bp, Homo sapiens
gggaagggagtgagggataaaagactacaaattgggttcactgtatactgcttgggtgatgggtgcatcaaagtctcacaaatcaccgctaaagaacttactagtgtaaccaaataccacctgtccccctaaaacctatggaaataataaataaataaataaaaacttaagtaaaaacaaataaaatgtggccatttagtccatttataattaatggaattattgattgatatatatgggtctaagattattttattgctcgttttctrttttttcacctgttttgtgttatatgttttcttatgtttttggcctcctatttgtttattgagaccgcatctggctctgttacccaggctggtgtgcagtggtgtggtctctcttgcaacctccacctcccaggctcaagtcatcctgccacctcagcctcccgagtagctggggctacaggtgcacaccaacatgctcagctaatttttgtattttttgtagagatggggttttgctatgttgcttgggctggccttgaactcttgggctcaaggaatccactcgcctctgcctcccaaagtgccaggattataggcatgagcca

SEQ ID NO: 258175 - DNA, 595 bp, Homo sapiens
gggaagggagtgagggataaaagactacaaattgggttcactgtatactgcttgggtgatgggtgcatcaaagtctcacaaatcaccgctaaagaacttactagtgtaaccaaataccacctgtccccctaaaacctatggaaataataaataaataaataaaaacttaagtaaaaacaaataaaatgtggccatttagtccatttataattaatggaattattgattgatatatatgggtctaagattattttattgctcgttttctgttttttcacctgttttgtrttatatgttttcttatgtttttggcctcctatttgtttattgagaccgcatctggctctgttacccaggctggtgtgcagtggtgtggtctctcttgcaacctccacctcccaggctcaagtcatcctgccacctcagcctcccgagtagctggggctacaggtgcacaccaacatgctcagctaatttttgtattttttgtagagatggggttttgctatgttgcttgggctggccttgaactcttgggctcaaggaatccactcgcctctgcctcccaaagtgccaggattataggcatgagcca

SEQ ID NO: 258176 - DNA, 560 bp, Homo sapiens
atactccttatcgctatctgatattatatttcatatttacttggtatctgtctattttgttcaagaccataaattcagggcctaaaacattgcggggtataaagactgtgttcaataaatactgtgtaaatgaattgataartaaataagcaaatgacatgcatcagtacttactgaatgctgcactgaatgtcagcaaaggcataagagaatgtctggatctgtagtttctgatgtaatcgaagcagaaacttgtttcccagccatgcccacattagttttttaaatgacaaaaaataaaccctactaagacagatggcgcctcagggtagaaagaacatgggtttggatgtgaataactcacatctgaaacacacttagtagctatatgaacttgtacaagtgactcaacttctctgagctccacatctcactgtgggtggaggtaatggtatcctcctcctgggggtattttaagtgagacagtgcacgctgagttgaggtcctgctccacacactgaggcatggtcaagtccaaaaacaagtaaatgaaaaagaca

SEQ ID NO: 258177 - DNA, 611 bp, Homo sapiens
ctaatggagttgataaatataacaattaatgaggattaaaataatgtcacattttgaagatatttaaatgattacttttattttgtcattttcttttttttttattttggagccaatacatttcttttccaggcttcaaatagttttagacgtccccccaaaattcataggccttccctgttgggcctttagtgcctaaaagctaaagtggccctttagagttggtattgtcagtgtgccamgaagatacaagctatttccatatattctccatcagagctccccatccaggctgccccacgagtaactctgaataacaaaacttgccctgatggctccattcagaatagtatgaccttgcacttcgtgctgctcttgccaccatagaaaacaagaacaggaagggcaattctaaaatactaactaatctgtttcaacaattctccctctcaggcttgtcttcactgtaaaagctttccttccctttagaatgtacttgttagttccatgtcatgcttatttgaaggctcttcttattagatcctatcaagaagtcgctgcagtaaatacataacatttttactgtttgataatcaacacaaaagagaatg

SEQ ID NO: 258178 - DNA, 619 bp, Homo sapiens
tggctcactttaaattcattttctcaaaagggaataatcataatttgttaaatagcatttctgcataggctagtagtagttcctaagctgctctatttcaatttcccctcataatgatatactccacttcacttggaacttctaaatggtatgatgattcatctactaaataggagataaccataacagtggcatcccggacacatgaaatggaggagatgtccatgattctggcacagggagggttgctgtgtgcagcaaaaastgtccattcatgattactgtgttctgagtagacattgcaggcaaacggcaagtctggattatttaactaagagcgaaatgccatctgccctacagcatctgcagcaaagatgacactccatttgctttcttctgtgacagtaggaaaatcagaatggcacagtgctcttcaaagtacatttactctaaacatagagctttaaaaaattagagacgtaagttggcatataattatgtcatatgtgaattcatgcattaaattctgcccctcagataatcagatttcaggaaagcaacaaagattcagttgatgataaatataatttagaacttaaagactggcagaagcaagatg

SEQ ID NO: 258179 - DNA, 626 bp, Homo sapiens
aagcagttggctcactttaaattcattttctcaaaagggaataatcataatttgttaaatagcatttctgcataggctagtagtagttcctaagctgctctatttcaatttcccctcataatgatatactccacttcacttggaacttctaaatggtatgatgattcatctactaaataggagataaccataacagtggcatcccggacacatgaaatggaggagatgtccatgattctggcacagggagggttgctgtgtgcagcaaaaagtgtccattcatgattactgtgttctgagtagacattgcaggcaaacggcaagtctggattatttaactaagagygaaatgccatctgccctacagcatctgcagcaaagatgacactccatttgctttcttctgtgacagtaggaaaatcagaatggcacagtgctcttcaaagtacatttactctaaacatagagctttaaaaaattagagacgtaagttggcatataattatgtcatatgtgaattcatgcattaaattctgcccctcagataatcagatttcaggaaagcaacaaagattcagttgatgataaatataatttagaacttaaagactggcagaagcaagatg

SEQ ID NO: 258180 - DNA, 593 bp, Homo sapiens
ccctataaaggcttgtttttatttaagtatatatacacatatatatatgtatatatatatacatatatatatgtgtgtatatatatatgtatatatatatgtgtgtgtgtatatatatrtatgtgtatatatatatataatcactttttcccttattttaaaaattaagctattgtactcaccaagaatactcaaactattaaacagtgaaattgctaaattgctctgtaagcaattgtgatttcccttcttaaatatttttctttaaaatacttttgtagtaagctctcatatcttttgagtatccttaaaatctatatactcactgacttttcacatgctacaattttctggaaacatttaatttgatgcaggtaaaataaaatatggttgttatgctatacatttttgaaagctgataaagcttatttttattattgcttatttttctccatggtggaattttatgaactttaatttgctttatgtatttctttgattcattctagtttttttgaattttaattgtttgatggaagtcatgccagtgggaacctcttccttatttttcccttttctttgcagatatcaat

SEQ ID NO: 258181 - DNA, 593 bp, Homo sapiens
ccctataaaggcttgtttttatttaagtatatatacacatatatatatgtatatatatatacatatatatatgtgtgtatatatatatgtatatatatatgtgtgtgtgtatatatatatatgtgtatatatatatataatcactttttcccttattttaaaaattaagctattgtactcaccaagaatactcaaactattaaacagtgaaattgctaaattgctctgtaagcaattgtgatttcccttcttaaatatttttctttaaaatacttttgtagtaagctctcatatcttttgagtatccttaaaatctatatactcactgacttttcacatgctacaattttctggaaacatttaatttgatgcaggtaaaataaaatatggttgttatgctatacatttttgaaagctgataaagcttatttttattattgcttatttttctccatggtggaattttatgaactttaatttgctttatgtattyctttgattcattctagtttttttgaattttaattgtttgatggaagtcatgccagtgggaacctcttccttatttttcccttttctttgcagatatcaat

SEQ ID NO: 258182 - DNA, 591 bp, Homo sapiens
tccatcgtgttttgactttgtttgactcatgtgattcttttagatattgatgagtgtgtcgaagagccagaaatttgtgccctgggcacatgcagtaacactgaaggcagcttcaaatgtctgtgtccagaagggttttccttgtcctccagtggaagaaggtgccaaggtaagtgtctttgaaggctttgggctttcaatgctgcatgtttatttgtggtggtcttatttttcaaacatggcaaagctctgtttctttgtgaacaggaagatggagagttttcattcacccagaggtctaatgataaccatatgtcagaaggttcattttcacttttaaggttaaaaactcatccatcaagttatggttgcttatacaattgtactgacacataaacctctctcccactaagaacacaaatgctgataggcccatcagtggggaaacaccttgagccaccraaacagcaaagcctgggggaagttgagctacatatcccctacctctgaagagataagctgaaaaatgtgggtccaaagttagacttgagactgaaaaactgcacattaacccatttgcccccacaatat

SEQ ID NO: 258183 - DNA, 601 bp, Homo sapiens
tgtagagtcacaaatctcagtgtatgctagcaggagatttaagggagatggacatctcccctggtgaagtgtcatagagcagaagatgatcgccaaactcagacttttggcagcaccgggaaaatgatgaatttgttgacaaccagcatagggtgtttgaccaagcacctatgtgaggctgcaggcaaagcaaggcaagtttcagcatttgtcctgcgtcatccatgagaaagtagccatggagccaatgactgcttccatgcattcacgcagaagtgctcaggatcctggagagaaggacaatgaagaccgacagtggcaaagaggaaccctattaggagtagcytaaggcaggtcactgctgtaatctctcacatattatagtattctagagtgtgaaaaaaggaatttagagattatttggtgcagaagtcagaaacccatggcacttataccatggcagacaccactaagcaagactcactgtgagactccttaatcataaaatggattaataatgacacaatttatgtagatcacttagaatagtgactttcacagaatactcaaaaattgctatttttcacaatgacccatgtta

SEQ ID NO: 258184 - DNA, 565 bp, Homo sapiens
gaaaaatccccacaaatttagtgttagaagtgttgtgagaatagagaaaaacagttttttaaatagtcatgttaccagctgtggccaataggaaatgagtagagtatcacatgtcagttccaggttcaggcacttaagtgcttattctcatctttccaggcatctctttgcccatcctgactattgtcaacccatgtgttgatacagagttgtcatagattgaatcaagctggaatgctgagccaacacatggaggacagcagccctaggcacgctgcccagacatgcagcacaatttgcttgagtgaaaaataaactgttattgcattgtgcacaagattttgggattgcttttgcagtataacgcttttccaaatcaatggctaagtgttttttcatgccggggtcagatttaccactcacacattctcccatacctccttttttgcactttatgtattgggttttggatttgatttakcaacttatatttgtttttctccctaaaaattagttttaatcatttcagttcaatgaaaaaattggtattttgattccatcaaac

SEQ ID NO: 258185 - DNA, 545 bp, Homo sapiens
aatcctatgctgcttcttccttgactttcattctcatttactttttctgaagtgcatccttacctaatttcaagcaaggatacccttgcttgtcgagaaagagctttattttggccttacacttcctggacagtttaccagaattcaagactcaaaatcctcagccctctgcctcacactcagctgcaaaacaattttcacaggtaaaattgagtacattttcatcaacatatttccttaaagttttatcaaaaattaaaaagtgcaatttcaaaaaacctttcaattttgactcctgaccccagcaactcatggaaactgttctctcacagatgatagattcttgcctcatttaacaatctcttttcagtctgcagtgcctgaaaktgctgacttctgttcgtagacctggaaggcacaggtgctttctaatatacaagagtttcaagcatgcaggaactgagccttttggttggaacaaaaagtcaggggccgatgggagtccgagaaatagaagtgagagagtcagtgaaacggagagagga

SEQ ID NO: 258186 - DNA, 502 bp, Homo sapiens
catcttcttcaatttaccactctactctcacaaatccacatatcccatcatcaatcctcacctcctttgctccaattttagatgaagtggtttttttttaatttttaaaaattttttaatttttttatgtttcaggccaactcttccattcatgcctttccctcaattttctgttcctcctggatcttactccgtgggtcgcccctttctttgcctacrtcttcaattttttcactctcttgtgccatttcctcagtctggaaacatgatttgatctcccagagatctatagtttccccacagtaagcctgctcaatctcattcctcttgttaccatccaagcttctcagaagggttggctacatccatattctctgcttgttcatctgatagtctctcctcaacccactgcaatctcgattctgataaccctgctttacagaaattgctctcactaagattacctatgtcatgccaattccatttgattcatgatcttact

SEQ ID NO: 258187 - DNA, 581 bp, Homo sapiens
cagctcccatttaaaaatatatattttttccacattaatgataggaaatacagttaaccaatttactaaaccatcactgtggcacaaaattttatttggagccatttcccattaactactgtgaagatttctttaagaaaggtcctaccatttttaagtaaaaattgttatcttttgaggtaaacagtgattccaagtattttcataaacattgtgggaaaagattttcctccatagtctgctaattgatcagttcctggaaagtctcttagtggccacaagaatttgttttgtgctctgtactaccttataacttagaagagagaaacagggggtggagacmcaaaagagagagtaatgtgcatagaagaaccaagaaataaagaatagtgcgagataaaaatgctaattttgaggctgagtgctaatattgtgtccaagactctaagtcaacaaatgttcagtgaaggcttgtaccctacctcctaagaacacagccaaacaaagatatgttgaacagtaagcatgactcatatggatttctcttttgcaagaaatacttcttttcatctaatctaagt

SEQ ID NO: 258188 - DNA, 575 bp, Homo sapiens
ggggagtggggtatgaacagggagtaagtcacaaagatcccatgcttcaaagatcacaagggcagaagggcagagcaagatcacaaggccagggcaaaattagaatactgatgaggttccatgtcccgctgggcacgtattgtcttgataaacatcttaacaggcaacagggttcgagagcagacaaccagtctgactagaatttgccaggctggaatttcctaatcctagcaagcctgagggcacttcaggagaccagggcgtatttcatccctcatcttcaaccacataagacagacactccsagagtggctgtccatagacccatccctggaaatgtattccttccccagggttattccttgctgagaaaaggattcagtgatatttctcctatttgctttctgcaagaagagaaatatgacgctgttctgcccggccccgcaggcagtcagaccttatggttatctcccttgttccctgaaaatcgctgttatcttattctttttcaggatgcccagatttcatatcattcaaacacacatgttttacaaacaatttgtacagacaacgca

SEQ ID NO: 258189 - DNA, 575 bp, Homo sapiens
ggggagtggggtatgaacagggagtaagtcacaaagatcccatgcttcaaagatcacaagggcagaagggcagagcaagatcacaaggccagggcaaaattagaatactgatgaggttccatgtcccgctgggcacgtattgtcttgataaacatcttaacaggcaacagggttcgagagcagacaaccagtctgactagaatttgccaggctggaatttcctaatcctagcaagcctgagggcacttcaggagaccagggcgtatttcatccctcatcttcaaccacataagacagacactcccagagtggctgtccatagacccatccctggaaatgtattscttccccagggttattccttgctgagaaaaggattcagtgatatttctcctatttgctttctgcaagaagagaaatatgacgctgttctgcccggccccgcaggcagtcagaccttatggttatctcccttgttccctgaaaatcgctgttatcttattctttttcaggatgcccagatttcatatcattcaaacacacatgttttacaaacaatttgtacagacaacgca

SEQ ID NO: 258190 - DNA, 543 bp, Homo sapiens
gaaagaaagaagaaggaaaagctaatcaaaggggaatgttattgagttgggtcaccgctgtgggcaactgcagctcagttctcttagggaccctttgaggaaccgtgtcagatatgcctcaaaattgcccacccgagggatgtattagaggagtatttagactttgggtcttgttactgttggtcaagggtcacctcatgagatattaattctaccccacttccaggtttatgcaaacatcaaatgtggcatcccacatggcagcagcagaaaggcactggggtagaagatgagtgataatgaggttaccccggaatgcagttggttggctggcatgcaaaggtgggcctaaaaggtagacaataggatgcaataagtatctcatctatagatcttcacgctaaaccgttattactgaaaacggtgaaaatgcagaaagactggctttgcagcaaattggtrtttctcagcacactctgttttgttttttacaaacatctcctattgtgagatacatagaaaaggcctggaatcttgctgggt

SEQ ID NO: 258191 - DNA, 560 bp, Homo sapiens
ccgcctgcctcagcctcccaaagtgctgggattacgggcatgagccactgcgcccagccagtttgagtattttttaaaaaactttcaraaagggtccatatgaaatatgctgttttatgggatttttatccattcaacatatgtatatcacaatatatatgcatgcatatatatcacactatatatctattcactacacacacacacacacacacacacacacacacacagacacacactgtctactatatgccaaatgctagggatgcagagataataaaaaaagctcttctgggggtgaagtcctagtaaggaagataaaaaattaacaaacaataacacatatgctaatggttttaatacatgttggaactgctagtctaaaagcataatctctacttgggtaataagagtgcagatcttgaattcaatgaaattcaaattttcagatgaataaaaagaattgggggccaatctgataggaaacattgctatttggaattaaaatctcaaaaatcttgaacatttctagacttgatgaatgttgtttataattaaga

SEQ ID NO: 258192 - DNA, 560 bp, Homo sapiens
ccgcctgcctcagcctcccaaagtgctgggattacgggcatgagccactgcgcccagccagtttgagtattttttaaaaaactttcaaaaagggtccatatgaaatatgctgttttatgggatttttatccattcaacatatgtatatcacaatatatatgcatgcatatatatcacactatatatctattcactacacacacacacacacacacacacacacacacacagacacacactgtctactatatgccaaatgctagggatgcagagataataaaraaagctcttctgggggtgaagtcctagtaaggaagataaaaaattaacaaacaataacacatatgctaatggttttaatacatgttggaactgctagtctaaaagcataatctctacttgggtaataagagtgcagatcttgaattcaatgaaattcaaattttcagatgaataaaaagaattgggggccaatctgataggaaacattgctatttggaattaaaatctcaaaaatcttgaacatttctagacttgatgaatgttgtttataattaaga

SEQ ID NO: 258193 - DNA, 558 bp, Homo sapiens
cacatggccaacaattcaattatgctatgcaatgaaacttcaataaaaattttagatatcaaagcttgggtgaactttcctggttagcaacactctgaatattgtcacacaccagagctggaagcagtaacatgatgaaggaatccacagggagaagataactggaagctatgcatttttttaatctggttctgagttgtatttttttgctatgttaaaattataatcataagtatagcactttggggcattctatgagtctttctagtgaattattaaacctgagggtagccatacgaacctttgaatatgtagctagttggtcagaagtragggtggccccagagacccccaaacttgcaactggcatctgaaataagagcagtcttgtgcagggctgtgcccttaacattgattttcataaacgttttattgttatggtttgaatatgtcccccaaattaatgtgttagaaacataattgtttcacgtgtccgtgtgaagagatcaccaaacaggctttggtgtgagcaacaaagctgtttatttcacctgggtg

SEQ ID NO: 258194 - DNA, 621 bp, Homo sapiens
agaatattacaactctacaatgaagagctcattattttatgtgtgtgtgtgtgtgtgtgtgtgtgtgtgtgtrtatatacatacatatacttttttttttcaagtaaaagactgaaaggataagcaacaaaatgttaaacctgagaagagtttcaaaaacaaaatactggaaaagggcaacgtgcaaggaaagtatccaagaagaggaactataaaatgtgtcaaagattacggaataaagacagaaagatgttgccaaagctaaggaaacagaatttttagaaggagggagttgttaaaaacgtcaaataccacaaaagggaagctaaggaaactaacattttagataggacctattatgtcaggaacttgaactatattaatctcaatctctaccaagacaactaattggtatttctcatttaacatgtccaaaatagagctcttctttctcatcccctcaacccacccctcctgcagagttagccttctcagtaaatagcagggcttctctgccatgactctgctactctttctttcgtgtatcacattcaatccatctgcaagaatttttttaaacaagctcagaaggtaaagaattctcatgttatgtacaaaagg

SEQ ID NO: 258195 - DNA, 644 bp, Homo sapiens
ggcatgattttggctcactgcaacctccgcctcctaggttcaagtgattctccggcctcagcctcctgagtagctgggattacagggacctgccaccacacccagataatttttgtatttttagtagcttcttttcacttgccttcagctcaaaataatcctaatgcaaaaatggtatatttggggatggcatattctgctaccctacatatacaaagatgttattaaagcattatttataatggggctaaattgaataaaacctaaatacacatcacctgtaaactacttaaactatggtrcatgctcaatatggaatactcagcagtatttaaaaagaacaaggtagatgtatatatattgacacaaatatataaaaacaaaaaggcaacacctttcaatattaaacatgatcacatttatgtccaaaatccaagctacatatttgcatatgaacatatatatatgtatttatagaaaatggctggaagatacgagccaatcttacaacaatttttggtgaagggagtcagatgttactttggagactgaagaggagaatgaagaagaatttgctttatgagtctttgttttgttttgacaataggaatgtattaactgtatacatataatatttaaggatt

SEQ ID NO: 258196 - DNA, 644 bp, Homo sapiens
ggcatgattttggctcactgcaacctccgcctcctaggttcaagtgattctccggcctcagcctcctgagtagctgggattacagggacctgccaccacacccagataatttttgtatttttagtagcttcttttcacttgccttcagctcaaaataatcctaatgcaaaaatggtatatttggggatggcatattctgctaccctacatatacaaagatgttattaaagcattatttataatggggctaaattgaataaaacctaaatacacatcacctgtaaactacttaaactatggtgcatgctcaatatggaatactcagcagtatttaaaaagaacaaggtagatgtatatatattgacacaaatatataaaaacaaaaaggcaacacctttcaatattaaacatgatcacatttatgtccaaaatccaagctacatatttgcatatgaacatatatatatgtatttatagaaaatggctggaagataygagccaatcttacaacaatttttggtgaagggagtcagatgttactttggagactgaagaggagaatgaagaagaatttgctttatgagtctttgttttgttttgacaataggaatgtattaactgtatacatataatatttaaggatt

SEQ ID NO: 258197 - DNA, 565 bp, Homo sapiens
tgtttgacaatggagagcaagaagatcaaagttcacgtggtcagaaagagtggaacactctccaaaaagtaggataggattcgttgcaactcaatattcacccattcaagcagccactgagaccagccactctgcagcagarcctggcaagaggtagaagacactgcatggatccacatcttcctaccattccaccaaccgtgggatcacatgagccagaattatttcctgtatatataaggccatcttgaaagaatcaaggagaagaaatacatttgagagactaagaaattccaagtatgaacacagctcaggctcattatagaaaaaagaaccacagaaaatactcacaaaaaagaagaaaatactcataatcacatacatcttgcaacagatcctgttagatcctttcaatatcattccctcatctctctctctcacttgctgtctgtcacgcaggcacttattttctgtggctcagcctcttaccactcatgcgaccttgagcatattcatcatttgtgaaatgaaggtaataataataagtcatgtgctgcacaatgat

SEQ ID NO: 258198 - DNA, 565 bp, Homo sapiens
tgtttgacaatggagagcaagaagatcaaagttcacgtggtcagaaagagtggaacactctccaaaaagtaggataggattcgttgcaactcaatattcacccattcaagcagccactgagaccagccactctgcagcagagcctggcaagaggtagaagacactgcatggatccacatcttcctaccattccaccaaccgtgggatcacatgagccagaattatttcctgtatatataaggccatcttgaaagaatcaaggagaagaaatacatttgagagactaagaaattccaagtatgaacacagctcaggctcattatagaaaaaagaaccacagaaaatactcacaaaaaagaagaaaatactcataatcacatacatcttgcaacagatcctgttagatcctttcaatatcattccctcatctstctctctcacttgctgtctgtcacgcaggcacttattttctgtggctcagcctcttaccactcatgcgaccttgagcatattcatcatttgtgaaatgaaggtaataataataagtcatgtgctgcacaatgat

SEQ ID NO: 258199 - DNA, 510 bp, Homo sapiens
gtgctgcacaatgatgttttggtcaatgacagactgcatatacaatggcagtgccataagattataatagagctggaaaattcctattgtctaatgacatggtagccatggtaaggtcatagcacaatgcaatagtgtttgtggtgctgggtgtaaacaaaccttcasaaactttcacagtacatataattatgtatagtatataatacttgctattgataataaatgactgttactgatgtatgtatttactacactttttatcattattttagagtatacttaattcttctacttattaaaataaaagttaactgtaaaacagcctcaggcaggtccttcaggaggtattcagaaggcactgttatcataggagatgacagttccctgcatattattgcccccaaagaccttccagtgggacagaatgtggaggtggaagacaatgatattgatgatcctgaccctgtgtagtcctaggctaatacatgtgcttatgtcttagttttt

SEQ ID NO: 258200 - DNA, 560 bp, Homo sapiens
ctccagtaaggctgtactcaagattggggtaccttttaataaattcaacaaaacatgtctgactgaacatccttcatcrtccttgacaatgtaacaatgattcaccacaggataaagttcttctgtggatcaaaaaaaccccacctagaacaagaggtctgacatttggctttttcaggcagtgaaacctgagagaagcagagaaggaagttctcagctcacctgcctgttttcatgactgattgtctgtcaactgtcatgattttcttactgaggcaacctgccttttctttgagaagcattttgtgaaggctcttgtttgaaagacatccacattttaattggctggtcttctacatcattatgttacatctctaactgaaaaatgacattaaaaaacaaaaacctattaccctgaaaacacctccagtctggagattagttcttacccctgcatagcttatgatagctatgatttccttaggaattactcacaggagcaagagccagtctgctttgagcgtggcaagattgaaagctgctagtctacagagcttaat

SEQ ID NO: 258201 - DNA, 560 bp, Homo sapiens
ctccagtaaggctgtactcaagattggggtaccttttaataaattcaacaaaacatgtctgactgaacatccttcatcatccttgacaatgtaacaatgattcaccacaggataaagttcttctgtggatcaaaaaaaccccacctagaacaagaggtctgacatttggctttttcaggcagtgaaacctgagagaagcagagaaggaagttctcagctcacctgcctgttttcatgactgattgtctgtcaactgtcatgattttcttactgaggcaacctgccttttctttgagaagcattttgtgaaggctcttgtttgaaagacatccacattttaattggctggtcttctacatcattatgttacatctctaactgaaaaatgacattaaaaaacaaaaacctattaccctgaaaacacctccrgtctggagattagttcttacccctgcatagcttatgatagctatgatttccttaggaattactcacaggagcaagagccagtctgctttgagcgtggcaagattgaaagctgctagtctacagagcttaat

SEQ ID NO: 258202 - DNA, 521 bp, Homo sapiens
aactgtacatcttttcatgttcattarccatttgcatattgtctgtcatgagacatcagtttaaacttttgctcaattaaaaaaaatcaatattttaaagttatactacagaattagaagtcacttaaaaaagttgtttcattagagacaagctttttttgttaacttatctgggacacacattctcaacaaaaatgtcaggagaaggttggataacacaatcaggttggccccaagcagagttctctattaagcacagtttgcctttgatattcttttttcttacctattggattttctcccttccaaattctctgtactatcacaacttcatcaacaactcttcctcactagacccctctttttctgtatcctggggatgggagggtgaggcaggaattgcatttaaaagtaccatggctaggtttctctttggacattgtttatataagcacatttatgaggttctgatgtgcaaaggtttagagccacatttgagagtaaggacaaaatagagctta

SEQ ID NO: 258203 - DNA, 521 bp, Homo sapiens
aactgtacatcttttcatgttcattaaccatttgcatattgtctgtcatgagacatcagtttaaacttttgctcaattaaaaaaaatcaatattttaaagttatactacagaattagaagtcacttaaaaaagttgtttcattagagacaagctttttttgttaacttatctgggacacacattctcaacaaaaatgtcaggagaaggttggataacacaatcaggttggccccaagcagagttctctattaagcacagtttgcctttgatattcttttttcttacctattggattttctcccttccaaattctctgtactatcacaacttcatcaacaactcttcctcactagacccctctttttctgtatcctggggatgggagggtgaggcaggaattgcatttaaaagtaccatggctaggtttctctttggacattgtttatataagcacatttatgaggttctgatgtgcaaaggtttagagccacatttsagagtaaggacaaaatagagctta

SEQ ID NO: 258204 - DNA, 514 bp, Homo sapiens
ccctttctcagtgtctccttacaaccattgaataaccccacttgaatcatgttactatgattatttcaacagctgccataaagtttacttctgtgtatttgtacagctcaaatcatcatatgtgtacaatagttaatgtcttcattgtgtcattaaaatatcccccaaatgaggtacctaaacatttagacttggaagccactagcttactcttcatgtgcatcattagtgtattgctttcctcctctctctctctctctctgagtcctactccaatctctagcctgaactttatttatttatttatttatttatttatttacttacttacttacttagagatggagtctcgctcttttgcccaggtggactgcaatgrcacgatctcgtctcactgcaacctccacctcccaggttcaagtgatcctcctgcctcagcctcccgagtagctgggattacaagcaaccgccacaatgcccggctaattttttgtatttttagtagagatggggt

SEQ ID NO: 258205 - DNA, 598 bp, Homo sapiens
ggagtaaaactttagttcaacctgagaacttgacatctgtgctggccaggaacgacaagctttctggtagcattgcctgcaaacatttactgaatattttttttcacttgaccaaagggcaggttaatatgacctgaattaaaatagaataaaacaaacaataaccttttatttgttaaattacttgtgtgttaggtttttgataaattttcattttattactgctttcatgaaatttattacatgcttttttattaagaaaaagaaagagttcttttgattttcatttttattcatattttcccatatacgcatgktgctgggataataatgttttgcataatgatgaaatattggaataaaaatcaaggtctgagagaatggctattgtggcagctttaaaattgggaaccaagagataagtattaagataagattttaaaaaataaaataaaagtttatcttccatagggctagaaaaaaagtataccctagatttatttagcagactttatttacaacagggcttcctaatcaattatcaataatcaaaactgagtacatgtacacaattacatatctacaatgctgaagtcta

SEQ ID NO: 258206 - DNA, 320 bp, Homo sapiens
taatcaattatcaataatcaaaactgagtacatgtacacaattacatatctacaatgctgaagtctactggtctgaaaatgaaaagttgtcgtttgcttttgtgacaaactgatttggcaacaaaayctaacctgaactgattcgaggctgttaataatctttatccaattgaaggtgaatagccatcattttacagaagaaataatttggggttgttgctccaacacctattggaaatattatttaaaaagagcttgtgcaatttattacctttgaaagaatatgaaaagcatgaattcagtaacatgtgacatgcaat

SEQ ID NO: 258207 - DNA, 530 bp, Homo sapiens
cccctttcctgtaacatatttctggcgactacaaagggaccatatagtgcagaaatcctgacccaatggctacctttgggtaagtgttggggtcctgtgacatctttctgacaaccacagaagtgactatactgttgcgggaagtcagggaccccaaatggagggactggctgaagccatggcagaaggacataaattgtgaagatttcatggacacttattagttccccaaattaatacttttataatttcttacacctgtctttactgcamtctctgaacataaattgtgaagatttcaatggacatttatcacttccccaatcgatactcttataatttcctatgcctgtctttactttaatctcttaatcctgtcatcttcctaagctgaggatatatgtcgcctcaggaccctgtgatgattgcgttatctgtacaaattgtttgtaaaacatgtgtttgaacaatatgaaatctggccatcctaaaaaaacaggataacagcaattttcagggaacaagggaga

SEQ ID NO: 258208 - DNA, 548 bp, Homo sapiens
gccactctgggagtgtctgtctcatrcagttgaagataagggatgaaatacaccctggtctcgtgcagtgcttgctaggattaggaaattccagcctggcaaattgtagccagaccagttgtctgctctcgaaccctgtttcctgttaagatgtttatcaatgacaatgcgtgcacagtgggacatgaaacctcatcagcaattctaattttgccctggccttgtgatcttgctctgcccccatttgccttgtgacaatttattgccttttgaagcatgtgatctctgtgacccacaccctattcgtacactccctcccctttgaaaattgctaataaaaacttgctggttttcaggctcaggggcatcacggaaactgccaacatgggatgtcacccctggagagccagctgtaaaatttctctcttttgtactctttccctttatttctcagaccagccgacacttagggaaaatagaaaagaacctactttgaaatattgggggctgtttcccccgatactatactgcagaaaccccctacccaa

SEQ ID NO: 258209 - DNA, 426 bp, Homo sapiens
ctatccgtctgtctgcagctctttgacttttgtgtctctgagactttgtgccactctgtctctgaatctctgagtctccatstctgtctgtctctgtgttttcgtcttccagagcttcttgcatcatttctcagacttcttcaagaacaggttcatcctgatctcaaactcctacagaattctctcctccctttcagttttgatttccattagctgagccttgactcccaccaaaaaacttgggacctgcctttaactcacagatcaatgagatatttgcatgctccgcctctgtcatcactcaggtctgttttctaaagcctggggcagctggtctcaccatttagctctgctcttagctcatgtaaacatgggcatttagaaaagcaattttgaaagatacagccctgctggttccatcacaga

SEQ ID NO: 258210 - DNA, 544 bp, Homo sapiens
tggaggcgagaactgcacaatcccatgtgctcaggctccctactcctttttcttcctaaggcagccccagcaatctctgaggaaaacagttgaaagacaagtgatctagacctctctagagtggtcagaaaactacctyctgcacaccaaatccagccccgtacctgtttttgtgaataaaattgtatcagaacactgccatattcatttgttttttttttttcacatttgttaatcatttgaattttttgatgacttttttttttctttttattgaggcaaggtctcactgtcccctaggctggagtgcagtggtgcgatcttgactcactgcaacccccctctcctgggttcaagcgatcctcccacctcagcctcctgagtagctgggattacaggcgtgtgccaccatgccaggctaagttttgtatttttagatggggttttaccttgttggccaggctggtcttgtactcctgagctcaagcaatctgctcgcatcagcctcccaaagtgctgggattacaggcatgagccaccacac

SEQ ID NO: 258211 - DNA, 544 bp, Homo sapiens
tggaggcgagaactgcacaatcccatgtgctcaggctccctactcctttttcttcctaaggcagccccagcaatctctgaggaaaacagttgaaagacaagtgatctagacctctctagagtggtcagaaaactacctcctgcacaccaaatccagccccgtamctgtttttgtgaataaaattgtatcagaacactgccatattcatttgttttttttttttcacatttgttaatcatttgaattttttgatgacttttttttttctttttattgaggcaaggtctcactgtcccctaggctggagtgcagtggtgcgatcttgactcactgcaacccccctctcctgggttcaagcgatcctcccacctcagcctcctgagtagctgggattacaggcgtgtgccaccatgccaggctaagttttgtatttttagatggggttttaccttgttggccaggctggtcttgtactcctgagctcaagcaatctgctcgcatcagcctcccaaagtgctgggattacaggcatgagccaccacac

SEQ ID NO: 258212 - DNA, 544 bp, Homo sapiens
tggaggcgagaactgcacaatcccatgtgctcaggctccctactcctttttcttcctaaggcagccccagcaatctctgaggaaaacagttgaaagacaagtgatctagacctctctagagtggtcagaaaactacctcctgcacaccaaatccagccccgtacctgtttttgtgaataaaattgtatcagaacactgccatattcatttgttttttttttttcacatttgttaatcatttgaattttttgatgacttttttttttctttttattgaggcaaggtctcactgtcccctaggctrgagtgcagtggtgcgatcttgactcactgcaacccccctctcctgggttcaagcgatcctcccacctcagcctcctgagtagctgggattacaggcgtgtgccaccatgccaggctaagttttgtatttttagatggggttttaccttgttggccaggctggtcttgtactcctgagctcaagcaatctgctcgcatcagcctcccaaagtgctgggattacaggcatgagccaccacac

SEQ ID NO: 258213 - DNA, 546 bp, Homo sapiens
tgagttttctctgttaatcatataaatatgagatctttggtattttaaatattttaagggtggtaaagagaagtttctcttaacatgtaaatgtttttgttctgtctatctaaaggagacattatagagatgattttttttgagatgggggtctcactgtgttgtccaggttggtgttgaactcctggccttaagtgatcctcctgcctcagtctctcaaagtgctgggattacaggcatccgtcattgtgcccagacacaaartgaattttatccagaaggttaggtgggggatggaagcaggaggaagagcaaaattatgaggaactatgagtggttaaaaaaaaaatgtgaagagagcaggagaactataaaagagagtactgacaggatggtgtgataggtgactgaaccagtaatccacccgaagcaaaaaggataaacctggccctgaagggggccacatcagagcaaaaataaaggcttcagaagaccctggagggtggggagcatggaggtgacacactggaagctgaaagctaaggg

SEQ ID NO: 258214 - DNA, 565 bp, Homo sapiens
gttataattagaattgtaaaagcacataaacaaaatacaagccacatgagcctgcctgcccagcttcaggaaatttgaaagtgtcagagaaaaatctttgtttaaaagtttttaggacaaaaatacaaaagagtagaattagattgaaacaaaatggtcaaacaaaaatagggcaaaatagtggcaaaaaaaaaaaaagctatttgtttattgaggattatgtttaaaggtaggaatttagctggagagaatgaattgaaacctggggaactatctggttcctgtgacctcttttaacttgtgactggaaaagctcatttgaggactttgatgagctagaaaactcagcttgcagggtgtgtctttggagaaatcccttagtagtaaatggytgtatataaatctgacagttcattgactaagagctcactgaacactagtcagttgctagatttgggaagcaggtggagttcagctactccacctcaaaagagcctactctgggatattgactgttttcagttaaaggcgtttgaaaaacagcagatgccagaagggcactctg

SEQ ID NO: 258215 - DNA, 608 bp, Homo sapiens
gtcttcattacacacctcagcccctgagctgagcacgatttccagttgaaaaggtctccaatgtggaaagaaaaaagggtggggagtgagtaccttgtgatgtgacctgacagcattgggagagatgggtcacctctcggctccctccccttcccaaggttttaaatcctttcctaccggaaggggtggagtaagagctgatgccaatttattgggtcacaactgggtgtctctcccttcctgaaagacctggcaacatctctcctgccattgtgattatgaagaaagcattcacgaggataattatctaatcagggaattagccttggttcatgtggcaagcattaaaggactcttaaaaatctaataggaaaaaaaaaaggcccaagtcaggaaatagcactggtaattgcaccctaaatgattattatacacaaacactattaagatctaggatgaatatttataaataatcagcaaacaaaattggcagatatttatcatgaacacttaccccatgaaagacactgkcaacttctcctacttgatttcctccatttaagtcattgcactgtctagtctaattttctcacattgtggtcttagtg

SEQ ID NO: 258216 - DNA, 574 bp, Homo sapiens
actatcaaattatgcccaatcttatttgattaatatcccatccgtgattattctgtggcaagtcccagatatcatttcatctgtaaatatttcagcatgtatttctgaatgataaaaacttaaaaatctaaaaaccatgatcataccttaacaaattaacaatattccctttatatcaaatatctagtcagtgttcaaatttcttatgttgtctcacmattttttgcatcaaaaaccaaataactgtcctgcattgcaactgctgatgcatctcttgcctcttttgtttgctcttctgtattagtcatcttcacactgctataaataaacatactacctgagactgggcaatttataaacaaagaggttgaattgactcacagttctgcatggctggggaagcctcaggaaacttacaaccatggctgaaggcaaaggggaagcaaggaccttcttcagatggcagcaggagagagaaggagtgcaagcaagggaaatgccagatgcttataaaaccatcagatctcatgagcactcactcactatcatgagaacagcatagcaggaaccgtcc

SEQ ID NO: 258217 - DNA, 551 bp, Homo sapiens
tcatttctttagggaaaacataatttagacttttgaaaagtgttgagcatatactgaatgaataacattgctccagagtattcgtcagatacaatggccatattcttctcttcttacccatactggcttgaccccttgtaatctggctattgaaatggctccstcatcagtctgtaaagctcttctggttgcaaaatccagtggcttcctcattctcttatcttctcccatgtctttgtagacatatcaaatgaaaagattacaagtatctgggaggataaaaccaatggggctttgagactgattatttgtgtgggtgggtgggacatgaggaaaaggaaccaatcaaacatggtacccatgttcctggcttggactgggtggatgggattgtaccccattcttaaacataggggtacaatacacaaagcaaattggggcaaggcagggtgggcaaatgatcccttcagttagaaaagttgatgactgtatgctttatgcctttgagtacattagaatttccttaggagttgcagagtcatgagattttt

SEQ ID NO: 258218 - DNA, 551 bp, Homo sapiens
tcatttctttagggaaaacataatttagacttttgaaaagtgttgagcatatactgaatgaataacattgctccagagtattcgtcagatacaatggccatattcttctcttcttacccatactggcttgaccccttgtaatctggctattgaaatggctccctcatcagtctgtaaagctcttstggttgcaaaatccagtggcttcctcattctcttatcttctcccatgtctttgtagacatatcaaatgaaaagattacaagtatctgggaggataaaaccaatggggctttgagactgattatttgtgtgggtgggtgggacatgaggaaaaggaaccaatcaaacatggtacccatgttcctggcttggactgggtggatgggattgtaccccattcttaaacataggggtacaatacacaaagcaaattggggcaaggcagggtgggcaaatgatcccttcagttagaaaagttgatgactgtatgctttatgcctttgagtacattagaatttccttaggagttgcagagtcatgagattttt

SEQ ID NO: 258219 - DNA, 559 bp, Homo sapiens
gtctcacttacttcaagaatcaatctgcagaccgtcgcgatgagtgttacagttcttaaagatggtgtgcccagagtttgttccttcacatgttcagatgtgtccagagtttcttcttcccggtgggttcctggtctcgctgacttcaggaatgaagccacagacctttgcagtgagtgttacasatcataaacatagtgcagactcagagagcgagcagcagcaagatttattgtgaagagggaataaacaaacctcccacaccacagaacagaacccaagcgggttgcagctgctggctccggtggccagcttttgttcccttatttggccctgcccacatcctgctgattgttccattttacagaacactcattggtccattttacagcgtgccgattggtccattttacagagtgctgattggtccattttacagagtgctgattggtgtgtttacaatcctttagctagacacagaatgctgattggtgcatttacaatcctttagctagacacagaagttctccaagtccccacctgaaccagaagcccagct

SEQ ID NO: 258220 - DNA, 584 bp, Homo sapiens
aaagtggcccattgcagtgctttctcgtgaacttcatccacctgtcatgtttagtcttggaggggagccaggacaggcaggaaataataggctgcaggatactggtgtgtgtcagtggccccgaccctcccattcctgaacacagatgagctggaagcctgcgaggcgttgccattgcatggatgggcttgggaggccacagcaagacaggctaagggagggggagacacaaaacggatgacaagaggtttaactcatagtgggcccatctttgggackgcggaaccatttctgcagggaaatggccttggctgttgctcagacacatccctttgttctcactgacctaatgttgcacacataaggctgagcctcagatctaaaggagaatgtctgagtccttctcaccttcacatcctcccttcccctggcctccctggccagagaactagctataatgacatcaactggctagaattacataaaacttcccttttcaactcccagacccctggattattattatgttttgtttttaatttccacatgatttctctttatgcaattgggcttcctccttgcca

SEQ ID NO: 258221 - DNA, 584 bp, Homo sapiens
aaagtggcccattgcagtgctttctcgtgaacttcatccacctgtcatgtttagtcttggaggggagccaggacaggcaggaaataataggctgcaggatactggtgtgtgtcagtggccccgaccctcccattcctgaacacagatgagctggaagcctgcgaggcgttgccattgcatggatgggcttgggaggccacagcaagacaggctaagggagggggagacacaaaacggatgacaagaggtttaactcatagtgggcccatctttgggactgcggaaccatytctgcagggaaatggccttggctgttgctcagacacatccctttgttctcactgacctaatgttgcacacataaggctgagcctcagatctaaaggagaatgtctgagtccttctcaccttcacatcctcccttcccctggcctccctggccagagaactagctataatgacatcaactggctagaattacataaaacttcccttttcaactcccagacccctggattattattatgttttgtttttaatttccacatgatttctctttatgcaattgggcttcctccttgcca

SEQ ID NO: 258222 - DNA, 583 bp, Homo sapiens
ttttaatttccacatgatttctctttatgcaattgggcttcctccttgccaactcttatcacctttatccctgtcaatttgattttctatttcttattagcaggttttaggcaacaaggtgaaagaaacatgggttctcaaggagttgtaactataggctggtgcaaaagtacctgcctaggagcagtagaaatgccaatatgattaaaaatatgatacctgccagtgcttctcagtgagagacccagggagagacagacacacactcawattagaataatttacccgtacatgtaccccctgaatctaaagtaaaagttaaaaagaaaaaaataggataatttgagggtagtctataaaggaattatcatcaaagctatcagtgagcttcctcagggataataacggaagacgaagatgtgttatcactcagggctcaaagatatgaggaaggcgaatgatgtggtttggctgtgtccccacccaaatctcatcttgaattgtagctcccataatttccacgtgttgtgggagggacccagtaggagacaattgagtcatggggacggttcccccatactgt

SEQ ID NO: 258223 - DNA, 583 bp, Homo sapiens
ttttaatttccacatgatttctctttatgcaattgggcttcctccttgccaactcttatcacctttatccctgtcaatttgattttctatttcttattagcaggttttaggcaacaaggtgaaagaaacatgggttctcaaggagttgtaactataggctggtgcaaaagtacctgcctaggagcagtagaaatgccaatatgattaaaaatatgatacctgccagtgcttctcagtgagagacccagggagagacagacacacactcatattagaataatttacccgtacatgtaccccctgaatctaaagtaaaagttaaaaagaaaaaaataggataatttgagggtagtctataaaggaattatcatcaaagctatcagtgagcttcctcagggataataacggaagacgaagatgtgttatcactcagggctcaaagatatgaggaaggmgaatgatgtggtttggctgtgtccccacccaaatctcatcttgaattgtagctcccataatttccacgtgttgtgggagggacccagtaggagacaattgagtcatggggacggttcccccatactgt

SEQ ID NO: 258224 - DNA, 596 bp, Homo sapiens
cctgcaagccaacgccctgggacagagaaaagggtgagtggagagtggagagagggtctcaaggagcaagtggaaggcatctggcacattcatacagtttctggtgcacaaataatcaataccacaggcaatttttttcgtttcatctaagttttgacttcaagttgaactcctgaggtcagaaatatcttccaactctggatcccttgtgaatttgggggaactaaaaaaaaagcttaggctgggcatgatggctcatgcctgtaatcccagcactttgagaggccraggcgggtggatcacttgaggtaaggagttcaagaccagcctgaccaacataaaggaaccctgtctctactaaaaatacaaacaattagcgggcatggtggcacatgcctgtaattccagctactccagaggctgaggcaggagaatcacttgaacctgggaggcagaggttgcagtgtgcagggatcacgccattgcactccagcctgggcaacaagagcaaaactccatctcaaaaaaaaaaaaaaaaaaagcttagttattgaaacttaaatatagtccttaatagttttatgacaatgttcaca

SEQ ID NO: 258225 - DNA, 573 bp, Homo sapiens
tgttttaaagtcaagttccttcacatttcttaagtaaatattcctgagtattttaatctttcattttccttttgtaaattagattaaaaattttgttacatttttctaacctttttttggttaaattgttatcaaccattgactcagttctcttatttatttatttttggctttaacttaatttattatatgttatactttttttaattgacacatgataattgtacatatttatggggtacacagttatatttcagtacatatatacattgtgtaataatcgaatcagggtaattaacatatccattacctcaaacacttgtcattgctttgtggtgagaacatttaaaatcctctcctctagctattttgaagtaaacaatacatcgttgttgactacagtcacctgctgtgcaacagaactccagaacttaaatcaatctcttatttttaaaaaatatttttaaaatggcctttcttaagctttccaagtrtaaatcacactatctgtaaataatgatcatttttccttctccatttttttaaacttctaagttattttttatgtcacac

SEQ ID NO: 258226 - DNA, 657 bp, Homo sapiens
ttggtgtgttctacttattgagtatgaggttctatatatgacctttagatcaagcgtatgagttttatgcttaaatcttccctatctaccagtttttytgtctgcttggtcaatttcctaaaaaagagccttaaaatgttccactgtaatgatgaatttgctgatttctccttatactgatgataatttttgccttacatatttgagattaagttgtaaaatgaatacatacaaatttaagcattccgagtacctgaagagttatccttttaccattaactcagaaacttctattaacttttttcttttaaagtccatttagtctgatattttaggagtcacacaagctttcttttgtttcagatttacttgtatatattttccatacctttaacttcacatttctgtgtaattatgttttagttattgtctcttataaatacatatatctgggtttttcctaaatttttattttgaataatttcaaatatgcagaaaagttgaagaaatagaaaataaaatcctggctacctttcatctaaatttatcaattatttattttgtcacttttgcttctctatctatatatcaatcacactttttttaatggaaccatctgaacataagatgcaagtatcatgctgcttcacccctaaa

SEQ ID NO: 258227 - DNA, 609 bp, Homo sapiens
gccaccgctcctggctagatattctttacatagtttatctactcttaaaacaagtaatttaaaacaacagaaatgtgaaaattcatatattaatgaagaaaaatagtcatgatacatcatttagtgaaaaacagagttaaagactaataaaaggtagggtattttcaaattttgagtaaaaacattacttgtattcatctatttgtgtatactaagtcactggatacctcccactgtgggactggaggaggaagacataagaccattaatttgattgtagagccttttatgcttttgagttgttaaaacatgtaccttttacttttataattcaaataaccaaaaaatttttaaagtaaatccccccagatatatacatgagtatgtcttctttaacggacagaggaagaagaaactatacatgtgtgtcaattttagtttaaataattaggttttatatatatatgcatatttatattgamgatcatatggaaatggaaactgttattcaaatacttcaatgacttgtgtggcgggttaaaaactacaaggatttggagaaattgcaggcaaaaattcacacattgtctgatgacagaagtgcaaagg

SEQ ID NO: 258228 - DNA, 595 bp, Homo sapiens
aaaccaattttagaagaagaggaatgtgtgggaagaagactgtgagagctatgtttctttggagttgattctyttaggctttagtcggggactcataaagttgcctttcatcttaaatatgaaaaatatagcaagttcaccccatctatcatcagttccagggaggcatgtgtttatgaaaagagtttattaactggatgtcactggattttctggaagaaaatatggtattctcaatttaggaactctctgttcatttatgccctaactagataaaatctgcaatattaattttggtaaacagaaactctaactctacattggacagagattcaacctattacctcacctttgaaaataaaataaaaacatctctttcctcaggcatacaaatttgcaaggtacaaatgtctttataactgccatcaagtataacactcagcctaatccccacgatacaaaataagtaaactggggttcattcaggctaaaaaatgactattcaaggtcacttaaagctagaattttaattcagttcttcagacactgctatggtctaaatgttttgtgtcccaccaaaatttacatgttgaaa

SEQ ID NO: 258229 - DNA, 577 bp, Homo sapiens
cagcaaacagctacaaataccagttatgacctggagttgtctatgctttaagtcccacagaataaacacagaagagaacagagagtcacaaggattaggtcactggcctctgtggtccatgtgtccctccctgctgaccacagggacctgtggaaactgaccgtagaatgcactttttattctgccccagtgctaagaagccagcccagcccaggccacttggacaacctccaatatgtgaatggattcatcatactcattcagttcaaggactagagtctcaagtgtatcaccaacttgtcttcccctcctaagcctgttcttcgtcttggctctaacactttcatctgtgtttatggaactaaatttatccctcaggcctggtgtttgacccatgttctctagaactggcctccaaattccacctttacacccacgcctgagttaaygcctgtctcaaggcactgtcaagaaaccttccactcaactgggcctggtctccaagatcttaccccagaacaagcccatcatggctgtagcaatagtgaacttctcccttggacctagttaagagtgg

SEQ ID NO: 258230 - DNA, 596 bp, Homo sapiens
tggtgagaggtgggaacagtgtcttgttggctgctgcaccccagcccctggattgggtgagtcagagagcctcagagcccccacccatgtccagacactacctcaatagacaagtggggaggctccagacagatatcttttaggaccagcatggacctccctgtctcttcaacctcsgcgatgccagacacgcggatgagcttttcgtccgttagcttgtttctgtaattgctgtagggcaggaggagcggccactgtgtctctaagcacatacaaaagacaccttgagtccaggacatggaccagagagaggggggacatgtagatgtgagagaggaaaaattagaattttcacgtgagaggtaaaagtgtgtgtgagagacagacagacagcgtcccaccacgcacacactgtccccagggctcactgctccgtctcgcctggtggggtggcatcagaggtgcagcagctggcagcttcactgcccagaatgtgtgtgtgttggaggaaggggtctgtgtgtaatctggctgggcccaccccactgtgttcatggacccacagctcccctccctgtaggtgccttctcaggcct

SEQ ID NO: 258231 - DNA, 493 bp, Homo sapiens
gaggttgctctggagagtgctcttgcagatcccctcagagagcagagcactcagacttggaagaacatgcctggttccctggatgagaaacactaagcccgagcaggattgaggggaaaggaatccaagttaggactttttttctggactaggaggagagaaaatatcccttttaaaaaaaaaaaaaaaaaaaaggacaagtgtagtggctcatacctgtaatcccagcactttgggaggccaaggcgggcgtgtcactttcagcccaggagtttgagaccagcttgggcaacatagcaaaaccccgtctctactaaatatccaaaaactagctgggcgtggtggtaccttcctgtagtctcagctactcaggaggctgaggtggcaggatggcttgagctcargagacaaaggttgcagtgaggcaagatcatgccactgcactccagcctgggtgacagccagaccctgtctcaaaaaaaaaaaaagcctt

SEQ ID NO: 258232 - DNA, 580 bp, Homo sapiens
ggattgttagttaacaggatttttttttttctttcaggatttaaaatatgtcattctgccacttccagcccttcatggtttctcattaggaattgactatcttattgaagattccttgtgtatgacgaatcatttccctcttgttgtttttaagattttctcttgtctgattttagacagttttattataatatgctttggtgtggatttctttttttatcctccttggagtttgttgacatttttggatgtatagtcatgtcttttatctaatttgggaagttttttggacattatttcttcaggtatgcctttttgcctttctttctctcttcttcctttgtgacttccattatatgcatgttgataccctcgatgtcattccacaggtccattaaactctcttcactttttctttctgctccttagattgaataatttcaattgtcccacyttcaagtttgctgattgtttcttgtgccttctcacatctgctgctgaactcttctggtcatttttaaattttgagtattatacttctcaagtcctgaatttctagttggttcctttttacaatttt

SEQ ID NO: 258233 - DNA, 510 bp, Homo sapiens
tcctgtctatcttgcactgctggtcagaggtactgggggttttttttttttttttttttttttttaagatggagtctcactctgttgcccaagctggagtacagtggcgcgatctctgctcactgcaacctccgcctcccaggttcaagagattcttctgcctcagcctcctgagtagctgggattacaggcatgtgccaccacacccggctaatttttgtatttttagtagagacagggtttcaccatgttggtcaggctggtcttgaactcctgacctcatgatccgcccaccttggcctcccaaagtgctgggattacaggtgtgaggcaccgcacccagccagaggtacttttttatagcttgctagtgaatattgaacattagcttttatcttaraatcatttcctcctttggcttagaaaccatccttgtcaccagcatcagaaccttcttttatagcatggccgtggcttttggtgtctggagcaacagagaggggacagaga

SEQ ID NO: 258234 - DNA, 577 bp, Homo sapiens
gggttctctcaaatcgtgttactgcaactactgtatttccaagcctacctttgggccctgaagcaatctatctgtagctgttcttgcactagctcctctttcccccacccctgatcccttggcctccagactgaatgtttggctcaacaagacaaaatgtttggctcctaagtctcagctggagacagattacattcaactgagcaacagaatttgttctatggggcagcaataaaaatactagtttgtaataaccttttatgttctttaaagactccttagagtgtttgttaaagaaagataattttaacaacagtaaataagataaaatatctctcttgacaagaaagacctcttgctgcaacttcttaaccaagatacaaaatacttccttaaaaagtccatgctggccgggcayagtggctcacacctgtaatcccagcactttgggaggctgaggcaggtggatcacttgaggtcagcagcttgagaccaacatggtgaaactccatctctactaaaaatacaaaaattagccagacatggtggcacacatctgtagtcccagctactcggg

SEQ ID NO: 258235 - DNA, 576 bp, Homo sapiens
atactgtgcaggagatgtataactcacaacaacaacaataaaaaaaaaaggtgccattgagtcacagatgatctgtcctctcatgatggaaacatcaaggactaagaaatctctccatcacatttctctaaatgtttaggtgaagtattgaaaatcttttttcaatagtgtgaaaagaataccagattataggtacttactttttggtctttttctattgaaaattctactataaaggctctagggtggtctgggaaataatcaatatgacaaaggaatcaagatgcaaagacatgtaactaaatcaaatgattaataactatcattatgcttttcagcaaatattcagtaacaaatttacatttgacattgcttacagtgacattctctatggagatttaaaatgaaaatatctgaggctcgatgttaactggtcattacgtggaatagtctgaggggaaaggtgacactagcaactttgcaaytcctttcatacatctgaattagatcttataggatataatcgccaccatttttcccctgtacaatttcaattcctcactatctatgagagga

SEQ ID NO: 258236 - DNA, 296 bp, Homo sapiens
gtttgaggaataacagagctaagagaactgtgcctcacattcctttttaaaacatgrtaagtgggctgccttaataatatccctcatataacagtgacaaggaatcagtatgccagggatggctgggggtgatgtccatggcaaggtaggtgccaggggaaaacctacctggcttttccatgggcccacacacagaacaggtgaaagttccttatgcccttgagaatagcaagtaggaacaagcaagggctaacagaagttctctcttaccttctccccacccccaagaaaaataa

SEQ ID NO: 258237 - DNA, 563 bp, Homo sapiens
aatgacaccaaataacaatacatccaatgctttgtctttaaatatttaaaagttagtgcaagtagatgctcaaaatgaatgtaatagacatacaatcagacagaatgagtccttgtccccaaccatttgagctgaggattacaacaagagagaagaagaagaagtttcagatgttggtgcatctatatgccccaatctctctccctaagtcctagaggtgatggaaggaagaagtgatggaatattctagataagtttgaggaataacagagctaagagaactgtgcctcacattcctttttaaaacatgataagtgggctgccttaataatatccctcatataacagtgacaaggaatcagtatgccagggatggctgggggtgatgtccatgrcaaggtaggtgccaggggaaaacctacctggcttttccatgggcccacacacagaacaggtgaaagttccttatgcccttgagaatagcaagtaggaacaagcaagggctaacagaagttctctcttaccttctccccacccccaagaaaaataattgcctgggagtg

SEQ ID NO: 258238 - DNA, 519 bp, Homo sapiens
tggctttacctggctaatatgcctcaactggtgaagaccctttggtgttagaaatcattcctcccctccttccaaattaacccccaacaaagaaacaacatttttgcttagaagagttacttgtttctgtgtcatactgcaaaaatagctgccattcttcatctctttctatacccttccctttgcaatgcgatcccttctctttgcagcttctcccataaaaaggtacattctgtttctctaaaacttgaacctaggctggacttatgactttccttgacaaatagaatgcagagaagtaactawgtgtgatttagaagcctggcctcaggaggccgtgtggtttctactctttctttgggaatgctgccagccatcatgtgaacaagcctgggcagtctgatggagaatgggataccatgtgggccagcaaggagtcaacccagtttcccaggcaaggcttcagacatgtgaaagagcttagccaagattagccaagcctgggcaaatgagcagaac

SEQ ID NO: 258239 - DNA, 631 bp, Homo sapiens
ctatttggaaaccaatcaatccaaggaagtagatgtgtcagcttaaagaaagagtgcacaaaatggttaaaagaacaagagttttgagaatacccaaatctaaaagcacataataggtacaggaaaaaaaggagcctaaaaatgatgaaaacgtgaagggctatacctatataaagtacagctctctaacaaaggtacattcacataacatttatcttaaactaggaaaaaatattgggatagacagcttctgttgcaaatgacataaaaatcttaatcaaagtagcttaagtttcaaaagtaaataaatttcctggcttatataagtaattccctgtcgtagatttagcrtcagatatgctaatatcagaaatcaagtcaggtcattaggactcagcttttccctgtctcctggctgctgaaccatggtgagaaagaagatggctatgaccactccaacctcacaatatctcagatgtaagaccagtgggaagaaaggaaactcacctcctcagaagattagatgacacacacagaattgagccaaatttattctaaataatctaccatgaattatgaagccattcatgaacaaatattgttttcaggacaatacagtagaaaacctggc

SEQ ID NO: 258240 - DNA, 648 bp, Homo sapiens
tggagaactaaattaaatcatgtatgtgaaaatatttagcatgcacacttactggaatcacaaaaatcaaaaacactgaaaataccaaatgctggtgaggatgtggagcaacaggaactctcacttcttcctgatgagaatgcaaaatggtacagccactgtggaagacagttggaagccttttgcaaaactaaacatactcttaccatatgagtcagaaatcatactcctttgtgttcacccaaaggagttgaatgtcacttagttgaaatcagacartgtatataatagcttttatagactgacttatctcacttaaatatgcatttaagtttcccccatgtctttttgtggcttgataacaaatattttatttcatgggatcatcgaccaaaaaaatcttagatcaactccacgtagtattccctttcataaacttttcattagaagcaccaaaatgtcctagggtatgagggagtacgagtggattaccatatcaatctaaggattaataatacgtcagtcactataacttgggaatattgagacaaattaagggtagacaagatttggagaaggtaatgaagctgtaggcatagctagacctattctagagcaagaggagttctgggcctttaaagaaactta

SEQ ID NO: 258241 - DNA, 605 bp, Homo sapiens
atgctccatgtctttggctctcagggtgggcagaaaaagaccaccaggtgggagcagggataggtatgtctgagctcagcctctcctttggaggggcttgctgtggctgtcgtggaggatgggggtgtggttccaagtccagtggagttatattctcaaggggattatggctgcctctgctgagtcacacaggtcaccagggaagtgggggaaagctggcagtcacaggagtcatcctgctcccatgcagcctgcagtcctaaaggctggtctttctyccaccatgccctcccctctcaacagcactgagtccatttccaggcaaccggtgatgagggctgagaacttgtcccagaccaccagcctctccattgagaaagcaaactgactcgcagtttttcggcatctcagggagcctgcagtggtgatccagttccttcatggattctcttggctttcctggaatgttcctgtggtagttcttggagcaaaagttcatgatgtgagtttccacacactgctgtgtccatccgagcaggaactgcaagctagtcctgcctcctgtctgccatcttaatcttcttgctttctttgtgatttgatgg

SEQ ID NO: 258242 - DNA, 631 bp, Homo sapiens
ttaatcttcttgctttctttgtgatttgatggctttctgtagtggaatgctttagttcttttctttttatcttttgtgtatctatcataggcttttgctttgcagctacccagaggcttatataaagcattttacagcagggtaatttaagctataatagcttaattttgaccacatacacaaattctctacatttaccccctttcttttcatgtttcatgtttttgataccacacttcacattttttataatatatatcccttagcaaattattgtggctttagttgttattaatagttttgtactttgacatttatagtagagatataattgatttactcactgcagtttaagtattagggtgttttgtatttgacartgtatttacttttactaatgagttttatattttcatataattttatgtgacttatcagcatccttttccttcagcttgaagaacttcctttagcaattttttttttggtaatgcatgtctagtggtgataaactttctcagcttttgtttgtctgagaaagtctttatcattccctaatttttgaaataaaggattgctgagtatagtattcttcattgccagtctttttctttcaggatttaaaatacat

SEQ ID NO: 258243 - DNA, 606 bp, Homo sapiens
atctttccttcttcctgatctagtctgttgttgaacccctttactgaattttttcagttcagtgataacattcttcaggtctctggtgtccatttggtgcttgtttatactttctctttgytcagattctcagcttgtcctaacattgctgtcttgacctctcttacactgctgtcttgacctctgtggagcatctttatgaccattgttttgaatttcctattgctgaattcataaaactccacttcatttgtgttggcttctggacattaatcttgttttttgcttggaatttcttttcattttccttgattgtctgtgttgatttccacacattagaaaatacacctacctctttatgtcttgttagaccagttcttgtgtaggagaaagttttcactaatctgtctggccagagattttaaggtgcctctctaatttttgtgtttgtccagaccactatctttgtttttagtggccctctgaatcttaaggatgtactacatattgccagtaccccaagactcatatgatagaagcaagacattttagttatagttggaaaggtgaggggggtgttgaatatgtgttctagttctttctatc

SEQ ID NO: 258244 - DNA, 617 bp, Homo sapiens
ggccagagattttaaggtgcctctctaatttttgtgtttgtccagaccactatctttgtttttagtggccctctgaatcttaaggatgtactacatattgccagtaccccaagactcatatgatagaagcaagacattttagttatagttggaaaggtgaggggggtgttgaatatgtgttctagttctttctatcttcatggtggggctgggtatgggtgtttatttcctactctttctgtactaagctgggggaggatttttggaaaaagcctgagctcacatttgggctayaccttctgatccttgaggaataacttctgggtgtgggtccattctactttcagttacttgttttctgtcatcctgtgtcactcagattggaaagcccccttaactaccacagctaggtcattgagatgacagtcccttaggtgggagttattaaaattgtagcacttggtgcatagccaaaatcctttcaaaaataataggtaggcttgtacttatttttgggatgatctgggaggaagtcttatgaagagccaaattctgtaccaaagggctattttttgtttgcactgttagctctttgatatatgttcatgggagattaa

SEQ ID NO: 258245 - DNA, 621 bp, Homo sapiens
aatcaatggcacccccataatctcaggcatattcaacaaagcctaaccaaattaaaacctaaccgtgatcaaatgattgatacatattgatgcatatcagatgattggtatttaggcacatatatatgtayataggtagagacagagatagaaatagtgagagagacacaggagggaggaagagagggagatagagagagagagagagagagagctgagacagatcttaaaagcataagtcatttgcctgagtaagtgatttacactccctagatactcactcactcatgctttctgccacatctccctcagccctcactatggcctcctgtggagattcctctgaccactgagctgatggacggaaagatgtaagcttggtgtacagacaggtctagcccacagttctacaccgtgctggtgccaaccagaagtagaatataaataatcttataatcctacttatggttggccaggaaagacaataccctgtgggtggaagattgaaccagatattattgacctttcacttagtaagttgtgttaacaaacaacctcaaaacatgaatggcttacaacaaaggttgatttttgctcactgtattgttggctctgggttag

SEQ ID NO: 258246 - DNA, 661 bp, Homo sapiens
agatcttaaaagcataagtcatttgcctgagtaagtgatttacactccctagatactcactcactcatgctttctgccacatctccctcagccctcactatggcctcctgtggagattcctctgaccactgagctgatggacggaaagatgtaagcttggtgtacagacaggtctagcccacagttctacaccgtgctggtgccaaccagaagtagaatataaataatcttataatcctacttatggttggccaggaaagacaataccctgtgggtggaagattgaaccagatattattgacctttcacttagtaagttgtgttaacaaacaacctcaaaacatgaatggcttacaacaaaggttgatttttgctcactgtattgttggctctgggttagctgtggtttgctctacatgtttttcagtcgtgtatttaaaatgaaaagagcagccactatctatggcatggcattgtgctggttacattccattggccaaaatatattacatgaagaagcctaatcaatggtctcaacagtaggctatattgtcctttcataggaagggcatgtagatagaaaaaacagtatctactataacagtacatatcattgttcactttttcyagaaatactgttcagtgtatggtgcaagcccaa

SEQ ID NO: 258247 - DNA, 589 bp, Homo sapiens
ttgacttcaaggcatgattctttccacctcctcacctccaggctgcccttactgatattgttctcttccatctcatctttgtttcacgctgagtccagttacctctttttttaagcaccattttgatgaggttactcctctgctcagaaagtcactatggctcctcctgcctctaatatcaactctagaatacgactggttttcaagaggctgcgtagtctgcctctatcttctccattcatttccgagaagttaccatctatggaagtcagacaaatcatttctattattttgttaaatctaagatgtcatcaattataaaatggactgttattctatcatctaaggtagagaaaataatgccaattaagttcaaatataccattgcttaaaatactgactccaatttcagagacataaaatgtgaaaatatgtgaatctcagtattaatgcaatattttctatcttaaaaactattagttggctcaaatttcacctgctacataaaactcgccatgactaactgtggccatattttctgaattcctgtggaacctrttatcagcccattacccatttcccaactgcc

SEQ ID NO: 258248 - DNA, 539 bp, Homo sapiens
caatttttcccccacataaaatgtaatttgaaatttccactggagaacacagttatcaagaccagcaaaatatctgctttctagcattgattttcaaasttgaacttcttcatctgaagactgcatgaagcctgtgggatcccatatttcatgatgataagacttggaattcttactgtcagtgaagtctgtgcctgcatctctgatgatgtacaaacttgtatcatttgattcacaacgtacaacttttgattcacaggccccttcagctcttttgtgtcaccgttgtcatgaaactttgtgactccccgttaaaactgacagacatttggctttcttggttttgttaagtacgaatttattttgggcaattttcaaggtgaattaactgaaagccatattcgtgtggctctggaaaaacatttttattctcacctaacccataatgtatcatttagaataaagtgctccattaaactagatctcagtaacagacatgtgtcacaagttattccatcttgcagcactcctaagaaatc

SEQ ID NO: 258249 - DNA, 539 bp, Homo sapiens
caatttttcccccacataaaatgtaatttgaaatttccactggagaacacagttatcaagaccagcaaaatatctgctttctagcattgattttcaaagttgaacttcttcatctgaagactgcatgaagcctgtgggatcccatatttcatgatgataagacttggaattcttactgtcagtgaagtctgtgcctgcatctctgatgatgtacaaacttgtatcatttgattcacaacktacaacttttgattcacaggccccttcagctcttttgtgtcaccgttgtcatgaaactttgtgactccccgttaaaactgacagacatttggctttcttggttttgttaagtacgaatttattttgggcaattttcaaggtgaattaactgaaagccatattcgtgtggctctggaaaaacatttttattctcacctaacccataatgtatcatttagaataaagtgctccattaaactagatctcagtaacagacatgtgtcacaagttattccatcttgcagcactcctaagaaatc

SEQ ID NO: 258250 - DNA, 544 bp, Homo sapiens
tcttttgtgtcaccgttgtcatgaaactttgtgactccccgttaaaactgacagacatttggctttcttggttttgttaagtackaatttattttgggcaattttcaaggtgaattaactgaaagccatattcgtgtggctctggaaaaacatttttattctcacctaacccataatgtatcatttagaataaagtgctccattaaactagatctcagtaacagacatgtgtcacaagttattccatcttgcagcactcctaagaaatcagtgtaaaatcaaactgatgctaaaataaaaatgggttggttttgaaagtaagtaaaatgcaagtgtgtgttctactgtttcttatattactatgttattttcttcctctagtcattctcttgaataacattgaatagtggaaagaggaaatattacacgaaatacttgactgctcctctcccatttctgttctcctccccttccacatgatttaatcaaccccccaaactttgtcactatctcctaaatgtctctgaagctggtctgtttttct

SEQ ID NO: 258251 - DNA, 544 bp, Homo sapiens
tcttttgtgtcaccgttgtcatgaaactttgtgactccccgttaaaactgacagacatttggctttcttggttttgttaagtacgaatttattttgggcaattttcaaggtgaattaactgaaagccatattcgtgtggctctggaaaaacatttttattctcacctaacccataatgtatcatttagaataaagtgctccattaaactagatctcagtaacagacatgtgtcacaagttattccatcttgcagcactcctaagaaatcagtgtaaaatcaaactgatgctaaaataaaaatgggttggttttgaaagtaagtaaaatgcaagtgtgtgttctactgtttcttatattactatgttattttcttcctctagtcattctcttgaataacattgaatagtggaaagaggaaatattacaygaaatacttgactgctcctctcccatttctgttctcctccccttccacatgatttaatcaaccccccaaactttgtcactatctcctaaatgtctctgaagctggtctgtttttct

SEQ ID NO: 258252 - DNA, 587 bp, Homo sapiens
cagctcttttgtgtcaccgttgtcatgaaactttgtgactccccgttaaaactgacagacatttggctttcttggttttgttaagtacgaatttattttgggcaattttcaaggtgaattaactgaaagccatattcgtgtggctctggaaaaacatttttattctcacctaacccataatgtatcatttagaataaagtgctccattaaactagatctcagtaacagacatgtgtcacaagttattccatcttgcagcactcctaagaaatcagtgtaaaatcaaactgatgctaaaataaaaatgggttggttttgaaagtaagtaaaatgcaagtgtgtgttctactgtttcttatattactatgttattttcttcctctagtcattctcttgaataacattgaatagtggaaagaggaaatattacacgaaatacttgactgctcctctcccrtttctgttctcctccccttccacatgatttaatcaaccccccaaactttgtcactatctcctaaatgtctctgaagctggtctgtttttcttcatcttcacatgttctatctcagctcacgccaccatct

SEQ ID NO: 258253 - DNA, 468 bp, Homo sapiens
ctcagtggaattaattttattattattactgcratcacatttgcaacagtatgatgagaccatggcaatgtcagggctgaacaatttcagaatataggaaatggtttcctcatatcttgtaatatataaattaaggaaaaattaggtaggagtggcaatgagtttataaatatgccgtcagaaggaaattaatcatagatttaatgctgtaaaaaattgggcattcaattttgtgtgtattgccaacttatgatcctgaagacacacttgggaccactattgcgaagaaaattatgaccaatctccttgccatcatatttgactctccttgatccaagtcattatgccatgcaactgtaggtgtaaaatcaaggaacaataccccgattctatttaagggcatgactttttaaaatgcgctaacctgtgccactgcttgagagatatttgagtgaattgacattaatc

SEQ ID NO: 258254 - DNA, 614 bp, Homo sapiens
gtatcttttcatttttaaagagaaattaaagttctggtcttggttgctacatagcctgagtttgatgggatgacatttgagcagtggtacaacatttcaattagtaattgcccaatcgtcttcaagtagcatgaatgatgctaggacagctaaattctatgaatttctctagctttgtttttaacttgacaggcagatttttttctatagctgaatactcactgtctgttatttagcaggtggattggactaagatcacagtgatcgcyatccatttaaataatagttacttgaatgtagctgagggaggcttgaataattttaacaaagccatatgtctccctaaaatagttttcagttttttagaacaaaacacagatttcttattttctttttgataccaatattactggtcatgatgctgatgccacactgtcatcctgtattcattttgaagagttttagcacctgaatgaggttgaaagtaattgtagataaatgttactgaagtgatatgtaatttccttcttatgaattattcatatcaatacctatttctgtagcgctggtgcagtataaaatattacatgctgtgtatgtaaatgtcttcatca

SEQ ID NO: 258255 - DNA, 491 bp, Homo sapiens
aaataatagtgatagatgtgtttagaattagatcagtggcttaactatgttagagctctaggttggcatctccatgattctcttgttctaccctcatggttgtaaaatggctaccacatctccaggcataacgtcacataaatgactttaactaaaggcaaatgtagggtgagagccaaaatagtgaatatgatctgtcctcatgtcactctcatcttttatcagggaagagaaaaaatctttctggaacaactttctttacaatctccccagataactattctttattccttaagggccaaaactttgaygcatagccattactagaaacaggaggtcttggaaagtgagtgactagatttttcagactttgcaacaggaggtgagtgatggttaagtgggtcaggaatggctgcgaggtagcaacaatcgtgtctctgctatgattgccaaaatttaaaaaatcaagagatttcatgtgaaaatctgaa

SEQ ID NO: 258256 - DNA, 593 bp, Homo sapiens
ccttcattaagaagagacggaggttgaactcaaaccacattcagtaaaaaggaattcaatgggaattctcagagatggagtgtgtttcaaccatgaccagattgaagggcacaagcaacagtgcgacggctctggttctctctctctctctcagccttggctgcattggcttggtttccttgcaggtgggatctctctctatttgccaagatggctgttggcctgcccattccttcattctgtcattttagcaaaacagtcagcaaggaattcctccttccagagtcgttattttaaaccaggaaaatctctggttggccctgtttgggttatctgcctacatctcttagggggtgaccagccatcaaggtagatagctcctccatggacagaaggaatgaaggagggtcaattttccaaataaagaaatacttaaagaagaaagaacatgcacctgttgccaacttcatgaagcaaatataatcatttctattttccacataatgmgataaagttaaatcacttgttttagatcacataactcaatagaactgggtttaagatgttattcacattttttcctctgtataaaa

SEQ ID NO: 258257 - DNA, 657 bp, Homo sapiens
tttccaacatgtaaactttgggggacacattcacaccatagcagatgtataatgcaaaaaacaacaatttaataaattcaatattttaaatatttattatcaagtaacatctttaatagtaaataataatgaaacaataatctaagactttattactggattatcataatattaaaaactggttggggggataaatagtatagtacccctatgccttataaaagaggaaattaagaagatacttttgttcttaattctgagaagttgaaaaaggtccaggaatgattttgaaaaaaaaattgaggtaaccattaacaaaattaaaaataggacatataccttttatgtgctagaataccaaaaagcaaagaaaacataggaaacatgaatgcctgagaaataaagcaaaaaaaatgtattgacaaaataaactaaacatattagttacaccaaaaacgaagtgtattaaactctatgaaatggttaaaaacatgagattctgtcctgtttctgtcrcttgctaacttcagtttcttaacatcgttatttaacttcattaagattcagttttttaattttctacatggtgatagcaagacctacttctaaaggctgttcagaggactgagacattgtagaaacaaacaagtattaccc

SEQ ID NO: 258258 - DNA, 657 bp, Homo sapiens
tttccaacatgtaaactttgggggacacattcacaccatagcagatgtataatgcaaaaaacaacaatttaataaattcaatattttaaatatttattatcaagtaacatctttaatagtaaataataatgaaacaataatctaagactttattactggattatcataatattaaaaactggttggggggataaatagtatagtacccctatgccttataaaagaggaaattaagaagatacttttgttcttaattctgagaagttgaaaaaggtccaggaatgattttgaaaaaaaaattgaggtaaccattaacaaaattaaaaataggacatataccttttatgtgctagaataccaaaaagcaaagaaaacataggaaacatgaatgcctgagaaataaagcaaaaaaaatgtattgacaaaataaactaaacatattagttacaccaaaaacgaagtgtattaaactctatgaaatggttaaaaacatgagattctgtcctgtttctgtcacttgctaacttcagtttcttaacatcgttatttaacttcattaagattcagttttttaattttctacrtggtgatagcaagacctacttctaaaggctgttcagaggactgagacattgtagaaacaaacaagtattaccc

SEQ ID NO: 258259 - DNA, 378 bp, Homo sapiens
tgtggctgctgactgatcagcatggtggttgttggaagttgggatggctgtggcaattccttaaaataagacagcaatgaattttgatgcatcaattgactttttttaatgaaagatttctctgtagcgtgtgctgctgtttgatagcattttatccacagtagaacttkcagtattacagtcaatcctctcaaaccctactgctgctttatcaactaagtttatacaaagttctaaatcttttgttgtcatttcaacaatgtttaccgcattttcatcaggagtagcttccatttcaagaaaccactttctttgctcactcagaagaagtaactcctcatccattcaagttttatcctgagattgcagtcatatctt

SEQ ID NO: 258260 - DNA, 391 bp, Homo sapiens
taaatttaaagtcataaactttagcaataaccagaaacatttaaaaaataaaaaacttccatgactcctaagtcaaatttgaaaagggtctatagagtattgktaatacttgctaattacactgtgttcagtgttttatctgtgatacaaaagggtcacttatctcacatgaaataaaactaacttcagtgaaatcccaccacccacttttcattattcttgtagtcaacaaaattagtccatatttttcaggtttatttgcattactttgtttttcatctttttcttatttattaccacagattgtaaatacttttccctgtctaaataccacaactcttcataacaaatctgaaaggactattttatcattactaatgtcagtcattct

SEQ ID NO: 258261 - DNA, 586 bp, Homo sapiens
gaatctagagaggcggtctggctacagtggctttgcctagctgcggtgggctctgcctggtccaaacttccctgcagctttgtttatgctgtgaagggaaagctgcctactcaagcattggtaatggtggagtcccctcccccaaccaagcttgagcatccctggtggacttcagactgctgtgctggcagcgagaatttcaagccagtggatcttagcttgctgggctccatagggtcagatccgttgagaaagaccacttggctccctggcttcagccccctttccaggggagtgaacagttctgtcttgctggtgttccaggcaccactgaggtaygaaaaaaaaaaaaaaactcctacagctagctcagtgtctgcacacttttgtgcttaaaacccaaggccctggtggtataggcacctgagggaatctcctggtctgtgggttgtgaagatcatgggaaaagcaaagtatctgataaagatagcactgtccctcatgccctcacagcttcccttggctaggagagggagttcccggaccccttgaacttcccaggtgaggcaatgccccaccctgcttc

SEQ ID NO: 258262 - DNA, 569 bp, Homo sapiens
aatattttatacatagtctaagaaaattcaatctttggtggactgaattatgttggaaccaaagactcctatttgaggttgattgcctttaagttgttaaaaattattatggttaatatgtcattgtttttcctttcaatttttaccccattatgtttgtttttttaactgaccttccaataagacagcatttcttattgctctgctcaaattgccaaatcccttcctaagacagctgaaccatcctaaaacattttgtacagtaaaacagagcctttctggttgtttgtaccctggccaaatgcatcytcataagctatatgtttttcaaatttctgtagtactgacagtagaatattttaaaattcacaaaattgggaaaaaatgtttaccattcaaataacatggcaaattaaaccagatttaatgatgatgtagaaaaaccatttccttgaaatactagtctaggctttatttgctgtaattatccctcagcagggggatggtatagatttcccagctgtaccagctgcatggcatgctgggactaaggggaagaacaaactgag

SEQ ID NO: 258263 - DNA, 421 bp, Homo sapiens
taaaattactgacttatagataatatttagcaagttctggaaaacagtgcatagcttctttgaatactgtcatccctctggacaaaggagtctggtaattccaggtaactgctctgtgcctttatcagaggaaaattctgcaaattcttctgcacagggttgagaggatgagctctgagcaaatgcagcaaatgtaagggacttcatgatataaggggagcacaaactatgaacccagatcaaaggccaagaagaaaartcagtgaacatagagtatggatgctgttttattgttctatatgtgaagacttgaagtcagaaatatcagtgttttaactggttccctggtttcactccctcctaccctatcacccattccttcataacctagctcaagatatattctacactcagcaaccaa

SEQ ID NO: 258264 - DNA, 185 bp, Homo sapiens
gggcagtggggctaagggggtcatttgttctctcatatttcagtaaatgtccaggcttcttcccatgacattcccaaaggagcaaaaccagsacactcccatctaaagaatgacatcaaagtgttctctattcttgttactattaatttctgctcaagtgtttgcattcctctcttttgtttcct

SEQ ID NO: 258265 - DNA, 590 bp, Homo sapiens
actgcttctcaatggttcaaggttgctactcagctccaaggcagataactaaaactccaatactgcaaggcgttcccagaaagctgtctttaaggtttgcttcattcctgtttttacctattctgaacttccaaatcttaagtcaaagagtgtccaccttatttaatggtttaaaaaaaaaatcatcactattattataacccactcagatttcaattctgagtggaactaaatagttagtgatgttattctgctttgttcgctgctatcttgccagtgtccagagcagtgcctggcacatagtaaactcaacagatatttttaagtaaatataacatcattaattgtagtccagtattaacaataactgtcattttattgatttattacaagcactctatgaaaaagatcaggcctttctattttaattttgggtcgttcaactagacccaacwgttttgtaaaacaatttgaaacttggcaaatcccaaagcacaactggcaggctcagcttggcagagcttaccagcccagcacttacccttatgcttctctgcccatggccctcacagtgaccagcatgggcctgg

SEQ ID NO: 258266 - DNA, 573 bp, Homo sapiens
ggtactttttatgcaataagattttaagcttctcaaaggcaagagcttgattgtataactggagtttaatgcctacttaattgactcactgtctcttttgttggttgattaattgatagtcttgtggaaatttgttgttttaaacacattagtgatatataatacaacaaaattagcatttgatttcatgcagcttaatataggcaacccaaaatatcaaacttcaaatatgcataatttatcctaattgcaagamggaaagaaacaggaagtttttaaggttaaaaaatgaactgtcacatgtctgttaaccaaagcttttagtaattatttactgacttgcccaaattctttggccttctcagttttagctaggcagataataatctacttaacacagcttcttatgtcaatgtttgtctcagcctttgagcattcagacccaaactgccaatgcccccaggaaccagcagagcctgccacaacaagatctgctttgcagaaattcttcttgatgaccctaacggttgaatcttcttaatggcaaattgaaatctgccatagcaaaacttt

SEQ ID NO: 258267 - DNA, 447 bp, Homo sapiens
agtctacacacctttatagttgctggggtccagcttcttctgtaattgcctcagaaatgccatcctgtgggacacctagtacaataaattgttcaagcttttggaaaaaaaaaactgaattttgtacagctttttggtctggtgtcaagtaaagccacagattaattgtctaaattactaacacaagtctaacacaaactatggtggtttatttactacagaaattgcagtattgttttcattgattatgaggaactaatttttccagaagtatgatgtacaacataaartaatgactagtgttcactcgcaggttgttatacatcaatagtcaataaatagccttgaactgaaattttgtgaagttttgtctctcaccaaagcaaattttacatccactgttgcatttaggaatttatagaaggaagatggatctcataatagata

SEQ ID NO: 258268 - DNA, 518 bp, Homo sapiens
aagtgagggtaaaaaaaaagaacaaaccaacctccaagctagcagaagaaaataactaaaattacagacaaatgaaattaaagtaagatgcaaaaattcatacmaaaaatcaactaaaagtggcttttttgagggaataaatatgattcagagactgctagttagattaataaagaaaaataaggatccaaatacgtataatcagaaatgacaaagatgacattgtaaccaatcccacagaaatacaaaaaaatccacagagactattgtgaataactctatgtacacatattagaaaatctaggggaaatggataaattctaggaaacacacaatctcccatgattgaaccatgaagaaagcaaaaacttgaacaggtgaaaaacaagtcctgcaatggaatcagtaataaaatatctaccagtcaaaaaaggcctggaacagatagattcacaaccaaattttaccagacacataaagaagaacaggtacaagccctaatgaaactattccaaaaa

SEQ ID NO: 258269 - DNA, 603 bp, Homo sapiens
atggtactcatacaaaaacaggcacatagaccaatgaaacagaatagagagctcagaaataaagctgcacacctacaaccatctgatcttcaacaaagttgacaaaaacaascaacaggtaaaggactttctattcaataaatggtacctggataacagcctggccatatgcagaagattgaaactggaacccttccttacaccatatacaaaaaacaactaaagaagcattaaacacttaaatgtaaaacctaaaactataaaaatccttgaagaaaacctaggcaatacgattctgtacataggacctggcaaagattttatgatgaagacatcaaaaacaactgcaacaagacaaaaattgacaaatgcgacctaattaaactaaagagcttctgcacagaaaaagaaaccatcaacagagtaaacagacatcctacataatgagagaagatatttgcaaagtatgcaactgacaaaggtataatatccaaaatttataaggaacttaaattaacaagcaaaaacaagacaactccatttaaaagtgggcaaagtatatgaatagacatttttcaaaagaagacatgcatgccaccaaca

SEQ ID NO: 258270 - DNA, 379 bp, Homo sapiens
atggcattattccaagtttgacatatttcaatgtttgacttaactagtcccacccactgatttgggctttcttcggaaattgcttacatctttggtcaaaccaatctgctaagacctaagacaaaatgtgctggatggatgattgcccccagtaaataacatacaatgtagtttttttgtttgaagaaactgagctttagagagacgaagtatcattcccaactcagcggtccatctagtrcatgatgacttgaagtcttccaatgaagtagcttatgtgctttccattctaagtaggagtcaatattgataaacaccaataagttaggtgaagacctttggacagcatgttacagaaaagataggttagtatgttagt

SEQ ID NO: 258271 - DNA, 538 bp, Homo sapiens
tacatacataaggagagcattagcttctcttggcttcctaaatcaactattgcaatggtcaagggaamtgatcactcttccaatagatggctcccttgtatgcccccattgtctctaatacatgttaacttctagaaattctattccatatgaagaaggaaagttagggagttgttagggaagagactgagaaaagaaactgaaggttaagaagatgatgagagctgatgaatggagagaccaggtaatcaactctgcaattcaagagcacagaacactctggtagcagagaaaatcacaagaacatggaatgaaaataaggttaaataaaatacggttttttccagagcaggaactgttttaaaagaaaatccatcgccttggaagtttgggtgggaaagttaaagatttattttaaaaaataccttctctatactcttgcttatttccactttcttctgtacatcaggctcaacaaactttttacagactaagtttttttctaatataaaaatacaataatccagcaacacaacaa

SEQ ID NO: 258272 - DNA, 578 bp, Homo sapiens
gcagttgcttttcagtattctcacaggtagtgacaactgctttcaaatatttcttgtctatttcttccataagcattgwgtggctttctctttgtctctttccttatcatgagtcctgctactccaataaggatacagaaattccaacaagagtacgttctcatcattcatgatatcattgatgaaccagtgtgtgtaaccaccattaactgctttgtgactgccttgttctaaccacttaactaagtcttttagtaaatactcaagttctccttcaatgcaagtaattgatgtctttctgaggaattacttttagatagcccacatggtacactcaaaaagaaaataaaaatgtcaagcttgaaacttgacatcaacaaatccaaatattaacatcacatttggatataataattaaaactgatgatcagatactaaaaatgaaaaattttctagaagaaagtcctttcaatatgactcagcctttttaggaggaaattttaaagaaagaaaagataactcccttttatactgtggtgcagtataattatgtctagaggtggttgcatattatagta

SEQ ID NO: 258273 - DNA, 578 bp, Homo sapiens
gcagttgcttttcagtattctcacaggtagtgacaactgctttcaaatatttcttgtctatttcttccataagcattgagtggctttctctttgtctctttccttatcatgagtcctgctactccaataaggatacagaaattccaacaagagtacgttctcatcattcatgatatcattgatgaaccagtgtgtgtaaccaccattaactgctttgtgactgccttgttctaaccacttaactaagtcttttagtaaatactcaagttctccttcaatgcaagtaattgatgtctttctgaggaattacttttagatagcccacatggtacactcaaaaagaaaataaaaatgtcaagcttgaaacttgacatcaacaaatccaaatattaacatcrcatttggatataataattaaaactgatgatcagatactaaaaatgaaaaattttctagaagaaagtcctttcaatatgactcagcctttttaggaggaaattttaaagaaagaaaagataactcccttttatactgtggtgcagtataattatgtctagaggtggttgcatattatagta

SEQ ID NO: 258274 - DNA, 552 bp, Homo sapiens
ttctgctagtgtccttttacttagatagctcctcaacttctaaaattcaacaaatccaaaactgaacataccatttcacccactctacaatttgctcttcctttgttttctgtctcactgattggccccactcagttatctgcaccatccaccacatttttatagcgactccctcttgcctttcacatgtcatccacagaatatgtttctagttgtcaccataccccaggtcatcatcaatawctctaacctggattacttcaaatgccaaccaatgttctctttgtccaatcttaccagtctcagctatgttcatgactcagcctacactctcctttttctccactcctacccacatccccctaccctaaacacaaacacacacacacacacacacactcacacacacacacttcagttggctaatttgtgatacaggcttccatttttccccctcaaaggttttactgtccccacaagtccctctagactaggttactggtttttttttctcaatattacccaacttccccatgctttcctttctcagta

SEQ ID NO: 258275 - DNA, 182 bp, Homo sapiens
gaaacaaaaacaaaaaccaaaaaaaccaatgtggcatttcaggttggctgtttgtttgctttgctacycatcaaacttttaacccaaaatccccctgggttaaaaatttatgtcacatattctagaaaataaaactttaattacttcatattgtgtgttccttaatatgtgtgtgtgtttgt

SEQ ID NO: 258276 - DNA, 591 bp, Homo sapiens
gtgaattccaattcaaagtgactgagagcaagagtataatactcaattgaaagtacacactcaagggacagatattgatcagctttgtcttctstttacttgtagaaagaaacagtgtagatgaatctccgcaaaatggagacaactacagaaaatgaaggaaaatggggtgtgtggtaggtgtgggtagagttaacaggtgtcgggggtgaacgaaggctaattaggtggaactgagtcctgattcttctatttctgaaaaacaggaggagactggaggtacaaggggacttaactttgtcttaagaaaaacaaatgacatccttttttctttgctaaagtaaaaagtatattctaaaggatatatatcacatgccaggaaatatttttaagctataagaataaaattgatcaagctaataatatgttataaaatagaaatgatttcaggaaacagttgaggaacctaaaaataaagtgaatttgttattatcataaactcaaaatgaactgtttaacataatactaagcaagaatatgtatacatataattcttgatgtataatagcaactagctatatgcaatgagaa

SEQ ID NO: 258277 - DNA, 591 bp, Homo sapiens
gtgaattccaattcaaagtgactgagagcaagagtataatactcaattgaaagtacacactcaagggacagatattgatcagctttgtcttctctttacttgtagaaagaaacagtgtagatgaatctccgcaaaatggagacaactacagaaaatgaaggaaaatggggtgtgtggtaggtgtgggtagagttaacaggtgtcgggggtgaacgaaggctaattaggtggaactgagtcctgattcttctatttctgaaaaacaggaggagactggaggtacaaggggacttaamtttgtcttaagaaaaacaaatgacatccttttttctttgctaaagtaaaaagtatattctaaaggatatatatcacatgccaggaaatatttttaagctataagaataaaattgatcaagctaataatatgttataaaatagaaatgatttcaggaaacagttgaggaacctaaaaataaagtgaatttgttattatcataaactcaaaatgaactgtttaacataatactaagcaagaatatgtatacatataattcttgatgtataatagcaactagctatatgcaatgagaa

SEQ ID NO: 258278 - DNA, 615 bp, Homo sapiens
gctatatgcaatgagaaataacacaggtattatctgcttgcagtgtttttattagatttaaaaatgtgcatccagacttacatgcgtatttttggagcttttataaagmtagacaaatttaaaggaggcaaatagcacttttagaagatgaggataaaagggattttgataaaagaggaataacttacagaaggataaaaactactggcaaaacaataagtagctgttctccatatctattgagaacaaaacaagagaaaataggcttacattgtagacaaagatttaaattgtatgcaagttaaaactttctaacgaagagaatttagagatacttgttggatatctttttttggctttgtttggaaaattattaagtgtagaataagactcccattgtgtttttagctatgcccaaattacataaggttgaactctgtgaaagtttgctgttgcatccttaatgttagtgtttatgtataaccaaggatactgaccagtttatccacatcaattttaaagacgagagcaaataattgcatcaggagagtggggttaattatagagaagaatttcctgctggagaggaatgttaagcatcaaaataaaatttta

SEQ ID NO: 258279 - DNA, 527 bp, Homo sapiens
tattacatgtagttaatgaaaaatgtctaatttctttttgatgttatgctaattgcagattttttaaaggcttattaaaatgcatcattatttgctagagttaaaaagattagttgctcccccttatgcataagaaaatggaataatccttgtttctgacaattttctggaggamaaacaaatttcaatcatataagatttgcctttcaataacacatttatgtcctttatttggcctccagtaaaatattattatattagatcacatttctttagttatatacaaattaggcatattgcacaatgtctaggaattactttcctaatgtttcacaataactggaattaattgaaatcctttagggtatatgaggccagaagtgtgtcgtgttcatggtatagtaggaaataattagatatgtagtggagagacactcccaattaaatctttatgggaaaatgattttgaaattagctttaagaaaattgaatggaagcagatcagaggcaaattgtaacactccagc

SEQ ID NO: 258280 - DNA, 614 bp, Homo sapiens
tgggaaatgagtgttttaaggatatttgaggctgggcagggtgactcatgcctgtaatcccagcactttgggaggtcatggccggcagatcactttaggccaggagtttgagaccagccttgtcaacatggtgaaaccccatctctactaaaaatacaaaaattggtcgagcgtggtggcacatgcctgtaatcccagctacttgggagactgaggcaggaaaattgcttcaatctgtgaggcgaaggttgcagtgagctgagatcacgccattgcactccagcctgggcaacaagcgtgaaackctgtctcaaactaaataaataaataaaaaaggatatttgagggaccctatccagatgtggaccctgagcatttcaactgcaaaaacaaatttcctctatttagtacttgatacatacaactatttttgaatctctactatatactagatattatttctggtccttgagatgtattaatgaacaaaaaaaagaaaaaagaaaaaatcacttactttatggtgcttacatgttcttcttcctagatttctgaaaattattctcctgatttccttcagttactctccttcctgccaacattctttaaatgct

SEQ ID NO: 258281 - DNA, 577 bp, Homo sapiens
gtgtatatcattcttgccttcaactgtctcctatatgttgctttaaaatctgtatcttccacttttctcttgtataccagtttcatgtttccgagtgcttactcaagtccatctggaaatcccacagttacttcayacgtaatgtgtcctgaattaaagcactattaacctccacttcccttccaaagaaatctttgctttccttagtttcttttcctttctatcagcatcttgacactgatcaagaagtcaaccaatgtaaatgtctatagtgttaagtgattaatagttcagatttctagactcagacagcctgtgtttctatcccaactttgtcaataattagcttagtaatattggcaactgatttaacctactgcaaccataatttgcttagctgtaacttggggatttagctgctagaatgatggtgatagcattttagggtttagtacatagtaaggtgtaaataaaaattagtttttggtattagttttccttttattattatatttttatagctaccactactcagtcatcttaaagtgtgcttgggaaagtcctagtgtgtcacaaa

SEQ ID NO: 258282 - DNA, 577 bp, Homo sapiens
gtgtatatcattcttgccttcaactgtctcctatatgttgctttaaaatctgtatcttccacttttctcttgtataccagtttcatgtttccgagtgcttactcaagtccatctggaaatcccacagttacttcatacgtaatgtgtcctgaattaaagcactattaacctccacttcccttccaaagaaatctttgctttccttagtttcttttcctttctatcagcatcttgacactgatcaagaagtcaaccaatgtaaatgtctatagtgttaagtgattaatagttcagatttctagactcagacagcctgtgtttctatcccaactttgtcaataattagcttagtaatattggcaactgatttaacctactgsaaccataatttgcttagctgtaacttggggatttagctgctagaatgatggtgatagcattttagggtttagtacatagtaaggtgtaaataaaaattagtttttggtattagttttccttttattattatatttttatagctaccactactcagtcatcttaaagtgtgcttgggaaagtcctagtgtgtcacaaa

SEQ ID NO: 258283 - DNA, 581 bp, Homo sapiens
actgaatacacagagagaaaaactctagaaatctgcggatgctccaacttgagtcttcagctgactcaacacatgtatatgaggacactacctatgctcaggagaactaccccaaaagaagagaggaaaaatgtatagatctataggggtgtgaacagtctgtgtgctcactaatcacagtaggaaacatactaattcacagggtgtagggtggcatagtcaggagattgcctcagaaatctgccaaaaaacaacagccatacattaaagtttactgtgttctaaacattttaaacaaaacaaaacaaaacaaaaagcctcaaaaggatcagtttccaaagttggaggacaggcagtatctgattttgagatcttttaaaactctacagtaatcaagacattttagtattggcataaaactagataaataagtcaataaacagaaaagacagtccagaaatagacccacacgtatatatgcaattgatttttgacaaaaatgycaaggcaattcaatggaaaaagataatcttttcaagaaatgatgcaggaaaatttgagttacaaaaaacaaaaaacat

SEQ ID NO: 258284 - DNA, 575 bp, Homo sapiens
actatggcttaccttttacttaaattattcttcttgaaatctgtgtttttcttaagcaacaacaaaacaaaacaaactgcattcaatttcactgacaggatccattgaactggttgtgtagctccatagccaaaattgtattgtattaaatttgtgttttacagtttaattggaatgcctagaatcaaatttagttcttctaatgaggtctcatatctaattgaacaatatattggtctttatttttgttacaaaataatggaaaaatatatgtcccctattccacttcccgtatcttatctatcagcatctacaaaggctctcactctctattgacaagcaattactggccaccaaaaaacaattttaggatagttttcatgaagaaacgctcattttaaaaagaggtaaacagttaaaacattttatcaattctaactatcytggtttttaaccaagacatttatttacattacaaaacaagcatttgcaaattacaaatttctagaaaaaaattatcttttctaatgaaagaaaatattttgaatgatgaaaatagcaagtagagaagtgta

SEQ ID NO: 258285 - DNA, 495 bp, Homo sapiens
ttgtctattttcatattttatttcttttcagttttaagagtggaatcgtatgtctgcaatattgtcagaaaatctggcttctagaactaactcccctaccgactatgtgggtgacttgtgcaagccatttaacatcccttkctttcagttgtcctattgctcaaatgagaataatagcatctatcatttctgctttgttctgaagagcaaggtatgtatgtggacaaactttaagtatatcaaatattaacaattataaatcattatctctgtgtgatacagagtttgcactagtgagtcactgtgagttatggcttttgacttgtccatatcttttagaatgaaagttaactattagtaaatatctttcatctggtaaccactcatgactatctctaagtgttcccacactggtccaaatcaaagagtataaaatgatgaggcacatttccaataatcattctgctttagggctagaactttattgtgcaaaat

SEQ ID NO: 258286 - DNA, 580 bp, Homo sapiens
tatcacattgtgttgtaattgccagtctgtttgtttttttcactcaaggacaggaacatgatgcatttctattttttgttcccatcgccaataacaatttgccaactgaatacacaatatagcacttattgagcacctgccgtaagctgatttatttttaaaacaaccctatggggctaaatattattattccaatattcttcatgatgaaactgaaggtcaaagaggttagattgcatgtctatggtgggcaaagctggaatgaaaactcagaatgcctgcctccaaattcctcagcatttttccttccatcttatattaaagaggcttaatagactggatattataatgagaccattagaacatgaaccatatgcatcaaaggatcttctggaaactgaagatgatgaattacaaarcttttgtgatcataaaattgctaaataagttgaaatattgaaaaacatatacaaatcttatttttggcatatctcctttttacttaataattcaaaatagaaaaaaaatgctgcttttttgagaacattttattttagttctccttttcttttccctcccc

SEQ ID NO: 258287 - DNA, 630 bp, Homo sapiens
ctgttgcacagtagttacgcctttcaattaaactctaagcactgttgtctcagtgggcttcagcattccatcaggggcttgaagcctgaagtccgaaaatggagaaagaagtaccagtagaaaaatgtagaaactttattactgatgtatctttctgaccttagtgacttctgcattagtaargataactctagttgctgtgcaaacaagttcccaaatttcagtggtttaaggcaatggaaattattcacataatctaccaaattggtattcccgatccatgtgtggtttgcctccaaatgatgattcaggtgctcagtcttgttccatcttgctgacctataatttttaatgcttttaacaagatcatcctggaaggtaaaagaatgctgaggatcacatgggatgaatttttatgagcagatctggaagaggcacatattatgtctatttttattcaattggccaaaacttaatctaatcacctgaccattcccaactacaaagggcaattgggattgtagtttagctgtgtgcaaaagagaaagaggaaacaggtttgttcatatttttgtatcccaaagtacctaaaacattggttagatattttatttccagaatcacctccta

SEQ ID NO: 258288 - DNA, 630 bp, Homo sapiens
ctgttgcacagtagttacgcctttcaattaaactctaagcactgttgtctcagtgggcttcagcattccatcaggggcttgaagcctgaagtccgaaaatggagaaagaagtaccagtagaaaaatgtagaaactttattactgatgtatctttctgaccttagtgacttctgcattagtaaggataactctagttgctgtgcaaacaagttcccaaatttcagtggtttaaggcaatggaaattattcacataatctaccaaattggtattcccgatccatgtgtggtttgcctccaaatgatgattcaggtgctcagtcttgttccatcttgctgacctataatttttaatgcttttaacaagatcatcctggaaggtaaaagaatgctgaggatcacatgggatgaatttttatgagcagatctggaagaggcacatattatgtctatttttattcaattggccaaaacttaatctaatcacctgaccattcccaactacaaagggcaattgggattgtagtttagctgtgtgcaaaagagaaagaggaaacagstttgttcatatttttgtatcccaaagtacctaaaacattggttagatattttatttccagaatcacctccta

SEQ ID NO: 258289 - DNA, 541 bp, Homo sapiens
cgacatattttcattatttgtatcatggtaactctgtgatgtgagtaagggtgacagtaacacattccactgataggggagaaagctgagatacagaagaggtacttgcttataccaattatattattaatcagcagaagacacaaccacctaaatttaggctttctgattscttatgctgtgttcttcctactattaataccctgcctgctagaccaaagcaaagctttatgagtcaatcagtttaaatatcccaaaacttcatagcatgaccctattattacttatagaattgagtttaatataacatggggcatctttgcacctcataaagaggtctagttattgaagttcaaaaaggtccttgttacagagtagtgtgcctggaagatatctaacgcataggtcaagagagagttagtatcatagaggaaggacttcaggaaagagaaagtacttcataccagataaaagcagagggtatgtctgttaatacctcagctggattgtccctcagattttctaaattgtctgatcgtac

SEQ ID NO: 258290 - DNA, 475 bp, Homo sapiens
tacaccagtaaaataaaactttaagaaaaacttcttgttaatttagagatttacatagagaacacaaaaactatggctacagaagctgtgtccttacaacagtaaggaggttaatggcaaagcctgtgcttttaaccctaatactggacagttctaagtaaagcaagaactaggccgattagtacagtatcttgaatttcaggaaatctggatggctgtattaagcacagggatccgatttctcagaagctcatacttttccaggttttagataatgactgtctatatgttcaataattggaaatagtttctaagtaatagaaaaacagttttggagaaagaactaaagaaagcactaagtrattcatcaataccaatttgggtgtatgatctgtcaaaacagtaaaagagagacttccaaaagaacaaatgcagagagtgcatttctggaggcctaaaatctaattaaaattgc

SEQ ID NO: 258291 - DNA, 523 bp, Homo sapiens
ttgttatatattcgataacaattaggctgaaaatctgactctaaccttggtcttttgccttctttaccaaaattctactttcgtgaaggaaatttaaattactgtggcatgagcacactcgaaactcataactaaaggtgtactaaggttcttagttgcaagcaacaaccaactctaacttargcataagaagatttgtggagagattattgagagcaaattgacagatatgactgtgtagctgaaagcactccatgattcttcaaaatgtgaagtgggaatcagaaaacaacatcttgtagctgaagcaatctgatctagtgccatgtcactcaaacctccgcttgctctatattctgcttcgcatcagaaactcagtattcaaatgtcccagaaagcttgactgcttggccaagattaggccacattcccattccctccctgtactggaaagagggttctgaacttatctcatgaagttggaattgtcttcttccatgtctctctataatggagaagagag

SEQ ID NO: 258292 - DNA, 563 bp, Homo sapiens
aatgggaaaatgaggacagggaagtaagaagaagagaggcaaagtaagtacacagacatgcccaccagaacacgctgtaccaacaccaaagacaaattgcaaatttagctccaaacttcttaaaagccaagtcacagaaatggaaatatgatgcattaggagactcatgtttgtccatacattttgtgttactgcatgggcctgctgaaatttctcatatctgtccttctcagaaggatagtgggatataatggccaacattgtagcacatttttatctatctatctatctatctatctatctatctatctatcttccatcatcttctatcatctatatatctagtaatatatctacagtaattctttgatcccttaatcctttgatgtaagctaaagrcatgaaaattaagccagagttcaatatatgatattcattaagggggggtctattaagtccactcatgttgttatttaaatttggctgatccaaggataaaaggtatgctgcttttagtaataaatagactgcttatgtttcagacaatacacatcaataccgtt

SEQ ID NO: 258293 - DNA, 536 bp, Homo sapiens
ctcatgcattaacagtgcctaccctgttcttagaatatatccataatgcattcctcctacaagaaagtgggaggctttgaagtgcttattatgtaactgaagggattatgcaagtttttgttgttaaatggactattttttaaaactcaattcaaatacgttaaaaatcccagagtcagtatctaatggtcacagaacamgtaaatataatacttcacaatacctcatatctagcatatagcatatctaaaatctacattcagttaataaatattacacttaaatctctgaggtcattatctctttttagatctctaaatatattttgagtgcctactttaaagtctacaattcttcagactaattaaactgagaaaattgcatttgcaatggatgatattcatttctattaagaaaaccaaaaagtatacacacaaatatatattttggaaatatgtatacatacatatttatatatgtacatgtgtatatacatatacatatatacatatatattcatctttcctttaggagaa

SEQ ID NO: 258294 - DNA, 536 bp, Homo sapiens
ctcatgcattaacagtgcctaccctgttcttagaatatatccataatgcattcctcctacaagaaagtgggaggctttgaagtgcttattatgtaactgaagggattatgcaagtttttgttgttaaatggactattttttaaaactcaattcaaatacgttaaaaatcccagagtcagtatctaatggtcacagaacaagtaaatataatacttcacaatacctcatatctagcatatagcatatctaaaatctacattcagttaataaatattacacttaaatctctgaggtcattatctctttttagatctctaaatatattttgagtgcctactttaaagtctacaattcttcagactaattaaactgagaaaattgcatttgcaatggatgatattcatttctattaagaaaaccaaaaagtatacacacaaatatatattttggaaatatgtatacatacatatttatatatgtacatgtgtatatacatatacatatatayatatatattcatctttcctttaggagaa

SEQ ID NO: 258295 - DNA, 560 bp, Homo sapiens
cctgcaccaactgaatcaggaaccctggtagtgggacccagcaatccctgtgttcataagccctctgggtgatgctgatgtacgctaaagctggaactactgactagccaatctcattttacagtcaaagaaactgtggtgcagaaaggcaaaactgactcatccagagtctcagctgattcagagcaaaggctaattgtgtttccagggcatagtttttgctgtgctacattttctatccatgartttgttccttcccatgaccctccttccatcgatatttatttaatgtgttcctcctgtttaactgcactgtgttaggagctggagatgagactaacaagacacaactccttcccccaaggagcccacagtccagtgagacagagacctacaaatgcattgcagtgcagagtgggataggtgctatgttgtataagggtaggacaactgctgtaacaaagaaccctgggaattcaatgaatctcattcacctcaccatccagggtggatgcttacagttgtcctgttttccttgtggttgttcaggaacccagact

SEQ ID NO: 258296 - DNA, 637 bp, Homo sapiens
tgcttctgctggctgaaggaaggtgaggaggtgggaactttaggggtcctgtaaccatttctaacccagttattctacccccatatcagatctcttctacccttactgtttccattatgggtttaggccagttgttctcaactgagtgcaattctgcctctgcagtgtctggcaatgtctgcaacttggcaatgcctagagatagttttgcttgtcacaactgggggatgctactggcatctartgggtggaggccaaggatgttgccaaatatcctacagtgcacaggacaatcccccacaacaaagaatgatctggcccaaaatgtcaatagtgctaagattgagaaactgttacagaagagccctcagccttctctccctttctctcaattacccatagcaatttagccttcttaccattatcaggaataatccttcacatggtcaaaactatatcaacaggttctgctaaattagtccattaattcagatatcaccagggttcagggtggcaatataaattgagtgaagtgagtcaggagtaagatgagaagtgggcactggcccatctgcttcagtagtagggaacaatggggtaatggtggggactgtggcaaattggagactgcataccc

SEQ ID NO: 258297 - DNA, 637 bp, Homo sapiens
tgcttctgctggctgaaggaaggtgaggaggtgggaactttaggggtcctgtaaccatttctaacccagttattctacccccatatcagatctcttctacccttactgtttccattatgggtttaggccagttgttctcaactgagtgcaattctgcctctgcagtgtctggcaatgtctgcaacttggcaatgcctagagatagttttgcttgtcacaactgggggatgctactggcatctagtgggtggaggccaaggatgttgccaaatatcctacagtgcacaggacaatcccscacaacaaagaatgatctggcccaaaatgtcaatagtgctaagattgagaaactgttacagaagagccctcagccttctctccctttctctcaattacccatagcaatttagccttcttaccattatcaggaataatccttcacatggtcaaaactatatcaacaggttctgctaaattagtccattaattcagatatcaccagggttcagggtggcaatataaattgagtgaagtgagtcaggagtaagatgagaagtgggcactggcccatctgcttcagtagtagggaacaatggggtaatggtggggactgtggcaaattggagactgcataccc

SEQ ID NO: 258298 - DNA, 617 bp, Homo sapiens
ggacaatcccccacaacaaagaatgatctggcccaaaatgtcaatagtgctaagattgagaaactgttacagaagagccctcagccttctctccctttctctcaattacccatagcaatttagccttcttaccattatcaggaataatccttcacatggtcaaaactatatcaacaggttctgctaaattagtccattaattcagatatcaccagggttcagggtggcaatataaattgagtraagtgagtcaggagtaagatgagaagtgggcactggcccatctgcttcagtagtagggaacaatggggtaatggtggggactgtggcaaattggagactgcataccctgtgtataaaggcagccctaacttattgccatgcaggcacctgtgttgataaatgtcagattccttgagagagactcaatatctcgcctccctcatcccacagtaatccccttttgtgttattttttagttgagttgttacatacacacgtgcaccaaatttaagtgtgcagcacaatgaatcatcaagataatctggaagaacgaacttggatttagactaccaggttccaagacttacatagctacaagtaattaagacagtgta

SEQ ID NO: 258299 - DNA, 566 bp, Homo sapiens
ctatgggacactgtcaagcataccattagttgtatagtgggagtcccagaaagagagaaaacagataaaggggcagaaataatgggtgaaaccttcccaaatttgatgacaaacatgaatctacaaatccaagaagctcaatgaattccaagttggaaaaactcagagcatcacactaagacacctcataatcaaactgttgaaaatcaaaggtaaagaaagaatcttgaaagtagcaaaagctcatcacgtacaagggatgctcaataagattaagaggtgatttttcaccagaaaccamtgaagctagaaaatagtgggatgacatattcaaagtgctgaaagaacaagtatcaaccaagaatttgatattcagcaaaactgttctttagacatgaagtttcattctcaaataaacaaaaatggaaagaatttgtcacaagcagacctcttctacaagacatattaaatactgaaatgaaagaacactagatagtaagttgccacatcaagaaataaagaacaccagtaaaggtaactacataggtaaagataaaaaacagtat

SEQ ID NO: 258300 - DNA, 588 bp, Homo sapiens
catgaggaccacttttctttcattatctcctcataccccatacatttgcaatccaggttaaaataaagattaaaataactactagagattgttggtaacaaccatttccccttcttccccagtttggatagctgggttcaaacaacaaatgtttatcaatcctaacagtctcatcagcctttcatatttgatgggtggtttccaaactcatgcatttacagatatattatcccatgcaggataaaagtagagatctggcaactatttatttaatttggtcaggcaaggcagtcaaagcagacttctcttgcccaaaaatttacatgaaaggactgagttgtctgggttgacagcctagcttggccaagttaaacagctcattgccaaaacctccactttacagaggtgtaaagacccagtaagtctttgacattcaatagaaaacratagtcatgtattatttatagctagatataatatcaaaatggcactagagaagcaatttttggcatatagtggtagagggcacagcgccagtctaaatctgatgcttttattttagcttttgtttttattatggtcacacca

SEQ ID NO: 258301 - DNA, 553 bp, Homo sapiens
tcccacagctgagcagagccccatcccaggctgcagaaagtagtccagcaaagaaggtaaggtcagcctgaggatgctgtcagatggcgttgcgagtcccaccccgggcttcttatctctattagctgatctattgttttaaggtttctgtgtcctgaaatgaatgtcaatgatccagatttcctagaatgtgggttctttgtgaagattggggtcctgaagattcctgggcttgacccttgatgcattttgtacatgacagtacatactcaacctccttagccccccagctaaacatggtggccttgtttatggcaagagctaaaagggctgtggggagggacagatgtctttagcaamaccccatccacctgctaagcctctgtgaatacctcttggggtggggtagtctctcctttttggtctttgtaccatggtttcctcttgcatcgtggcattttcacctggcatctgcccagccatgccattgggtcacctgtaatttgctcagtaagtacccctcactcatcatgctctccattcatctcctcac

SEQ ID NO: 258302 - DNA, 407 bp, Homo sapiens
tttttaaacctcccagtggccggacctcagcaccccatgccaaaatctctgggaggggctccaggcctcagcacgttcaaagctcccccagatgattccactgtgcagccaagggtgagaaccactaggctaaaaccctgtcctcccgtcagtttmtgctccccagacagaactcctttggtaggggctgtttctctcccacatccctaccagaactggaactggaagtgagcaggaggcttgctccccatggccacttccagaacactacagccattttccctacaatctggctttccaaatctcaggcagctcctcaaacataccaggacctcttgcaagcctgtttctctgcatttgggttttttttttttttttaaatctgcagtaaagctctgtatctttta

SEQ ID NO: 258303 - DNA, 595 bp, Homo sapiens
gaatacagatataaaaactgcaaaacatacatacatagagagcacataatccaaattttaaaaagtaagtctcagctggtaggccaccattgtcttctgagaagtaggatttttaaaatcattctgtgttgatggagcactgaattaaatcactaataccaattgcgctctgccaaaaggtttgaaacacagtgaactgtggcatggttggggtgctagcrgtcatgagctttccttaggaagtgaatcccacgtgcctctgcttcccataagagcttctacttctacttccaggggagacacatgggggaacaggccaccatctggcccttggcttctatccctcacctacaagggccttcccttggaagagacagacctatctcatcagtagggcttggatgaagactcagctgcatggggggccttttttggagaggcagattttctcttcctacttgtgtgggaaatctgggatggccaagcctgcctgtgactggaaaggtgagtgtctaaagcccatctggtcacaaatctaagacatgtgctctgatcagctatatcagtaataaagctgatattcaggccatcaatt

SEQ ID NO: 258304 - DNA, 555 bp, Homo sapiens
caactagtacagactagtttgtaaaagatccattcatccttttacaaaggatgagtaaatgtgttgaccacagaaagaatgcctacaccttttcttcctacctaaatgaattactctattgtttttaaatacacataaatataaaaatatagatatctgtatcttacataaacaaggaaacaaaaccccaatttggaaaatgcacatataaactaaaggataactctttgacttacaaagagatgaggttccttaaatatcagtatttcaagcatataaaatatgatcagacttaaatttactttttcaggattgtgtctagtaggcaaaggagggaaaaatgtcactaacagccaaagcaaaacagaaaacacacayatggtatcctcgttatcctatcttacactgcagttctaccagtgaaatacagtaccaataccatttcccttccttaatggattaattctattagtgtctctgtatttcccctctgcacctctcttctgagtctcacatcaaccacagctctgccttactggctttctctcttgtact

SEQ ID NO: 258305 - DNA, 332 bp, Homo sapiens
aggagcctgaggcaggagaatggcgtcaacccgggaggcggagcttgcagtgagccgagatcgtgccactgcactccagcctgggcgacaaagcaagactgtctcaaaaaaaaaaaaaaaaaaaaaaaggaatttttctttttcttatggatatgaacaccagactgaaggtagaaagaaaaaatcaagtgcatttcattcagcttctgtctcttaggaacagcctatcttttcacttcaaagacaggtgattgcaaagaaaatgaggcagcttctaataacagtgattatggcwttactagtgactatgcttatatagaataacattcttc

SEQ ID NO: 258306 - DNA, 490 bp, Homo sapiens
catacaactgccattctgaaagcttacattgctgtggcactttattagcttcaaaactgtcaaaaaacaatcagygtgactgtctgctgtctgcaggggagggggatattcaacagttagaatctatattcatatactggtaaacattttgaaactgtccccttaagacccatgaataagattatggaatgttttcttagtattcaatgtctatgtaatagaaggaaaagggattagctggaggcgaatatgcattcacaaatatttgttattgaaaattgcaagaaaacttgctcattcatttataagtattttattgagatttttattaaacctccactacatactatacactaaggatacagcagtaggctagagagaccaccctgctctcatggagcttgcacatgagtgtgaaagacaaataccaagtgagtttacaaacagttataaaagtctggtggtggtaagtgtgaagaaggaatatgaa

SEQ ID NO: 258307 - DNA, 527 bp, Homo sapiens
acaaaacaaacaaagaaaagactgacatagcaaaacctggagagaattcaaaaatagaccaacaattgacttcagttttagcattttcagctacaaattaaatgcacacaaacatacacacgtgtgcacacaaacacatacaaattttaccatgctcatacagagttctaaaaagcataaaattttagcacaaaataaaaatctataaaatctgacatagtatatttgaataagagtgaagtagaaattcttgggaaaatgtacctgtacgttaacccatagtaacataaaaaaagatactactaaaaactgatagtaacaggaaaaaaaattcactactaaatagttttgaaagcagattctgtatgtatgagcggtttagacacacctaragaaagaacccaccaactggaaaatagatctaagaaggactcaaaatacaatattgagaaacaagaagactcaaattagagaaaagaggataataaaaccacaaatacagtaagcgattcaaaaatctacatcac

SEQ ID NO: 258308 - DNA, 562 bp, Homo sapiens
gacccaattcgtgggcaatcttttcccatcgacctggagtccctcctgggaacttaaccatacttcttatcagttggctgaggtcctcttctgtccattcaggtgcattttttcttctgtgttcagttcctgttttccaaccaatcatccatttgttcctcaatttcttctatagaagttccatgatcataagagtgaatctatatactttctaaaggtgtgtatataggaaattcaggttttagttttttaactttattctgtttggagrcaccatgtccttggactttaaaccttcacagatattttttaaactctctttttcttcacttgtgtaaaacagccaggttagaagggactagaataggacagttaacttttcctccagatcagctgagccctttgttacgaagaagactacaggattttaggatggttacttttcccttctgctgtggccatagggatctttactgtattttcactgagataactggtggggttatctcaggggttccccactgaggaactggtggggttcctggaggtgaaattcacaaaa

SEQ ID NO: 258309 - DNA, 605 bp, Homo sapiens
ataaaatatactggtacactttcaaggaatcagtacatttagctaacatcttctgagaaatgataatacagagcttttgttttctactctaatttcttcaaaatrtatcgctggagactacattctgtagttcctaaaggagagctcgagcagacctgtaactctgctgctctatttcctatataacaaatattttcctgtaataagagttaattgtaaacagttcccataagagtataagaatgttcagggaaagatattaaattattaaacagaattggagttaaacttaatttaacccaacccgtgtctccttatccagctgggcttgtggcaagctgaaaggcagaatgggaaaagcagggaagtggtgtgtttctcttctacctttgtctggaacttgtctttgtctttaattttcagcagtttaactctgaaaggtctatgtgtaggttctttgtatatgttcttatgggtttacgggtcttttctcataagtaggttaatattctcataagtttttagaaattccgaagtattatcagttcagagattgtatcttcctgactccctctgtcctatttttcagagattttaattggaaa

SEQ ID NO: 258310 - DNA, 641 bp, Homo sapiens
atcaaacagagcatctgtgaatttctatatatgatatctggcattaaacacaaaaaaagtatgaggtatgatttaccaaaagcaagtgaccaaaaaccaagataaaaaattgacaaatcagacatcacagcttacagacaagaattttatataatgattaatatgttggcaagaatagagaaaaaaaggagactatcaatataaacttcaaatcttaaaagattcaatttaagtgtaattttaaaacctcaaaagggtccattcaaaattctagaagttaaaaattatgtagctgaatactctggttccagcagcaacaygtaaagaagtgcttggaagttgtcactccagtccttacaatgagaagcagcagaacaaaagaaaatcaatgacttttattgaactcgtcagagaactgagattacagggaaaattgccagtcggaaatctgaagggacaaacaaatcaaaaaccacagctaagaactgcttactcagagcaggagccatgggaaccataaatgtgtcgggacacttaaatggtaattttgataaccatgacaataaaaaaatctaaggaacacagtcttgggagaagccccacattttgcaagtctactatgttttcaaggtggatatcct

SEQ ID NO: 258311 - DNA, 527 bp, Homo sapiens
aaatgtaatcaatttaaaataatatatctttgcgtttttatatgaagatttaatttcagctgaaatgactggctaatatcaatattacaaatggcataaccaaactgttaaattgactcacagtctaaaaagtaagtatggaaggcaaatttccgctattaaactaataagcaaggagcaccacttgtagtgcaatgcatttttattttaggacttctgaataatagagcaacattaactgggacaataaagaataaagcatcgtgaagtgtggcaaaatgaattcatcaaaaatgtatgaactactaaaaaagtttaaactgtacataaacacataggtcttggacgattcayagaaaagtagtaatccagataacattattgtattagcaaaaagcctggactttgtgtgatatgagcaagattttgaacttgagctaaaaagcacatctatttgaaaaagaggatcttaatcatcaaagcaaggcagcctaggacagagataaaatggaaaataatgtttattt

SEQ ID NO: 258312 - DNA, 555 bp, Homo sapiens
aacttagctgaaatcacatatttttcaaatagtraaactttggtttgtctgtcccgtcaagtatctagtcactgcattctacttaaaacacactaggaaacacactgtattactttaagattaaattaattctttattctgatattaactccttattagcaagaaattcactaaattttgaaattgtttttcaccttccctacctctgaacctacaagctggcccctttttctcttttgaagctgtgggaagataaggataaaggcagatttgcaagtttttggcagcattaattgcagtgtctgaagcaaattcacattttgcagccttgaaaaatgaaagatgcagtgagggggcgaagatggaggacaactgagaatttctttctgctttataccacttactgtatgttgatttctagtaattaaccttgagcaaaatctcatatttcaattttttaatttttagactaaaatttgatacaggtttaatatatttttgtgtaatttctgtagcctttttccccatgatttctcagaattacttataattgcc

SEQ ID NO: 258313 - DNA, 555 bp, Homo sapiens
aacttagctgaaatcacatatttttcaaatagtgaaactttggtttgtctgtcccgtcaagtatctagtcactgcattctacttaaaacacactaggaaacacactgtattactttaagattaaattaattctttattctgatattaactccttattagcaagaaattcactaaattttgaaattgtttttcaccttccctacctctgaacctacaagctggcccctttttctcttttgaagctgtgggaagataaggataaaggcakatttgcaagtttttggcagcattaattgcagtgtctgaagcaaattcacattttgcagccttgaaaaatgaaagatgcagtgagggggcgaagatggaggacaactgagaatttctttctgctttataccacttactgtatgttgatttctagtaattaaccttgagcaaaatctcatatttcaattttttaatttttagactaaaatttgatacaggtttaatatatttttgtgtaatttctgtagcctttttccccatgatttctcagaattacttataattgcc

SEQ ID NO: 258314 - DNA, 556 bp, Homo sapiens
accaaccaaaactcccttgaaactgtatgtcccctccttctactactacctttctctcctcctcctcccttcacagggatcctcaaaccatctgcattcactgaattcactcctcgctttttaatttcaattttttttagagagggggctctcgcctccttggcttccgcgttgtcaaaaccattggccacttcaggccccccacactgcctgccatttgacagcagggatccttccactattcctagctccttctagggtgtcttactgtactgtgaggggtaggaaacaaaaagctacattttgtggacactcttgaagttgggttatgcaaattaggttttcagaatctagaaagcagatgtgagacaggccatattttttgcagttttctttgttttctcctgggaaacaagatcattgaagacatgggatgttcgtgcatcagctttccactatccagtccccrctttgtgggaatggaggacacagttgcagttatggtggccacagtactgtgttacaaaacccagctaagttctacaggtggctttac

SEQ ID NO: 258315 - DNA, 604 bp, Homo sapiens
  misc_feature (1)...(604): n = A,T,C or G
ttattgcattttgctttattgtgcttcacagatactgtattttttacaaattgaagattgaagattcatggcaaccctgcgtcaagcaagtctatgggtgttagtttttcaactacatgtgctcacattgtgtcacattttgttaattctcataatatttcaaactttttcattattattatatctgttacagtgatctgtgatcagtgatctttaatgttactattgtaattgttttggagcaacacaaactatgcccatataaggtggtgaatttcatcaacaaatgtggtatgtgtgttccaatcactctattgacttgttgttcccctttttcttttcctttcctcaggcctccatatcccctgagacccagcaatattgaaattgggccaactaataatcctacatttaagtgaatgtaggattaaacatttaagtgaaaggaagagyctcatgtctctcaccttaaatcaaaagctagaaatgattaagtttaatgaggaaggcaagtcaaaagcaaagacccactaanagctaagcctcttatgccaaacggctaagttaagaatgcaaaggaaaagtttttgaaggaaatttaaag

SEQ ID NO: 258316 - DNA, 593 bp, Homo sapiens
actggggatattgaacagtggtaaaaaggcagttactataaaattttagtgttgtcatagagatcctgaaatttaaaacagtaatgtttattaaatgaccaagataatttaaagaacttaataaaaacctgccagagatgaacaatacactacatgtgcctggggctagcgaggtcactagrttaaaaaatacattaaaaaacattagtatggtgagattgtgtttaaaatttttctttttaaaaatgtattatcattttcttatatcatttttataagctttttaaaagatggaaactaacctatacattgtatacatacaacccttcctgaagctttcctccagtgcattcacctctctgtggcttgacttgttccttccttcatgttgaatgccaatgctcaaagagggagaaaataccgtcggagggtccttaacctttctgccccactccacacattttatagaatagttactgtctcttaggccacttaaatagacaacctaaaaatggtctagccaggtagaaatatatgtgtgcatattctaacatttaaattttttccctcagttgccagttggaatgcttgtt

SEQ ID NO: 258317 - DNA, 540 bp, Homo sapiens
aagatagatacaaaaagttttagtacacagcagactgaactggaatcaactatttattatattactcaacaaatatattgaacaataattagatattgcactatgcactgaggytacagacagatgaaagatggctaaacaagagtttatgtaaatactgctttcctaatagtgaagagaaaatgaactcagaaacatacagaaagtctttaactacctggatattctcacacagttaagagtaggggatatgataaatgttctacttgactagttgacaatctctcaggaggttgaaaaagcaatgaaatgacaggtttctctctcaacaccattctgcctcaatggaagaaatggctgattaaggaaatcattgagaccttgggaaaaaatgacaccattatacaggatattaagtagttgtgtataacatcaagaaagtaaagttcaaaaatcgcagggaaaaaaaaacagaaaaaaaatgtcaagggaaagatttaagattttccagaccatgtcttgagtactgaaataggcata

SEQ ID NO: 258318 - DNA, 517 bp, Homo sapiens
gacaaaaaccagcaaaacaatgactcacatgaagcaataagtgtgatgaagaaaattaaagaggatcagaggaaaataaagaggagtctactttagataagtgaccttcaagtaacagcttgcattgaagaagatagtgaaycatttggacatcagtggaaagaacaatccaggtggaggaatctgcaggagcacaagtggtgaggcaagagtttaaatgatgcagtaaaaaagagcagggttgccaataaggatggagtggggaaacaaagggagaatggtgggaaatcaggtcggcaagatagccaaggtctggatcatgcaggattataaaggcaacaataagtagaggtacccctcactttccaaactttctcgctataaagttagaatgaaatacttttaaatagcaaaagataataatttaaattctatggctaagtattataggaacccattggaatgttgagagcaggaaaatgacaaagtctaatgtgccaaacacttctgtgattat

SEQ ID NO: 258319 - DNA, 517 bp, Homo sapiens
gacaaaaaccagcaaaacaatgactcacatgaagcaataagtgtgatgaagaaaattaaagaggatcagaggaaaataaagaggagtctactttagataagtgaccttcaagtaacagcttgcattgaagaagatagtgaaccwtttggacatcagtggaaagaacaatccaggtggaggaatctgcaggagcacaagtggtgaggcaagagtttaaatgatgcagtaaaaaagagcagggttgccaataaggatggagtggggaaacaaagggagaatggtgggaaatcaggtcggcaagatagccaaggtctggatcatgcaggattataaaggcaacaataagtagaggtacccctcactttccaaactttctcgctataaagttagaatgaaatacttttaaatagcaaaagataataatttaaattctatggctaagtattataggaacccattggaatgttgagagcaggaaaatgacaaagtctaatgtgccaaacacttctgtgattat

SEQ ID NO: 258320 - DNA, 567 bp, Homo sapiens
ttttacataatatattaatgtgaaataaaacatgttcattatataaaacttaaaaaattattaaaaagacaaaaagaaattacaataagtaggaccccaatcagatttaactacagctaatagtttgacataattgattcttgttcttttccataaacatacacaaatctttacttgtagatttgtgatcttattatatatatgtagttctgtatgcagtttttaacttgacattaactatgaagattttccatataacttgagcaaatctcagacatacgactttttacaacattgtgctatcagatggataaatcataattcacttaaccatccttctatactgtattttgtctttcargtagtatgtgttgttcttacaatttaatataaacttaaatctgtttctgcatgttggcttatttctcttcaggattttcctgaagtggagtcattaggtaaaaggtaagaattttcagattttttccatataaagccgaatttatttcaaggaaggttatgcttatccagttgaagacgcaaaacaaacacgtcttcctcccttct

SEQ ID NO: 258321 - DNA, 623 bp, Homo sapiens
tttatttacattgctgaaatgtgaataatggagagttggcaattaaataaatatccaaagttcagtattctgtaattcatagtatgtctctagaacactgaatctcaagaatgtaatattcctacatgcattgaaatatgacgttgtaccccataaatatgtacatttttgtgtcagtaattttttaaaagaagtaatgttactataaaatcacttggggtctcctatttaaaaatgaagatattttaggctccactgccagagatcctgattaatatctgacatgggacccatgaatctgcattttaacaggcagaggagaaaaatttaagttttgtaggtctaggacccaatccagtttggggggtcgttctaaaagaaaaataacacaagatcacaaggataaaattaggtacagtgtcacagttaagtatcctagaagcttaagcttgactatcttgttggcaaatctgcctcagaaggcacaccaagtaattcatgcccatgttccatggacgacrctcaatggaacactgatctagcataccctttctaccttttggttgttgttgctgctaaacatttcttcccagaatataatgctattacaagttgagctttcc

SEQ ID NO: 258322 - DNA, 652 bp, Homo sapiens
tcaggttaagatattttattatttttggcagttatttatagagttccttctctctccccaaattatatatctattgatcattatttaattcaaagaaagcttgtgccaaagtaaaattataccagtartgtttgatgtagaagaatacagtgaaggatagcctgtataccacaggcagaaatacagaatcctatatatttgtaatttgtgcttatgaaatactatttccaaatctgattatgtgtaggtccaagtagataaatttgaaaaaagtaataaatatctttttattctttttttcttttgttcctttttacttcctcatttcttcaccgcacaaatatagctctgagttataaatgaaaatacaaagtgatgagcaccaataccctacagtggctttcagacatagatttctggtgcctatgaagaactttgtcacacaattgaaagactttttcaaactgtttgggatttgaatcatcaaatttgaaagaatttggcagttattcagcgtctccatctgcctcccataaaagctgctattattaagtcatcccagtgagatgggaatctatgctttcttttaggctttgagagaaaatgattcagtaatctctttttttaaattatttcagtgtttaataacttg

SEQ ID NO: 258323 - DNA, 659 bp, Homo sapiens
atttcgaacatttgttccaccaatgcaggcatgacaagtggctcccatatagtctccaagtgccagaattaccttttggatctaaaacccaagccttaattattattccgcagaactccaggatcaatgactaatttttaaagcataaaggcaaatataatctggtctgccaacagcttttatgcatgcacagcacaaaactacttccaagcttaaaatgcagacgacctaactgctgcaaggtaaaattcccttaatgtctttcttatgccttgtcaaacttgggatgctgctgctccacgcatcagctagacaatycaagaataacgtttcctacattattcttcactgtaggtagggagtacgtagtgaaatttatgttctgtaattacagctagggcaaatgatttttttcccccagagggtattgtgccttatataatcctgacctcaataaagcctacagctttattaggaaggtttacttcaaagccaatatagcagtgagctttgaaaacatagcatgcaacagatgcatcacgaactacggagacagtcaaatggtaacatgtcactgcagttttcatgttgcacaactgcattcaaacttaaaaaatggggacagatctagtacatccaagagagcgcttcggattctc

SEQ ID NO: 258324 - DNA, 568 bp, Homo sapiens
gcattcgtactgtagcatggatcggaatttcattcctttttaaggctgaataatattccattgatgtataaagcacaatttgattttttgtgttgtttgttttttggagacagggtcttgttctgttgcccccgggctggagtgcagtggcgtgatcatggcttactgctgccttcatctcccaggctcaagcaagcctcctgcctcagccttccccgagtagctgggaccacaagcacatgccaccacacctggctaattacttgakttttttgtagagatggggtctccctatattgcccaggctggtctcaaacttctgaactcaactgatcttcatgtctcagcctcccagagtgctggaattacaggcgtgaaccaccacgcccagccacacttgttttatctactgatccgtcaatggatgcttgggttgctgtcaccttttggctattgtgaataatgctgctatgaacactggtgtacaaataatctgtttgcatccctgctatcaattattttaggtatatactcagaagtggaattggtggatcatatgataattctt

SEQ ID NO: 258325 - DNA, 577 bp, Homo sapiens
gggccaggcattccagtgtttgccttgtgaacattttctctgtgattctcacagcaacctggtaaagtgggaattgttaactgttgtcgatgcagaaattgcagctcagagaaagcaaggtcacacacctggcaagtgtcagactcaaggtctggatgcaaacttgagagtctggcttcagagctgggaacatttaatcactttaatatggtatgtaaagtgctcagcatggagccaagcacacagtgaggacaagtaaaacacagcagcagctgctgctgccgttcccactactggtcttatgattattgtcattatttcctcctttctctgacgtcctagagtgttcactctctgctcttctccgggcatgtgggcttatgattgtcttgtgccatttttcagtagcttcccccatgaaaggcttttcactctaacacaattgcattcccttcaaaggcagcatccactctccccacccascaggagcctagtaaagagctaggcccccaggaggtacacagttatccagactttgtttcgccctggatcttttcccttgactgagtgccaagct

SEQ ID NO: 258326 - DNA, 542 bp, Homo sapiens
tacacagttatccagactttgtttcgccctggatcttttcccttgactgagtgccaagctctaattccatcctatgggcatccctgcttttcttagactttctaggggtcagtgaccattgaggatgtggacacaatctttactaagaggtcctggcccagaggacctgacccgagggaccttgaaccaggaggtgatgctgcagatctgggaacacagtcttgctgggtagatccttacctgtccttactcagggaacttgcagactctttcttcattctgctctctcgctccaggcttgcttaggctagaatgcatagggrgcccaccttcataccccgtggtagctcctgccttgcttgggtctcaaattctgcctggtctccccatgttcctaccagggattggtgtggctagaattagcatcccattcaaaattattcataacaaagagagaatgtattggaagggaatggggatatattgtggaagctaagtgcagaatgtccactgggccccatgggagactgcagtcaagaact

SEQ ID NO: 258327 - DNA, 582 bp, Homo sapiens
tgtcctggccttggagggggggggtctcttgtcattgcttatttctttgtgcctgcttatgccactctctgctgattggctttttctgctgcagtgagtttaagggaagaattgtctgctccagttctcactctctgaggcccccagattccttgcttctacttttcccttcaagttttacatctttactctcaatatttctctgcagttgaacttgcctgcattattaataaaagtagcaaaccacaccaagtgcacacatgggccaggcattccagtgtttgccttatgaacattttctctgtgattctcacaacagcctggtaaagtgggaattgttactgttgtccttgcagcaggaaataaacatgtgaccccrtatttcccttgatctcttcctgcaatgcccatcacagtctgacctcagtctgagaacctctgcctaaatttccacaagagggaagtggagtggcccagtttgtttggataagggagtccccacagcccagttagcgagggccattgttgatgagctgttctaaagaaggggcgtaagtcaggcagatacccaggaggcatttg

SEQ ID NO: 258328 - DNA, 504 bp, Homo sapiens
ggtggctcatgcctgtaatcctagcactttgggaggccgaggygggcggatcacaaggtcaggagttcaaggcagcctggccaacgtagtggaaccccgtctctactaaaaatacaaaaaattagccgggtgtggtggcaggtgcctataatcctagctactcgggaggctgaggcaggagaattgcttgaacatgggtggcggaggttgcagtgaccactgcacaccagcctgggcgacagtacgagactctgtctcaaaacaaaagcaaaaacaaaacaagcaaacaaaaaaacgtgcaacctttggggaagcacgcaattagtgggaagagatattgcagtgagctggaaatgctgtagtagtaggttggatgagtcaacaaagtgtgggttataacagacctcgtttcaaatattatcaaatgtgaccttagggatacaccagttatgcaaataaaatttataaatacattaaacaagtcatttgtcacaaatgagtagg

SEQ ID NO: 258329 - DNA, 504 bp, Homo sapiens
ggtggctcatgcctgtaatcctagcactttgggaggccgaggcgggcggawcacaaggtcaggagttcaaggcagcctggccaacgtagtggaaccccgtctctactaaaaatacaaaaaattagccgggtgtggtggcaggtgcctataatcctagctactcgggaggctgaggcaggagaattgcttgaacatgggtggcggaggttgcagtgaccactgcacaccagcctgggcgacagtacgagactctgtctcaaaacaaaagcaaaaacaaaacaagcaaacaaaaaaacgtgcaacctttggggaagcacgcaattagtgggaagagatattgcagtgagctggaaatgctgtagtagtaggttggatgagtcaacaaagtgtgggttataacagacctcgtttcaaatattatcaaatgtgaccttagggatacaccagttatgcaaataaaatttataaatacattaaacaagtcatttgtcacaaatgagtagg

SEQ ID NO: 258330 - DNA, 504 bp, Homo sapiens
ggtggctcatgcctgtaatcctagcactttgggaggccgaggcgggcggatcacaaggtcaggagttcaaggcagcctggccaacgtagtggaaccccgtctctactaaaaatacaaaaaattagccgggtgtggtggcaggtgcctataatcctagctactcgggrggctgaggcaggagaattgcttgaacatgggtggcggaggttgcagtgaccactgcacaccagcctgggcgacagtacgagactctgtctcaaaacaaaagcaaaaacaaaacaagcaaacaaaaaaacgtgcaacctttggggaagcacgcaattagtgggaagagatattgcagtgagctggaaatgctgtagtagtaggttggatgagtcaacaaagtgtgggttataacagacctcgtttcaaatattatcaaatgtgaccttagggatacaccagttatgcaaataaaatttataaatacattaaacaagtcatttgtcacaaatgagtagg

SEQ ID NO: 258331 - DNA, 447 bp, Homo sapiens
gccactactggcttcctatctcttcaacttgcagatgttctatcatgggagttcaccttgtgatcttgtgagtcaattatccttaataaactccctttcatatatgtatatatcctatyagttctgtccctcgagagaatcctaatacactattatattgcttttaatgcctcctttttaatatcttattttgttcatttgagtatttgctctgtatttgttggttagtctaatgaatgtttaattgatttttctatcatttcaaaaagtcatgtttttgtttcattggacttttgtattttttagtctctatttttttatttctgctctaatcattattattctttccttctactaattttgactttgatttgtttttgaaggtgttttgtattgcttacaaactttggtattaacactgcttttgctatactccataggttttca

SEQ ID NO: 258332 - DNA, 594 bp, Homo sapiens
cttttaaaacagaaactaaaatcattatcatagcctacagtgttctatatggtgtggcctcagcctaattcttcaatcacaccttgttccattctctcctttgttcggctccctccagcatcactggctttgtttgcttcctgcctgattcagagcctttgaaatgttgctccttcttcctggattgttcttcctgctttctccttctcttagttaatgcatcttcatccttcagatcttatcccgaaagtcacttgcttagggtaaccttcacatatcttagaccagcctatatgtgaatgaaataccttagagtgttactcaattaatttagtcagggacacagttattttccacattccaagaagcaaaaaaaaggcattagctattttagtacacctactggaagggggagtaaggtagtgtatgtaaaagggagaatgcatgtgaagtatctcacatggtgagaataaatactatgtaaaatcatacagtagacartttcataaatattagtttcattttctttctgtttatgtagatactcaagttttcagggaaatcctgatgattacgaaagtagagtcacagagt

SEQ ID NO: 258333 - DNA, 617 bp, Homo sapiens
attcacttgtgaattcatctatctgcccctgggccttttgttgttgtcaatttatttttattgctgattcaatttcactgcttgttattggtctgttcagggtttctatttcttcctgatttaatctaggattgtatgtttccaggaagttatccatttcctctaggttttctactttgtgagcataaagttgttcatcatagtctcaagtgatctttcatatttctgtgatgtcacttgtaaatgtcttcagtttcatttctaattgagcttatttggatctyctttctttttcttggttaatctagctaaatggtctatcaaatattttgtttatcttttcaaagaagcagctttttgttctattgatcttttgtgttttttgtttccatttcatttagcgctgttctgatttttgttatttcttttcttctgctaatttggggtttaatttgttcttgtttctctagttccttggcatgtaacattaggttgtcaatttgtgctctttcagactttttgatgtagtcatttagcactgtaaactttaatcttagcactgcttttcttgtatcccagaggtattattaacttttgttactattatcattcatttc

SEQ ID NO: 258334 - DNA, 617 bp, Homo sapiens
attcacttgtgaattcatctatctgcccctgggccttttgttgttgtcaatttatttttattgctgattcaatttcactgcttgttattggtctgttcagggtttctatttcttcctgatttaatctaggattgtatgtttccaggaagttatccatttcctctaggttttctactttgtgagcataaagttgttcatcatagtctcaagtgatctttcatatttctgtgatgtcacttgtaaatgtcttcagtttcatttctaattgagcttatttggatcttctttctttttcttggttaatctagctaaatggtctatcaaatattttgtttatcttttcaaagaagcagctttttgttctattgatcttttgtgttttttgtttccatttcatttagcgctgttctgatttttgttatttcttttcttctgctaatttggggtttratttgttcttgtttctctagttccttggcatgtaacattaggttgtcaatttgtgctctttcagactttttgatgtagtcatttagcactgtaaactttaatcttagcactgcttttcttgtatcccagaggtattattaacttttgttactattatcattcatttc

SEQ ID NO: 258335 - DNA, 555 bp, Homo sapiens
ctgccttagaagagttcctgaaggaagcactaaatatagaaaggaaacaccattataagccactagaaaaacacacttaagtacaaagacacatgatattttaaagcaaccacacaaacaagtctgcataataaccagctaacaacaagacaggatcaaatctgcacatatgtatattaaccttgagtgtaaatgggctaactgcccaaactaaaaggcacagrgtggcaagctggataaagaagcaacacccaatgttatgctgtcttaaagggatccatttcacacacaatgacacccacaggctcaaaataaagggatggagaaaaatcttccaaggatatggaaaacagaaaaaatcagaggttgctattctaatttcagataaaaaagactttgaatcaatgaagattaaaaaagacaaagaaggtgattatatattggtaaagggttcaattaaataagacctcactattctaaatatatacacactgaacataggagcacccaaatacataaagcaagttcttagagacacataaagagacttagatt

SEQ ID NO: 258336 - DNA, 417 bp, Homo sapiens
ctctgcctggcaaccctcccctcccccatctccctagtcttgtgggttacacttgctcactgaagacacagtttgggtgtccccracttgggcaagacaggctgggtcagttatctggttggtgacctcacatttaagttcccatggcaacatgtgttttatctttctaatataacatttatctcactgaattaatatttagttatctttttccttgccagattgttcactcatttaaaaaaagagctgtgtcttttatttctgaatagaggcagtgaagttaagaacacaggcacttgcatcagaatgcttgagttcaaattctagctttgcctcctactagctacatttcttaggtaaattacctaagcattctgtgcctcagttttccactctgtaatatgagaatgatattaa

SEQ ID NO: 258337 - DNA, 417 bp, Homo sapiens
ctctgcctggcaaccctcccctcccccatctccctagtcttgtgggttacacttgctcactgaagacacagtttgggtgtccccaacttgggcaagacaggctgggtcagttatctggttggtgacctcacatttaagttcccatggcaacatgtgttttatctttctaatataacatttatctcactgaattaatatttagttatctttttccttgccagattgttcactcatttaaaaaaagagctgtgtcttttatttctgaatagaggcagtgaagttaagaacacaggcacttgcatcagaatgcttgagttcaaattctagctttgcctcctactagctacatttcttargtaaattacctaagcattctgtgcctcagttttccactctgtaatatgagaatgatattaa

SEQ ID NO: 258338 - DNA, 526 bp, Homo sapiens
acttatgagaatgaaacaatctctaagggatagcatgtagagtgagaagacagtggactgaccatgaaatcctacagaataccaacatttaaggactaggtaaagaactcaggttgggccaggtgtggtggctcacacctgtgatatcagcactttgggagcccaaggtgggaggatctgttgaggccaggagttcaagaccagcctggacaacacagcgagactctgtctctacaaaataaaagtaaaaaatagccatgcgtgttgatrcgcgcttgtagtcccagctactagggaagctgaggagggaggatcacttgattccagatcccaggagtctgacatcatagtgagctatgatggcaccactgcactcaagcataggtgacagagctagaccctctctctaacaagaaaaaaaaaaaggaaaaaagaaaagaaatcaggtggatcttaataacaatcttccccagccagacatcattcttgatttggccagtttgcccacctactgcctggttattat

SEQ ID NO: 258339 - DNA, 535 bp, Homo sapiens
atggggaagggggtggaattatgctcaggtcatctgttttcaacawatggaagagatcaggaacgcattgtgaatgatcagtaaatgccactgtacaactgcggtgtcgtctcatttgtaattattttagtttatagataacctttggtatgtggataccaacttctgtcaagagtcagagatatggactcaggctgggccctggaaatcacacagatataagtgtaatggcaatgctcccaggacactaataattgcaagtttgctggctcaagagccccggcagcagatgcagcatctccctctgctcctccatgcacaggaataagttcactgacatcttctgctccagccttcccaagcgtgggcagggcccacaatttattctgcatctgccactatcaaagctgtctatgtatgagaaaaaagagtgggaaaacacccttccacagtgctgtgtcccacattagcacctggactctggcacaattagtgtcctgagtttaatggaaaacagttcctaagttcccacgta

SEQ ID NO: 258340 - DNA, 535 bp, Homo sapiens
atggggaagggggtggaattatgctcaggtcatctgttttcaacaaatggaagagatcaggaacgcattgtgaatgatcagtaaatgccactgtacaactgcggtgtygtctcatttgtaattattttagtttatagataacctttggtatgtggataccaacttctgtcaagagtcagagatatggactcaggctgggccctggaaatcacacagatataagtgtaatggcaatgctcccaggacactaataattgcaagtttgctggctcaagagccccggcagcagatgcagcatctccctctgctcctccatgcacaggaataagttcactgacatcttctgctccagccttcccaagcgtgggcagggcccacaatttattctgcatctgccactatcaaagctgtctatgtatgagaaaaaagagtgggaaaacacccttccacagtgctgtgtcccacattagcacctggactctggcacaattagtgtcctgagtttaatggaaaacagttcctaagttcccacgta

SEQ ID NO: 258341 - DNA, 549 bp, Homo sapiens
acttccttatttttcaaattcactgagacaatatgaccactcatgggcattttctttctctcattattgtcttgatttaaaatagctctaatcaaaaagaaccttaaaatcatcaactctaaattttttgttttataaatagagcaactgagagccaggtagtgtcagtgatatagttaaggtaatggaggtaagagaaattagactcatacctcgaattcaggtctcctgattctcagttcaatcaacagtctttccactgaagctcttggatttgcatcttgttactacatactattacattaaaaatctgaacacacacatgtacaacatatatatatatcactcttctaattactctttatataagttgcttatttttttwaaaaaaagcaaaacctcagcaaaatcaggcttttcaatagttgccactcttgaactaacaataaaagatgtacagtcattcattcatttattcaacaacctttcaacaggtatatcagcctgccttaagtatctagttatacatgttatgtggcatatgttaat

SEQ ID NO: 258342 - DNA, 553 bp, Homo sapiens
tttgtgtatttttgcagcattgtgtgtttgtggtatttttcatcttttaaaaaacttgaaatttttgttttttttctcattttaaataaatatccagtttcatgtttaattttataattataattygtattatttttcttaaaagccctccacaccaccattgaattgtaacagtttagaccccacaaagcctctatctactctttcccagtttacttacagcaaggaggtccacagcagggaaaaaaggcaaaacttatccagctataaaaagagccatggttcagtcacagggctagtttcagatatatcagatgcacagttgtatcacatggtgtccactggttttagttccagtttattttgattttttaaatatatgtcacacaaattaggagagaattttgccttttaacagggattaatttgtgtaattttttccatagataaaatcaacagtctttagattattattatttatttggccctcttctgaccttttaattttccacatcattcttcctatcccatctgttactttatagctttacaa

SEQ ID NO: 258343 - DNA, 553 bp, Homo sapiens
tttgtgtatttttgcagcattgtgtgtttgtggtatttttcatcttttaaaaaacttgaaatttttgttttttttctcattttaaataaatatccagtttcatgtttaattttataattataatttgtattatttttcttaaaagccctccacaccaccattgaattgtaacagtttagaccccacaaagcctctatctactctttcccagtttacttacagcaaggaggtccacagcagggaaaaaaggcaaaacttatccagctataaaaagagccatggttcagtcacagggctagtttcagatatatcagatgcacagttgtatcacatggtgtccactggttttagytccagtttattttgattttttaaatatatgtcacacaaattaggagagaattttgccttttaacagggattaatttgtgtaattttttccatagataaaatcaacagtctttagattattattatttatttggccctcttctgaccttttaattttccacatcattcttcctatcccatctgttactttatagctttacaa

SEQ ID NO: 258344 - DNA, 505 bp, Homo sapiens
ctttttaaaaagctgtttggcaagtagatcaaattgatgacaatcttaccttaaaaaaaataaagttacacatatgcacagcccaaaataaatttcaggggagaagaaacaaccagatttgttttaaaagataaagtagaaaaaggtaattggcttgaataaaatcttttaaaagagagatcggaatagtggcagagaataaccaacagtatccttttattttttcctcctatcttttgccaaagtcacacatctgtgctccaatggtacataaagttataatgacaccaaaggaaagagtatgatttcataacttatatcaacaggctattagcttcatatcaccagcrttgataaggaacaagggactggtgaagtaactgtctaggataatagattagcctaagttgaaccagtttgagagaaggaaaagagagaaagaccatttccagcaattagagtagttttctttcatgctaatcaagttcaaattcagattaaacca

SEQ ID NO: 258345 - DNA, 599 bp, Homo sapiens
ttttcagcagatttcctaagatgatcctaggcaaggttttctttgtatttattctgctaggcaattatagaggttttaaatctctggcatggtattttatcagcattgaaaaattctttgttattttatcttcaaatatgccttcgttttctttcttatctttttcttggattctagctgcatttaccttcataatttcttcagattccaagtgtctcttactttctttttgyatttttctttttctttcttttttttttttttttaaagagagagtctctctctgtcaccaaaggtagaatgcagtggcacaattatggttcactgtaaacttgaactcctgggctaaagtgactcctccacctcagcttcctgagtagcaaggactacaggagtacaatcacactcagctatttttttacattttttagagatgggggtttccctatgttgtccagcctagtctcaaactcctggcctccagtaatcccctcagcctttgcctcctgaatcattgagactgcagatgtgaaccatgcctgacccattttttctttatttaacatcctgcccatatgatgtttctctttgagattaca

SEQ ID NO: 258346 - DNA, 465 bp, Homo sapiens
agaaatactaaaattaagaaataactttcaagaaaacataaaatccagtgcacttcttggaaaacttagtcaaaaggtgaagccaagggtgtgtctataaaacattttattaaaacctcagtatattcagtcatacagaaggccctttaagacatcagagctgtgcttccaagatctccttaaacaactgaacagaaatcttaaagacattgtccctgggctctttcaacagaacccccaaaacagaggactgtcttctctacaagagatttgtaggtactgcttttgtcaaatggagctaacaccarcgattacagaagacacacaaacttctttaaaaaattaaatgtggagaaatatcattgtttggaataagtatcatagagatcataaagaatgaggacagtcctttggatcccagaatacagattcctcacagcagctacaacccctaaccaaaatgaa

SEQ ID NO: 258347 - DNA, 563 bp, Homo sapiens
  misc_feature (1)...(563): n = A,T,C or G
atttgtaggaagtctacaatggcagtgctctaaatacataaataaaactaactgatcttatgcaggaacaataggaggtgatagctaaattaatataattaccmcaagatagggacatttgaagtattatgggatacacagaaggagtttatttatatcatctgaaaataagaaagagaaaagaaaatattatgatgtaaattcagctggcctcctttttaactcttaagctgaaaataggacatgagaaaatgagaatttggatatgaaatggaacacaggaattattttagttatttggacattgcctggtgaagacagggcttggtaaaggtgctagttatgtctacttttatatatatatatatatatatatatatatatatatatatatatatatatananttttttttttttttttttttttttttttctcatggttagattcagctccgtgaaggtaaaagtacatcttattcatgtttaaatccctgtcatctagcaaggaatagactcaaatgtgtccagaattgactgtgacctctccttttgaattttcttt

SEQ ID NO: 258348 - DNA, 563 bp, Homo sapiens
  misc_feature (1)...(563): n = A,T,C or G
atttgtaggaagtctacaatggcagtgctctaaatacataaataaaactaactgatcttatgcaggaacaataggaggtgatagctaaattaatataattaccacaagatagggacatttgaagtattatgggatacacagaaggagtttatttatatcatctgaaaataagaaagagaaaagaaaatattatgatgtaaattcagctggcctcctttttaactyttaagctgaaaataggacatgagaaaatgagaatttggatatgaaatggaacacaggaattattttagttatttggacattgcctggtgaagacagggcttggtaaaggtgctagttatgtctacttttatatatatatatatatatatatatatatatatatatatatatatatatananttttttttttttttttttttttttttttctcatggttagattcagctccgtgaaggtaaaagtacatcttattcatgtttaaatccctgtcatctagcaaggaatagactcaaatgtgtccagaattgactgtgacctctccttttgaattttcttt

SEQ ID NO: 258349 - DNA, 576 bp, Homo sapiens
tcccatcaatttctgaattgctattgaatggtgttgactgactattcagtatgctggtgtatgtagaacactgcgacaaaattagagagaaactgaacatgtgctgagttaattagttcatgatttgaagaggcaacacattaataattttagtctttattacacatacaatttcaaaagttgcaaaaataactttaaaaagatataaaagatggtttgttgaaggcagtagagagctaatattttatgatgttttggaagaaaattatatcacatatgtggcaattagagaaaatctcacagtgagccctagcaattttgaaaatgaaaacaggaagagaactgcagsctgcatgggtactgaatctttttcaaaagctaatcagtcctggtatttctactgcccttggccaaacattgcattaatgagaataatcattgtaatccattacatttgcagagctctttcacatacttcctcttgctttatcctgagaactatcttttgaggaagacaccatagcatattatagatgatgaaactgccattttgaaacaagtctatagccaaatgaa

SEQ ID NO: 258350 - DNA, 576 bp, Homo sapiens
tcccatcaatttctgaattgctattgaatggtgttgactgactattcagtatgctggtgtatgtagaacactgcgacaaaattagagagaaactgaacatgtgctgagttaattagttcatgatttgaagaggcaacacattaataattttagtctttattacacatacaatttcaaaagttgcaaaaataactttaaaaagatataaaagatggtttgttgaaggcagtagagagctaatattttatgatgttttggaagaaaattatatcacatatgtggcaattagagaaaatctcacagtgagccctagcaattttgaaaatgaaaacaggaagagaactgcaggctgcatgggtactgaatctttttcaaaagctaatcagtcctggtatttctactgcccttggccaaacattgcattaatgagaataatcattgtaatccattacatttgcagagctctttcacatacttcctcttgctttatcctgagaactatcttttgaggaagacaccatagcatattatagatsatgaaactgccattttgaaacaagtctatagccaaatgaa

SEQ ID NO: 258351 - DNA, 563 bp, Homo sapiens
tatgttttcacttaatggggtcccataagtccaatgggcttcctttatgctttctcattatttttcaagtttttctctctaggtaattttaaaagattgatcttaaaatttactgattgttctttctacttaatctagtctgctgttgaagctcttggttgtcctttttatttatttctattgaattattcaaggttgggcccagtggctcacacctgtaatttcaccactttgggaggcygaagcagaaagaccacttgagcccaggagtttgagacaagcctgggcaatacagtgagacctcatttctacaaaaatatagtttaaaaaaaaagaattcttcaagtccaaggtttttgttaggttctttttgattatgtatgtttctttgttgaatttcacattcagattatgaattgttttcctgatttccttgaatcgtctatgtgtagtctcttgtatcttgctgagttccttcaatatcattattttgaatttcttttctgacagtttgtaaattcctttgtctttgaaaccattactggagattatttttttccttt

SEQ ID NO: 258352 - DNA, 563 bp, Homo sapiens
tatgttttcacttaatggggtcccataagtccaatgggcttcctttatgctttctcattatttttcaagtttttctctctaggtaattttaaaagattgatcttaaaatttactgattgttctttctacttaatctagtctgctgttgaagctcttggttgtcctttttatttatttctattgaattattcaaggttgggcccagtggctcacacctgtaatttcaccactttgggaggctgaagcagaaagaccacttgagcccaggagtttgagacaagcctgggcaatacagtgagacctcatttctasaaaaatatagtttaaaaaaaaagaattcttcaagtccaaggtttttgttaggttctttttgattatgtatgtttctttgttgaatttcacattcagattatgaattgttttcctgatttccttgaatcgtctatgtgtagtctcttgtatcttgctgagttccttcaatatcattattttgaatttcttttctgacagtttgtaaattcctttgtctttgaaaccattactggagattatttttttccttt

SEQ ID NO: 258353 - DNA, 581 bp, Homo sapiens
tcttttccgccttcaatttgtattcattgttgatttaaaattcatgtcacatggaatcaaatatattcggctgagtcacgttattccgtgttattttcccaaatcttgtatccgcttctgaaaaaccaatactgggaaaacttttaagtatataccattagagattttatatattatcaaagaatggcattcaaatatatcagatttctctaccaatgcctatttttgacatttttgaaagagatttttacaaaacacgtaaatgttttgtagtttctatcaaatacagrcagaaactaaatacagtaaacttctagagaatggtgattattttttttttggtctttctagttccccatagtaccttgtccagccaaatgcacttaacaattatttgttgacctaattaaaattgatacaattatttagtttttgataagctattactgtaatgagctttaatgttcatcaaaacatcaactaatatatcaacctaaatatttccaatggtgcttatcatcatcatttgaatatcctctagaacatgagctctaataaggcaatgatacaaacatagtgga

SEQ ID NO: 258354 - DNA, 517 bp, Homo sapiens
ggggactggggatagggaacaggggagtctgttctgccaatgggggcattctgccattgccctctgccctcagtggggacctgagtggaatccagaagacctgrgtcagagttgggtgcatgtactccagggtgtctcagggtaagtttgggggtggtacctctcccctctgccaagggctgcccagtgccctggtacatccagtaggcagctagaggccatgtcttaaagttggatggagtaagcccttctaccatagtttggagcagcaaactactgaaagctgggaatgtctggctcaaatttcccagagcctgctgccagcccagtgttgtgcattagtctggcaactcatggaagggggaaactggatatacttaggtcccagcaagtgcctgctagatgcctccaatcttgggttgggcatccaggaggcaatcctcagtattcccatacccaaggcagcaccccttcgaggtggctctatgcctggcctcgactttcttttcctccctcc

SEQ ID NO: 258355 - DNA, 517 bp, Homo sapiens
ggggactggggatagggaacaggggagtctgttctgccaatgggggcattctgccattgccctctgccctcagtggggacctgagtggaatccagaagacctgggtcagagttgggtgcatgtactccagggtgtctcagggtaagtttgggggtggtacctctcccctctgccaagggctgcccartgccctggtacatccagtaggcagctagaggccatgtcttaaagttggatggagtaagcccttctaccatagtttggagcagcaaactactgaaagctgggaatgtctggctcaaatttcccagagcctgctgccagcccagtgttgtgcattagtctggcaactcatggaagggggaaactggatatacttaggtcccagcaagtgcctgctagatgcctccaatcttgggttgggcatccaggaggcaatcctcagtattcccatacccaaggcagcaccccttcgaggtggctctatgcctggcctcgactttcttttcctccctcc

SEQ ID NO: 258356 - DNA, 588 bp, Homo sapiens
gatattacttgatgatatactgttcacacatatattgccacaatcatctaggtgggttccctttaccttctctaattgttyttgcctctaagtaaaacaaaacaagacagataaaaaacagttaccttactttttttttttttttagttagggctcaatgacttgataattcagaaaactatattcaggctgaaattggttaaggctattggctaggttcataaattataaaaccataattcaatggtttaattcaatgcagttggttcttcccctttccaatatgactgcttgaataaatgcttgttgattcaatttattgatgtgtttctttacttttaaattctttctaccctctcaaccacttaccttgtgcagtaacctaccctatggtctcactatctctaatttatttgtgattccaactacatttttttctactcttttgctagagtcaactacctaagataaggaattgaaatcactggaattttttttttttttttcttttgcgacagagtctccctctgtcgcccaggctggagtgcagtggcgcgatctccgctcaccgcaagctcgcgtgccggc

SEQ ID NO: 258357 - DNA, 463 bp, Homo sapiens
ataagcttaaattttataatgtatgtgtaatgaggaggtcttagaaacaactttaaaacaaagtggctaactttgaaacattctaagagtggagcccatgatcaacaaaatttctcccaagttcaagtcatatgtactattaygacttttcaaggagcagagaaatatatttcacagaaatgtgaatgaagttaattactcataaaatatcaaaagagaacctataactatgtatattattgtaattgtcccccatctctataccttcttatataagtttaaaaaagtagaaaatatcattgatgaataattataatttttcacaattagattaaaaataaaaaattaataaatatactgtatttgttaaatgatatttaagaacttctagttagagtcacatggaaatacctataataactatcctatacatttttaaatattgtagaacaggaaaaaatag

SEQ ID NO: 258358 - DNA, 547 bp, Homo sapiens
catggttctccagataaacagaatgatagatatgttttaaggttgggtttactgattttggaggcttggcaagtccaaaatctgcaggttaggccatcaggctggagacgtagggaagaactgcaattcgagtccaaaggcaattcttcttgcttgggtggctcagtctttttctttgtacaaaggccttcaactgactgaatgaagccctcccgtaacaggaaaggtaatgtgcttcattgaaagcctacggatttaaatgctaaactcatttaacacatacctgccgagwaacatttagaataatgtttaaccaaatagtttggtaccttattctaaccaagttgatacataaaattagccatcatgatatataatatctaaacctcaaaaattaaagaaatagtgtgaggaaatggtgttggggatgagaaatggtggtatatagggttgtgctgtttccattataagtctgataatttttactgtttaatgatttaaattatgtacaaaggttacttggataaaaaatttataaggttacatt

SEQ ID NO: 258359 - DNA, 608 bp, Homo sapiens
acttgtactccttaaatttatattttaaaaaacataggcaaccttaaaagctatctcttttggaatttatgaaacacagtacctgtatcactttctctcaaacaagcgatacaacatgttatacaccatgctaattgtgactgttgaatatctggcagtgtttctaaggactcattgctttttaacaacaaccacagaaataattaatttgccacgttaacaaaagggagaaagtgaaagaacaggtagatttggtaggtgccatttgaaaatttaggtccattttgtatttaaaataattgaggttcasatagtaaaataaatgttggcctaactgccaattagtgacaagcatttttaacgccagccctgcctgacatgaattgctacattttattttcccggtttttatattatcttccacttttaggcctaacatgacatagacttttttaaagttttatttcaaaatggtaactattctttccagaacaaaagtaaaataaccaattccaatagaaactaaacaaatattatcagcatgtctatgatttctatacattttcaaatatgaagtttctatgtatacatttatttaattttactaa

SEQ ID NO: 258360 - DNA, 608 bp, Homo sapiens
acttgtactccttaaatttatattttaaaaaacataggcaaccttaaaagctatctcttttggaatttatgaaacacagtacctgtatcactttctctcaaacaagcgatacaacatgttatacaccatgctaattgtgactgttgaatatctggcagtgtttctaaggactcattgctttttaacaacaaccacagaaataattaatttgccacgttaacaaaagggagaaagtgaaagaacaggtagatttggtaggtgccatttgaaaatttaggtccattttgtatttaaaataattgaggttcacatagtaaaataaatgttggcctaactgccaattagtgacaagcatttttaacgccagccctgcctgacatgaattgctacattttattttcccggtttttatattatcttccacttttaggcctaacatgacatagacttttttaaagttttatttcaaaatggtaactattctttccrgaacaaaagtaaaataaccaattccaatagaaactaaacaaatattatcagcatgtctatgatttctatacattttcaaatatgaagtttctatgtatacatttatttaattttactaa

SEQ ID NO: 258361 - DNA, 565 bp, Homo sapiens
aaatatacttttgcataactgtgtgcaaattatgtagctgtaaaaataaggctatgatgtaattatgccctgaaactgtttgtttgttgctgtttttggttttgttttatttttgcttggtattggtgatgtatggagtaatgtgttcactggtctttgaggtataatcatacctttgccagatggagaacagttgagcagyatattccaggaatagggaatattatgtctaaaacattacatagtcaaggaattacagcaaagttttgtttataaagaggagaggaaaaaaaaagaatgatacaaggaatataaatggggcgggctctgtatgtacgcatttttagaatataaaatgtttttctatagaaaataaagaaaccatgatatgaatataatatgtggggagcataaacatgtctgcagtttattaatatttatttttaataaacatttctttgaatgcatattaagtgtgtgtactataatgacttacatcgatttacaaagatgccagcctccatttgacagtagatcccaaggggcccaatctaagctctatccc

SEQ ID NO: 258362 - DNA, 569 bp, Homo sapiens
tgagaggaaaggtcttcagtgaaatagacagcataaaaaacaatcgcaacttctggaaatcaaggagacacttatagaaacgcaaaatgcaggctgggcgcagtggctcacacctgtaatcccagcactttgggaggccaagttcaggagttcgagaccagcctggccaacatggtgaaatcccatctctactacaaatacaaaaattagctgggtgtggtggtgggcacctgtaatcccagctactctggaggctgaggcaagagaattgcttgaaaccggaagggggaggttgcagtgagctgagatcatgcccctgcactccagcctgggcaacaagagcaaaactccrtctcgaaaaaaaaaaaatccaaaatgcactggaaagtatcagaaatagaatcaaaagaatcaaacaagcagaagaaagaacttcagagctcaaagacaaatcttttgaatcgatccaatccataaaagacaaaattaaataaataaataaataaataaagcctccaagaagtttgggactatattaaacatccaaacctaggaataattggtgtttg

SEQ ID NO: 258363 - DNA, 569 bp, Homo sapiens
tgagaggaaaggtcttcagtgaaatagacagcataaaaaacaatcgcaacttctggaaatcaaggagacacttatagaaacgcaaaatgcaggctgggcgcagtggctcacacctgtaatcccagcactttgggaggccaagttcaggagttcgagaccagcctggccaacatggtgaaatcccatctctactacaaatacaaaaattagctgggtgtggtggtgggcacctgtaatcccagctactctggaggctgaggcaagagaattgcttgaaaccggaagggggaggttgcagtgagctgagatcatgcccctgcactccagcctgggcaacaagagcaaaactccgtctcgaaaaaaaaaaaatccaaaatgcactggaaagtatcagaaatagaatcaaaagaatcaaacaagcagaagaaagaacttcagagctcaaagacaaatcttttgaatcgatccaatccataaaagacaaaatwaaataaataaataaataaataaagcctccaagaagtttgggactatattaaacatccaaacctaggaataattggtgtttg

SEQ ID NO: 258364 - DNA, 438 bp, Homo sapiens
aaagaaataaagagcattcaaatcagtaaagaggaagttaaactgttgctgtttgttgatgatatgattgtatacctagaaaaccctaaacactcctccataaagctcctagaactggcaaataaattcagcaaagtttctggatataaaattaatgtatgcaaattaatagctctgctatatacaaacagtgaccwagctgagaatcaaatcaacaactcaaccccttttacaatagctgcaaaaaaagaatacttagaaatttacctaaccaagaaggtgaaagacttctacaaggaaaactatgaaacactgctgaaagaaatcatagatgacacaaacaaatggaaacacatcccatacttgtggatgggtagaatcaatattgtgaaaatgatcatactgccaaaaacaatctacaaattcaagacaattctc

SEQ ID NO: 258365 - DNA, 487 bp, Homo sapiens
aaaacaaagataaataggtgggacttagttaaactaaaaagcttctgaacagcaaaagaaatagcagagttaacaattaaactaaaaagcttctgcacagcaaaagaaatggcagagttaacagaaaacccacagagtgggaggaaatctttacaatctatacatctgagaaaggactaatrtccagaatctacaaagaactcacaaatcagtgagaaaacaccaaagaatcccatcgaaaaatgggctaaggacacgaatagacgattctcaaaagaagatatacaaatggccaacaaacaaaaggaaaaatactcaacatcacgacgaattatcagggaaatgcaaatcaaaatcataatgcaaaaccatcttagacctgcaagtatgaccataatcaaaaaataaaaaaaaaaatagatattggcctggatgtagtgaaagggaacacttttacactgttggtggaaatgtaaactagtactcc

SEQ ID NO: 258366 - DNA, 487 bp, Homo sapiens
aaaacaaagataaataggtgggacttagttaaactaaaaagcttctgaacagcaaaagaaatagcagagttaacaattaaactaaaaagcttctgcacagcaaaagaaatggcagagttaacagaaaacccacagagtgggaggaaatctttacaatctatacatctgagaaaggactaatgtccagaatctacaaagaactcacaaatcagtgagaaaacaccaaagaatcccatcgaaaaatgggctaaggacacgaatagacrattctcaaaagaagatatacaaatggccaacaaacaaaaggaaaaatactcaacatcacgacgaattatcagggaaatgcaaatcaaaatcataatgcaaaaccatcttagacctgcaagtatgaccataatcaaaaaataaaaaaaaaaatagatattggcctggatgtagtgaaagggaacacttttacactgttggtggaaatgtaaactagtactcc

SEQ ID NO: 258367 - DNA, 599 bp, Homo sapiens
atgtgaactcaacaaatatacaaaataatgtgacacagrccaatgctaaagcaaggaaaatctgtcatccctgagacaaagaattcaaaatagctattttaaagaagctcaacaacttcaagaaaacacaagaaatcggtgtagaaatgtatcagagaaatttaacaaaaagattgaaataatttcaaaaaagcaaacaattttggagctgaaaagtaccatgaatgaaatttacaaatgcagtagagagcatcaacagtagaattgattggacagaagaaagaagcatgagctcaaagacagatgattggaaaatacacagaagagagaaaataacaaaacacgaaaagaaataaaggttacatgatctacaggacatcaaaagttctaatatttgggctaatggagttaatgaggaaactgagaaagacaaaaggatagaaaacatattaaaagaaataataatagagaggtttctaagcctggagaaatatataagtattcaggtgcaagaagatcaaagtttaccaatcagattaaagcaaaataaaaatatctcaagacatattataatcaacctctcaaatttcaatgacaaa

SEQ ID NO: 258368 - DNA, 629 bp, Homo sapiens
actagtactcctttcctattatccctacctctaaatgaacttgaggtcacatgcttctaacgttcttggacatgctatggaaccaatgtgtatgatattcagttttcccatctgctgactgggctttatttttctcaagtttgttatctcattaccattcttcttttcagcttccaaaattttgcttctattttctcctctctttcttcctgttctttataggtttatgtcttaaaaattacttagctgccatcttagtttattgagagagaccaaaagtagatatagatatttatttgatgtttatgttttttaaagacagagtcttgctctgacaccaaggctagagtgcattggcacaaacatggctcactgcagcgtcaaactcagggctcaagtgattctcccacttaggcctcccaaagcactgggaytacaagtgtgagccaccacacccagtcctgatgtaaatatttaatttccatcttaactcacgtctgttctttgtaacaactctttcacctggacaacaacttctttcctgaattgaaaaattctgttgtttattattctaagtggtcaatcatttgatcagttgcctaaccagaaaatagttatttttaactgaa

SEQ ID NO: 258369 - DNA, 546 bp, Homo sapiens
actaaggtgattttacctcacaatttattacaagaagaaaaagcaagatgaaacttttccagaaatattaccaaagacaaggttgaaagatatttttaaagcaattttagaatctgttgttattctgggtcctctgagaggcagataccaggacatcattacacgtgcaagagatttattagggcactgcctgtgagtgtaaatgagaagggagccacaggaagcaatcaatgcatatttgatccatgtgggagagagagggagggaagggaggttgtgtagaaacatcttaccctgcagtgcggttctaagaaatttcatcaagtatatcactgagtccttcagtgaaaataaccccccagaaacagtcctgctgcagtctcctgcctacactcagccactgcctgggagcagcctgttggaagtatgatcttgacatgaactgggtgttggtggattyagagtacagcctctgggaccctaagtcaattactctcccagcagttagacagctcattttcacagctgccacttattcaaagtcaa

SEQ ID NO: 258370 - DNA, 692 bp, Homo sapiens
taattcccatttttggaattactcgtataagtcaaaaactaagcagaaagcaactaaaattgtactctttgttattaataatttttacagtaaggagacttttctgtttttactgaatattgaaaaccaagattaggctgccaaaacacractgtctaaaattttcaaaagcttacataaacacttctctaaaaagttgttaaaaatttgttatatattttcaaaaggtttttaaatgtggaagtgattatgatgctttttaagctcctgaaaaatgtctttgagccttcaaaacaaagtttttcttctctagaagcaaagaattactagttttctttctaaattttattttttaatagataaaggctaaacatggtactataaactatcagcctacttacatattcttatcttatatgcaaagtttaaaatcttattaagatctgataccaagaactgaaacaaacctacatggtaaataccaaaatcaataataaatttatgctccttaaacatctctctgacttctactctttataaaagataaataacttggtagtggaaaatattttatgggctatcattcagtagagattattctcacttctctttgtcagttcttttgaataacaactttaaggagaaattcaggagcaaatacacctatatatctatttatatattatacatgt

SEQ ID NO: 258371 - DNA, 692 bp, Homo sapiens
taattcccatttttggaattactcgtataagtcaaaaactaagcagaaagcaactaaaattgtactctttgttattaataatttttacagtaaggagacttttctgtttttactgaatattgaaaaccaagattaggctgccaaaacacaactgtctaaaattttcaaaagcttacataaacacttctctaaaaagttgttaaaaatttgttatatattttcaaaaggtttttaaatgtggaagtgattatgatgctttttaagctcctgaaaaatgtctttgagccttcaaaacaaaktttttcttctctagaagcaaagaattactagttttctttctaaattttattttttaatagataaaggctaaacatggtactataaactatcagcctacttacatattcttatcttatatgcaaagtttaaaatcttattaagatctgataccaagaactgaaacaaacctacatggtaaataccaaaatcaataataaatttatgctccttaaacatctctctgacttctactctttataaaagataaataacttggtagtggaaaatattttatgggctatcattcagtagagattattctcacttctctttgtcagttcttttgaataacaactttaaggagaaattcaggagcaaatacacctatatatctatttatatattatacatgt

SEQ ID NO: 258372 - DNA, 692 bp, Homo sapiens
taattcccatttttggaattactcgtataagtcaaaaactaagcagaaagcaactaaaattgtactctttgttattaataatttttacagtaaggagacttttctgtttttactgaatattgaaaaccaagattaggctgccaaaacacaactgtctaaaattttcaaaagcttacataaacacttctctaaaaagttgttaaaaatttgttatatattttcaaaaggtttttaaatgtggaagtgattatgatgctttttaagctcctgaaaaatgtctttgagccttcaaaacaaagtttttcttctctagaagcaaagaattactagttttctttctaaattttattttttaatagataaaggctaaacatggtactataaactatcagcctacttacatattcttatcttatatgcaaagtttaaaatcttattaagatctgataccaagaactgaaacaaacctacatggtaaataccaaaatcaataataaatttatgctccttaaacatctctctgacttctactctttataaaagataaataacttggtagtggaaaatattttatgggctatcattcagtagagattattctcacttctctktgtcagttcttttgaataacaactttaaggagaaattcaggagcaaatacacctatatatctatttatatattatacatgt

SEQ ID NO: 258373 - DNA, 571 bp, Homo sapiens
ttaagattgcagcaaattgaattataatwttttggagcaacactaaatctgcgtagtatcttttctggtatcaggtttataatttccagtatttgacatatttttatatgttttctttttagaaatataataaatgtgagttattggtactttcaattcattttacgggaaatataaggcatacatcgaaaatatgttagttctattgatccacacaataatccaggtggcatatagaattccacctatttttgacttgaagaaattgaggctctgagcttaattgatgaaagaagtttatctacccaacaagccacaaatcttggatttacaccttatcctttacaccccaagtattgtattgattttgctgtgtcagagcttttacattctatatgacattagtttaggctggtatatatgtgtttataatatatatatatatattcctaacattactactattgcatcactatctgtaatctatgtatatatccatcgactatctacctatcatctatttatcttatttatccatccatcatacacattcatatcattctatgtaggc

SEQ ID NO: 258374 - DNA, 571 bp, Homo sapiens
ttaagattgcagcaaattgaattataatattttggagcaacactaaatctgcgtagtatcttttctggtatcaggtttataatttccagtatttgacatatttttrtatgttttctttttagaaatataataaatgtgagttattggtactttcaattcattttacgggaaatataaggcatacatcgaaaatatgttagttctattgatccacacaataatccaggtggcatatagaattccacctatttttgacttgaagaaattgaggctctgagcttaattgatgaaagaagtttatctacccaacaagccacaaatcttggatttacaccttatcctttacaccccaagtattgtattgattttgctgtgtcagagcttttacattctatatgacattagtttaggctggtatatatgtgtttataatatatatatatatattcctaacattactactattgcatcactatctgtaatctatgtatatatccatcgactatctacctatcatctatttatcttatttatccatccatcatacacattcatatcattctatgtaggc

SEQ ID NO: 258375 - DNA, 571 bp, Homo sapiens
ttaagattgcagcaaattgaattataatattttggagcaacactaaatctgcgtagtatcttttctggtatcaggtttataatttccagtatttgacatatttttatatgttttctttttagaaatataataaatgtgagttattggtactttcaattcattttacgggaaatataaggcatacatcgaaaatatgttagtyctattgatccacacaataatccaggtggcatatagaattccacctatttttgacttgaagaaattgaggctctgagcttaattgatgaaagaagtttatctacccaacaagccacaaatcttggatttacaccttatcctttacaccccaagtattgtattgattttgctgtgtcagagcttttacattctatatgacattagtttaggctggtatatatgtgtttataatatatatatatatattcctaacattactactattgcatcactatctgtaatctatgtatatatccatcgactatctacctatcatctatttatcttatttatccatccatcatacacattcatatcattctatgtaggc

SEQ ID NO: 258376 - DNA, 571 bp, Homo sapiens
ttaagattgcagcaaattgaattataatattttggagcaacactaaatctgcgtagtatcttttctggtatcaggtttataatttccagtatttgacatatttttatatgttttctttttagaaatataataaatgtgagttattggtactttcaattcattttacgggaaatataaggcatacatcgaaaatatgttagttctattgatccacacaataatccaggtggcatatagaattccacctatttttgacttgaagaaattgaggctctgagcttaattgatgaaagaagtttatctacccaacaagccacaaatcttggatttacaccttatcctttacaccccaagtattgtattgattttgctgtgtcagagcttttacattctatatgacattagtttaggctggtatatatgtgtttataatatatatatatatattcctaacattactactattgcatcrctatctgtaatctatgtatatatccatcgactatctacctatcatctatttatcttatttatccatccatcatacacattcatatcattctatgtaggc

SEQ ID NO: 258377 - DNA, 612 bp, Homo sapiens
cccactaggcccttcctttaacactggggtaatcacatttcaacatgagatttggagggggacaaatagccaaagtatatcatatctatagaatgakctcttagaaatggacttgataggttgagtttatgtgtgttatcaaattagatatatttacatgtactctaaaagataacaatattttgctgaatgtagtttaccaacctttcattgacacaagaatatccatcttctaatttatttttaaagtttatttaaaatttatatttattttatttatttgccataatgtatatgattgtataccatgaatcatatatgttgtatattataaattcattattgatttagtcagtattgttcaattttagccaaagatcccataaacaagttttccttcactataaagtctcatgtaggaaaattgtatcagtactttgatgttttcctagtgatcttataaacactgcacatgacttccttaataaaaagcctacaagaactatactatatttgtagtgtctctaaaatttcttggcaagaaatcagtagtgcacactttaataagatcctcagccaagtcaagggaatgtttacaatatgggcaaatca

SEQ ID NO: 258378 - DNA, 637 bp, Homo sapiens
accttggaaacattatttttttcatgtgtctgtgagattgttttcagagtgattagtgtgtggacccacgtggactaggtggggaagatgatccctcaatgttggcctccacatccagtcatccagggttctctcctggagagaacatatacagaaggcaaactagactctctctgagagcaaatacagactttgttttactgccttgaatatcagaaatttaactccaccaaagtgcattatcacaaagctgactttgtgtgtaagcattgcacatgtatgtaaaaatgctggcacttcctcartaagtgaagagatatccttttgtacatctgcaattgtgaaaggtacaatttctcaagatcttggctctttggatgaatgtatatgctatggtggcctatcacagcttttgatcgatctcttcaaaagacttagattgtttttcatggtatttcaggcaactacagtataaaactgagtgcacacaattaccaaccacagaggtattcatttatatatttcctttttatactatttcgttatgaacgtggttaatctggtcataactgttatatgtatatttaactgtcattagtatatttgagtgtttatgcttgcaaaaatacgtatgttg

SEQ ID NO: 258379 - DNA, 597 bp, Homo sapiens
taataatatcttccatttgaagtcagggccttaaatttytactgcctgaatacatcactgatgtattaaatacgcactgattaggatccaaacaaatctgtttcaacaccaagccaagttatcaacttaaacttagtcctcattcagcttatagaatcgttattttttagaaatgttacatttccacattagaaaaataaactttaaaggtcatctagtccaaatgtctattcattatttgctttctcttgtgtccgtttctccaaagtggctgtctaatttagttaaacttctgcacagatgaccttcccattcatgcagtatagcacattaactgactggatagctgtaattactaaaccacttcctatattaaacacaaagtcagttttcttgtagctcccatgttggtcttagcactgccctctggttctatttaacacaggtctcatttcttttccactgggcatgttttccagttttggaagacagcaatcatttccactcaaaggtgtctttttttgcggacagaatgtatagaatgatcattaaggagatttctaagttaaaaagtctatgagagtcactaaaaaggaa

SEQ ID NO: 258380 - DNA, 597 bp, Homo sapiens
taataatatcttccatttgaagtcagggccttaaatttctactgcctgaatacatcactgatgtattaaataygcactgattaggatccaaacaaatctgtttcaacaccaagccaagttatcaacttaaacttagtcctcattcagcttatagaatcgttattttttagaaatgttacatttccacattagaaaaataaactttaaaggtcatctagtccaaatgtctattcattatttgctttctcttgtgtccgtttctccaaagtggctgtctaatttagttaaacttctgcacagatgaccttcccattcatgcagtatagcacattaactgactggatagctgtaattactaaaccacttcctatattaaacacaaagtcagttttcttgtagctcccatgttggtcttagcactgccctctggttctatttaacacaggtctcatttcttttccactgggcatgttttccagttttggaagacagcaatcatttccactcaaaggtgtctttttttgcggacagaatgtatagaatgatcattaaggagatttctaagttaaaaagtctatgagagtcactaaaaaggaa

SEQ ID NO: 258381 - DNA, 623 bp, Homo sapiens
aatttcaattcaactttactgtgcttttactaagagctctgtctgtgcatactaccataatatatgggtgagggtaatgtagtatttaagaacacaagctctggagtcagattgcctgggcttcaaataacaaatctctctattcctcagttccttataaaaagcagataatagcagtatctagctcatttgttttttgtggatttttttgtgagaattaacaaaataatctaygaattatatttagtaaatatttgacatagcaaaggcccaataagtgatcatagatgaaattttatattcaagaaatactatttaagcattcttctggcaaaaagcaaccattagaaaagttaacatataaaatactgatatttatattgtaacagtattgactctgttagagaaaagcttatttgcttggatataattattactttgattaagtttgtaaattattcattaaaaacagcctcaggaagacaggaccttcaacagagataaaagaaaatatgctagccagcaactctgagaatgagctgactggcctgataaagaatagcctgatggtgattgcagaaggccacaaaacaataaccaagaaagcaatgattaactgccaa

SEQ ID NO: 258382 - DNA, 424 bp, Homo sapiens
taagttgacacttaaaaaaagtttgatgttgcctggatagagaaaagaacaaaagatattggaagcacawcaaaggagcagctatcacagtttggaattctcggaaaacacttccctaagacataaaaccaaaaccaagtctcaaagaattaataaaagttgaagcaagtgaagaaagtataaggaaatagatcttccaagaagaaagagcagcttttacaaaggcatggagttgcaacagcattacttgttaatgtcactgtaattattttagtatgaattgtacatttaaagcctggaacagagtgaaagaggtacagttgcggaggctggtgttgttactaaatgccaggaatttgatctagtcctgttgttcactgcacagaaagccaattactgagacaaaaagtatcgcaaggaaaga

SEQ ID NO: 258383 - DNA, 424 bp, Homo sapiens
taagttgacacttaaaaaaagtttgatgttgcctggatagagaaaagaacaaaagatattggaagcacaacaaaggagcagctatcacagtttggaattctcggaaaacacttccctaagacataaaaccaaaaccaagtctcaaagaattaataaaagttgaagcaagtgaagaaagtataaggaaatagatcttccaagaagaaagagcagcttttacaaaggcatggagttgcaacagcattacttgttaatgtcactgtaattattttagtatgaattgtacatwtaaagcctggaacagagtgaaagaggtacagttgcggaggctggtgttgttactaaatgccaggaatttgatctagtcctgttgttcactgcacagaaagccaattactgagacaaaaagtatcgcaaggaaaga

SEQ ID NO: 258384 - DNA, 424 bp, Homo sapiens
taagttgacacttaaaaaaagtttgatgttgcctggatagagaaaagaacaaaagatattggaagcacaacaaaggagcagctatcacagtttggaattctcggaaaacacttccctaagacataaaaccaaaaccaagtctcaaagaattaataaaagttgaagcaagtgaagaaagtataaggaaatagatcttccaagaagaaagagcagcttttacaaaggcatggagttgcaacagcattacttgttaatgtcactgtaattattttagtatgaattgtacatttaaagcmtggaacagagtgaaagaggtacagttgcggaggctggtgttgttactaaatgccaggaatttgatctagtcctgttgttcactgcacagaaagccaattactgagacaaaaagtatcgcaaggaaaga

SEQ ID NO: 258385 - DNA, 461 bp, Homo sapiens
gggttgtgttatttctgatttctctcagtggtgttttgggggtttttttgtagagatctttcatctcctttgttgggtgtattcctagatattttatttgtgtgtgtgtgtgtgtgtgtgtggctactgtgaatggaattgcatttttgatttgactctcagcttgaatattattggtttatagaaatgctactgatttttatacattgatttttatatcctgaaacttttaccagtttatttatcattcatcatttatcagttccmggagctttttggtggcatctataggtttttctaggtatagaatcatattgtcagtgaagagagagagtttggcttcccccttttctatctggattcattttgtttctttctgttgcctcattgctctggcaaggacttccagaactatgttgaatagaagtggtgaaggcaaacttccttgtcttgttctagta

SEQ ID NO: 258386 - DNA, 461 bp, Homo sapiens
gggttgtgttatttctgatttctctcagtggtgttttgggggtttttttgtagagatctttcatctcctttgttgggtgtattcctagatattttatttgtgtgtgtgtgtgtgtgtgtgtggctactgtgaatggaattgcatttttgatttgactctcagcttgaatattattggtttatagaaatgctactgatttttatacattgatttttatatcctgaaacttttaccagtttatttatcattcatcatttatcagttccaggagctttttggtggmatctataggtttttctaggtatagaatcatattgtcagtgaagagagagagtttggcttcccccttttctatctggattcattttgtttctttctgttgcctcattgctctggcaaggacttccagaactatgttgaatagaagtggtgaaggcaaacttccttgtcttgttctagta

SEQ ID NO: 258387 - DNA, 617 bp, Homo sapiens
caaacacatatagtacttactagataaaaagaactttcctaggcacttaaaaactgcaacttttaattctcataacaatcttatgaggtgagtataattattatccttattgtatgaatgagaaaactaaggtacagagatgttaagtatcttgcagaaagtcacatgtattgtcaggggcagagccaggtccatgtgcataacaaccaaactatgttcttgctctcttctttttctttgaagattgttttccaagaggcaataaaaatgccatcattagattatacttaaaaaggtttattgagactttattttaatatcaggcatttttatctgcttggtttgtaatagtgaactaaacacaagtaatgactctgactttctagacctcactttctagttmgatgaagcaggaagaacattatcaaaccattaaataagcaagattatttcaaagaggatgaaaaagataaaagactatttggtaataggaggatcagtatgtagaaatttatacaaaactgatttggagcatgagagactcaattgtctttccatctgacaaaattaatttgcatatctctagacaagaattatttttattgctattagttatc

SEQ ID NO: 258388 - DNA, 617 bp, Homo sapiens
caaacacatatagtacttactagataaaaagaactttcctaggcacttaaaaactgcaacttttaattctcataacaatcttatgaggtgagtataattattatccttattgtatgaatgagaaaactaaggtacagagatgttaagtatcttgcagaaagtcacatgtattgtcaggggcagagccaggtccatgtgcataacaaccaaactatgttcttgctctcttctttttctttgaagattgttttccaagaggcaataaaaatgccatcattagattatacttaaaaaggtttattgagactttattttaatatcaggcatttttatctgcttggtttgtaatagtgaactaaacacaagtaatgactctgactttctagacctcactttctagttcgatgaagcaggaagaacattatcaaaccattaaataagcaagattatttcaaagaggatgaaaaagataaaagactatttggtaataggaggatcartatgtagaaatttatacaaaactgatttggagcatgagagactcaattgtctttccatctgacaaaattaatttgcatatctctagacaagaattatttttattgctattagttatc

SEQ ID NO: 258389 - DNA, 630 bp, Homo sapiens
tttccatctgacaaaattaatttgcatatctctagacaagaattatttttattgctattagttatctattacattcgtagttgtaaagtagctcaaagacattgaaaggcacaaatcctatagcatcaaataacccagaaagatgtctgacactatatgagtttcttagatcattggtgttatatgttatgtgctaataacttagaaatgtataaccaagtcaaacattttctctgtagtttgaatcatctactatttacttgacatctccacttggctgtctaaaaamcatcttgaatgtaacattaaaaagaattgactttttctcaccgaatctattcctcttccacttttcattaatacagtaaatgatatcactattcatccaacgattcaaatccagaaatttaaggagtcatacttgattctccttattccatcagtccccacatgaaatcccctagcaaatcctgttagcagctttacctccaaaatgcattttgatttgttcattcttatccctctctactgtcaccactctggcttgtaccattatcatatctcaatcaacaatttcaataatgttcagcttccctttttctattcttgtttctcttccttcaattctcc

SEQ ID NO: 258390 - DNA, 623 bp, Homo sapiens
tggctgtctaaaaaccatcttgaatgtaacattaaaaagaattgactttttctcaccgaatctattcctcttccacttttcattaatacagtaaatgatatcactattcatccaacgattcaaatccagaaatttaaggagtcatacttgattctccttattccatcagtccccacatgaaatcccctagcaaatcctgttagcagctttacctccaaaatgcattttgatttgttcattcttatccctctctactgtcaccactctggcttgtaccattmtcatatctcaatcaacaatttcaataatgttcagcttccctttttctattcttgtttctcttccttcaattctccccatagcaagcagtcagaatatgcttcacaaatataaaccagatttctttatcgtgatgcttaaaaccctttgttccatcccaacaaaataaacaaaacattcactgtggggctgtaaggctctgcatggcctgtaccctgtctctctctttaacagctaatactccaatgtcgctctcctcagagagcgctttcccttctcaatatttgttgatatatttccctgttaaatttcttcagagcacctacatcaaacttaattctttc

SEQ ID NO: 258391 - DNA, 623 bp, Homo sapiens
tggctgtctaaaaaccatcttgaatgtaacattaaaaagaattgactttttctcaccgaatctattcctcttccacttttcattaatacagtaaatgatatcactattcatccaacgattcaaatccagaaatttaaggagtcatacttgattctccttattccatcagtccccacatgaaatcccctagcaaatcctgttagcagctttacctccaaaatgcattttgatttgttcattcttatccctctctactgtcaccactctggcttgtaccattatcatatctcaatcaacaatttcaataatgttcagcttccctttttctattcttgtttctcttccttcaattctccccatagcaagcagtcagaatatgcttcacaaatataaaccagatttctttatcgtgatgcttaaaaccctttgttccatcccaacaaaataaacaaaacattcactgtggggctgtaaggctctgcatggcctgtaccctgtctctctctttaacagctaatactccaatgtcrctctcctcagagagcgctttcccttctcaatatttgttgatatatttccctgttaaatttcttcagagcacctacatcaaacttaattctttc

SEQ ID NO: 258392 - DNA, 521 bp, Homo sapiens
atatttcatgaaatagtcgaatgttaatgatacacagaaatgatgtgatgagctcattgaaatcagccaatactcagtaaatattttacaatatttacagagatttttttagtagatttaatgtaccagtgtgtactgtgaattttcaagagagggacatagtgtrctgtattgttatttttgttattttggattacagacatgtataaactgatcctacagtaaggcaatttgggagtttgtatatgtttaatgtggctacattgtaaaatgaaagaacgtgtgtaggaaatgtaggttgtaatttattatctagtctatctagttattttaccatatttttgtgactatttctcggttatgtatagtttcttagtatttgctgactttttttcagtaaatagacaatcattaaacccttaacttgagcacctacatcaaacttaattctctcactcaattattttctcaaagaattagattaggacttaataatttttattaaaaaatagtgctttata

SEQ ID NO: 258393 - DNA, 521 bp, Homo sapiens
atatttcatgaaatagtcgaatgttaatgatacacagaaatgatgtgatgagctcattgaaatcagccaatactcagtaaatattttacaatatttacagagatttttttagtagatttaatgtaccagtgtgtactgtgaattttcaagagagggacatagtgtgctgtattgttatttttgttattttggattacagacatgtataaactgatcctacagtaaggcaatttgggagtttgtatatgtttaatgtggctacattgtaaaatgaaagaacgtgtgtaggraatgtaggttgtaatttattatctagtctatctagttattttaccatatttttgtgactatttctcggttatgtatagtttcttagtatttgctgactttttttcagtaaatagacaatcattaaacccttaacttgagcacctacatcaaacttaattctctcactcaattattttctcaaagaattagattaggacttaataatttttattaaaaaatagtgctttata

SEQ ID NO: 258394 - DNA, 432 bp, Homo sapiens
taatttctgttttttcatttctaatttgattgtgctgtggtctgagatactttgtgataattttagttcttttgcatttgctgaggagtgtttactccaattatgtgattgattttagggcatgtgccatgcggtgataagaagaatatatattctgtcatttttgggtggagagttttatagttatcaggtccatttgatccagtgctgaattaagggtcctgaatatctttgttaattttctgtctagataatctgtctaatattatcagtggggtgatacagtctcctgctattttgtgtgggaayctaagtctctttggaggtctctgagaacttgctttctgaatccgggtgctactgtgttaggtgcatatatatttagaagagttagattttcttgttgaattgaaccctttaccactatgcaat

SEQ ID NO: 258395 - DNA, 595 bp, Homo sapiens
tgtgttacaaaagaaaatcatcttctttttagttattggagaatacccaaaaatcttctagtgttggataatgcaccctaaaaggctttatctgaataccccaaaatcttctagtgtttagaggataaaccctaatgggctttgctctgatacggaggtcaggttccccataccctaaagttcttatttagggttcgattctagcttctcaaagtttacataasaggttaacagttatacagatgtgcaatgactgatttttcctctcaaaatgtaacaggcccctctaacacacataataaaagtaagtcaatgtgtgagggtgacctggcagatcccaagcacagccccgtgtgcttcctgcaaaatcccaccatgctgcccagtgaccctcctgggcatcaggcatagtagcttccccttcttttaaaagctgatacctgaagagaacatacccaggtgaatcaggaatgtatcagtgtgagccccttctcctaagctgaagttttcccagtctagctgtcaaagtcgagggcttccagcctccacaggtccctttctactttggaagatgcatcccctctgatgaccttaa

SEQ ID NO: 258396 - DNA, 563 bp, Homo sapiens
accccaaaatcttctagtgtttagaggataaaccctaatgggctttgctctgatacggaggtcaggttccccataccctaaagttcttatttagggttcgattctagcttctcaaagtttacataacaggttaacagttatacagatgtgcaatgactgatttttcctctcaaaatgtaacaggcccctctaacacacataataaaagtaagtcaatgtgtgagggtgacctggcagatcccaagyacagccccgtgtgcttcctgcaaaatcccaccatgctgcccagtgaccctcctgggcatcaggcatagtagcttccccttcttttaaaagctgatacctgaagagaacatacccaggtgaatcaggaatgtatcagtgtgagccccttctcctaagctgaagttttcccagtctagctgtcaaagtcgagggcttccagcctccacaggtccctttctactttggaagatgcatcccctctgatgaccttaaacctatctctggaaaaattgatctcacagttcatttcactgttggctagccaggtctagattgct

SEQ ID NO: 258397 - DNA, 405 bp, Homo sapiens
gttggaggtggggcctagtgaaaggtttttgggtcatgggggtggatccctcaggaatggctttgtgctctctctgtggtaatgagttagctctcactctattaattcatacaaaagttggatgcttaaaagaggtggcacccgtcccttcattctctcttgctccccctctcaccataagacacgtctgctccctgtattccttctgccatgattgaaagcttcctgaggtcctcagcagaagcagatgctgacactrtgcttcttgtgcagcctgcagaacagtgagccaaataaacctcttttctttatgaattacccagcctctgatattcctttatagcaacacaaaacagattaacacagactctaatctaataaggatagtgcccttataaagagagg

SEQ ID NO: 258398 - DNA, 602 bp, Homo sapiens
gcctcccccaaagagattaaacccaaacagtctgctaacacatgggaccctttagaccaccttcccctgttgaacacaccaaccttcctctcccacaagcagctgccaacccagaccctttccctactcatgttattcctcccctctayaaacctgaatgtcacccctcaagaggacttcgacgtgagatagagcaatgtaagaaagatatccaaaatttccctttccccagtacctccaaagtgtctgctccaactctctttccccagaaaagtgcatcttgtaggaggggacattggctttgtgaatgctcccttaaccagctcagaagtccaaaacctaaaaaatgagcttaaaccactcttggatgaccattatggagtggcagatcaaattgatcagttttagagccccagctatatacttggcttatataagttatatacttatatacctgggctgagttaatgtatatcttaggcatcttattctcagaagaagaaagaagcatgatacacacggccactatgaccatttgggaacgtgaataccctactggtcagaacattccagtggctgaacaaaattcccagcccaggatc

SEQ ID NO: 258399 - DNA, 607 bp, Homo sapiens
gcatcatttttttggacaaatttcagaagaactctmattaataagtggagctattttcttcttggcctttataaaattcccttaaaagtcagccctcctgggaataaaatagtttatagttagcaattcaaatcagccattatacactatttctgtttttttttttttaaactcttgcaagtagacgtggtcaggcagaaaaacaattagagatgtgctgaaatatttataattttttgcaccagctattttttgaagatttttgggggttcatgtctcaatagtattttaaaacaatctataaagataaaaatttcggtattatacatgttgtaaatgacagttgaaataacagagatgaaagataactactgccttgataagatggcacaactctgacatataacttcatttttattcatgcactattcattcaacccgtttctattgaatttttattgaagttttactctcagccagatatggcattaatattggacataaaaactgaaataagccaagatctctcttttctaggacttcatcatcctagtggaaaaggcagaaatttaaagaaatgcaatgacaaggacaagtactctaacag

SEQ ID NO: 258400 - DNA, 607 bp, Homo sapiens
gcatcatttttttggacaaatttcagaagaactctcattaataagtggagctattttcttsttggcctttataaaattcccttaaaagtcagccctcctgggaataaaatagtttatagttagcaattcaaatcagccattatacactatttctgtttttttttttttaaactcttgcaagtagacgtggtcaggcagaaaaacaattagagatgtgctgaaatatttataattttttgcaccagctattttttgaagatttttgggggttcatgtctcaatagtattttaaaacaatctataaagataaaaatttcggtattatacatgttgtaaatgacagttgaaataacagagatgaaagataactactgccttgataagatggcacaactctgacatataacttcatttttattcatgcactattcattcaacccgtttctattgaatttttattgaagttttactctcagccagatatggcattaatattggacataaaaactgaaataagccaagatctctcttttctaggacttcatcatcctagtggaaaaggcagaaatttaaagaaatgcaatgacaaggacaagtactctaacag

SEQ ID NO: 258401 - DNA, 627 bp, Homo sapiens
  misc_feature (1)...(627): n = A,T,C or G
tatccattatgtgttgtgtgtgtgtcaataaaatctttacacttgtttcacttaagataatgacctccagttccacccatgttcctggaaaagacataatttcattctttttatggctaaatagtattccacagggcatacttatacaagagatatgtaactttggtagatactgtcaaatggttctctaaaatggtgatgctaatttacactagaaccaaaagcaagagwgccactttactcatgcccttgtaaaaactagatattattggtcttactaatctaagggtggatagataagcaaaaatatatattattattntgatttgcatttatcaatttctgagctctaaaatcttaatacatttcttgggccatttatatgttttttctttctatgcttggtgtaccctttcatttgtctctatnttttcttaataatttgtaagggctctttgcatattaaagaaattaaccttttatcatgtgttacaaagatttttacccagtttgacattgtttcaatgggatgtttgttttggttgtttaagtaattttactcatatgtactcaaatacactagactttttatcttgtagctgctggttttatgtcatactcaggcat

SEQ ID NO: 258402 - DNA, 606 bp, Homo sapiens
aactgacactaaagaaatgtagttctatgacctgattcagaataatcctcttagagaaattcagtgaactccaagaagatatagataacaactaaaccaaattaagataagaatacacggatgacatgaaaagcacaaaaaaagagacacaaatcagaacaaaaccaaataattmaaatgctgccatttcattttattgattgtttctctggctgtacttttacacattacttttcaactcatttgggtaaataccaaagagtactactgttggatcacatggtatgagtacatttagctttgtaaaaaactgccaattgtcttccaaaatggctgtaccaattggcatttaccagcaaggaatgggagttcctgttgctttgcattctcaccagcttttggggttgtcagtgttttgaattttggccattattataagtgggtagcgtaactcactgttgttttactttgcaattccctaatgacatggtcatgttaaacatcttttcatatgcttattttccatctgtatatcttctttggtgaggtatctgtttaggtcttttgcccattttttaatcagcttgctcattttcgtatcgttga

SEQ ID NO: 258403 - DNA, 637 bp, Homo sapiens
tttggagagcagtcttttctcacatgtcttttgcaaacatatttttccagtctgctgtgtgaattgtcttctttttctcttgacagtatctttcacagagaagaattttttaattttaatgaagtccagtttatcaattatttctttcatagattgtgcctttagtacctataaagtcattgccacacccaaggtcactttggttttctcctgttatcttccaggagttttatagttttgtgatttacatttatgtcttgatgcatttttagttaacttttatgaaaggtataargtctgtatctaaattcttcttcttttttttgaatttggttgtctagttcttgtagcatcgtttgttctctccattgtattgcctttgcttctctgtcaaagttcagttggctatatttacgtgggtctatttctgggctctctattctgttctgttgatctatttatctattctttcaccaataccacattgccttgattactgtagctttattgtgagtcttggagtcaggtagagtcagtcctctcatttgttgtctccttcaatattgtgttggctatttggaggccttttgcctctccatataaactttagagtcagtttattgatatccacacaatt

SEQ ID NO: 258404 - DNA, 572 bp, Homo sapiens
atttgataacacaaaagggtgactatagtcaataataatttaattgtacactgtaaaataactaaaagagtacaattgggttgtttgtaacaaaaatgatacatgcttgagagggtggataccccattttccatcctgtgattattagtcattgcatgcctgtatcaaaagatctcatgtactccataaatacatacacctactatgtacccacaaaaattaaaaattaaaaaacagttcaagtggccaagaacatagtttggtgtagttgtaggagaataaagcaacaattttgtttttactttcataaactacttcagggaaatatcccccaatccaccataataaagtaaagagaatttcaaagaattatgtgtggagagtatttggctccaraaaatactccatttattttgtatgacatagttcagtcaatgatcagtggacctctgatcaggctggacctttcaaaggagcaaagctatgacttacatgaccttccagatgggcttgctgctgtcatcaggtctgtaatttgtagtaacttacatttttctctttaacagtcttat

SEQ ID NO: 258405 - DNA, 617 bp, Homo sapiens
ggttccttatatagtttttcatatggaggtggcaatgtgagcaaatagatcattcaaatagattgtgattaatatttttctccctgacatctactattgtagatgttgagaaaaatctgtgggcatagggagaagagaactggtaaatctgcttgagggaatcagggactgcttcaccagagaggttatatttgaactgagtttccttttttaacatttaaaagtttcaaaacctatacaggagytaggcacagtggctcatgcctgtaatgccagcactttgggaggcttaggcaggaggatcgcttgagcacaggaatttcagactagctttggaaacacagtgaaacaccatctctacaaaaaaaaaaaaaaaaaaaattagccaggagtggtggcacacacctgtagtcccagctacttatgaggctaaggtaagaggatcacttgagcccaggaggtcaaggctgtagtgagcggtgttcatgccattgcactccagcctgggtgatagagtgagaccctgtgtcaaaaaaataaataaaacctacaaggaagtactgagaataacataacagcacctagatgccagtcacacagttctaaaaaatgtttat

SEQ ID NO: 258406 - DNA, 588 bp, Homo sapiens
aggtgcttagtaacgccaaatcagagagcattcatactttcacaggtgtgaccactactcaagtaggcaaattaattcttggggagctgcacactatcagcagattgtcagtagagcaatataagtctccaaatgtgtgcccacagtcaccatacatcgttgttagtagtagtgtaaaactaaacattagtgctatttcttcccaattccagtaattatccaaatactaagcaccactgctaatatccatctttcatgaattagctggaaggacacagaatgtgatgagacaatactattagtcataaatttcactgagcatatatagtttaggggctgctgatggaatagatttgaaatatttcaaacacattctcctttgataaacaacagagatagtcgacatttaatgacccctacagtaaatgcaatacaaatccataatttyatttattcattcaacaaaactattgagtacctactatatgctagatacttattttgccactggagattctgcagtttacataacaaagtacctacactcaggcaacttattttatgtttggtaaatttggatttttgtat

SEQ ID NO: 258407 - DNA, 556 bp, Homo sapiens
aatgattgtatggttttgatccttttttctgttgatatggtatatcacattgatttgcatatgttgaaccatcttggcatcccagggataaatctcccttggtcatgatgagagatcattctaatatattgttgaatttggtttgctagtattttgttgaggatttttgtatcaaaattcttcagagatattgacctgtagttttcttttatggatgtgtctttgtctggttttgttataagggtaatactggccttgcagaatgggtttggaagtattccttcctcctccatttttttgaatagtttgagtaggattgatcttagctcttcttgaaatgtttggtakaattcatcagtgtagccattggatcccaggcttttctttactgggagactttttgttacaacttccatctcattacttgttattggtctgttcaggttttggatttcttcctggttcaatcttggtaggttgtatgtatctacgaatttgttcatttcttctaaattttccattttattgtcatatggttgtacatagtagccactaa

SEQ ID NO: 258408 - DNA, 595 bp, Homo sapiens
ggagatgtccccacaacactaccccttttctattcttcgacccacttattccaatttcttcccatcttgcaagtcaacgaatgctcttcttcccctcctagcaaactcctacataacaaaagatccactcacactgccttctctatgaagctttcccaactcctctgggcagttaggactgttccactgcaccccktcatgcatcttaaataatctaattttaacatttatcacatggcactgagtatgtttctaccccacagtcaccctattgtgaataagttccgcataagggactcctcaatcttgacattatgtggcctattgctcagtgtctttagattttaaataaaaacgtttccaaatttcctattatatgtggaaagctattttggagttcccagaaagttataacatttctgaagagtaaagctttgaatgaaaatttacactatctggtcaccctactatatattaagtctgtatcagaaaccaaaaattcagttctataaaaaactttcagggactgacatttatatggtttagacaacttaacaccttcagcaggaagaagtcacaaaaatgccttaactga

SEQ ID NO: 258409 - DNA, 585 bp, Homo sapiens
gatttttcaagttatttacatcataaatgcagaaaacaaacttctacagtggtaaatgcatatttaccactacagctaatgcatatttatcaatttcctgcttgcaaaaaatactgcatgtctgtatcatttgcacttagtttcccaacatttagaagtctagagttacactgatactataaggaaatgacttacattaaacataaaacttacagcaaattggcatgatgctactgagtgatagatgcttgaagagtaaaaacttccctttgtcacgcatatcaatcaattgctgcaaatggcaataaaatgaatcacctagacaggaaggatggtcttaggattctcagctctctcatattcgtagattttatgccaagagaacaatgacatctatggtggtagctttcaaacggcacacaataagccttagaaaatgcatttgggtgtttattattagggaatttcctaactcrtatttttaagttcaaaaattgctaatgagcattgataacttttaggatgtaaattagctagtgagaatattcaaattcttccatcttagtgacacaaatgcactagaca

SEQ ID NO: 258410 - DNA, 344 bp, Homo sapiens
agaatcattccaataaacagaatactaagagctaactttataaaatcaacgactggctaaccaatacgaaagaatgaattccatccaccaccacaggttgccttaaagtcaaaaaggaggactgatcaacatctgtttggcttgaacacagattatcaaaatagtaaggcttactatctttagactggaaatgttaaaacaaggactaagaactaaaatacagcttacttgttttgtaagcactttcacggtgtttggtaaataaattccctaccaatccaaatccactacttgatrcaaataactacacattaaacatttctaatgctaagcttaaagtactt

SEQ ID NO: 258411 - DNA, 529 bp, Homo sapiens
agcccctccataacttgaaaacatcttttttttcttaacctgaaataggcttaaattctcacattgtcagatgagtcttaacactttagtatttgctaaatttagcatattaaaawtttttaaaaggagtataagggccctaaattggaaaaaaaaactctactacgatcataactgtgggatttcatttccagttcattctgtcagaatcaatctaaagtccatgtaatgtaaacagttcgaaaaaagtcttaaaaatgaattgttgactttaaacacacaatcttcggagccgctcacaacgtccgtagaagcagactcctccccgctcctggggaaaaccctgcctaatatttataactttatgacatactgtaatactcacaaggtggttgtagaagtataaacacgactggagttatctgattggctgctggtgatgtaacacccatgtcaatacttcccagtgaacgcacgtgttcgaccttttatttaaatttccatttcatcacagcaataagacactcgg

SEQ ID NO: 258412 - DNA, 529 bp, Homo sapiens
agcccctccataacttgaaaacatcttttttttcttaacctgaaataggcttaaattctcacattgtcagatgagtcttaacactttagtatttgctaaatttagcatattaaaattttttaaaaggagtataagggccctaaattggaaaaaaaaactctactacgatcataactgtgggatttcatttccagttcattctgtcagaatcaatctaaagtccatgtaatgtaaacagttcgaaaaaagtcttaaaaatgaattgttgactttaaacacacaatcttcggagccgctcacaacgtccgtagaagcagactcctccccgctcctggggaaaaccctgcctaatatttataackttatgacatactgtaatactcacaaggtggttgtagaagtataaacacgactggagttatctgattggctgctggtgatgtaacacccatgtcaatacttcccagtgaacgcacgtgttcgaccttttatttaaatttccatttcatcacagcaataagacactcgg

SEQ ID NO: 258413 - DNA, 324 bp, Homo sapiens
atattttacttttttatttataagatagcaaatgcacatcaggaattgcaaagctgtttttgagaaaacgaggatccagtttacctgaagagttgtgaagaatatatgaagatggggtgccatcagaggtgaggtaaccctggttttgaggggaaaaccttaaaactagcaaaggaaagccagtaagaaggggaagtagaatttggaaaatagaagtaattgagccacaaactttacaaaaaagcgtgatacagaacaaaartagattatgaataaaaaatagattaacctggagggggtgcagctagcaggaaggcgttaagt

SEQ ID NO: 258414 - DNA, 567 bp, Homo sapiens
gagtctctgttttgctttttcactttaagcccattccaataataaggcaactgctattttgggagtactagcaattgttcaatttagtgtcacagactgcaaatgatttatgctattggaggttttcacttttgtgggaagggattatagtgatgggttctagaaaacctattgaataaataaatattccctggcagatgttgcttttctgcccccagccaatactaattgcaaagcacagagcttaggggttgcctgtggtgatattaattaacatcatgaaacttcgtgtatgggtgtcagtgaggtgataaacaactgctatttacatgatgtaaagtggctgacaatgggtcaaaagaactgcgatatcatttctcttgacagacactgagcatctatttatagatgttcttatttgtgtgagagaaaaagggatatttttttcccctcttaaaaaaaggtggtcatttagaaagcaaaagatacactgcttttaagtccagaagcctcattaggatttctgaggaaatgaaaagtrgtttgatgggagactgaactaaacct

SEQ ID NO: 258415 - DNA, 597 bp, Homo sapiens
attgtaatcatccttggcattgtgtgaacaaaatattttcctcattaaaattacaccccttggaaagtacactctatatgaggaggattttgttttgttctttgctataaactcagagtctagaacagtgcctgacatatactagataataaatgcttgttgagtgaataaaagcaaaaggttatgccagctttcctcaagcagtcagcaggtaaagtccataatctgagagcccaaatttggggtgagtagaaaggtcgaagaataggtcaaagaaaccaagaagagtcaagtaagaaattatcraagttcaagtggtgtatccattgttatcgagttttggaacatttaaactcagcagaaaagggtctgtctcaccagggactattttattagcctcttcatgtatgcagcagttttatttacttggtcttggaatttgtaaaggactatttgggatctaactatggtacattggacagtgagattcttattcattcactagcactttcatctatatgatcatttgtaattattctacaaaacccacagacagaaattaatagtctcattataaattatttacttgtcccaggt

SEQ ID NO: 258416 - DNA, 555 bp, Homo sapiens
aagccacttaacatatgcatactctcacatactaatttttttgtggtaaaaaacacttaaaatctcctctcttagcaatttgaaaatatacagtataatatattgttattaactatagccagcatagtgtaccatagatgtcttgatgtaattgtctctgtctaactgaaattttttgttttctgactatctccccagaactcagaaactttttamatttttcttgtatacttctagttagattttttttcctgacttttaccagtttttttctgatttatgtcaaataagtacaatgtctgaatttaggattcagcattaacatctaaggtcaataatttagctatgaattatcattgctaaggcttagcaatgctaaggcacatagcaatgtgcctataagagaattatataaatataaccccaccttttaaaaactcattgtcaccaatccatgctctgtaggaccctggtcctgaacttattttgcctgaaaatactctttttttggtcagtgatatgaccttttggtaggtcgaggttctattcaaatcc

SEQ ID NO: 258417 - DNA, 624 bp, Homo sapiens
tactatgagaagtgtactaaggaagaacatttagatagtttttgtcatttgttattacaaagattcttctataaataatttgaagacaaatctattcacrtatgtgaaactatatctatatgtgtgagtatacctatcaaataaatttccacaagtagaatttctgttaaaagctatatgtacttttaattttgatagatattgctaaattgtacttctaagttctttagtaaattaaaactatctaacattttaaataaatattccattatctttcctctttgtgagaaaatcttaacttgtttaaattgatggaacaaatgagttaacacttccagaataaattcatagtctgtaaaatacccaatgacattctgaaattgtcagtggtatttttatgctaaaggactgtccaaagcagagaataaaataatttatttgctactgtgcttaaataattgataaagtccttagaaaaaaattatatttttagaggatgaatatggaaaaatttgacaacttttttttttaaatgaatgaagtcaatttgggcatgtctgttctaacaaattatttaagagtttgggggataaaactcatctgcatggaacccttgcattttga

SEQ ID NO: 258418 - DNA, 612 bp, Homo sapiens
attagaagatgtggaaggaaaaaaatgctccccaccccaggatgtccacatcctaatccccagatcctgtgaatatgttatcgtacatgacaaaagggatcttgcagatgggattaaggttaagaacctttgacatggggagattattttggattacctaaatgtgcctgttgtgatcatatgagttttgaaaagtggaaaaccgttctcagctgttgttagaaaaatatgtgacgaccaaagagtcatcaagatgcaatgttgytggctctgaagatggagaaagagggccaccagccaaagaatgtgggtggcctcgagaagataaggccaggaaacctattctctcctatggcctctagaaaggaacaaagccctgccaacactgtgattttagcccataagatccatgtccaacttttgacttatagaattacaagacagtaattccatgttgcataagctaccaaatttatgacaatttgttaggcagcagtaggaaacttatgaagaagggtataggcactacccattatatccatgtaacaaaactgcacttgtaacccctaaatttatacaaatgaaaaaagacaggtatagagataggtgaag

SEQ ID NO: 258419 - DNA, 612 bp, Homo sapiens
attagaagatgtggaaggaaaaaaatgctccccaccccaggatgtccacatcctaatccccagatcctgtgaatatgttatcgtacatgacaaaagggatcttgcagatgggattaaggttaagaacctttgacatggggagattattttggattacctaaatgtgcctgttgtgatcatatgagttttgaaaagtggaaaaccgttctcagctgttgttagaaaaatatgtgacgaccaaagagtcatcaagatgcaatgttgttggctctgaagatggagaaagagggccaccagccaaagaatgtgggtggcctcgagaagataaggccaggaaacctattctctcctatggcctctagaaaggaacaaagccctgccaacactgtgattttagcccataagatccatgtccaacttttgacttatagaattacaagacagtaattccatgttgcataagctaccaartttatgacaatttgttaggcagcagtaggaaacttatgaagaagggtataggcactacccattatatccatgtaacaaaactgcacttgtaacccctaaatttatacaaatgaaaaaagacaggtatagagataggtgaag

SEQ ID NO: 258420 - DNA, 577 bp, Homo sapiens
aactagcaaccttaaatctaaagtttcgaaattaggaaatmtccaattataatttttcaaatggtctatctaataaacttgttgggggtgaaatctgagcttttttctttctagagaaggttgttaagggttaaggtaaagagaataaaacttttctaacaatgtggataacaggcatgccttcccagcctcccctgggcaccccccaaatacctaatataacgcttttcacacagcatgtacttggaaaatattttttaaaataagggagataaagagtttcaactcacagttttaaaattcaaagtgaatttcaagattcttcagggtgaagaatcttttaggtttttattcttttaggtttttattctaccttcattgaaataatgaacattacctcatttgctcattgtggggattaaataaatgatccatgtaatgcacctagaactgctcattataaatgtaataagtgagattttttatcattatttggatattataaaaattaatcaataagcaagtattattaaatgcctaacaatgtccttagcagtaccttcagcacagtgttgaa

SEQ ID NO: 258421 - DNA, 424 bp, Homo sapiens
atcataaaaaagacaagtatatccaaatgtactgtacagaactctgggttttaagtggcagaaattcatctccaagtaagttaaactaataaatacattaatagatagatgcatagaaacctagatgtattcatttgatgagagacgttctcagtatcgcccctggaaagtccagagtgatttcagaatagctagatccagagggccaacaatgttttcaccagggctctctccatccatggcttcttctcttgactctactttcctccatatggtgtcatcctcaatcctcagcagattcctgcgtttgacatcaaagatacccactgggaagttcctgccttttatcatctttattgatagcagtttcaaaaaggactccctttcttccctgtttccccmattatttaccaaaattggattc

SEQ ID NO: 258422 - DNA, 451 bp, Homo sapiens
ggcaagtaatcaggctagagaaataagagctaattacagtgaaacagagataatattcatgggagtattttgtggtttctttttcacaaaatgttacaactgaaaaagacttttaatattacctagctagtaatccacaaactgggrtcccaatatcccaggtactcagatctgagaactattaagctaagttcagaacttctaaaagcccaatgaatgttacacctttttctataatgtggctgagtgatgtagaaaacaaaagccctttgcatttgtttctaggcatatcgattctgtgaggttataagaacacattattaattaaaccgagaaggcaaatgtacttggtttggtgggttaatcatttaaaaatgctgggccaaaggggagataaaatgtggttggataatttttttccagtggcaactctaatcaaccccttgcccag

SEQ ID NO: 258423 - DNA, 558 bp, Homo sapiens
ctgagtgatgtagaaaacaaaagccctttgcatttgtttctaggcatatcgattctgtgaggttataagaacacattattaattaaaccgagaaggcaaatgtacttggtttggtgggttaatcatttaaaaatgctgggccaaaggggagataaaatgtggttggataatttttttccagtggcaactctaatcaaccccttgcccagagcctatgatcttttcaaagaccttgtgaaaatgtattgggtcctgaaaaacataggttttggttccaaaaaaagaaaagaaaaaggaaattgctaaatcaaaatgaatacgtgccaacataaatgcctacaaaatgtaactgttaatcaattttattaatggttaaatagaaataattaatgatttcattatttttgaaaaccatataattatttaggcagmgattttgatttgcatacggtgggtgatggaaaaggaaaagttagaggaatagtggccattctggcgagactgtgggactacttgggaagaactgacctcaccagtggctaagtgaaggaagccacc

SEQ ID NO: 258424 - DNA, 453 bp, Homo sapiens
aaaaaaatgtgaatacaagagagaaacaaaggcctgattaccagaagtcgatctataggatacagaatgtggcattgtacaaagtagaaattcctttctaaaatttaagaagaaatcattgtaacatcaggaataaacaggaaaaaggagaaagcattaagattttccagtcaaggagagatctggaaacataatgatttacytcctgccatagcaagcatggtatagcaaattttatgatttggggttgatcaaaattattgtgtgacgaagacataattaaaaaaagatttgactctgtctctaaccttttttaaggaaggaattattttcttaaaaatcaagaacaaatcaaggaccaaatatctataactaaagcacaaattaagtgttcagaagaatattggggagaaaaagcagaatgcaaaaggaaaaatgccttatggaaagagc

SEQ ID NO: 258425 - DNA, 513 bp, Homo sapiens
aaatcccaaaagtactttctggaacatttccatgttgttaactaatgttaattctatttcaagagatgaaggttactcaccgtattgtcaataagtaaaatacttgaaaataaaaattactgatttggtgctgagttggtcttaagtttaatttctatcaacattatagtctatcagttctagagttagaagatagagtacatgaaataactaaactatttttgtaaattgctcggcttttsgtgggaatgtaaataaaattcttaattgtaattatgtaccaggttatacagtttgatatgcataacatttagctaaataggacacataaactttatatggaatatttttagaaaaactcttcattaaattgggctgcctcccccatatacactaaaagccaatagcacaccaccactaccaccaccaataatttgtgacaaccctgaacatacccagtcctacctaaaatattctgtaggtgtgtcacttgccattatgagagccatagag

SEQ ID NO: 258426 - DNA, 513 bp, Homo sapiens
aaatcccaaaagtactttctggaacatttccatgttgttaactaatgttaattctatttcaagagatgaaggttactcaccgtattgtcaataagtaaaatacttgaaaataaaaattactgatttggtgctgagttggtcttaagtttaatttctatcaacattatagtctatcagttctagagttagaagatagagtacatgaaataactaaactatttttgtaaattgctcggcttttggtgggaatgtaaataaaattcttaattgtaattatgtaccagrttatacagtttgatatgcataacatttagctaaataggacacataaactttatatggaatatttttagaaaaactcttcattaaattgggctgcctcccccatatacactaaaagccaatagcacaccaccactaccaccaccaataatttgtgacaaccctgaacatacccagtcctacctaaaatattctgtaggtgtgtcacttgccattatgagagccatagag

SEQ ID NO: 258427 - DNA, 513 bp, Homo sapiens
aaatcccaaaagtactttctggaacatttccatgttgttaactaatgttaattctatttcaagagatgaaggttactcaccgtattgtcaataagtaaaatacttgaaaataaaaattactgatttggtgctgagttggtcttaagtttaatttctatcaacattatagtctatcagttctagagttagaagatagagtacatgaaataactaaactatttttgtaaattgctcggcttttggtgggaatgtaaataaaattcttaattgtaattatgtaccaggttatacagtttgatatgcataacatttagctaaataggacacataaactttatatggaatatttttagaaaaactcttcattaaattgggytgcctcccccatatacactaaaagccaatagcacaccaccactaccaccaccaataatttgtgacaaccctgaacatacccagtcctacctaaaatattctgtaggtgtgtcacttgccattatgagagccatagag

SEQ ID NO: 258428 - DNA, 582 bp, Homo sapiens
aatcaaactcctgatctctgctcatctcacctcaagggtgcagggttcccatagtccaatctggttttaatcttgacattacttctccttcaattccattaccaaggctttgattttgacctccaaaattaattacaaaaatctgcctctgccgtcacacaagtgtaagcattcaccatcctttgtgtagaaaaacaacaatgtctccatgactgatctcctggcattgttccccacccccaaattcatcctccaatgggataccagatattatatttgcattcaaaatgcaaatatgaaaactatcaccttscaaccacggataacacttaaatgaattaccattgctttgcttaagataaagaccaaaactcagcacctgatttttgtagcccagcaaggacagcctcctccacttttatctctttagatgctcccattcttccctcagcttcagctgcctggctttcttcaagctgccttaacattccagctctctcccatccccccatcccctaaaaacacaaactcaagcattctctagttaactcttagttaacactttgaaaatatcaactcaaa

SEQ ID NO: 258429 - DNA, 512 bp, Homo sapiens
ataaaaataaaatatactacaatatttatttaacttatatcagaaaacaggaatagccaaaaggtggaaggaacccaagtccatatacagatgaatagaaaagcgagatgtatatacaacatacaatggaatactatcagcctcaaaaaggaaagaatttctcatacctgctttaacatagatgaactttgaagacactatgctacawgaataattcagacccaaaagatcaagtattgtataattctacttatatgaggtacccagaagagtcaaattcatagagacaaaaaatagagtagtggttaccaggagctggtagaaggcagaaatggggagttatgtaatggatacatagactcactggggaagatgaaaaagttctggagatggatggaagtgatggttgtacaacaatctaaatatatttaatgccactggattacacacttaaaatagttaaaatgttaaattttatattatgtatattttaccacaataaacaaaattta

SEQ ID NO: 258430 - DNA, 545 bp, Homo sapiens
atagacccatgtttgaatggtgatgccatcccagttctcttttcctcagggggtgggtgaccttgatattgatgtgggtaatgccctaatctgggtgcttgatgcctagtagctgcccaggtaggtactcacctcacctttagagctaaccttaaggaatcagctgctttgtctcagtgtctgagtctccagtttattcatctgtggggcagctccttcccagagaaatctaagttcagcgaaatttggttaatataattcatttaaggcaatcacatagtcattrtatcagaactgtgctccaatccctaatttttatgtttttgagaagtatattcacattaagcaaaaattaaacacaatgataaggaaataccctattgtcttcctcaccctggagtaaaattccctaacctactgaaaagaatgtagattgaacagcagctgtgtgactgcattagggctctaatatgcagtggaagtcactgaaatacagtggcttagtgaactacctctgatgtccagggcctgactgtcaaacctca

SEQ ID NO: 258431 - DNA, 573 bp, Homo sapiens
ccattcatttttaaaggctccttcaggccatgcagctttagccataactagcagacagaaagagagatgattactgcaaacatgttacctcttaatccaccaccctgcctcctatgcgccagcctccaatcttcatgaactgctggctcatacacacaaattttccttgtacctgtataaaagtctgtgtgatttggcctgtgatctacatagaatgccaaaattctcatttgctttgacacacctctgcacctctgtagtttccattttggcattatgatttgagaaatakcctctattaataccaagtaaagatttaaataaagtggtttaatgcctggtcaatagactccacaaaatataaaatgggtccttcatagtcatctatgtggaaaatggatagaatagaatggcatttacatttgcaaacacttaatatttgagcttttggcataggtggttgaggtggttgatgggaggaggcaatactcaggggcaaaatagtgtacttttccttgcagatatgctgaatttaatcgctctgtgtttctcccttacaggatgaaaacataa

SEQ ID NO: 258432 - DNA, 602 bp, Homo sapiens
gcttcacatgatgagcttgggtttccttacagcatggtgatctaagggtagtccagcctccttccaagaaggaatgttccaagaggatgagcaccaatgtcttaaagcccttcacaagctcttcttttgccatgtttgctaatgccacactggtcagagcaagtcatggggcaagayagatgactgtcaaacacagtttataaaaaagaaggcataaatgggtataattttatgttagcctttaagcaacaaggaatcataatttaaaggaacaaatgtgtctaccctggatttttttttttttttagcataggagttggcaaacattggcactaggtccaggagaccaaaatgtcactgtggtctaccagttggtataggggcttatgaaggtcaggtgatcaatggagttttagctcagatctatcccacagtggctccagtgagtccctgaacccatgctgtgattatttccccatttctgggatgcataatttaaatagacattctcagaaactggcagaattttcacattcattccctggcctgtgaagtgagggcaaaaaaagtagtagaaaaggccaagggaaaaccactagaac

SEQ ID NO: 258433 - DNA, 596 bp, Homo sapiens
tgttcccccactggatgtattcagctgtgtctcaacttgctctttgccagtaaaactagtcttagagccaaacatttcctgcattttctaacacaagaggtccctcaagtgtctgcatacccttgcagcctcctgcataaaatagaagtgagaatgttagagaaaaggaaatgtcattttatgggttttattttagaaaatctaacatttatcgtaaaagatcaatagataacattctgttgaagttttcactgtagtgccctgtggaggtgtggatgatcgaattctttttagttttagcaattgttatgggctgaatgtgtccaccccctaaattcatatgtcgaagccctacccgccaatgggatggtattgggaggtggagactttgggaggtgattaggtttagattagawcatgagggtgtgacttgcatgataggatttgtgcccttataagataacgaagacagaggtatctccttctttctctcgtctccctctctccttcttctctccctcttgtccactgtccctctcttctctccctctctccctcctctttctcctctcactcctctctccctctctccctat

SEQ ID NO: 258434 - DNA, 586 bp, Homo sapiens
tcactacattgctaagactggtctcaaacttctggcctcaagcaatcctcccgcctcggcctcccaaaatgctgggattatatgcatgagccactatgcccagctcttggcagaagttttgaaattcatttttcgtctactaatgcaggttcttcagcagggtttattgsaacctgtaatctgtgggctagaggtggaatggaggtggagcggttcttattcttgctacagataaaaaaaaccatgatgatttatcttagaaaagaaaaagctaaggaacagtttaatagtcttcaaataaaaattttattagtatcttgagagaggagagtggtggctctgataatcctaaatttatgaacaactttgaaatgtgtatgtttgcacacttgacttagctaattttataaagagtttgtattcacctggtttttgagaatatgctatctaggtcagaaaaggagatggtgctgtggtaatgtacagggtaacagagaaacttaatttaggattacaaaaaatgccacaatgtggataattaagagctagctgtccaagaagagatattatgtaatcattcttcaac

SEQ ID NO: 258435 - DNA, 592 bp, Homo sapiens
gacaacctcattttccttcctgataccaagttctttagggacacatttccctatagctgtcaagaacctgctgtctcattcccatcctacagtcatttaagagcaaagccaaagttaagatctgaggtcacaggaaaaaaaaaaagatgttataggatgtactgtttgaacaactcctgttagatgttagtgtttcacagaactcatcagagaaacccaagttttcacaaaacactacatttatttccacctcccacagcagttatcttgcccaagagaggaaattgtttccaatttacacatggtaaaggacacctcctgaaaatttccctttggggctaggaatttaatcttactactgggttaatgcatttatttgggtggctttttaacctaaataagtgagcagtacttcctcccaccatcactttcataattgctgtgaaaagaagccctcgtgggggttgctgcagagacagcctggggaaaccccgtgaagttaaatgcrctgcttgaaaacacagacacccggttctagctgctccagccctgagccattagatttggtcgtcaaggagcccagcagggcaaa

SEQ ID NO: 258436 - DNA, 523 bp, Homo sapiens
gcactgcattgatgcagtggaacacttactrtctccgtctgtacacacaccttgagaccaaggcttttaatcaggaagagcctaaagttgtaagaattaaaaacataatttccactaatgggtgaaagggagtgtgtttaagtcagtcctacttgtatcctttaattatcattcctgtgtattccaaatgctgggaaaacagcacagtgattgcatatagtgatcactggttcaacaaatatgctgtatcctcgaggacaatgacctagccatgcaaggtgcaattcctaagccaatgcctttttaagtctttaaaaggctattcagatactctctcagacccccgcaaagtcaatagtcttctgatacaatagatcagagcattattctcatgggtagtatttattattgttatttttttgcctcaggaattcaaagcagctcaccaagtgctgtgcctctgtcttagtggtaggaaatgtaaagtattcttttgagtagggtgtctcaacatacccctgga

SEQ ID NO: 258437 - DNA, 480 bp, Homo sapiens
tttgtagttctgcaactctattaaatgttgacttcatacctcagctatgcccactttgcacttctgaagacaagggatgctttgaaagctacgaagaaggacctttgtctttcatacttattttttaaacacaggtttattaagataaaatctacatatagtaaaatttagatgtatagtttgatcagtttttgaaaaatgtatatattagtgtaacaaccaccacagttgagataaggaacataagcatcaccccaaaaaattccttcatgatgctcctttktaattaatcttcttgccaaccccagcccctggcaaccatggttctgatttctgtctctgtgactttttaaaagtatcacataaatggaatcattcatgaggtcttttgcacctgcctcttttcattttaacacatttgagagtcattcatgttgctgcatgcatcagtagttcattcccttttgtttttaatagtat

SEQ ID NO: 258438 - DNA, 494 bp, Homo sapiens
aggctcctcaggattccatttgtctttgtgtcctgatttctcaaattctttgaggatggacccagtgtcaagcacttaatgccccacacttagtaggggaacaataaaggtgtgttgtagtgctgcctttgacacacatgtacattgtgcttttagaagttgctataaatgcaacctgaaacagcatgagcagaaaaggagggcttcttggctcgtgagctagatatgcaaggaagtagctggggacaaccagaaccagaaacctgaatgctgtcagttctagatttctctcccactctcaagttcgttctytatttcttccccagatttctgtgcctgagtcattgttgcctactatctactgcagacaggatttttcacacagaagacatacctgctgacagctctggggttgctttcacaaagctccattcctctattcaattcaaaaactttcaagacaggactcagactggcttgatggaatcatatgc

SEQ ID NO: 258439 - DNA, 588 bp, Homo sapiens
gctggaccgcagggactctgcagctctagtgctggtggtcagagtcaacacaagtgccctggtaccrgcagtcctgagtccacaaggtgtgtttcatgttgtggctgcaggagggacagaggctgctgcaggggggccacccagcctcggaggccatccaggagcgactggaggagctgggagcactctggggtgagctgcaagacaactcccagaagaaggtggccaagctccagaaggcctgtgaggtgaggttgtgcaggccgaggggtggctggccgggctccaggacactcccctcctgcctacctcactttctaccctaggccctgcgtctgcggcggagcatggaggaactggagaactggctggagcccatcgaggttgagctgagagcccccactgtgggccaggccctgcctcgggtgggcgagctcctgggcacacagagggagctggaggcagcagtggacaagaaggccaggcaggctgaggcactgctgggccaggcccaggcctttgtgagggaaggccactgccttgcccaagatgtggaagagcaggcccggcggctgcttcagaggtaga

SEQ ID NO: 258440 - DNA, 419 bp, Homo sapiens
gctttccttaacatttccttaacattgtctaggaagacttaaagatgtttgtatataaatgttaaaatgataatcagtatggtaaccatattggccaaactggtctcaaactcctgacctcaggtgtgatccacccgcctcrgcctcccaaagtgctgggattacaggtgtgagccaccatgcctggccattggcagaaaatctttagggacaacagactaggttagtttagttactaacctgtagctttcctggctgacgtgaagtgttgaattcccatcaagcaaggataaaagtgttctgatatatttataataataatattctgatcaagtaatagcttcctaaaagtcctacaaacttttcttgatttcttttcttgtattttagtagccaatgaaagaatgtttggattcctg

SEQ ID NO: 258441 - DNA, 549 bp, Homo sapiens
gttcaggggcatctgggcagggtccagagggttctgatacagggggccccattttgaggaatctgggttagggctgagccaccactcctgagcctgagcctgtccctcctacataccctgccatccccaaaacaagtgaaagaaggggctggcaaacttggagaacctaccgaaaccaacctgggctttgtcctgcatctctgtatgcccgagggtgaaggctgccctctcagagaacagaggggagaacttgagtgagagagacgatggggtggggcaggctctgtgactaaccagcctccttccagggcagggctttggaaggaagcagaggtgactgtcccgcaggagtcaccaagtgaccctgtyggcctcatgggcgtctgacagggagggcgtgaggcctgatgctgggtcctctgtctgtgtctcactgcttgcaggagcacccccgcctagcctacttcggaagctaggatttttaggaacccctaatgaaaataaagaaggaatttttttaagttttcaggtacactttgaaacgtttaa

SEQ ID NO: 258442 - DNA, 567 bp, Homo sapiens
aaggaatggaaggaaggaaggatagaaaggaagaaaggaaagggaaggaaaggagggaaagaaggaaagaaggtggaaaggagggaagaaacgaaaggaagggaagaaaagggaaaagaagggagaaaggaaggaaggaggggaatgaaggaaaaaggaagggaaggaaaaacgaaggaaggaaggaggaaggaaggaaggaaggaagaggratactcatttttgaatcccctacatattcctctctagaagcactaagatttgagtcttcccctcctcttccactaccctaacttcaccctaaggcaaaagaatggtgatctgattcggtgtattccagaaaatgactgtgcacagaggtgatcgtgccagcctagcatacaggggttgctccctgtgtagcccctgtccaccacccaagtgcacacacctcacactgattttgacagcagacactgagccatcactgtccttcacatccttcaccacaataattcgtgcagagactcaagtcagctccactaaaagtatcccctagggtttttaagaggaagccaggagacatct

SEQ ID NO: 258443 - DNA, 564 bp, Homo sapiens
acttcagcaaagtctcaggatacaaaatcaacatacaaaaatcactagcattcctatataccaataacaggccaaggctagcaaggttctggagaaaaagattatacattgttggtggaagtgtaaattaatttaaccattgtgaaaaacggtgtggtgattccttaaagagctaaaaacagaactaccattcaacccagaaatctcatactgggtatatacccaaakaaatacaaatctttctatcataaaaacatgtgcatacatgtatattaattgcagcactattcacaatagcagcactattcacaacagcaaatgcatggaatcaatctaaatgcccatcgatggcagactggataaagaaaatgtacatgtacaccatggaatactattcagtcattaaaaagaagaagatcatgtcctttgcagtgacatagatggacctggaggccattatccttagcaaacaaacataagaacagaaaagcaaataccacatgttctcacttatatgtgggagctaaacgataagaacacatggacacatagagggcaacaaca

SEQ ID NO: 258444 - DNA, 594 bp, Homo sapiens
tcacattttaaaaatgccatcatcttccatttgatagcattatatttgtctgtggcatcctcttccataaaacatgtatataatccccctgtgtttgacaagtgtttcctggatgaagcacaacaatagttcatcacttataaaccacattattaagatagagcgttggtgttaacgtctgaaacggtctgacttccatagaatcttgttctgcaggaaaaaaaaaagtcatattcttttcacttaaatatagaacaagtgtccacactttagatctcacagagtgaraaaaaaaatgttgcttttgccaagatctttgaaatgagtactttctttaacaactcacaagaggatttaagtttctattctttttgaagaattacagctttcatcaaatcaaacgaaaagaattagtaactgtgctggtacagcactgattcaaccaaatgtaacaaaacgattgaaaatttctgttgaaaaagtgccagagctagagctaatgttgtgaaaccatgttagttaagatgagaaatgctgacccgaaaggaagaagcagaggcgaaatgaatgtaagtagagagtttatttgggccg

SEQ ID NO: 258445 - DNA, 594 bp, Homo sapiens
tcacattttaaaaatgccatcatcttccatttgatagcattatatttgtctgtggcatcctcttccataaaacatgtatataatccccctgtgtttgacaagtgtttcctggatgaagcacaacaatagttcatcacttataaaccacattattaagatagagcgttggtgttaacgtctgaaacggtctgacttccatagaatcttgttctgcaggaaaaaaaaaagtcatattcttttcacttaaatatagaacaagtgtccacactttagatctcacagagtgagaaaaaaaatgttgcttttgccaagatctttgaaatgagtactttctttaacaactcacaagaggatttaagtttctattctttttgaagaattacagctttcatcaaatcaaacgaaaagaattagtaactgtgctggtacagcactgattcaaccaaatgtaacaaaacgattgaaaatttctgttgaaaaagtgccagagctagagctaatgttgtgaaaccatgttagttaagatgagaaatgctgacccgaaargaagaagcagaggcgaaatgaatgtaagtagagagtttatttgggccg

SEQ ID NO: 258446 - DNA, 594 bp, Homo sapiens
tcacattttaaaaatgccatcatcttccatttgatagcattatatttgtctgtggcatcctcttccataaaacatgtatataatccccctgtgtttgacaagtgtttcctggatgaagcacaacaatagttcatcacttataaaccacattattaagatagagcgttggtgttaacgtctgaaacggtctgacttccatagaatcttgttctgcaggaaaaaaaaaagtcatattcttttcacttaaatatagaacaagtgtccacactttagatctcacagagtgagaaaaaaaatgttgcttttgccaagatctttgaaatgagtactttctttaacaactcacaagaggatttaagtttctattctttttgaagaattacagctttcatcaaatcaaacgaaaagaattagtaactgtgctggtacagcactgattcaaccaaatgtaacaaaacgattgaaaatttctgttgaaaaagtgccagagctagagctaatgttgtgaaaccatgttagttaagatgagaaatgctgacccgaaaggaagaagcagaggygaaatgaatgtaagtagagagtttatttgggccg

SEQ ID NO: 258447 - DNA, 524 bp, Homo sapiens
atctgtatctatatccatatctatatgtacagaggggcaggaaggcctgaagcatgaacataaatgtatgcatatggtgctacatttttggtgttgcattctttmgtttagtttttgattttcctaattttctaatccaattaacacatattgcctgtgtaccaaaaaacaaaggaaggagggtatccactaaaagaatagtgagaaagaccgtggcaactatttctatccaatttctcttcaaaacccaaaacaaacaaaaatcaactaacaacacataattatacacatcaataagaaaaagaaatgcaactaaaaaaaattccacaaaaatcgtaactagaagtttgggagcactaaaaactctaaaatacttgtaagtaaaacttaaacaccaaattcagcagagctgtagctgaagcttccgcttgcaggcatttggggcaaacaggaggaatctgattaaacctgtgaaggagagaggaaacaaaagagagcctaagatggaacagaaatcacagcct

SEQ ID NO: 258448 - DNA, 524 bp, Homo sapiens
atctgtatctatatccatatctatatgtacagaggggcaggaaggcctgaagcatgaacataaatgtatgcatatggtgctacatttttggtgttgcattctttcgtttagtttttgattttcctaattttctaatccaattaacacatattgcctgtgtaccaaaaaacaaaggaaggagggtatccactaaaagaatagtgagaaagaccgtggcaactatttctatccaatttctcttcaaaacccaaaacaaacaaaaatcaactaacaacacataattatacasatcaataagaaaaagaaatgcaactaaaaaaaattccacaaaaatcgtaactagaagtttgggagcactaaaaactctaaaatacttgtaagtaaaacttaaacaccaaattcagcagagctgtagctgaagcttccgcttgcaggcatttggggcaaacaggaggaatctgattaaacctgtgaaggagagaggaaacaaaagagagcctaagatggaacagaaatcacagcct

SEQ ID NO: 258449 - DNA, 524 bp, Homo sapiens
atctgtatctatatccatatctatatgtacagaggggcaggaaggcctgaagcatgaacataaatgtatgcatatggtgctacatttttggtgttgcattctttcgtttagtttttgattttcctaattttctaatccaattaacacatattgcctgtgtaccaaaaaacaaaggaaggagggtatccactaaaagaatagtgagaaagaccgtggcaactatttctatccaatttctcttcaaaacccaaaacaaacaaaaatcaactaacaacacataattatacacatcaataagaaaaagaaatgcaactaaaaaaaattccacaaaaatcrtaactagaagtttgggagcactaaaaactctaaaatacttgtaagtaaaacttaaacaccaaattcagcagagctgtagctgaagcttccgcttgcaggcatttggggcaaacaggaggaatctgattaaacctgtgaaggagagaggaaacaaaagagagcctaagatggaacagaaatcacagcct

SEQ ID NO: 258450 - DNA, 573 bp, Homo sapiens
tttttcttgctgcttttaaaatcctctctttatcattgacctttgggagtttgactattaaatactttgcagcagtcttcttgggttaaatctgcttggtgttctataaccttctcsaatgttggtatctttctctaggtttggggagttctcggatgttatccctttgaataaactttccaccactatctttctctacctctctacctctcctttagggccagtaacttttagatttgctctgttgaggctattttctaagctcctgtaggcatgcttcattgctttttattcttttttcttctgtctcctctgactgtgtattttcaaagagtctatcttgaaattcacttttttttttgctgtatcagttctgctatttaaagactgatacattcttcagtacgacaactacatttttcagctccagaatttctgcttgattctttttaattatttcaatctttttgttaaattgacctgacagaattctgaattctttctctatgttatcttgaatttccttgagttttcttaaaacagctattctgaatactctgtctgaaagatcac

SEQ ID NO: 258451 - DNA, 573 bp, Homo sapiens
tttttcttgctgcttttaaaatcctctctttatcattgacctttgggagtttgactattaaatactttgcagcagtcttcttgggttaaatctgcttggtgttctataaccttctcgaatgttggtatctttctctaggtttggggagttctcggatgttatccctttgaataaactttccaccactatctttctctacctctctacctctcctttagggccagtaacttttagatttgctctgttgaggctattttctaagctcctgtaggcatgcttcattgctttttattcttttttcttctgtctcctctgactgtgtattttcaaagagtctatcttgaaattcacttttttttttgctgtatcagttctgctatttaaagactgatacattcttcagtacgacaactacwtttttcagctccagaatttctgcttgattctttttaattatttcaatctttttgttaaattgacctgacagaattctgaattctttctctatgttatcttgaatttccttgagttttcttaaaacagctattctgaatactctgtctgaaagatcac

SEQ ID NO: 258452 - DNA, 444 bp, Homo sapiens
ctgcctcttgctctaccccygtgtggccatgctggtctctaaaatgcaagacaaagtctcttttacttttctctctgcttttctcaagcagaaagattcttgccacatagccaccacagctggtaatgtattgagtctcacctgaagccagcaagtgtcagaggctcacccaaggcccttgacacagtacctgagtattgctgatggttattcagggctcaggtactattcagttagcaggtgattaatcgtgctaggaatgggtccttcccttcaaggaagcagttttccctccggctcaggatatgtctagaaatgtcttctgggagctaggacctgaaccaggggcctcatgactctgaccagtaccctatcatgctgtggctgagctgatagccaagatgcaagacaaaatcctcccctgtcttccttctcctctcctca

SEQ ID NO: 258453 - DNA, 536 bp, Homo sapiens
agaacagccaaaacagtcatcaaaaagttaatggattcacacattctgatttcaaaatttactataaaatgtagcaatcaagccaatttstacagattaatgaaacagaattgagagttcagaaataacctcttaacatttatggctaactgcttttcaacaaagaggccaaggcaactcaaagggagaaaaaatagtctttctgacaaacgtttctgtgacaactgaatatagttatggaaaagaatgagcctaagaagaatgagtaatccagttttgttgggtagagtattttataaatatcagttgattaagttgattgttagtgcttttcaggtcatctttactgattttctacctgctggatgtatcaaattactgagagaggtatactaaagtttccaactattatagtggatttatgtatgtctccttttagttctatcaatttcacctcatatattttattgctctgttatcaggtgcatacacaggattgctttgtattcttgaagtactgaccattttaaattaga

SEQ ID NO: 258454 - DNA, 536 bp, Homo sapiens
agaacagccaaaacagtcatcaaaaagttaatggattcacacattctgatttcaaaatttactataaaatgtagcaatcaagccaatttctacagattaatgaaacagaattgagagttcagaaataacctcttaacatttatggctaactgcttttcaacaaagaggccaaggcaactcaaagggagaaaaaatagtctttctgacaaacgtttctgtgacaactgaatatagttatggaaaagaatgagcctaagaagaatgagtaatccagttttgttgggtagagtattttataaatatcagttgattaagttgattgttagtgcttttcaggtcatctttactgattttctacctgctggatgtatcaaattactgagagaggtatactaaagtttccaactattatagtggatttatgtatgtctccttttagttctatcaatttcacctcatatattttattgctctgttatcaggtgcatacacaggattgcttygtattcttgaagtactgaccattttaaattaga

SEQ ID NO: 258455 - DNA, 553 bp, Homo sapiens
cacacaggcactggataggtgcagggaaagatgacctttaaattccctgactgggcgtggtgacacacctgtaatcccagcactttgggaggttgaggggggcaggtcacccaaggtcaggagttcgagaccagcctggccaacatggtgaaaccccgtctctactgaaaatacaacaaattagccgggcatgtgcctgtaatcccagctactcaagagactgaggcaaaagaatcctttgaacctgggaggcagaggttgcagggagccgagatcacaccattgcactccagcctgggcaactgagtgaaactccgtctaaaaaaaaccacaattctcttaccactcaaagatgctctgactccaataattgtatctgggtaatgtatttatgcctctctaaatggttacctctctatacacgcttattcttagtcattttcagtagtcattaaacaaattattaaatagaaatttcattcattattcattgaaaacatgaaataaacatgargtgtttaatatgatggtaaaaaaatgccaaggacttttt

SEQ ID NO: 258456 - DNA, 547 bp, Homo sapiens
aaatgtaaaattggaattttgattctaaatcttgcttttaagcttatcttctaaaggaacttttgactgccctaaaggagctaccagctttagttgagtaaaactatggccagatacagatttgatggaaaaagaccattctaactcaatgtggtatgggggaaatttttagtgtgctcagtccacagtagtgaaaataataataattattcaaagagaaaatccttttgggacttaagactggaatgtgattttacctaaaacgttggattctgaacgatttgcttctaattacaggttcatctaaatataggatctgaaaatttttttctataaatgccagaaagtgaatattttaggttttacaggccacacaatctctgtaamaagtactcaattttgccattgtagcataaaggcagctatagacaaatacataaataagtgagtagggctgtgttccaataaaacgttattttcaaaaactgatactgctggacttggctcactggctgtagtttgccaaaccctaatttatcgaaatata

SEQ ID NO: 258457 - DNA, 616 bp, Homo sapiens
gggcttgtgggataataactgagaattccagcatttgtatcattggtattgcagaagaaaagaatgagagtggaactgaaagaatatttaaagaaatgatagctgaaaactcctctaattggtaaaagacataagcctagaaactcaagaagattagagaatcccaaataggataaatccaatgaaatcaacataaaaacacatcataatttagactttggctcatttttaattcaattgttttcttattgttgaattttgaggatattttgtttattctggatacaagacctttgtcagatatgtgattagcaaacacattctcctagtgtgtgccttgtcttcttattctcttaacagtatctttggcagtggaaacttttttcttttttttttaacttttaggttcggggtacatgtgcaggtttgttatataggtaaatttgtgtcatgggggtttgttatacagattatttcgtcacccaggtactaagcctagtactcattagttatttttttccgctcctttccctcttccyatcctccaccctcaccactagaccccagtgtctgtgttctcttgtgtccatgtgttctcatcatttagctcccactt

SEQ ID NO: 258458 - DNA, 574 bp, Homo sapiens
taaaaccactgaaataaaacataggggaaaagctccatgacattggtttgggcaattattttttggctatgaccccaaaagcacagacaacaaaagtgaaaatcagacaaattggattaagttgaactataaagcttctgcccggtgaagaaaacaatcaaagtgacaacctacasaacaggagaatatattaggacatcagacatctgataaagggctaaaacccaatatgtaatagataaaaggctaatatccaatatgtaaaagaaaccccagcaactcaataacaagacaactgattgttctacatgaggatacccagttgtcccaaaaacatttcttgaaaagactattctttccacaccgaattgtcttggctcctttgttgaaaattaaataagtataaatgtaagggtttatttctggactctgaattctatttgtttgatgtatctatctgtctttataccaatgccacactatctttgttactgcatctttgtagtaaattttgaaattgataagtatgagcctacctacttccttcttcccatcatagcctgaactacttttt

SEQ ID NO: 258459 - DNA, 574 bp, Homo sapiens
taaaaccactgaaataaaacataggggaaaagctccatgacattggtttgggcaattattttttggctatgaccccaaaagcacagacaacaaaagtgaaaatcagacaaattggattaagttgaactataaagcttctgcccggtgaagaaaacaatcaaagtgacaacctacagaacaggagaatatattaggacatcagayatctgataaagggctaaaacccaatatgtaatagataaaaggctaatatccaatatgtaaaagaaaccccagcaactcaataacaagacaactgattgttctacatgaggatacccagttgtcccaaaaacatttcttgaaaagactattctttccacaccgaattgtcttggctcctttgttgaaaattaaataagtataaatgtaagggtttatttctggactctgaattctatttgtttgatgtatctatctgtctttataccaatgccacactatctttgttactgcatctttgtagtaaattttgaaattgataagtatgagcctacctacttccttcttcccatcatagcctgaactacttttt

SEQ ID NO: 258460 - DNA, 608 bp, Homo sapiens
aatttcccccaatccaacacacaaacccacatcaactcctgatatttgtaagcccttgtgttgtattccctgtgtaatttgaatcttctcctgctccagctgtgtcttgtctctacttggggtacaattaatagcagagccagtcatgtcctaccagcattccttttatacaggctggatatatgtgtgagtataaccaactttttatttcattttattttgcacagtgcagcactgagaccttagaatttttctgctaataactctcaagacttctttgcacagctacttttaagatagttaacctataattttttatctttactatgttattatttttgataggatttagcatgactcccaaaatatattttacactggccaaaaagaaaaaaaaaccctctaaattgtttaaggacaaacgtatttctaaaaatttatttttcaattgttacatttctcagtgtattcatttgctggggctgctgtaccaaagtaccacagactgggtgactcaaacaacagaaccrcattgtcttacagtccagatgcccaagatgaagccatccacagggtggtggtgccttctcaaaacaatgagagggact

SEQ ID NO: 258461 - DNA, 629 bp, Homo sapiens
ggtccttttatctaaattgtcattatgggatgagagttgttaatagcttttattattattttaattattattcttttaataattggaatcagtastaattggtaattcatgccttctgtattttacttcttgattagtctgggtaaagaactgtcaattttattgatcttttcaaacaaccatcttttggtttcatggaatttcttgattccttttgttttcaagtttattgatttttaactctaatatttattatttagttccttctgcttgttttaggtttaatttgatcttttttgtctcttattactaaggtagaagcttggattatttattttagatctctcttattttctaatatatgcacttaatgctacaagtcccttctaatcatggtctaagctgcattttatcaattttgataagccacattttcattttcatttagtttaaaatatttttttaaatttctcttcatacccctttgactcatagattgtttaacttcctaaaatttgggaattttccagatatctttctggtgtggatttctagtttaattctattgagctattagattgtattttgtatgatttctgttgtttttaatgtattaaggtgtgttttaa

SEQ ID NO: 258462 - DNA, 629 bp, Homo sapiens
ggtccttttatctaaattgtcattatgggatgagagttgttaatagcttttattattattttaattattattcttttaataattggaatcagtagtaattggtaattcatgccttctgtattttacttcttgattagtctgggtaaagaactgtcaattttattgatcttttcaaacaaccatcttttggtttcatggaatttcttgattscttttgttttcaagtttattgatttttaactctaatatttattatttagttccttctgcttgttttaggtttaatttgatcttttttgtctcttattactaaggtagaagcttggattatttattttagatctctcttattttctaatatatgcacttaatgctacaagtcccttctaatcatggtctaagctgcattttatcaattttgataagccacattttcattttcatttagtttaaaatatttttttaaatttctcttcatacccctttgactcatagattgtttaacttcctaaaatttgggaattttccagatatctttctggtgtggatttctagtttaattctattgagctattagattgtattttgtatgatttctgttgtttttaatgtattaaggtgtgttttaa

SEQ ID NO: 258463 - DNA, 562 bp, Homo sapiens
gatactttgatataggcatacaatgtgtaataatcacatcagggtaaatgggctatctgccacctgaagcatttatcctttgtgttacaaacaattgaattatacttttttagttatttaaaaatatacaattattattattgactatagtcrtcccattgtgctactaaatactagatcttattctttctaactatatatatatatattttttttttttttttgagacagagtttctcactgtcaccagggctggtgtgcagtggcacaatctcagctcactgcaacctctgcctcccaagttcaagccattctcctgcctcagcctcccaagtagctgggactacaggcatgtgccaccatgcccggctaattttttagtagagacaggttttcaccgtgttagccaggatggtctcgaactcctgacctcgtgatctgcctgccttggcctcccaaagtgctgggaatacaggtgtgagccactgcgcccggccactgtatttttatacccattaactatccccacttcctccacgaccacttcccccaacttcactat

SEQ ID NO: 258464 - DNA, 583 bp, Homo sapiens
ttcttcaaattatttcaggtttcttctctacctgaaatttttccacaaaggaataaagaaagcaaaataatatttactgaccaccaagcaatgtatgtgcatcgggtaactggagtcccagcaggcccactgggtagatatgccatccttatgaatagattaggaatatcagcctcctaggacaataaaaacaagctcatgatatcacatattataacctctagtatgaaaattcaaatcctctggcccgaagctatagtctttcatattttatgaaatgggtactgtctgcctcataaaaggaagactaataatatagcacaaggtgtgaagtctactaggattggcagagaagcatatatgtgacaacaaattattgagtgatctatggcataacacaattctgcattgtgatttcaagttaatctataatgatcacttttttaaattggtaaaaatgttctacaaaaaaaaaagtattagaacttttcccaattttaattcctcacgaayaattgtgtctgtgttgttaaatgttcaagactgtctgcaacttttataattaattcaaggacagtagatt

SEQ ID NO: 258465 - DNA, 563 bp, Homo sapiens
tctggtacttttttgttagatttatacttacatcttaatgtcaatgtaagtgataatgtatttttaatttcaaatttcaattgttcattgctggtatataagaaagcaattgacttygcatattaaccttataacttgcaatcttgctttaatcacttagtttcaggggttctgttattgttgattttgtgagatttttctatgtagacaatcatgttatctgtgaacaaagttttatttcttcctttacatatacctaccttccatttccttttcttgtcttaatgcattagctaggacttgcagtactatgttgaataggagtgattagaggagacattctttctttttttctggtcttaatagtaaagcatctatatattcttaccattaagagtgatgttaactgtagaattttttagatgtattttatcaatttgagaaatttcctcaatatttctactttgttgttcttgtcatgaatgggtattggatttccctaaatgcattttctgcatctcttgatacaatcatatgatattttggattgcatacctggaata

SEQ ID NO: 258466 - DNA, 563 bp, Homo sapiens
tctggtacttttttgttagatttatacttacatcttaatgtcaatgtaagtgataatgtatttttaatttcaaatttcaattgttcattgctggtatataagaaagcaattgacttcgcatattaaccttataacttgcaatcttgctttaatcacttagtttcaggggttctgttattgttgattttgtgagatttttctatgtagacaatcatgttatctgtgaacaaagttttatttcttcctttacatayacctaccttccatttccttttcttgtcttaatgcattagctaggacttgcagtactatgttgaataggagtgattagaggagacattctttctttttttctggtcttaatagtaaagcatctatatattcttaccattaagagtgatgttaactgtagaattttttagatgtattttatcaatttgagaaatttcctcaatatttctactttgttgttcttgtcatgaatgggtattggatttccctaaatgcattttctgcatctcttgatacaatcatatgatattttggattgcatacctggaata

SEQ ID NO: 258467 - DNA, 556 bp, Homo sapiens
aagaatgctttgctacaaaaaaataacaactgccttcaaatggccagctttttaaatactaaacccctattgattttcttttgcttggctcaaaatagtgttaacgcattttaatctgaatttcctgatttccactgtttgcattcattgcaataagggaactaattattagttctttgggatactgtcagtgaaggaatccaaaacagctattgcacagcacacatacagattcctcagaagcatgggtcccatgttctcatactttaaacccacattacttagtttcaaactttaaagttgagccatttttaattcstcttggaggcagttatggagggtaactctctgtagagttagttgctcccctgatgattgagtgattaatactttggcatagggatgacttcatccagggacctggcaacagtcccccttgcttctcatcctttatttttcaatttcttacactgctatgctgaacttcttcagcacagactgtgggaagtgagccacggagccactgaattaattgccattgctcccagcacgcctg

SEQ ID NO: 258468 - DNA, 620 bp, Homo sapiens
aaatgagatggcctaattatgggttaaaaatcatagatatcacacctgtaatcccagcactttgggaggccaaggcaggcagatcacctgaggtcaagagtttgagatcagcctggccaacatggtggaaccccatctctacccaaaaaaaacaaatacaaaaattagctggacctagtggagcacacctgtagtcccagctactcagaaggctcaggcaggaaaatcgcttgcacccagaaggggagattgcagtgaaccgagattgtgccactgcactccagactgggcgamagagcgagactctgtctcaaaaaaaaaaaagtgaaggacacatgtagatcctcaaattgtttcttctaatcatcaaattaggatttctgttaactttaagttacaaatcatgagcaattatatatgcataatgaaactatgaatacaagcctataatcatagcagaactgagaaatataaacatccatgcacattcaaataattacattgttgatcttgatcatttgaaattctgtatcaacagaggcatgtctttctgggtcaaaaagctagatatagaaaaagggaactcctagggacaggatttatgcttttcccaatgcctg

SEQ ID NO: 258469 - DNA, 600 bp, Homo sapiens
agcaatatttaaggcaattctgagttatatgtaacttgacactgtgagccgagagtcataaaaatgtctacatcaggccaggtgtggtgactcatgcctgtaattccagcactttgggaggccaaggtgggaggatcatttgaggccaggagtttgagatcagcttgggcaacatagcgagaccccatctctacaaaaaaattttaaaaattagtcaggtgtgatggtgcttgcatatactcccagctgctggggaggctgaggcacaggagaatctyttgagcccatgagtttgaggttacagtgagctatgatcttgtactgcacttcattgtgggtgacagaatgagaccttatctcttaaaaaaagaaaaaggaaaaaaaatctatattgtaatgttaaaattgactttaggggaacctaacctaccaaattaatttagaatgtgaaagatgccatataaacattattcatctattcattgctaagttattggtaggaataaaaatttggaagcaatttgatgacctataataagaataaattattaaattcttatttaataaactattgcatacatttgcatatgattatgaaga

SEQ ID NO: 258470 - DNA, 632 bp, Homo sapiens
tggcccggttaagtacatttgactttggagtcaaactagggattaaatcctaattctaccacaaactagatattttaatctcacaagagttactcagtggctttatgcctcagttttctcacctataagatggcaaatataatagctagtcttattgggtattcgtagatattaaatgaaattatatatcagactacctaacttatagcaagcatttaataagtggmaactctcattattattatttcatcaccatcagtattagtatgaagaaatgaagctgtaacagtgtaataaaatgcagtgggtttggcatgatacatatgtttcaaccataaccttatttgtgtgtatatacatagagaatatataaaatacagggcatacataggatatcatatgcatatgatatcgtatatctagctgccctgagattttgttttcacctgtgtctgtagcaatggcttgctgtcacttccattggtgtactggactgttggtactgaattaaatgagacagggagtatttagctgctctcgccttccctctgatggattgtttctcagtgattgatgtttatccttgtgcctctttcccccctccaaaaaaatcaaataccatcaaaaccaag

SEQ ID NO: 258471 - DNA, 587 bp, Homo sapiens
ttgggttttcttagctaacacctaatccagtctagatcccttggaattaagtccaagtaatcctgatgggcttttgggtttccctgagtgttcttaatttcagtttagcatcatgtctttgaaacgttgtgtcttttaggccctgccctttaatattggctatattaagcacgtggttaaccaaaaccctagattcctttttattaatttgctgctaaagcatgtcacccccattctgtaccaaatcaattatttgtgttaatgtaaagatrgatgattacatttagttttgttaaatttcatcttgtagatgttggtacaacagtccagtctgttaaaacaattttagatctccacttctattgcagtaggtactcgtctaaactttacattatctaaaaatgtatcactggggagatcataaaatttatagacagcaggcacaaagaagacttttagacgctatcctttttatttattgttattattattttagagacagtgtttcactctgtgtcccaggctggagtccagtggcacaataatgtaatagctcactgcagcctcgaactcatgagctcgaggga

SEQ ID NO: 258472 - DNA, 537 bp, Homo sapiens
tttaacagtgggaataattaggacttcctcatggaatcctcataaagatttaataaatgatgcatatcaagtacttggcacatcttaagtccctaataagtgtttttattatgatggagcctgggtacgtctttcaaggggcccaagagttacatttacttcattataaaccgggcaaatgatacttaaggaaagattcatccagatgtttgtgcctctcccatcagtgcagctgacggagcaagtcacagctgccagccaaattaaagttggatcatggctattcccaagagcaaaatttatcctcaacaactcaaagaataatatttaacgcttactgggtaatatggtttagctgtgtccccacctaaatctcatcttgaattgtagctcccataattcccacgtgttgtgggagggaccccgtggragataactaaatcatgggggcagtttcccccacactgttctcctagtagtgaataagtctcacaaaatctgatgattttataagaggtttcctctttcacttgactt

SEQ ID NO: 258473 - DNA, 622 bp, Homo sapiens
atataatttggtgggtaattggtcctttgtatctaagccaactacctcctgcctgcatcacagataatataattagcagcataggtaagaaaatatgagtagattattttttatatgtacatattcatagatttaaaggtgaaacgatatgatgtctataagttatgtttaaacaactcagcaaaaatagatgaagcaaatatgacaatgttaatyaaaaatctagatgtgtatattgcatgtttattatactattttctctcccacttggagtatttgaattttttaaaaaagtttttttaaagaataaagaaaattaaggaggaaaaaagaaaaatactgtggtagaggactatttctgatgtcctgcaacatatggttcccgtcaagcctataccttgagtctacaccttcagcttgttggtgtttatttccaaagccttcattacctcaacaacactaaagctcgcaaccttctgtctgctcattactcttggcagggcctgcaaactctcagattccctcttcagttgcctcttgcagatcttcaatcaattacagccccaaaattgcaaactgcagcactccaaggtggagtcttatgtgtgcccctgagcctctc

SEQ ID NO: 258474 - DNA, 622 bp, Homo sapiens
atataatttggtgggtaattggtcctttgtatctaagccaactacctcctgcctgcatcacagataatataattagcagcataggtaagaaaatatgagtagattattttttatatgtacatattcatagatttaaaggtgaaacgatatgatgtctataagttatgtttaaacaactcagcaaaaatagatgaagcaaatatgacaatgttaattaaaaatctagatgtgtatattgcatgtttattatactattttctctcccacttggagtatttgaattttttaaaaaagtttttttaaagaataaagaaaattaaggaggaaaaaagaaaaatactgtggtagaggactatttctgatgtcctgcaacatatggttcccgtcaagcctataccttgagtctacaccttcagcttgttggtgtttatttccaaagccttcattacctcaacaacactaaagctcgcaaccttctgtctgctcattacwcttggcagggcctgcaaactctcagattccctcttcagttgcctcttgcagatcttcaatcaattacagccccaaaattgcaaactgcagcactccaaggtggagtcttatgtgtgcccctgagcctctc

SEQ ID NO: 258475 - DNA, 604 bp, Homo sapiens
caaatgtcagtggttactattatgatcatcatcatgatcatctggtagtggtaataaaaggaagctagtgatctaagaaaggaatacagtataggagtcttcatgggagaactagttacrtattctgatagaacaatgcactctttttgtaacatttattttactctaattattcagtatttgtcttccctgctagcttgtaaattcacaggggcaaacaacatgtctgctttattctctactatatccctgacccataatagatgctcagcaaatatttcttgactgattatgctagtgaattagtatacaagaaccataaagaggctgacaccactcaccggtcagctcactctcccctctccgagggtgttaccccgcttaataaaccttttgctgttttgctttaaaaaaaaaaaaatacgtaaagagaagtgcagcacaaacagagtgagaccactcaggggccgtaatcattcagcccttgcatgagggcaggtttgggattgtcagagtcattcgaaccagagcgactccattttgagtgagggctaggaaaatgaggctgggacttgctgggctgcattcccagaaaattacgcat

SEQ ID NO: 258476 - DNA, 604 bp, Homo sapiens
caaatgtcagtggttactattatgatcatcatcatgatcatctggtagtggtaataaaaggaagctagtgatctaagaaaggaatacagtataggagtcttcatgggagaactagttacatattctgatagaacaatgcactctttttgtaacatttattttactctaattattcagtatttgtcttccctgctagcttgtaaattcacaggggcaaacaacatgtctgctttattctctactatatccctgacccataatagatgctcagyaaatatttcttgactgattatgctagtgaattagtatacaagaaccataaagaggctgacaccactcaccggtcagctcactctcccctctccgagggtgttaccccgcttaataaaccttttgctgttttgctttaaaaaaaaaaaaatacgtaaagagaagtgcagcacaaacagagtgagaccactcaggggccgtaatcattcagcccttgcatgagggcaggtttgggattgtcagagtcattcgaaccagagcgactccattttgagtgagggctaggaaaatgaggctgggacttgctgggctgcattcccagaaaattacgcat

SEQ ID NO: 258477 - DNA, 646 bp, Homo sapiens
ttgcaatttgtttttcaatttaggagccctaactactaacattcctgttgactattgccatttctcccatagtaagttgatagtgccactgaaataatgaagcaaatatatctattaaaattcatattgttagctaaaaatgatcagtataargattcagtaaagaaattttatactatattgatgagttaatccttcaaaagtagaacaaaaagtccgagagatggaaaagacgaaagaaataagaaaataagagattaaaatgtgtaatatctaactaataaaatatccagaaagaggtcaaacaaggaaatcaattttttcatcattatttaagaaaaaataattttcatttttaccaaatagaacacttttacatatacataatagagtgctttttctccattttaatgaaataatttagatacatgtagataatacatgtaaataacactaaaatgcttattaaaatgttaatccccttctctccctgctccaatgttctcttcccccaaagcaaccacttttagcccatatggttctagtactctatttaacccaatacttatactcgataaagctccttctggagcccccactttgcttgttcctgtctgaattgaaagttccctaggctcctgcatag

SEQ ID NO: 258478 - DNA, 637 bp, Homo sapiens
tgtggatccttcaacttcattcttttttatcaaaagtgttttgctgggggaaggaaaggagcagggaagggttgaaaaactaactgttgggcactaagctcagcacttggtgatgggatcattcataccccaaacttcagcatcatgcaggtaacaaactggcacatgtaccccctgaatctaaaataaaagttgaaaaagagagaaaagtgttttgcccttctatatgaattttacagttggcttgttaatatctataaagaaacttgctagaagtttgattgagattgcattgatttgataaatcaaatggcagaaaactgacatcttaataatattgagtcttctaacccataaacatggtatatttttccatttacttagacatttyaaatttctttataagggttttatagtcttctgaatacagatcatgcatttattttgttatatttatccctaagtacttcatttctttttgctggactttttgattttgaggtgtctgtataagtctatttgcagatgtgggaaaataaatatagaagtctggaggtctagggtgtcatttaggataaaattcaagtttagtgtagtcacatttctcagaacgtgtcagatttttcatggacaaaaa

SEQ ID NO: 258479 - DNA, 582 bp, Homo sapiens
aatacagttagattttcttgtcacagtctgaattccttcctgaaatcctacaatctcgtaaataattttttttaatttgcatccattaaggttggctttttatgctattaaatatatgggggtcttgacaaattaataggaccatgtattcaccattatagtaccatacgttatggtttcaccacttaaaaaatctcttgtgcttcacctattcattcccccctccccctttccccctacctcctggcaaccactgatcttttcactgtctccacagttttgccttttcttgaatgtcacagagctggagttatacaggatgtagtcttttcagattggcttcatttcctcatcaatatcattttaaggcttctcacatttttcatgggttgatagcttatttttttaccactgaataatatttcactgtgyggatgtgtcacaatttgtcatcccttcccctatcgaagacatcttggtggcttcagtttttggcaattgtgagaaatgcttctatgtacatttatgtgcaccttttgcatggatatgttttcaaatcaatttggtaaatacctaggagag

SEQ ID NO: 258480 - DNA, 629 bp, Homo sapiens
atttccatttgaattttaggatacacttgtcaatttctacaaagaagccagttgagattttgatagggactgcattgaatctgtagatctatttagggaagactatattaagtcttctagttaatgcatatgtatttctatttatttgggtcttctttacttyctttcaatgatgttttgttttcagtgtgcacattttgtgcttgttaaatttacttctaaatatcttattcttttgatattataaatgaaattgttttaatttcattttagagtattcattgctaatgtaaaaaaatacaattgattttgtatcttgatcttacactgtgatctattgaacttattagttgtaatagattttatgtagattccttaggattttttacatataagatcatgttatcagcaactagagatagtattacttcttcttctccaatatgatgccttttattttgtcttctatctaagtgccctggctagaatacctatcacaaggttgaatagacatagtgagaactgacatccttgtcttgtttttgatcatagaataaacacatgcagttttttaccattaaatattatattctctgtggtttttttttatagattcactttatcaatgt

SEQ ID NO: 258481 - DNA, 466 bp, Homo sapiens
tgaaacgcacactgcaaagtctaccacttgtgttattcattcctcattcagttacctaattcctaatctgcttaatttcccaaacagtgaaaccggaggacaggccatgaactttcacgtacaagtctttacattggcatacgcttgggtatcctgggtaagtatcaagaaatggaatggcctagtggtacagaacgtatatctttaacttcttaactaactttttcaatttttttttttttttttttgagatggagtctcgctctgttgccaggctagagtacagtggtgcgatctcagctcactgcaacccccacctcccggcttcaaccgattctcctgcctcagcttcctgagtagctgcgatgacaggcatgtgcaaccacacctagctawtttttttatttttagtagagacggggtttcaccatgttggccaggatggtctccatctcttgatctcgtg

SEQ ID NO: 258482 - DNA, 572 bp, Homo sapiens
agagcctaatgcactccaatgctcagaaattagggagatgagtaagaacatgcagaggaatctgaaacgagcagtcagtgaagtaggaggaaaacaaaagaatgttctttaatggaatatgttcagattatttttacatgaaaccttttcctttctacagttttcaatcagcagtgtctgcgttctgctctctccctacctcctgcaatcatcacttctctttttaccaaaactgttctattattttcaggaagaatgaaagagatagtgctatatgcctgtaattctagcaatctcagtttgtctcaagctatgttttatgcccaacccggtgttactaatactcactcccaattttttttttgcataaataatgacgtctggaattaactaaaaagacagatttggtcaatatacaggtttccaagctgacagaaattgatttatattttatttgcttttttgttacamaaaaaaaaaaaacccatagcttcttggaattgtaaagagaaaatctaatgaaatccatgtaagtatcataaccaggattttgaataagttccattcctggt

SEQ ID NO: 258483 - DNA, 572 bp, Homo sapiens
agagcctaatgcactccaatgctcagaaattagggagatgagtaagaacatgcagaggaatctgaaacgagcagtcagtgaagtaggaggaaaacaaaagaatgttctttaatggaatatgttcagattatttttacatgaaaccttttcctttctacagttttcaatcagcagtgtctgcgttctgctctctccctacctcctgcaatcatcacttctctttttaccaaaactgttctattattttcaggaagaatgaaagagatagtgctatatgcctgtaattctagcaatctcagtttgtctcaagctatgttttatgcccaacccggtgttactaatactcactcccaattttttttttgcataaataatgacgtctggaattaactaaaaagacagatttggtcaatatacaggtttccaagctgacagaaattgatttatattttatttgcttttttgttacaaamaaaaaaaaaacccatagcttcttggaattgtaaagagaaaatctaatgaaatccatgtaagtatcataaccaggattttgaataagttccattcctggt

SEQ ID NO: 258484 - DNA, 617 bp, Homo sapiens
tcattgtctaactgtgtgggataaaacaaaatatatttggtctttgtcctggtttctaaaacccttggaatttcctgagtccttcattttttattcataaagaagccacttacgatgacacctgagcttatgttaatgaggtgacttaggatggagcccctagactgcccaaggatggagttggttatcagaaagacgacatgattagaggggtrgaactttcagccacacaaccgacctccaggaaggggagagggggtctggagattaagctctatagaaggtcttgaactgggagacttatgagcttaggagttgatgaattcattgaggtgctgggagagtggtgtgcccagagagggcatgaaaaccctgaagcatccccagtcccctgtcctatgcattcctttcatttggctgttcccgagttgtagcttttataataaaccagtaaacataagtaaagtgtctgtgagcctcagttctgtgagctattctagtaaattatcaatcctgagaaaggggtcacagtgagacaggatagtcatagcagaacagaaaattccaagcagcagtctcatgactagcaaaaaggagctgttgaaagagctgcatat

SEQ ID NO: 258485 - DNA, 617 bp, Homo sapiens
tcattgtctaactgtgtgggataaaacaaaatatatttggtctttgtcctggtttctaaaacccttggaatttcctgagtccttcattttttattcataaagaagccacttacgatgacacctgagcttatgttaatgaggtgacttaggatggagcccctagactgcccaaggatggagttggttatcagaaagacgacatgattagaggggtagaactttcagccacacaaccgacctccaggaaggggagagggggtctggagattaagctctatagaaggtcttgaactgggagacttatgagcttaggagttgatgaattcattgaggtgctgggagagtggtgtgcccagagagggcatgaaaaccctgaagcatccccagtcccctgtcctatgcattcctttcatttggctgttcccgagttgtagcttttataataaaccagtaaacataagtaaagtgtctgtgagcctcagttctgtgagctattctagtaaattatcaatcctgagaaaggggtcacagtgasacaggatagtcatagcagaacagaaaattccaagcagcagtctcatgactagcaaaaaggagctgttgaaagagctgcatat

SEQ ID NO: 258486 - DNA, 607 bp, Homo sapiens
ggaacacccatatttggtgtaaacatgggtgacaccacagttctgagaaatctttatctttttctagaaatcttcatgaataatccaccccttggttaaagaaacccataaaggtagaaactccaaaccccgttgggcatgactcactctcttgagtacacacactcacactcccctttcttgagtgtgtcttttcactttgccacaaagctccagactttcactattttctgactcgtccttgagtttcttgacggtgtccttgaatttcttgatggtgaattccttgacttgtccaggtgtcaagagcctgggcactggccagggttgaggtcctgccatcatttggggttacctctcctaccccccagtatcaatgggaacctctgatttatggccacttggtcagaagtaytggtggcaaccccagacttactgttggcatctgaattggggaaagtcttgtgggattttaacttgcgggtatgacgcaaattccaggtagatcatgtcataatttcaggattcccagttggcatcttcagagaattggacaattacttggtgtggtaaaaacccatacatttagtgtcagaagtgtagtgtg

SEQ ID NO: 258487 - DNA, 603 bp, Homo sapiens
gaattgaaaatctcaacaatttgtcttctaaaacatgaacactctatatccatttatttatatttcctttgatttatttaagcaatgttctrcagttttcagtgtatagtacttgcacattgtatttgtccattctcatgctgctaataaagacatacccgagactgggtgatttataaaggaaagaggtttcattgaatcacagttcagcatgactggggaggcctcaggaaacttacaatcatggcggaaggggaagcaaacatgtccttcttcatatgatgacagcaaggagaagggcagagcaaaagtgggaaaagccccttataaaaccatcagatcttgtgagaactcagtatcaagagaacagcatgagggtgaacatctccatgactaaattacctcccaatgggttcctcttaccacagggaactacaattcaagatgagatttgggtggggacacagctaaaccatatcacacatattttaagtttatacccaagtattttcatgctttttgatgctactgtaaatgggattatttcattaattattatttcaaaattttcactaataaattttatttttgtatgtcgatctt

SEQ ID NO: 258488 - DNA, 349 bp, Homo sapiens
caaacacatatgtaggtgagggtgttcccttccctcccaacaaatggactaaaaggctctctaataaggagacttaggatgcaaatccattaacaacaactatatttgactcatcatagtgctgctgggtgctacttgggaggaaaatgggtgacattctratgatcaatttgtttatgtatgttaactaaataggggcagaaaaataaacccacgagcaaaacacttagtctcatagaactgaactaaaacagaactaaaagaggcattagacattatctaactcaatctcagtttacagatgagaaaacccttttaaagactcttcctgatacagttgtttggatag

SEQ ID NO: 258489 - DNA, 560 bp, Homo sapiens
ttttaaaagcagaatgtgtatatctaaatcaattgtcctcgttcaaatggtcaccttagaaaaccacacacgttatttcaaggaatcctgagcaaatcatttggaattcctattctgaaagaaccttcgacgccagttttcacatcacaygatgcacgcttctttatagacatctcaagactaaagaaaaactatttcccagcttgctgtcacctagcttgcagagcatactttaaaatgttgtggcctgggccaggtgtggtggctcacgcctgtaatcccagcactttgggagaccgaggcaggcagatcacgaggtcaggagtttgagaccagcctgaccaacatggtgaaaccccgtctctaataaaaatacaaaaaattagctgggtgtggtggcatgtgcctgtaatcccagctactcaggaggctgaggcagaagaatcgcttgaacccaggaggtggaggttgcagtgagccgagatcgcgccactgcactgcagcctgcgtgacagagcaaaaaaaaaatgtctccaaaaaaaaaaaaaaaaaaaaaaact

SEQ ID NO: 258490 - DNA, 560 bp, Homo sapiens
ttttaaaagcagaatgtgtatatctaaatcaattgtcctcgttcaaatggtcaccttagaaaaccacacacgttatttcaaggaatcctgagcaaatcatttggaattcctattctgaaagaaccttcgacgccagttttcacatcacacgatgcacgcttctttatagacatctcaagactaaagaaaaactatttcccagcttgctgtcacctagcttgcagagcatactttaaaatgttgtggcctgggccaggtgtggtggctcacgcctgtaatcccagcactttgggagaccgaggcaggcagatcacgaggtcaggagtttgagaccagcctgaccaacatggtgaaaccccgtctctamtaaaaatacaaaaaattagctgggtgtggtggcatgtgcctgtaatcccagctactcaggaggctgaggcagaagaatcgcttgaacccaggaggtggaggttgcagtgagccgagatcgcgccactgcactgcagcctgcgtgacagagcaaaaaaaaaatgtctccaaaaaaaaaaaaaaaaaaaaaaact

SEQ ID NO: 258491 - DNA, 569 bp, Homo sapiens
tgctgggcacctaggctgtaacataagggtccaccaggacactgctagccctcagcaccacataatggatactcaataaatatttgttgaatgaacagatgaatgaaatatagtggtttcaagacatrtaaaaatcaggaaagacgcaagaaaagtcacaggtcaccccccaacacacatacaaaaaaagtccactcattattgaagcagaaagactactatggtgatttaaagagtgcaggctccagtgccagactaaatgaattgaagcccagattctatcacttactagtgggtgaccttggataaggtactcaacatccctgtgtctttggaaaatagagataaccataaaacaaactcatcaggttgttataaggaacaagtaagctagcacttgaaaagtatttagaagacttcctgttaagattctgtatatacaggcatactctggagattgtgtgggttcaattccagaccacaacaatacagtgaatatcacaataaagcaaacatcacaataaagtgaatcactccagtgattcactgtgaatataaaagttgttgac

SEQ ID NO: 258492 - DNA, 569 bp, Homo sapiens
tgctgggcacctaggctgtaacataagggtccaccaggacactgctagccctcagcaccacataatggatactcaataaatatttgttgaatgaacagatgaatgaaatatagtggtttcaagacatgtaaaaatcaggaaagacgcaagaaaagtcacaggtcaccccccaacacacatacaaaaaaagtccactcattattgaagcagaaagactactatggtgatttaaagagtgcaggctccagtgccagactaaatgaattgaagcccagattctatcacttactagtgggtgaccttggataaggtactcaacatccctgtgtctttggaaaatagagataaccataaaacaaactcatcaggttgttataaggaacaagtaagctagcacttgaaaagtatttagaagacttcctgttaagattctgtatatacaggcatactctggmgattgtgtgggttcaattccagaccacaacaatacagtgaatatcacaataaagcaaacatcacaataaagtgaatcactccagtgattcactgtgaatataaaagttgttgac

SEQ ID NO: 258493 - DNA, 569 bp, Homo sapiens
tgctgggcacctaggctgtaacataagggtccaccaggacactgctagccctcagcaccacataatggatactcaataaatatttgttgaatgaacagatgaatgaaatatagtggtttcaagacatgtaaaaatcaggaaagacgcaagaaaagtcacaggtcaccccccaacacacatacaaaaaaagtccactcattattgaagcagaaagactactatggtgatttaaagagtgcaggctccagtgccagactaaatgaattgaagcccagattctatcacttactagtgggtgaccttggataaggtactcaacatccctgtgtctttggaaaatagagataaccataaaacaaactcatcaggttgttataaggaacaagtaagctagcacttgaaaagtatttagaagacttcctgttaagattctgtatatacaggcatactctggagattgtgtgggttcaattccagaccacaacaatacwgtgaatatcacaataaagcaaacatcacaataaagtgaatcactccagtgattcactgtgaatataaaagttgttgac

SEQ ID NO: 258494 - DNA, 527 bp, Homo sapiens
ttttttaaaaaattctattttggatttttttttaactttttcataattcagagttttacatgaattccactatcaaagaaactttaagagaaaaaacaatttatctttattaaaattgtttttattttgtgtgtatgtgtttatatgggaacaaaacaaaactgatgagaaacagctgaatgaacatgtggcttttaaaacgttacataataaaagggaagggaaaggtctggagtcctacattgcacatatgatattttgtccctgtaggctcctttttgttttcttaaggatatcaaatgscagtgtgatttcacaggtgacccagcttctagaattacattctgcaaaattgtttcccttccagaggctcagtgaaatgtggggtgatggcttccacatgaggataagtccccaacatgttctccaagcaaactcaggcacacgtttcaaaccaaagtgacagatacactaaatctaggtccattatatagaaagtaaagaaaatgatatgtaacagaagaacg

SEQ ID NO: 258495 - DNA, 403 bp, Homo sapiens
ctaattttacctaatgacctcattttaccttaattacctccttaaaggccctatcgccaaatacagtcacatttggaggtactgagtgttaggaatttaatacgcgaattttgaggaggacacaagtcatcccataataggctccaaaaggaggtgatatcttgcaaggtggagcggagagactatctcccatcgtcgtagtcctacacacaaggaagaggtcagaaatcccttaaatctaagccatatgtttgaatgagctccctgtgcttctaagaccttcatgtgcctttacaatctatgagaaaggatgatgtgccaggcacagtggcccacacctgcaatctcagtgctctgggargccacggcaggagaaatgcttgaggccagaagttcaggacca

SEQ ID NO: 258496 - DNA, 625 bp, Homo sapiens
tgccttaaatcctcgtactcacttcccttccttactaataaatgtcctttgtggaactgttttccagaaagggggcactttttttctacargaaaaaaaagaaagaaacctgccaggcagatatccattcttctcaatgattttcttaatggtgtctgggaacttgtctactgcttcttggctgtctgctgcttctcctgttatcttgacattttttaaggcaaatctctttctaaaattatcgaaccatcttttgctggcattacattctccaagtttagatctaacaccttccttttgctttaagttgtcatacactaacctcattttttcttaaatcattgtagagtctataggcatgattttcttataggtatcctgcatccacataacagctacattttcaatataaaaaagttcaaggttttgtgcctactaagggagctgcagtgacaacaaatttccttttcttttcttacaacggtacttacactgctggattcttttatcttgaaatggcaggtgaccacagctgcagacctcaatccatttggtacatatcaagcaattcacccttcttataacatcatgaattttccctgcttcttgggagcacttccagcat

SEQ ID NO: 258497 - DNA, 447 bp, Homo sapiens
tcttgttcctccttggccagatggcagctacaaccacatcagcctgaactcaggcctaaggtgacatatggctcagccttaaactctcaraatggcactcaccctgggcctgggacccagggtgggcagagtaccttccagtctagcagtatgggcaagaagctatggggaatatggtccacttacatctcagtctcacagcagcccacagcagggcagcaagcaccctcctaggggtgcatgggagtgcccagcctcttctttctcttgttggagcagtgcagtagccccagccatgtttgtagatctccagtatctaggctctcaagatagctcccagctgaggctgctccaagctcaggtgcctgtgaaattttgcatgggttctctttctggagaaacatctctttgcaatctttagccagctctgtatgtcaagcccaaggc

SEQ ID NO: 258498 - DNA, 608 bp, Homo sapiens
caaacacctttaaccaggcttcacttccaaaattgggtataacatttcatatatatatactttatatatatatatawataaaatatataaattttatttatatatatataaagtatatatactttattttaaaaaatttttattttaaaaacttattttaggttcaggggtacatgtgaagatttgttacataagcaaattcatgtcacaggggtttgttgtatagattatttcatcatccaggtattaagtacagtatctaacagttatcttttctgctcctctccatcctcctactctccgccctcaagtagaccccagtgtctgatgttaccttctttgtattcatgagttctcatgatttatctcctactcataactgagaacatgcgatatgtggttttctgtttctgcattaggttactaaggctaatagcctctagttccatctatgttcccacacacacacacaaaaacatgatcttgtccttttttatggctgcatagtatttcatggtgtatatgtaccacattttcttttacctgtgtgtcactgatgggcatttaggttgattccatgtctttgttattgtgaatagtgccacaat

SEQ ID NO: 258499 - DNA, 608 bp, Homo sapiens
caaacacctttaaccaggcttcacttccaaaattgggtataacatttcatatatatatactttatatatatatataaataaaatatataaattttatttatrtatatataaagtatatatactttattttaaaaaatttttattttaaaaacttattttaggttcaggggtacatgtgaagatttgttacataagcaaattcatgtcacaggggtttgttgtatagattatttcatcatccaggtattaagtacagtatctaacagttatcttttctgctcctctccatcctcctactctccgccctcaagtagaccccagtgtctgatgttaccttctttgtattcatgagttctcatgatttatctcctactcataactgagaacatgcgatatgtggttttctgtttctgcattaggttactaaggctaatagcctctagttccatctatgttcccacacacacacacaaaaacatgatcttgtccttttttatggctgcatagtatttcatggtgtatatgtaccacattttcttttacctgtgtgtcactgatgggcatttaggttgattccatgtctttgttattgtgaatagtgccacaat

SEQ ID NO: 258500 - DNA, 619 bp, Homo sapiens
ctgggtccatagtaggtggtaaataaattgtagctattactatgaaatgagggacaagcttaaaatactgtccacaggcactgtcctgtgcagtttcatctttcctcagagagtaactcagaagttttgctcagaatggacactaagtgacagtgtgtagaattgcagtcgtttgtgttttattgaagtgcttagctgggtaggcctcatttactggtttccacccatgcgaggacacaccaagaagatcacatctaacaagtgagacaaatactctacctgcttaaagaattagccaacaatgtcacctcacttcccagggaggggaattcagtagcccaagatgcttaagccattctaaatgcctgcaaaattagggaggatgacaaaatgagacctttgccagctctaaaatcctgggtctgtaaatctgagagacaggctttgtgtggccaacaagctcctggggtagaaacaaggtaggagtttgagacatcttgtgggccagccttcaaaattatacmcaacccaactttcttaccagccccgtactgttttcccaagcctggtcccggcagagtcatcctcacccttatctgttctcttttgagcaagagca

SEQ ID NO: 258501 - DNA, 487 bp, Homo sapiens
gccttcaaaattatacccaacccaactttcttaccagccccgtactgttttcccaagcctggtccyggcagagtcatcctcacccttatctgttctcttttgagcaagagcatattggaacatcagacatttggatttatgaggtaggacaggcagggcaaagttcaggatttctggtcctgaagctgataaaattggaggaagtagctttttgagcaaaagaatgcaaaatcaaaaatatataattaggtctagggccttggaaggggtcctgaagcttcagttttattgcctctctgggggtaggagattcctctctcagggacagcagccaaccatggtgagcaagttccttggccaggcaggaagtatgtgcagttttgtttccagccgtactcatttaggtctcatgatcattcttcacagtgggaagaaattactctcggtttatatttttaagacttttagattacagtagcttggtaag

SEQ ID NO: 258502 - DNA, 569 bp, Homo sapiens
ctggtcaggcacggcacgtctggccggccgccaggatgcaggccccgcacaaggagcacctgtacaagttgctggtgattggcgacctgggcgtggggaagaccagtatcatcaagcgctacgtgcaccagaacttctcctcgcactaccgggccacaatcggcgtggacttcgcgctcaaggtgctccactgggacccggagactgtggtgcgcctgcagctctgggatatcgcaggtgascgcggggggagggggtcagggggatagagcgcctcgcggccggtttccagtctcgaggcagcggcttgcggccaagcgtgagattaaaatcactaggtcgcgaggcagtttttcctggtgggctggaaacttagtttcaaagaaaagaaaaacgtctgaaacttcaagtgcattccctggcgcttttgggctattgctttagctccttcccgcacagtcccctgggatctctctgcccagagcaggcctccccagggaaccagaggaagattgtctgcaattgcattctgttctccactccagctcgttttctgggcgcgggcagtt

SEQ ID NO: 258503 - DNA, 549 bp, Homo sapiens
tgggcagtttattgccttgtttctagcttagctaattacagattttctaaatgccacgtaaaataacatgctatgttcttacgggtaaataatgtgtacagtgagcaaaaatggtgaactttcaaagtaggaatgagggatatatggagaaaacgcctcaaggcaggacatgtcgtgtcatctgggttttagaggactgattctgatagaaaagcaagtagcagcttgaccaaggaaagctaaggcatttgagagtgggaggggattggaaaaagtagctctatatgtgtgattggtttcttcagcaaatatatrtatgtatatataaagtgcctggtatgtgaaagtacttaggtgagggaaaaacaaagaaggataataattgaataagatttacttcttcatcccagcttcatcagcatgatgacacaaaaacaaatcactgtaacaataagtaaagagcattgatagacataacttcagaacactctcatggtgcagagatgttgtccacacctcgttctcctactctctgagactaaatctgag

SEQ ID NO: 258504 - DNA, 611 bp, Homo sapiens
ataggttgggtcaaaaccttgacctcagtctgaaaattagcctttaacttgtagatctaagagtgcracctcagaaatcccacaggaggtcagagggtggaatggaatcatcgtgaaggcaaggatttttttctagttatagaacaaaactagtaaccagctgtatgttctagttatatgttcctagtgataattctggaaaattatagggattaaatttttttttgttaaatgaatgaatgagattagacgagatgaaattagacagtcttagctaaagtgattttagtgggagtggaaagaaagtgatgaatgcaacagaccagacatgacagaaaactcttaaataactaataagcctgcaaatccactgggagaggagtaaagaattaagaattattccttcactcagcatggggaccatattgaatgcttactatatagagtgcagtgcttgtcacaggggctgcagaaatttggttctggctatggggtggcttgttattttgtaggggaagattgtaccaggtaagttctaggatatacacctaggtgacttggaaaaatggtaattaatttatatgtttctgtcattggtttgatgggacaaa

SEQ ID NO: 258505 - DNA, 611 bp, Homo sapiens
ataggttgggtcaaaaccttgacctcagtctgaaaattagcctttaacttgtagatctaagagtgcgacctcagaaatcccacaggaggtcagagggtggaatggaatcatcrtgaaggcaaggatttttttctagttatagaacaaaactagtaaccagctgtatgttctagttatatgttcctagtgataattctggaaaattatagggattaaatttttttttgttaaatgaatgaatgagattagacgagatgaaattagacagtcttagctaaagtgattttagtgggagtggaaagaaagtgatgaatgcaacagaccagacatgacagaaaactcttaaataactaataagcctgcaaatccactgggagaggagtaaagaattaagaattattccttcactcagcatggggaccatattgaatgcttactatatagagtgcagtgcttgtcacaggggctgcagaaatttggttctggctatggggtggcttgttattttgtaggggaagattgtaccaggtaagttctaggatatacacctaggtgacttggaaaaatggtaattaatttatatgtttctgtcattggtttgatgggacaaa

SEQ ID NO: 258506 - DNA, 559 bp, Homo sapiens
tgcacaataatgttaattttctcctccaataacaatctattgattatttactggaagttggagttgagtatagagtaagttcatcagtatgcagcactaattcactaatacatgataaggcattttagaggaagaaggagccttaatttgaatttatttccaccataaaatcttgagctcttattgtatcctaaaggtggagaaataagcctcgggttttgcaatatcgaaagatggtcaatctgctctccaggattttcagtgccatggttagagatccaagcatgaatgyacagcataataagtatcagtggtgtagaaattttaaaattctatgggttcataaagaagagattcagtgattccagctgtcaggacagggaagtatgcacaaatgtggtgagatttaagggcacatttgaaggatgtataggattttattgaacagagtgggagtagagatgaggagggaattcaggctttgggcacaaagatttaaaaaggcaagaaaatctggaaagtaatttaggatgcgttttaaaaagaacaagtagtccaa

SEQ ID NO: 258507 - DNA, 578 bp, Homo sapiens
taccttttgatagtggattctaatggagatagaggttttcttttcttttctctaaacttttattatagattcagggggatacatatgcaggtttatgacatagacgtaggtatattgcatgatgttgagctttggggtacaaatgatccccttactcagggagtgagtatagtacccaatagtttttcaacctttgccccttcttttcttctcactccagtagtgcctggtttctgttgtcattatcttcatgtccatggttacctgatgtatagctcccacttataagtgaggacatgcagtatttagttttctgttcctgcattaattcacttagggtaatggcctccagcyacatctatgttgctgcaaaggatatgattttattctcttttttggctgtgtaatattccatgatgaatatgtactatgttgtctttaacaagtgcaccattgatgggcacctaggttgattccatgtctttgctattgtcagtagtattgcaatgaacatgtgagtgcacgtgtttttggtagaatgatttgctttcttttggatatatacaaaagaatgggat

SEQ ID NO: 258508 - DNA, 600 bp, Homo sapiens
ggttttgagagatttcggtaatgctttctatttttattccactgtggttcaagagtatgattgtatattttcaatttttttcgaattgattgagacttgcttcatgtctgggcatgtgttcaatctttctatgttctgtgcaaatgagaagaatgtttattctgtggttgatgggtagagtattccgtagatgtctgttaggtccaatcagtaagtgtcaaattcaagttcagaatttctttgttagttttctgccttgctcatttgtctgatactgacagtgggatattgaagtcccccactattattatgtggttgtctctgtcttttcagaggtctagaagtacttgttttatgaatctgactactccaatgttgtgtgcataatatattcaggacagttaagtcttattgtcgaattgagccgtttattattatgtaatggcctttttggtcctatttgactgttgccagtttaaagtgtgatttatctgacrtaggaatgacaacctgggctcttttttgttttctgtttgtgtgctggatctttctctaatcctttactttgagcctatgggtgtcattacatgtgagatggat

SEQ ID NO: 258509 - DNA, 593 bp, Homo sapiens
atacttttgtggtgactagtaatggtctttcctttccatgtttagcaggcccttaaggatctcttgtaaggcaggtcaggtggcaacaaattttcttagcatttgcttatctgtaaaggttcttatttctgctttgcttatgttttttgtttgaaaatttttttccttaaaaattcttagtataggcttccaatctcttctagactgtagggtgtttgctgaggggtccattgttagcctgaggggattccctttgtaggtgacctacctcttctcactagctgcctttaatttttttttgcattttgattttggagaatctgaccactatttgtcttggggatgttcatctggtatagtaccttgtaggggttctctgcatttcctgaatttgaatgatggcctctctagtgaggattggggaaatttttatggtcgatatcctctaatatgatttttctgttgcttgctstctctctctttctcttccagggacatcagtgagtcatagatgtgtcccctttacataatcccatatctctcagaggttttgatcattattttttattcttttttctttgtatttgtcagta

SEQ ID NO: 258510 - DNA, 605 bp, Homo sapiens
ctggttccttctcatctgtgtgggctaatgttccttcagttattgaagttgctgacccttggatgaggttgtttgcttttgtcttcttagatgaccttggagattgaattgcrgtataagattggttcagttgactagcttcatttctggaagattttagggagccaagtctcggcttggcattcctgagctatgtgctctaactctgggtggtagtactgggatgatagttttgttctctggccccttgatgttaggaaactgctgcgctacagaaactgaggtattttggcctgctggccataacacgctgatgtatggtgctggccaaagcacttcatcagcgtggtggcagcatgatctatgctttatcttgtgtgccaatagccatggcaatgcagcagggtacacatacagggcactgtcaggagcagggtagcaatgttcctgcatatcctcacgctgttggtgatggcagtgggggtagggtgtttgtggggagggttttgctggctagactaaatttttaaggcactaaaatgaatactgcatttcaagatgaataaaagcaaattgagtcaagaaaaacccatttatttccagtt

SEQ ID NO: 258511 - DNA, 605 bp, Homo sapiens
ctggttccttctcatctgtgtgggctaatgttccttcagttattgaagttgctgacccttggatgaggttgtttgcttttgtcttcttagatgaccttggagattgaattgcagtataagattggttcagttgactagcttcatttctggaagattttagggagccaagtctcggcttggcattcctgagctatgtgctctaactctgggtggtagtactgggatgatagttttgttctctggccccttgatgttaggaaactgctgcgctacagaaactgaggtattttggcctgctggccataacacgctgatgtatggtgctggccaaagcacttcatcagmgtggtggcagcatgatctatgctttatcttgtgtgccaatagccatggcaatgcagcagggtacacatacagggcactgtcaggagcagggtagcaatgttcctgcatatcctcacgctgttggtgatggcagtgggggtagggtgtttgtggggagggttttgctggctagactaaatttttaaggcactaaaatgaatactgcatttcaagatgaataaaagcaaattgagtcaagaaaaacccatttatttccagtt

SEQ ID NO: 258512 - DNA, 629 bp, Homo sapiens
cctctaagagggcaaaagccattcctgccctcttttggttactatttacatgaaatatctttttccatcccttcactgtcagtctgtgtgtccttaaatctaaggcgaatctcttgtagagagcactggatctggttttatccattaagccattctatggcttttgattggggagtttaatccatttccatttaaagtaattattgatagataaggacttgccagtgccattctgttccttgttttctgtctgtttttgtagttcttttgctccccttttcttatcttacagtcttccagatttttaagccttgactggtcaaggcatttttttttttttgtattcgttcatggcttctttagcaattcaatttcctcaaaatatagtaaacttatttgcttccagatagtttcatctgcctataaacatactaaaaaaatttttttwaaaaaataagctcactttattgaagtataattgatacacaaaaagctatacatatttaatatatacaacgattaagttgttattagcttaaaataggctgttataaatatatcaccatgaaaggtgctggagaaattaataggaaatactcagacagagaagtcagcctgaagaaaacgga

SEQ ID NO: 258513 - DNA, 488 bp, Homo sapiens
gttcaactcatcactcattactggtctattcaggagttctatttcttcctagttcaatatcaggcagttatgtgtttccaggaatttatccatttcctctaagttttgttgtttgtgagactatagttgttcatattgtatctgatgatcttttgtatttttgtggtatcagttgtaatgtctacttcttcatttctggttgtatttatttggctcttctttccttggttagtttagctagtagtttattaacttttttatcktttcaaagactcaactgctcatttcattgattctttgtattctttaaatctgaatttcatttcattctgctctgatctttgttatttccttttttctgctaactttgggtttggtttgttctttttttagtttcttgaggtgcaatttaagttattaacttgtgatctttctacttttttgatgtaggcttttaatgctataaactttcctcttagcactgcttt

SEQ ID NO: 258514 - DNA, 582 bp, Homo sapiens
aggggtgaccagcccagcgggatcgggactgggcgtcccgccgacgatgtgcaaggcagccaccaggccaggagcgcctggcggagcgaccaccacgtggcccagggagatcggtcggtttctcagcagctcctgtgccgcctccagcaccgcggctgtattccgggcaccgggcgcgcctgccsgctctcgcaacaccggccacacggcgacgcgccgcaggggcggacagggcactaggaggaggcgattcaggctgagactcctccgggatctcgacgccccgaccgccgccccggggctcgcgcacagcgggtccagctgcacaaagccgtccgctccgtcccgccgaggccaggcagtgcagaggcaggagccgccgtcgggtagcgagatcttaactgccgagcccaagcgcgcgcccagggcgtggagggcggccgggcccaggcggcagcgctgggtgccccggtctctagcgtctaagggtagcagctttaagagcggcccttcagggaagggatccgagtccggagccatcgcacacagatgaaccaggcagacgaaaccagattaggaaac

SEQ ID NO: 258515 - DNA, 582 bp, Homo sapiens
aggggtgaccagcccagcgggatcgggactgggcgtcccgccgacgatgtgcaaggcagccaccaggccaggagcgcctggcggagcgaccaccacgtggcccagggagatcggtcggtttctcagcagctcctgtgccgcctccagcaccgcggctgtattccgggcaccgggcgcgcctgccggctctcgcaacaccggccacacggcgacgcgccgcaggggcggacagggcactaggaggaggcgattcaggctgagactcctccgggatctcgacgccccgaccgccgccccggggctcgcgcacagcgggtccagctgcacaaagccgtccgctccgtcccgccgaggccaggcagtgcagaggcaggagccgccgtcgggtagcgagatcttmactgccgagcccaagcgcgcgcccagggcgtggagggcggccgggcccaggcggcagcgctgggtgccccggtctctagcgtctaagggtagcagctttaagagcggcccttcagggaagggatccgagtccggagccatcgcacacagatgaaccaggcagacgaaaccagattaggaaac

SEQ ID NO: 258516 - DNA, 540 bp, Homo sapiens
tataccagaggctgagtatttggtggcaaacaacaacaataaaaacactgtaatccttgccttcatgaagcttatagtctactgggaagtcaaacattgaagaagtaaacaagtgaataaatctgataattaaaggtgatgaaaattgctttgaaagaaataaacggaaaagggctactttaaacaggtattaaggataggaaaaacaaaacaaattgtttttcctactctcatacaccactcagccactcaacacagcacttctgacaccaggtgttggttggggagttccccacatatcaagcaaattctcccacagataccacctgggtgtcctctaattcaattcaatgctgagactatctacctggagatagcatcagactccacaggttcagggcccagtccctcaagactgccccccacyttcagatgccaatcacaagttccagattgtgacttgtgcttctgaccagggacggtctgtaaattgggcttcccatgacccccttcttaggttctattaatttactaggatgg

SEQ ID NO: 258517 - DNA, 598 bp, Homo sapiens
gctaggtgtttaatagttaaatctgtctgtttcctcaaatactagaaatccacttagtttttatttgaatctaggagaatgagcttgaaaaatcttaaaaaaaattggtttgggttttatacctaaggtatattagagttgagaattttagcctgctataataactcttagatctttagaacactcagacttgtctagtagttgacctaatattaaatatgacctggtcttggggactgagccagaaacaaggccagcctacagataggatagagattgtctgcaaatggcttattcatattaattctcaggtatccatttcatcaaagtttcctctagtgctttgctacaccccatccaaaaaatgggatgaagtcttgatttcttctttctaagrcactaaaatcagacagaggagacagaaatatctgtttgctgcaccattatttctcactgatggacaagatcttgccaaaacaatgcaagccctgagagacaggggagagagagatctcatgaccttttagccttggaatgggagggctgactccaaaagaaatgacccgctgggttccaaaatagcaaaactgaagacaaa

SEQ ID NO: 258518 - DNA, 600 bp, Homo sapiens
gttttgaaacgtatacaaaatacctttctaaggtattagaatagaatggtgagaaactaggacttcaacagaaccttgaggttaactagtttgtacaagtaggcgtggagagattaagtgacttgctcaaggktatccaagtagttaatggtcaagcagtgatctccaggtcaattctgatctccacatctgcattcatggggcacttccctgagcactgcatttctgactggaactgtctcagacaggctgtgtggtcatccatacagtgatgtgaaagacttctcatagttgaaagacctttattagttgccctaataaaggcactgtatttcactcaggaatcatatacttcatttttaatgataatacttatcagcttaatttgaaagggctaaggggttggctactatggcttaaatcctaaaggacagacttctgcttatgagaaaatagtagcagaaacaatgttataaaatgtgcattgatgctgtcctaaaatcctcaagtgcaattttggggtaagaagcctcaagttctagaagtagaccttctctccacacaactgatgataatactagcttattgtcattttgatgt

SEQ ID NO: 258519 - DNA, 600 bp, Homo sapiens
gttttgaaacgtatacaaaatacctttctaaggtattagaatagaatggtgagaaactaggacttcaacagaaccttgaggttaactagtttgtacaagtaggcgtggagagattaagtgacttgctcaagggtatccaagtagttaatggtcaagcagtgatctccaggtcaattctgatctccacatctgcattcatggkgcacttccctgagcactgcatttctgactggaactgtctcagacaggctgtgtggtcatccatacagtgatgtgaaagacttctcatagttgaaagacctttattagttgccctaataaaggcactgtatttcactcaggaatcatatacttcatttttaatgataatacttatcagcttaatttgaaagggctaaggggttggctactatggcttaaatcctaaaggacagacttctgcttatgagaaaatagtagcagaaacaatgttataaaatgtgcattgatgctgtcctaaaatcctcaagtgcaattttggggtaagaagcctcaagttctagaagtagaccttctctccacacaactgatgataatactagcttattgtcattttgatgt

SEQ ID NO: 258520 - DNA, 537 bp, Homo sapiens
cagagaaagattccatgtggcttattcatcatctaattcttgctaaacctccttctactgataaaggaagttgagggttaacagcatcaagagccaatgtgtttttacacgtaggccttcagtcagtaccacatggacaataatgataataacttacacgtctaagtaactttgtaatttacaaagcactttcacagctatcttatttgctcttcttaatactttgtatggtagacagggattactagcctagctttaaagacaagactgaggctcaatgagattaagtgacctgcccaaggtcacacaatcaaaaagtgataaagacaagaactcaggtcttctaaaatccagtccagtgcattttcccactatatcatactaatgaaatgggctctcagctgctaaatctgcctttagaaatatccagtgcatgagcctatactgtagaygacaggtgtcacacggctgaagaaaataattgatgaaacctatggaaagaaccagtgacaaagttctatagttttctcaatgggt

SEQ ID NO: 258521 - DNA, 528 bp, Homo sapiens
ttttggggcaccttagtggtaagaaggcagctgtcactggaccttctccctcatctcattcttgtagcctaaattcctttcccagtactttttcaaacatcttctccaagctgattctctatttacactttttgtctaaagcctcaaaaaaatgctataagaaacagattgaatgaccaacaacaattaaagaatggttaaggaaattattacacattcagcatttggcaaaatgcttgggtcttagatgaataaatacatttttcttaatatttcttaagtgaatgaataaatttaggatttataataaataaatttcatcataagrtgaacatgcaccactaaataatgtttaaagagagtttttcttttaataagctaggatgtggaggatgtgtcattttaaaatatgtcaggttgacatattattttgagttgaaaacattagagaaaatttagtcttagaaaaaggaagctgacctgtctctctgtatatagtaagcaataaagatttctctgggaggagta

SEQ ID NO: 258522 - DNA, 565 bp, Homo sapiens
aaacattttatagtgctagatgtcaggataatggtacatttagtcctagagaatgaaggcagagattgggaatatatttaaaataaattttaaaaatamatttaacacttcaattataaagtttaaaaaagttacagatggaatggtagaaagggatttccaaccagtagaattaggcaagagtgagggaagaaatcgaaaacttgggaaagaagaaaagcaggtgtagggtgcaaaaaacgaaaccaaaaaaacaaaccccaaaacacctccaggtaattcggattctccccactagagggcgtgcctccctctcctcgccctgagtgttcttgccgtacgcaaacatttgcttcgatgttgttttttccctctcttgaattattaggttagtacaaaagtaattgggtttttgcaattatttttaatttaatatatccgtgggaaaaatcttcataagaggaataatttggccaaaggatataactattttaatgccctattttaagaatgttgctagattgttcttcagaaagactgcacaaattaaattgatagccaccca

SEQ ID NO: 258523 - DNA, 565 bp, Homo sapiens
aaacattttatagtgctagatgtcaggataatggtacatttagtcctagagaatgaaggcagagattgggaatatatttaaaataaattttaaaaatacatttaacacttcaattataaagtttaaaaaagttacagatggaatggtagaaagggatttccaaccagtagaattaggcaagagtgagggaagaaatcgaaaacttgggaaagaagaaaagcaggtgtagggtgcaaaaaacgaaaccaaaaaaacaaaccccaaaacacctccaggtaattcggattctccccactagagggcgtgcctccctctcctcgccctgagtgttcttgccgtacgcaaacatttgcttcgatgttgttttttccctcycttgaattattaggttagtacaaaagtaattgggtttttgcaattatttttaatttaatatatccgtgggaaaaatcttcataagaggaataatttggccaaaggatataactattttaatgccctattttaagaatgttgctagattgttcttcagaaagactgcacaaattaaattgatagccaccca

SEQ ID NO: 258524 - DNA, 414 bp, Homo sapiens
taacattcattcaataatatcacctatcataaatatgatagtgatatcataaatatcacctttttttcctctaattgtctcaaaaatatcctttatatctgtattttaaaatccagaatcatctamtccaaggtttacttgttgcatttgtctaagttgtactgagtacttgactgacttgtggtcatgaaaatgactccaaagcagcttttatagaacggccatctctacagataacgagaacattacccggataacattctcttacatgcagactttacaattttttatttacaatctgataatgatgtattttcatgtagtttataagaggttgtacaattgatgagcactcactatgtgctagacgctgtgctggccttgaggctcttacagcttaggaaagggagacac

SEQ ID NO: 258525 - DNA, 414 bp, Homo sapiens
taacattcattcaataatatcacctatcataaatatgatagtgatatcataaatatcacctttttttcctctaattgtctcaaaaatatcctttatatctgtattttaaaatccagaatcatctaatccaaggtttacttgttgcatttgtctaagttgtactgagtacttgactgacttgtggtcatgaaaatgactccaaagcagcttttatagaacggccatctctacagataacgagaacattacccggataacattctcttacatgcagactttacaattttttatttacaatctrataatgatgtattttcatgtagtttataagaggttgtacaattgatgagcactcactatgtgctagacgctgtgctggccttgaggctcttacagcttaggaaagggagacac

SEQ ID NO: 258526 - DNA, 357 bp, Homo sapiens
gggattacaggtgtgagccactgtgcccrgctggtgtatttcttacaatgttcaggaactcccaattttctgttttaggaaaaaagtaaattgaatgttgtatgtggggtcggtgtggaggaaaagttaaatattaaatttgaattcaattaaacatggacaaaaacaatgatcaccaattcccagaacaggttgtgtgagccccttgagacgttcatccgcactgtttcggagaaatctctatttcaatctattcctatacgttagttattgaaaaacaatagacaatcacaaaacaagttcacctttttgtgttccttgagctcagtcaggaagggccctcatgactgggcctca

SEQ ID NO: 258527 - DNA, 357 bp, Homo sapiens
gggattacaggtgtgagccactgtgcccagctggtgtatttcttacaatgttcaggaactcccaattttctgttttaggaaaaaagtaaattgaatgttrtatgtggggtcggtgtggaggaaaagttaaatattaaatttgaattcaattaaacatggacaaaaacaatgatcaccaattcccagaacaggttgtgtgagccccttgagacgttcatccgcactgtttcggagaaatctctatttcaatctattcctatacgttagttattgaaaaacaatagacaatcacaaaacaagttcacctttttgtgttccttgagctcagtcaggaagggccctcatgactgggcctca

SEQ ID NO: 258528 - DNA, 612 bp, Homo sapiens
taaaaatatattgtaggaaaacattctgtctaaaaaacaaacaaacaaacaaaacccaaaaaaagttaatatgatcaagttgtctataattaaagggatttatagtggtctttctagagattaaatttgatgataaaaacacttatacacaaaakaattgattagaacaataaaattttcttaaaggattgatttactcttaatgaattataagagattttaatttgttttaaacccaaagttcaacttgtattgtttcttgatgttttctgttttctcttctcttttagaaagtgcgaaatagtaatgctcttcttcaacttattttcagatcataaaagtttttattccttcaagttctattcgctgtgggctgatgctagcaacgttttctttctcttttttttttttttttttgagactgagacttgctctgtagcccaggctggatggagtgcagtggtgagatctagattcactgaaatctccacctcccagattcaagcaattctactgcctcagcctcctgagtagcagggattacaggcattttccaccacgcccagctaatttttgtatttttagtagagacagggttttgtcatattgaca

SEQ ID NO: 258529 - DNA, 600 bp, Homo sapiens
aaagtaaattcattttctctataaattaactattaacatcaaatgcacactgatgaaagaccagcatataggcccctgtgtcagagtaacaaggttttcttgaagcatgaattaactccttaataaaagctataaaggctataaaagggaagttgtatcttatgggtcaagatgaaaattttatagattgtttataaaatattggaaaacaaatataattgaattcatgctgtttttattggggcttattggctgaaaaattaagtctcctctttcaaagaatgaaggtttttgccattttttgaaatccttcaattaccattttggttaaatgaatgatttattttwcattgacttgtgatcctattttgtgatatcaagtgttttaaacctttgatatttgacaaactttccaaaatcaaattataaattatgtatttttctgacctaattaatcctttaagatattaggttccctaaagtccaaaaaatgacatatttgtcttatttggtgtaaaaattatacaggaagcattgtaaaatgtgaaatggtgtttggttttctttgggctatatttgtataaatatgttattggtata

SEQ ID NO: 258530 - DNA, 592 bp, Homo sapiens
taaacactctctacacagtactggcatggggggaagtaagtgcggttagtttggggataatttttgtcactctactactctttcctcatctttacctgtccttatcatctgttccccactcagacctgcttcctctayaggtcgtcacacactagaaaactctttctttcaggactttccttgacctaataatacatatattccatttccttaaggttcttatctctgttgaagctaatctgataaactaatatctgctgagttgtttaataacaaataacttctaccttgcccatctaagaatataattttaaatattaacatcttgctaagctttatctcaaaagaatgactaagattgagtattttatataatagagcagctgattagtacagagaaaatattagactaagcaaccctgaaatgagttgctttttgggctattttttaaccagggctttcaaagttggcatcaaacacttataaaaagcagttgaatgagctactaaatatatgcaacattgaaagagtgcttggtcctaattaactcatagttttttccacttcgtatttttttcttaactttaaaat

SEQ ID NO: 258531 - DNA, 530 bp, Homo sapiens
tctcatgcatcctattctctgggagggaggggggttacataggagtgtggataccaggagacaaggatcacgggtggatatattggaggccacataacatattggcttattagagaacctgacagttgagacctttgaatcccatttaaaattttaacttaaaatttgatttggacttgttatttgtattgaaaaacctaagagaattgttacaagattatagagagtattgggatgtttgagataactttagaattaccattgttatgaatttaatttgtctggtttattagagtgattcaagtaccttagaaagttttgcttatcaatttaggcaagtaaaaagtaaatcaaatacattaactttataagcgctgtctaaaatgtttaagtcaatcaarttaactaaattgtaagaagcctgattgcttagtgcattctgctatccaagttactcaaactttagtccaagaccaatttgagagtaaatgttaaattttactgactttataaatagaattatatgatgt

SEQ ID NO: 258532 - DNA, 587 bp, Homo sapiens
caaatctttgctccaagaaagtagtaacataatttcccactaaaactatggcgatttgtatctttamagaacaaaagccaacggactgtcatcaggctcaaagaaaatattggcatttttcaaaaaaagctagtactttttcagcccaactcttttctttggcaaaatcttgtggatcatatttggaacttctgtagacatttcaaactcacagatccatgtgttttaaatgaagattgcctgcataggctatggaacaagatttacctttatcactggatcactacaccacaaaatgaacattatttgaagccacaccttttttgtgaggttgacaaaacaaggcagccagatttgaaaggttatgaattctgcaatggaacttgattcatggcatctaataaagatatttgaatgctcctgccaagttcagcaacaagacttgccagaacatagaatctcaagtaagcctacccttaatcttctgtgagaaaagaaaacaggcccaacagcagcagcggctggatttgagaattcatccctgcatttttttctcttaataaaggtcagctataccactgagaaac

SEQ ID NO: 258533 - DNA, 606 bp, Homo sapiens
aactggtgagccatggtgacacatttgaggtcaacggctgtaaagagctcccatgcctgtgctcaggaacagagggtcttggcattcttcctgtcgcaactgggggygagaaaacaaaaatgacctttctgggaaaatacactgagatgcatgtgttagctttgttgagaataactgttcaacaggctcagggcattttactcaagtcttttctgtcttactcactgttaaacattgcctctctggtaggctatctctaatatgtattgtttgtccatcttcctagcagttggctgggatttggctttgctttaaaagttaaatgtttcctctttgtatgccattagcttcatgtgtcatgttttctaacccttaggattatctggaccagtaatcccttgcccgtcccttgcctggttcctgtgcctttggattccgttttgtctaggatgcagataaacttaaagcattatattataaagaagtgacattagtgtctagctatatggctgaggggttcctttatctcagaacaggaaagtgagaagttaccactgagattcagctatacttatcattatcacaaacaataataataattatgta

SEQ ID NO: 258534 - DNA, 620 bp, Homo sapiens
aatgatgagacattttaaattaaaatcagaaattcatccctttttaaacatgagttgaaaaattaacaacatttttaaccaatctatgcaaaagcaaggaatgtaaacttttgttaaattagtaaacgctactgattttataattgatgctttaaacttacgtctttttttttttttcttagacagagtctcactccatctgccaggctgcagtacagtagtgtgctctaggctcactgcaacctccaccttccaggttcaagtgattctcctgcctcagaatcccaagtagctaggactacaagcaagcaccaccatgcccagctaatgtttgtatttttatagaaatggggtttcaccatgttgcccagactggtcttgaactcctggcctcaggtgatctacccaaagtgctgggattacaggcttgagccaccgcacccagcctcaacttccatctagattgcaaaaaaggataatttagatcagctaggcactcacaagatgatcagtgaaacccagtttaactcaaattggcattttaactcaatatgaacaaattttgtactgaagaaacacatttttacaagccaacaraaatagggaagtataactgcaaa

SEQ ID NO: 258535 - DNA, 583 bp, Homo sapiens
ttggttttaaaaaggtacataagttctcaattccaacttaactagaagttktgttgacttctttctttcctaatctgaaaactttatcttattaccacttctccttcagttttgttagccaaaaaaggaaatatcctgctatttaaaaaaaaaaaacaaaacaaaacaccttttacctgtactaagaatctcatctttatctgtttcttcttcagccttattttatgaattatctcttggatatcaagtgaattcttccctaatggctgattccaagcaactgctctgtcctacttttatgctcactgaatggtattccccattctccctcacaagtttcactttcttattttcactcttcaatgatgaatttctcaggaggggttttgcttgcgttattgcttttacactgtctaccttagtgccttcacagctaaacaccctctgtttcatgtttcatgaaacatgcagtaaactgctctgacctttatgttgagctttgtcagggtaagcaactctgctaccttagccaaaaccaggaaggatggggaacctaaagtaccacctcaagatggagtaactt

SEQ ID NO: 258536 - DNA, 226 bp, Homo sapiens
gagctttgtcagggtaagcaactctgctaccttagccaaaaccaggaaggatggggaayctaaagtaccacctcaagatggagtaacttctagactactcttcagactttctgctacttcttgtgtttattctggtaatctgtgtcattcaaggagtatgtccattaatcaaagttaccaaatgtattgtcatcacattgttcatattcccttgttattctttaaa

SEQ ID NO: 258537 - DNA, 563 bp, Homo sapiens
ctctctcttttttttttttttttttgagacagggaatcactctctgtcacccagtcttgagtgcaatggtatgatcacagctcactgcagcttcgagctgccggactcaagcaatcctcccatctcagcctcctgagcagcaagactacaggcatgcaccaccacacctggctaaatatttaattttttrtagagacaagaccttgctctgttgcccaggatggtctcaaactcctaagcttaagtgatcctactgccttggactccgaagtactaggattacaggtatgttgtttttattgatctttttaatgaggtatttctactcttggtatttggaaatgtaaagcctcttagtgctatatgagttctggaaatttatcagctccctagcagttctttgcctgaccacagtttcaccctatcaatccacagcttagaattcagcagcagacttcaggtgaccattaggcaaatttctgtagctcttttttctgcatagctacgtcctcactgagtgctttcccacataaattgaaaatcctcaccctctgtgttttctg

SEQ ID NO: 258538 - DNA, 584 bp, Homo sapiens
caccctgaggtcaatttaacctctcatttttcagtaaaccatgtaggtccagggaagtcccttccctgcaactttggagaaagttttttaaaagcatgaggtgataaagaaatgaggctccaaaggccaggtgtataaaccacagaaatcttttaggaaataagaaatgactattccttaacaacactaaattatattacaaagaagtatcgtggttctaaggagtaaatgtgagtagctgctttcttcctcatgccttcagcaagctagttatgtgcatttaagatttttgttcttttcaatattatagatgcagttcaataacatagtttctatgatttcttctattgctaataaaatatgtaaattttcttaataataaaataagtattgtaattctataatacaatatcaggaggaaaagttcttaaatgcattctacrtatcatagatatagttcaacacacaatgatactaacataaacaaggtgggttatcaccctataccattattaagcattatagaggattgttggcacttctaagagtttaagtgtgagtggaagctacatggccacctgtca

SEQ ID NO: 258539 - DNA, 584 bp, Homo sapiens
caccctgaggtcaatttaacctctcatttttcagtaaaccatgtaggtccagggaagtcccttccctgcaactttggagaaagttttttaaaagcatgaggtgataaagaaatgaggctccaaaggccaggtgtataaaccacagaaatcttttaggaaataagaaatgactattccttaacaacactaaattatattacaaagaagtatcgtggttctaaggagtaaatgtgagtagctgctttcttcctcatgccttcagcaagctagttatgtgcatttaagatttttgttcttttcaatattatagatgcagttcaataacatagtttctatgatttcttctattgctaataaaatatgtaaattttcttaataataaaataagtattgtaattctataatacaatatcaggaggaaaagttcttaaatgcattctacgtatcatagatatagttcaacacacaatgatactaacataaacaagstgggttatcaccctataccattattaagcattatagaggattgttggcacttctaagagtttaagtgtgagtggaagctacatggccacctgtca

SEQ ID NO: 258540 - DNA, 631 bp, Homo sapiens
tatgtccagatatatttaacaacaaaattctaaaaacttttttgttttaaaagggaggagtgttctaactctcagaaccaaaaatatattcactgattaaagttttgttgaccttagttcataaaggatattaaatttaaaaaatcctaagaatttatgaaatgtggaaaaaaaacatattaagagcctcctccaagtctaggcaatgggcttctgaaagttgtcttctcttgataccgggtactgaggaatagggcctgttttgacgccagctgaaaagacactcaaattactaatgacccattagcaacatattcccattcaagactctacatcatttctccacagaggactttgggtgttcactcgagtgctctgaggtttaggtcagtkttgctaggaccctccagagggcctcctgtctgataagacttcctactggataatcacagaatgaataaagttattctctccactatgcacgggagggtccaaacagtatgtggaatcttttaagagcagaaaacctgcatttccttctccccatcatagtgtgaaattaggagaagctaatctgacaactcgttcatgaccaggagggctaaattgccaaaaagtaaaaagagccagt

SEQ ID NO: 258541 - DNA, 540 bp, Homo sapiens
aaaaaaaaaaaaaaaaaaaaaaagccaaccacttacgtttacagaattaaaattgcagcctgccgctgacaacctgagaaaaagagacaaagtcagtggaatagcccttgttatttatgcaagtccgcatacagctagccctggagttcctggagagcaaggaacctctgtcccaaacttgactcagagcttccaaagttggtgtatttcaacaagtaagcattccrttgagccaacaatttggtagtttaccagcggctctggagcgcctgttgatgatgacagtttttgtgggggcatctcaatatgacacacaattgacactgaccagaaacacagcgccaaggacactctagtcctagccatgaaatgttatgattccaggttttcaggacagagcagagtccacttctcatctccagtatccgtaaaaatttgtccaaaatgtaactaagaaaacacaatgatattagttacttctgctccccgtcaccctcaaccccactgattacgagatgggaactcacacaaaactttgag

SEQ ID NO: 258542 - DNA, 570 bp, Homo sapiens
gggaaatttatatttcttttaagacagcctagtgtgccttacccacttcattagacacttcattcatccattcartaaatatttacttgatgcacaccgtattccacgcactgttttatatgctgtgattaggtaaagaacagaaacaagtaaggtctttgtttttatagagcttatgttatggtagagtagaaaaaaacataatgaagaaaaaaacgactaacataaattcagaggatcagtgctatgaagctgaaaacaaaataagggtggtgtgataacctagaatgggataactaactgattaatttagagtggaggacgtgggatgccatttgaaggacataatattagagtcaggctattcttggaaatatatggaaaagagccatctagacagagtgaagagtgagtgcaaagttcctaaagggcagatgcttggtacattcaaggtgcagagaagctagtgaagctagagtgaagtcaggaaggaggggggtgaaaataggtgaaatcagagatggagtatttgatcttatttgcaaccagaaaccactggagggtagtaaa

SEQ ID NO: 258543 - DNA, 568 bp, Homo sapiens
attcatttttcttctgtaggtatagtattattgctactgtggtgtagcttcaggattggttaaccacgcttccactacttactgtaggcccacaacaccaacatagaatttgtttccatgtgcttcaaataaaaattgtgttctggggctggtaataagggtcagctcatagagttagactaagtgtgcacggtatgactctggagacacaatttacaaggtagttggtgtaaactgtgccgcttatgttcctaccatttacaacctgcacaactatacatggtagtcatctcttggagagtaggtgactgagcaaaaggacagaataaaccagcccaggtaggaagagaagcaattaagtgttgtgtaacagaaattacggatgaaagtaytttaagagacttaaaatggtcactgatatcaactgcagaaacagaatcactctgagatataaacatatctcagttattacccatctaaaaataatacttattttttctccagctaccaccttgtttctcttttcaatggaaagtcctcagaagagttattatatgccttgcattgt

SEQ ID NO: 258544 - DNA, 551 bp, Homo sapiens
cctctttaaactatccctcatcatcttgttttcaatgcacagtatcatgtgtaaatcagaattaatatatctttcttaagagaaataaactgaaaagtaatagtatctgaaaacttcagggagatggggacattatttattgtggggtagttaaatcttttttcagctaaatgcctaaaagagaaaaaataatggcttattgagatcaaagcatgaaacaatctaaggcagaaaaaagcttatacrctttgccttgaatagtttggcacaatacctattccaacatttcctcagtgaatttaaaaatattgtttattgttcttcaaagtatatttgaaaaaaattctttaaaaaaggagtttgatcttgtaaaacataaaggcaatataaatcaaattgttgctattcaatgccaagtagcattcaatggcctgaggaattattttcatgtagcattggctcacactcatgttggttgacttggctgggtttctagagttctttggattttacatggaggtgccacaaatctactaattgagctatatgcc

SEQ ID NO: 258545 - DNA, 531 bp, Homo sapiens
  misc_feature (1)...(531): n = A,T,C or G
ccaatcacctcccaccaggccccacctccaacactggggatcacaattcaatatgagatttgggcgggarcacacattcagcctgtatcatcaaatgtgggggaaaaaatgcattagtaagggtggggggactagtctcatccctcttttctctcaattcacaagtgtatgcatatgtcaaaatatcaaattctacactttaaatatgggcagtgtattgggtgtcaattatacttcaataaagccattaaacgaaataggtagcacccaaagaaagctctccaaattatttttgaaaggttggggagagaaaaaagtcataataaaataatactacttctatattcctgtgggtgatgtangggaaaatatagattaaaaataagaattatcattttaccaggcaagagacttctcccctttttccttttatttcaaaattcctttctctgtccttttcaaatgtatataaatcttgataatggcgaaataaacctctgccagtctcacaattcaggaatgtttcctcaa

SEQ ID NO: 258546 - DNA, 621 bp, Homo sapiens
gctgggattacaggtgtgagccactgcgcttggccagaattttttctcttacttcgtcaatgtttcatactgaatctgatggttaggggyattttggtttgacttttaaggtttttttccctgcgttgttaatttatctgagtgtaaatgataacacttcttaatctgataatttacacaaagtttttcttttgccatgctagctaagaaaacaaaaaatggctcagtcttttttttttttttttttttttttgagatggagtttctctctggttgcccaggctggagtgcaatggcacaatcttggctcactgcaacctctgcctcccaggttcaagcgattctcctgcctcagtctctcgagtagctgggattacaggcatgcaccaccacgcctggcgaattttgtaattttatatttttagtggagatggggtttctccgtgttggtcagggtgatctcgaactcctgacctcaagtgatccacctgtctcaacctcccaaagtgctgggattacaggcgtaagtcaccgtttccgtccactcaaagtctttaatctgacatatactgccttagcaatatagaaaacaaatgagagacaaaaaatcctactctaatc

SEQ ID NO: 258547 - DNA, 542 bp, Homo sapiens
aaataacttgaaattttaagaataaaattgtaaatgtccagtaagcaatctcttgctgtcctatcctactgtaagtctttgtggcaagaaaaaacaggtcatgaaaaactatgggaagagaggagagagaaaatgatggccataagattgaccttaccaacttccaaaagtaagtctgcaggagaaaagaccagagcatggtttgcagggaagggacttaacagcatgtatgatgtgaagtgacagtttttgaaacctatagcctctgtaggagaaaaaatcaaaacagaaagaagtgacccttagaaattagatggtcaaaaagaatgtagcaaagggataaatttttgagtagttcatgtattacaaaagacaaacaaaatacgaggaaacaaacaatcccttttcctccactgcagaaataacccactaaggaatctggactttgttatactgaatgaaggtagtgccaccgaagcaggaatcttgtaaagttcctcrgtactacaaacatatgaaactgccccaatagtcccatagac

SEQ ID NO: 258548 - DNA, 453 bp, Homo sapiens
ctgctttcactttcctctgtgggagagctcgcagcccgcggagtctctcctggcactgaactgtgcctccctggggaagaagagatgcagaaagaagagaaaagctgttctttctcttttcttcaaaaatcttttttttaattttcaaatatattgctttatgccatttcaaaaacaaacctgcacgttgtgcacawgtaccctaaaacttaaagtataataataataaaataaaaaaagaaaaaataaaaaaataaaaataaatgcaagacactgggaatatattgcagatcaacataactctccctgtctccaatgagtctagacgttttgagtaataaaaaagtgaaacagggctagtgaataaagcttgattatagcattctgctatactattacctaattttgtaactatttcttgtatcttattctgcaattttttgctcgttgtgg

SEQ ID NO: 258549 - DNA, 453 bp, Homo sapiens
ctgctttcactttcctctgtgggagagctcgcagcccgcggagtctctcctggcactgaactgtgcctccctggggaagaagagatgcagaaagaagagaaaagctgttctttctcttttcttcaaaaatcttttttttaattttcaaatatattgctttatgccatttcaaaaacaaacctgcacgttgtgcacaagtaccctaaaacttaaagtataataataataaaataaaaaaagaaaaaataaaaaaataaaaayaaatgcaagacactgggaatatattgcagatcaacataactctccctgtctccaatgagtctagacgttttgagtaataaaaaagtgaaacagggctagtgaataaagcttgattatagcattctgctatactattacctaattttgtaactatttcttgtatcttattctgcaattttttgctcgttgtgg

SEQ ID NO: 258550 - DNA, 554 bp, Homo sapiens
cctggggctgggactcctgagtgtcctctcacctgtcaccaccagctccagggggtcactgtactctgatgagtgattgtggctgtagtactgacagtgataccgccctgcgtgttcccaggtgatggatgggatggggaactggccattcttcccaggctcttgtatccgtctaacccaggatgctgatttgttttccctatatagatggtactcctcagcctgaaggctcccctgacacctgagggtcacaggacttccctggatgatcacagagcctggctcagcccagagggtgggcttggggaggwgccctggaaggaaatcagaggtcggattctaagtcatttcccacccaacagatctcagctctcagctgcaggaccctccagacacccccatcagtcagcccagaactgctattccccatccccagctgcacgggggtggccccttgtccctagtgaggaggagggacctgggacagctgggaacagactcacctgcctgcacgtgggtcctggggcccagactcagccctggaagagagttcc

SEQ ID NO: 258551 - DNA, 554 bp, Homo sapiens
cctggggctgggactcctgagtgtcctctcacctgtcaccaccagctccagggggtcactgtactctgatgagtgattgtggctgtagtactgacagtgataccgccctgcgtgttcccaggtgatggatgggatggggaactggccattcttcccaggctcttgtatccgtctaacccaggatgctgatttgttttccctatatagatggtactcctcagcctgaaggctcccctgacacctgagggtcacaggacttccctggatgatcacagagcctggctcagcccagagggtgggcttggggaggtkccctggaaggaaatcagaggtcggattctaagtcatttcccacccaacagatctcagctctcagctgcaggaccctccagacacccccatcagtcagcccagaactgctattccccatccccagctgcacgggggtggccccttgtccctagtgaggaggagggacctgggacagctgggaacagactcacctgcctgcacgtgggtcctggggcccagactcagccctggaagagagttcc

SEQ ID NO: 258552 - DNA, 554 bp, Homo sapiens
cctggggctgggactcctgagtgtcctctcacctgtcaccaccagctccagggggtcactgtactctgatgagtgattgtggctgtagtactgacagtgataccgccctgcgtgttcccaggtgatggatgggatggggaactggccattcttcccaggctcttgtatccgtctaacccaggatgctgatttgttttccctatatagatggtactcctcagcctgaaggctcccctgacacctgagggtcacaggacttccctggatgatcacagagcctggctcagcccagagggtgggcttggggaggtgccctggaaggaaatcagaggtcggattctaagtcatttcccacccaacagatctcagctctcagctgcaggaccctccagacacccccatcagtcagcccagaactgctattccccatccccagctgcacgggggtggccccttgtccctagtgaggaggagggacmtgggacagctgggaacagactcacctgcctgcacgtgggtcctggggcccagactcagccctggaagagagttcc

SEQ ID NO: 258553 - DNA, 539 bp, Homo sapiens
acaatccccttcatcaggctgatgcctggacagccgtgggagaaaccctttatgaaaggtcaggtgygtgggaggagccgccccacaggaatgacaaccaagatacatgaggaaaacacagacagttgttgaaatgcattagacagacattgtgaaggtgaattaatttttatattaatttatatattatataaaagagtcccaagcccttctcagccttttcccctgctatcattgctaccgaaactttggggcttctgtctccaccctcaggtgcccccctcttcctgtcacagaagttttcttcctggacatcagcagctgggctggacccggggaaggacatgggagtgtgagggccagtgaggaggttgtgggggtaggtgggcgtctggggtcttcgggcagaattacctcctccacaggcctctgtcgttctctgactccacagtccccacaggactttggaaatcagcctccctctgggctgggtgaagagggacagagcttcagccttgggatcatgagagccacctgcc

SEQ ID NO: 258554 - DNA, 613 bp, Homo sapiens
gtcctcaaccatagccagcattggttggtgaagggccacagttttttttctgtgatgattggcttgtatagagcagttactgtctaaaagttttctgtcttgctatactgctcctttcctgctcctttggctagagaaagctgacttttggggggagctggcttttttgtctgtgccctgttggcatttttggattgccagcttcttcagttcgaagttgcagatatgtgaagtgaaaggaaaatccaggaaacgtaccactgtgttgtttcttgggtccccaaagtcccgagcttctctgccctttttctgcctttcacagtcttcttaatgattgttttatatataatgtccagtatttaaaattctacctcatggatatgcacatgtttcatttttctggaagtggaatttattcacctgctttttaatgtagcagagaaaataaaaatgctgcatagattacattataaagaatatagcttagaactctaggtagaattattaacattggaatgggtctttcaaagacagwttgtcatctcaggtaatttagatatcgttcagcttgaagacctgagttgctgcctggtgacaggcagtgacatagtgt

SEQ ID NO: 258555 - DNA, 604 bp, Homo sapiens
tgatataattttaatcagtttgtcagtgtaattgttttgtccacttttgatttcagtcttccctaaaagctatttatgaaatgactcaaactcaaaaaccttgtatataaggaattttacctgtgtatttcttcttaacatkaagatcaatctaatgattgtgaaattcactagttgaggacagtatgaatatattcaggcatggcttcatgcatttaatgctactctgaaaggtgttggatcaattaagtatttttatattgaagtctgtattccctctgatctctattatagagaagtgtgttttcctaggaaaataaatggatctaaggcggggaacttgctcataacatttctcctaggatcttcatatattttagtgtaaaatattcatttactggatattctatataaacacataaacatatgtatatatgtatacatgtaattctttcatagaacctcttcaagatgctacaggacttgtttacgctagaaagtttactagaaagtctattttgtgcatgtctgtattcccaaaatttagaaatagcatctggtacatagaagttgctcagtaaacgtgatgaattcgtattacagg

SEQ ID NO: 258556 - DNA, 412 bp, Homo sapiens
  misc_feature (1)...(412): n = A,T,C or G
agtccatcttgctttgggaaagaggggggaagaaaaaatgaagtgcaaataccacactccgggcgtaaaagtctgctaaacacctttccataacggaggagcaacgagtggggtgtccccgtgcccgtgcctgctcgaactggcggcggtctgggcagaaaacgcctccctctcctcctcttcctccttcttcccctcctccttctccctctcctcctcctcctcccgcgggccccggcgaagatcccgccgccactgcctctgcctccgctgccccccagggaggcaccgccggcgcccggcccggcgctgccattccgggcttggaccgcgcggcgcagagcgcgtggggccggacccggngtggccgcgcggggacgtcsgcgccggggacccccggcgcccctgggcc

SEQ ID NO: 258557 - DNA, 655 bp, Homo sapiens
atgtaccttataaggttattacaataattaagtaatatatgtaaaatacttaaaacagtgcttgtcatgtamgaagtacacaaagtagagttttcctttctcttttttttttttttaagccggtgagattcagcccataattccactttgccaacatctttttgtatgcgatcattttattcaacacatttgctattgatctcagcatcttggttcattcacaaatttcatggcttctttacgtttttccaagttgtttttaaaagcattgtccaaggcagaaccaaaaagcacccacctcccaatatattggttaacattgatttattaaccagcactcccatggccacagttgttgagccatgatagagtcgcctattttcacctaaatttttattatttaaacctaaagaaatttatagagaataatataatgtagcggccacctaggagctttattactacttaacatgttattatactgcctcagatttatttataagaggtaaaacattgcacattcagttgaaatcaccttccctggtccagtcctcttccacttttccccagaggtgaccattattgtataatttcactctcatcctatccatattttttgcagttcatttataaaaatacttgatgtagctttatc

SEQ ID NO: 258558 - DNA, 417 bp, Homo sapiens
tagctcactgcaacctccacctcccaggttcaagcaattcttgtgcctcatcctcctcagtagctgrgactacaggcatgtaccaccacgcccagccaattttttttggcggggggtagagatgaggtttccctgtgttggccaggctggtcctgaactcctgttctcaagtgatccaccacctcagcctcccaaagtgctaagattacagatgagagccaccgtgcccagacccccatctactctagacatgaccaagtccatagctgcagcagagtcaaggccccctgtggccatcctgacttagtgtgtgtcttccttctaaaccttaattgctgagtagagtcccattccttctcctctccagtcatactttgttcagaggagaaaggcaagcagcagaaagcacctccaccc

SEQ ID NO: 258559 - DNA, 577 bp, Homo sapiens
caccgtgcccagacccccatctactctagacatgaccaagtccatagctgcagcagagtcaaggccccctgtggccatcctgacttagtgtgtgtcttccttctaaaccttaattgctgagtagagtcccattccttctcctctccagtcatactttgttcagaggagaaaggcaagcagcagaaagcacctccaccccatctaggcttcccttcctaawttggaggctatatctgctctcccagccttcattgactggaaattacctctatcactccagcaggaggagagctagcaattcagaagggctctccaaagtgtgaatggagaagagctggtctaaggacttggtgatcatctgagaaaacagtgactcttcaatcctgagtgaagtaaagaagaaagaggcacccaataattctcgaactattattatggtgagcatagaagaaagaaccaagctctagaagtcactaaattgtatgggtcgtttacttattaattcattcaacaacatttatgacctggcttccctgtgccaggtactatgattattgtaagagacaacaaacagatc

SEQ ID NO: 258560 - DNA, 531 bp, Homo sapiens
acttgggaaattttaggcaaaagtaaggggctagaatgcctaaatcaactgggaagtcatgccttaatttctcaaatgcaacagaaaattagcataaggaagcttggtggtacttgcccattgggtagtacccattttctgtttgttttccgtttctgatctcactcccctctattctccaaggttacagactcttcatccttcaaccccctcagtttcacctctcaggatcttgagagatggataatgttatcattaaaattgagaaatyagagcttcttatgctatatctctacgttttctgtaatgtagagtttatataacataaaactatgttttatataacaaagttaaatcctttgcaactcagggatacatacaatttaactataaatttatgattaggtttaatgtttggcaaattttattaaaacagcagcacaattttttgttagcctagtaaagtaggaagagcactgcaatgggattcaaagaccaggagctgctctagccctgccaccagttgtcctt

SEQ ID NO: 258561 - DNA, 559 bp, Homo sapiens
aggttgggcaagccaagccaaagaatttgtcacatatacaaaatcaatgtcactgtccattcaaggaattgcaaatagtttggaatgttgagcagtagtctctagatatttaagtatggatcccttcttaatatcaaaatgttgagcctccgatgcatatgatagtagttatattgtagcagcctgtagttgagaaatatattgcaaacaattacattcagataaaattttactttgttaatcacaatcacaaatatatacatttagaaaatggtagtgataacaatagctcacatatgctatatgcattatatatattaagtcctttggtagtaatgtgtatgtactcaaactatatcatttgttcagtcaacaaataatacatgggctacttacagrttatagaactcttttcagaatacagaacgaaggcgtatatttcattctcatcatagtccagtgaagggtctatgtgtgcagaggtgatggtgaggagggaggcaaaatctgctccatgtgattattcagagatcctggcttttcctttttattggcttca

SEQ ID NO: 258562 - DNA, 548 bp, Homo sapiens
atctgaaataggaggatggccatgcttagaagaaatgtacaacacttgtgcacacattctaactggttagaactcaatcatgtggccacaactgagaygatcaagagaactataatctagctacagaatttggcagtatgattgaagtgaatcataaaattatttgagtttaattagacaatttctaaatgtaattgatgtaacaagagaaatgtgaacctgctccattttccctctctgccccatgtgattcttcagagatcacggccttttccttttattgggtacactgtctcctaggaccactggatgctttacttccttctgggcttaaatttgagatcagaaataggaagatggccatgcttagaagaaatgtacagcatttgtgcacacatcctattggttagaactcaatcatgtgaccaaaactgagttgatcaagataaatataatctagctacagaatttggcagtatgattgaagtaaatgataaaatgatttgagtttaattagacaatgtctaaatgtaattgatataacaaag

SEQ ID NO: 258563 - DNA, 560 bp, Homo sapiens
taatgttattgccagaagtgaaatagaatatagactgaaacacagaagcacagtgcactggaatatataacctctgccttcagcacagccagagtttggaaagctccagattctgatctgctgcaaaatttttggcatgagaaattctatcagttctctccaagctcagctggagttcagcctcctcaaggaacctgccctccgcagacccaaacacttcagcctgtagtgacyttgtgctcatttgaatgtatcactcctataaagtgtgtctgtaggttgacagttgtataataacaggcccttgtcacatccccttgacccacctctgatttcaaatgcagctgtggtggaagggtccatgtacgttcagactcacctcactcagtgggcagcccacctcaccctcttcaattgcatttgctcaaggggctttctccaatatcagggaacttgaaggatctatgaacaagctcagcctggaattgtgggtgatttatcatccctgtggaaaactcttcatcagtggggtatgggaaccagtggataaatgctttcac

SEQ ID NO: 258564 - DNA, 604 bp, Homo sapiens
tactcaaacctagcactgacacagaacacccaaggaagagctgtttctgccctctgccccaggtctgctatccagacctccaggacttaatgaattgcagagaagttgctgtgatggaagtcctggaaatacactctccagagtgcaggggaaagctgttcacagggaggtatcttgctgaatgcactctgctaggaaataacccaagcccgtgctagaggaagatgctggctgctccttgtgctggctgccctgtgttggagaagctgcctgagctgccagtacctggtgtgggagaggctgcccacagtgcaggaggtgggtgcctgggaagccatgtgcccaggagaagcctggtgctggaaaagctgcacatgctgcagaagcttgctgcaggagcacactgggaacaagaaggaaaatcccttcctcctgcagtatcttcccaccrccctctattgacaaagtttagcattatgtccactggcaaataaaaactatttaaaggccagttgcatttttacacagcaggtaattaagtgtgaatttggaactgagacagtaatttatttatttaatttttttttaatagagatggaaactc

SEQ ID NO: 258565 - DNA, 629 bp, Homo sapiens
attcaaactaatctaaagtaactgggggaagactaaaacggaatacaaacagataaatgagcccaactgtatctcaaaagaatatccgcagtgaagaggaaaaaaaaatgaatttaagtaatttttcagcacartattttgactataaaccttcagtttatcaacaaaaagaagtgcatagataaataaataaatcttatattcaacttaatagatctggtttcctgtagaagtgtaagaattctgaaactattttctatgatttccaggtctgaacaaataagcgaataggctaatgttgttggtaaccagagttcttactgtggaagtaaggagatataactacaaaaccagcaaggcaagcatgacccttccagagggtcttggaattagagatgattagtatttctggctttgtccagacaaaggcccaaagtgctgacattctagtggcaatgagcatgctctaacactcaattcttggtttctgaaaaacattttcttctgctcaagagaaccaggaattcttgaagaaatggttgattcaaggactagggcaggaaaagtgtaagataagtctggaacatgatgctataacagagagtaagaaataatgggaacatatcaaa

SEQ ID NO: 258566 - DNA, 568 bp, Homo sapiens
gtcaggaggaggtcagaagggtcaagtggcctgacagctgctgagcacagaggaggcaccatttctccctcaggccaacagatggagggagtgaggctgtggggcggagattctctgcgatgaaaatgtgcagttgccacaggacgtgagttaagacccatttagcaacaccgattaaggagctataaatagcacctgggctctctcacaggccgtaaaacactcttctctgcactgctcccagcctgtgacctgccctgcttaattggggctcaaaataaaatacctggaaggccgctttttgatggaaggcccttgttgccatggtgaccagttgctgggaccagggtggggcagaggcttgatacaaggctgctgagatgtaagatggggaggaagaggaggaggaagaggggagagaaagggaaagtgagaaaacaaygataaagattactgtggaagtctaaaatccacatcacgaggccgatggaaacaccagcttctctgcctgtaatggctatgaaaaatggcagcctcacccagctgatgggctagcaaatgaggaccg

SEQ ID NO: 258567 - DNA, 629 bp, Homo sapiens
attcaaactaatctaaagtaactgggggaagactaaaacggaatacaaacagataaatgagcccaactgtatctcaaaagaatatccgcagtgaagaggaaaaaaaaatgaatttaagtaatttttcagcacagtattttgactataaaccttcagtttatcaacaaaaagaagtgcatagataaataaataaatcttatattcaacttaatagatctggtttcctgtagaagtgtaagaattctgaaactattttctatgatttccaggtctgaacaaataagcraataggctaatgttgttggtaaccagagttcttactgtggaagtaaggagatataactacaaaaccagcaaggcaagcatgacccttccagagggtcttggaattagagatgattagtatttctggctttgtccagacaaaggcccaaagtgctgacattctagtggcaatgagcatgctctaacactcaattcttggtttctgaaaaacattttcttctgctcaagagaaccaggaattcttgaagaaatggttgattcaaggactagggcaggaaaagtgtaagataagtctggaacatgatgctataacagagagtaagaaataatgggaacatatcaaa

SEQ ID NO: 258568 - DNA, 553 bp, Homo sapiens
catcctcaaaccatatattagttaaataataaagcagaagatctattacaagatagcttataattcattaccaagtgaaacgccctgaaataaaggctcttggggtccagtgaaggccagggccattcagactgaggtaggtgtggcaaattcctggaaaaagaagaaaagtgactggcatttcaggatgggctcattttctcagatgaatcatgagagccttggccttaagctcttgctctgcactattggtaagaaataaagacttgagtacccaactggtacactgaagactgagaaagtaattcaggtatcctctccgtgcttagaccactgatactgttygccctcaaactgtgtttttaccatccacctgcctcaatggccttctagcctattatgaatgaagcatcccacctcctgcagtatgagtaaccagagttcaccgggcaatcaaaaaccaagtggaggacagagatatgcctgggataaaggagatgtgaatggacagagatgcgttcacctcgagactcctgagaaagtattgctttta

SEQ ID NO: 258569 - DNA, 594 bp, Homo sapiens
gaatgctgtctaaaaatatccaaatgtttgcaaaaaaaacacaattctaagtaacttatgagtcaaagaagatttttttaaaattacatagtattctgaatttgaagaaaatacaaacacaatatagcaaaatatgtgagaggtatctgaaacagtacttagaaggaaatgtatagccctaaatgcctatactagacaagaaaaatggtcttaaataaatgatctcagttttcacctgaagaagatagaaaaagaagagcagatggatcccatcataggcagcataaaggaaatactaaagatcagagtgaaaaaaatcaataaaatagaaaccagaaaaatacagagmaaataaataataccaaaagctgtttctttgagaagatcggtaagttgctaatgagactgaacagacaaaaaagagtgagaatgagagctgggtgtttggggcagatccagagagagacacaaattaacaatatcagaaatgagagaggtgacatcattatagattctgcaggtatttaaaagattataaagaaatagtatggacaacttaatgtcaatatatcctacaattagatgaaatggaca

SEQ ID NO: 258570 - DNA, 594 bp, Homo sapiens
gaatgctgtctaaaaatatccaaatgtttgcaaaaaaaacacaattctaagtaacttatgagtcaaagaagatttttttaaaattacatagtattctgaatttgaagaaaatacaaacacaatatagcaaaatatgtgagaggtatctgaaacagtacttagaaggaaatgtatagccctaaatgcctatactagacaagaaaaatggtcttaaataaatgatctcagttttcacctgaagaagatagaaaaagaagagcagatggatcccatcataggcagcataaaggaaatactaaagatcagagtgaaaaaaatcaataaaatagaaaccagaaaaatacagagaaaataaataataccaaaagctgtttctttgagaagatcggtaagttgctaatgagactgaacagrcaaaaaagagtgagaatgagagctgggtgtttggggcagatccagagagagacacaaattaacaatatcagaaatgagagaggtgacatcattatagattctgcaggtatttaaaagattataaagaaatagtatggacaacttaatgtcaatatatcctacaattagatgaaatggaca

SEQ ID NO: 258571 - DNA, 594 bp, Homo sapiens
gaatgctgtctaaaaatatccaaatgtttgcaaaaaaaacacaattctaagtaacttatgagtcaaagaagatttttttaaaattacatagtattctgaatttgaagaaaatacaaacacaatatagcaaaatatgtgagaggtatctgaaacagtacttagaaggaaatgtatagccctaaatgcctatactagacaagaaaaatggtcttaaataaatgatctcagttttcacctgaagaagatagaaaaagaagagcagatggatcccatcataggcagcataaaggaaatactaaagatcagagtgaaaaaaatcaataaaatagaaaccagaaaaatacagagaaaataaataataccaaaagctgtttctttgagaagatcggtaagttgctaatgagactgaacagacaaaaaagagtgagaatgagagctgggtgtttggggcagatccagagagagacacaaattaacaatatcagaaatgasagaggtgacatcattatagattctgcaggtatttaaaagattataaagaaatagtatggacaacttaatgtcaatatatcctacaattagatgaaatggaca

SEQ ID NO: 258572 - DNA, 578 bp, Homo sapiens
agggctgactttcacagggtggagcgtggaaatacaggtatcttgggcctaactggctgagagggctttccccctgcacggagccgaggaagctgtatttccagacgtctttcctagatggtttaattgatctgccaacaagtatttattggctcaatggctgagcagaggaggctggcagctagccaaggcttctggtattgatgaaggccagagagagtttgctctcacgatgactacaaggacactgtctccttgccagagctgcactcaagaccttctcgctagaccccygtgcatctcccggggtagtgaggtcctcccagcctccaggacatctggacttggcccctctgggcctggtcgcccctttgcccccatcccttatcaatctgtcctgaccccagctcacctccaggcctcagccgaggactctggctctgcatggggagtttagcactgagttcttctgcatctgcagggttcactcatttttccacccataggccttctttccccaagtggttatgaagttcctcagggcagggatggaaacccaggaggtatgcatggtgaac

SEQ ID NO: 258573 - DNA, 578 bp, Homo sapiens
agggctgactttcacagggtggagcgtggaaatacaggtatcttgggcctaactggctgagagggctttccccctgcacggagccgaggaagctgtatttccagacgtctttcctagatggtttaattgatctgccaacaagtatttattggctcaatggctgagcagaggaggctggcagctagccaaggcttctggtattgatgaaggccagagagagtttgctctcacgatgactacaaggacactgtctccttgccagagctgcactcaagaccttctcgctagacccccgtgcatctcccggggyagtgaggtcctcccagcctccaggacatctggacttggcccctctgggcctggtcgcccctttgcccccatcccttatcaatctgtcctgaccccagctcacctccaggcctcagccgaggactctggctctgcatggggagtttagcactgagttcttctgcatctgcagggttcactcatttttccacccataggccttctttccccaagtggttatgaagttcctcagggcagggatggaaacccaggaggtatgcatggtgaac

SEQ ID NO: 258574 - DNA, 555 bp, Homo sapiens
ggggcggttagcgtgagttayggcctcgcccagacactaataaggctgcttgtctgaggcattccataattcaagcaaaggctgtgccgcttaatggcccttcttcgtcagatcttccaggactcggtgcctccttaatgagttatttgcttgggatgaaattaagccgagacagcgtgagcttggaaaatactgccgtgcaggctctccccggttcttcatccttctcagcggctgctttctataaatagagccgtgagttctgcttcgtgacccgcctgctgggagccccagtgggcgcctggtgtctcccatccctcttgtctcccacgcccatgatctcactggtgagcagcagggggctggaactgccagcaaagaccttgtcatcatcccagctttgaagtcatttaagtagatgcttctgagtcgatccagggagccacagctgacttccagatcttgtcctctttgttgatgtttctccctcaaaatgcaattcatgaggaggtcccagggtgagagcgtgtttgcttctggcgtgttctggggtag

SEQ ID NO: 258575 - DNA, 555 bp, Homo sapiens
ggggcggttagcgtgagttacggcctcgcccagacactaataaggctgcttgtctgaggcattccataattcaagcaaaggctgtgccgcttaatggcccttcttcgtcagatcttccaggactcggtgcctccttaatgagttatttgcttgggatgaaattaagccgagacagcgtgagcttggaaaatactgccgtgcaggctctccccggttcttcatccttctcagcggctgctttctataaatagagccrtgagttctgcttcgtgacccgcctgctgggagccccagtgggcgcctggtgtctcccatccctcttgtctcccacgcccatgatctcactggtgagcagcagggggctggaactgccagcaaagaccttgtcatcatcccagctttgaagtcatttaagtagatgcttctgagtcgatccagggagccacagctgacttccagatcttgtcctctttgttgatgtttctccctcaaaatgcaattcatgaggaggtcccagggtgagagcgtgtttgcttctggcgtgttctggggtag

SEQ ID NO: 258576 - DNA, 555 bp, Homo sapiens
ggggcggttagcgtgagttacggcctcgcccagacactaataaggctgcttgtctgaggcattccataattcaagcaaaggctgtgccgcttaatggcccttcttcgtcagatcttccaggactcggtgcctccttaatgagttatttgcttgggatgaaattaagccgagacagcgtgagcttggaaaatactgccgtgcaggctctccccggttcttcatccttctcagcggctgctttctataaatagagccgtgagttctgcttcgtgacccgcctgctgggagccccagtgggcrcctggtgtctcccatccctcttgtctcccacgcccatgatctcactggtgagcagcagggggctggaactgccagcaaagaccttgtcatcatcccagctttgaagtcatttaagtagatgcttctgagtcgatccagggagccacagctgacttccagatcttgtcctctttgttgatgtttctccctcaaaatgcaattcatgaggaggtcccagggtgagagcgtgtttgcttctggcgtgttctggggtag

SEQ ID NO: 258577 - DNA, 600 bp, Homo sapiens
gggggtttgttgtacagattgtctcatcacccaggtactaagcctagtacccaacagttatcttttctgctccttgtcttcctcccaccctccaccctcaagtaggccccagtgtctgttgttcccttctttgtgcccatgagttctcatcatttatytcccacttataagtgagagcatgtggtatttggttttccatttccaagttagtttgctaaggataatggcctacagtgccatccatgttcccgcaaaagacatgatctctttcttttttatggctgcatagtactctgtggtatatatgtgccacattttcttttctttgatctgtcattaatgggcattaaggttgatttcacgtctttgcgattgtgagtggtgctgcagtgaacattcacttgcatgtgtctttatggcagaatgatttatgttactggttatatacccagtaatgggattgctgggttgaaaggtagttctgctttttagcccttcgaggaactgccatactgctttccacaatggttgaattaatttgcattcccaccaacagtgtacatgttcccttctctctgcaaccttgccagcatgtgttgt

SEQ ID NO: 258578 - DNA, 600 bp, Homo sapiens
gggggtttgttgtacagattgtctcatcacccaggtactaagcctagtacccaacagttatcttttctgctccttgtcttcctcccaccctccaccctcaagtaggccccagtgtctgttgttcccttctttgtgcccatgagttctcatcatttatctcccacttataagtgagagcatgtggtatttggttttccatttccaagttagtttgctaaggataatggcctacagtgccatccatgttcccgcaaaagacatgatctctttcttttttatggctgcatagtactctgtggtatatatgtgccacattttcttttctttgatctgtcattaatgggcattaaggttgatttcacgtctttgcgattgtgagtggtgmtgcagtgaacattcacttgcatgtgtctttatggcagaatgatttatgttactggttatatacccagtaatgggattgctgggttgaaaggtagttctgctttttagcccttcgaggaactgccatactgctttccacaatggttgaattaatttgcattcccaccaacagtgtacatgttcccttctctctgcaaccttgccagcatgtgttgt

SEQ ID NO: 258579 - DNA, 568 bp, Homo sapiens
ggttgttttctgaccacaatacgactaagctggaaatcaacaaggagataattgaagaaccaaatatgtttggaaatcaaagaagcacatatgtttggaaattaagacattattctaggtgacccataggtcagataaatcaagtgaaacaaatatttttgaactgaatgatagtaaaaattctaaatgtcaaaactggtgagatgcagcttgtattagggttctccgaagaaataggaccaatagtatatattargaaactggttcacgtgattatggagactgattcacatgattatggagacccaagagagccagtgctggagttccagtccaaaggctggcatgcatgaggcccagcaagagctcatgtttccatctgagtctgaaggcagggaaaaaccaatgttccaacttgatggcagtcaggcaggtggagtgttcttactttgccttttattcaggccttcgactgattggatgtggcccacccacattaggaagggcagtttgctttactcagtctactgatctaaatgttaatctcagccaggcgtggtggctcatg

SEQ ID NO: 258580 - DNA, 568 bp, Homo sapiens
ggttgttttctgaccacaatacgactaagctggaaatcaacaaggagataattgaagaaccaaatatgtttggaaatcaaagaagcacatatgtttggaaattaagacattattctaggtgacccataggtcagataaatcaagtgaaacaaatatttttgaactgaatgatagtaaaaattctaaatgtcaaaactggtgagatgcagcttgtattagggttctccgaagaaataggaccaatagtatatattaggaaactggttcacgtgattatggagactgattcacatgattatggagacccaagagagccagtgctggagttccagtccaaaggctggcatgcatgaggcccagcaagagctcatgtttccatctgagtctgaaggcagggaaaaaccaatgttccaacttgatggcagtcaggcaggtggagtgttcttactttgccttttattcaggccttcractgattggatgtggcccacccacattaggaagggcagtttgctttactcagtctactgatctaaatgttaatctcagccaggcgtggtggctcatg

SEQ ID NO: 258581 - DNA, 497 bp, Homo sapiens
cctgcctcaaaaaaaaaaaaaaaagactaagacacaagttagcaatatcataaataaaacagagacaaatactaccaatgctacaaatactgaaataataagataataagcaaatgtgaagatctttatgccaataaatgcaacaacttagaggaaaagaatagatttcttgaaatggtgatctatgtgatgccattccttgtccactatagtccagatccacctctccagtgtattgcggaagatttgaacaacactatcaacgggaattccagtgggatgctcttgctgaaggaaacttaagaggaaaattgcagctgatcttgaagctacaagtatactcattgcttccctcttccccagtttattctagatttcccccactctcargtcacgcttatgctggtcttagtggttcaaatgatgacacaatgcagacactcatctctgcagtgtctcaatgtctggtcaccatacctttctcaggacagatctgc

SEQ ID NO: 258582 - DNA, 585 bp, Homo sapiens
ttggtattataatgatgccaattgtgtctaatagacctattggttctacaaaattgaagctcaatagcttttttcttagaatttgttaaaataattccaaaatgtacatggtagaacaaagaaccagcatagcctagatgyttccaaagaagaagaataggatacagtaacattattattataaagttagagtaactaagacagtatggtttgggtacagggatataaactagaataatgaaacagaagacagagcctagaaacagagacacacctatgaagaaacgtgaccatgtcagagacaacattgcaaatcagtgagagatggatcgaccatccaacaaaatggtgctgtttcaaagttatccatatgaaaaaatatagaattaaatattcatatccaattggtggatacctcatgctatactaaaagaagccatttcggatgaattagacttaaatgtgagaagctaaacttttacaactgtaagaagaagaaaatataggagaaagtctacaaatgagtgagagaaagggttttcttaagcaagatactcaaagtgctttaaaaagatattaaaaatg

SEQ ID NO: 258583 - DNA, 585 bp, Homo sapiens
ttggtattataatgatgccaattgtgtctaatagacctattggttctacaaaattgaagctcaatagcttttttcttagaatttgttaaaataattccaaaatgtacatggtagaacaaagaaccagcatagcctagatgcttccaaagaagaagaataggatacagtaacattattattataaagttagagtaactaagacagtatggtttgggtacagggatataaactagaataatgaaacagaagacagagcctagaaacagagacacacctatgaagaaacgtgaccatgtcagagacaacattgcaaatcagtgagagatggatcgaccatccaacaaaatggtgctgtttcaaagttatccatrtgaaaaaatatagaattaaatattcatatccaattggtggatacctcatgctatactaaaagaagccatttcggatgaattagacttaaatgtgagaagctaaacttttacaactgtaagaagaagaaaatataggagaaagtctacaaatgagtgagagaaagggttttcttaagcaagatactcaaagtgctttaaaaagatattaaaaatg

SEQ ID NO: 258584 - DNA, 585 bp, Homo sapiens
ttggtattataatgatgccaattgtgtctaatagacctattggttctacaaaattgaagctcaatagcttttttcttagaatttgttaaaataattccaaaatgtacatggtagaacaaagaaccagcatagcctagatgcttccaaagaagaagaataggatacagtaacattattattataaagttagagtaactaagacagtatggtttgggtacagggatataaactagaataatgaaacagaagacagagcctagaaacagagacacacctatgaagaaacgtgaccatgtcagagacaacattgcaaatcagtgagagatggatcgaccatccaacaaaatggtgctgtttcaaagttatccatatgaaaaaatatagaattaaatattcatatccaattggtggatacctcatgctatactaaaagaagccatttcggatgaattagacttaaatgtgagargctaaacttttacaactgtaagaagaagaaaatataggagaaagtctacaaatgagtgagagaaagggttttcttaagcaagatactcaaagtgctttaaaaagatattaaaaatg

SEQ ID NO: 258585 - DNA, 585 bp, Homo sapiens
ttggtattataatgatgccaattgtgtctaatagacctattggttctacaaaattgaagctcaatagcttttttcttagaatttgttaaaataattccaaaatgtacatggtagaacaaagaaccagcatagcctagatgcttccaaagaagaagaataggatacagtaacattattattataaagttagagtaactaagacagtatggtttgggtacagggatataaactagaataatgaaacagaagacagagcctagaaacagagacacacctatgaagaaacgtgaccatgtcagagacaacattgcaaatcagtgagagatggatcgaccatccaacaaaatggtgctgtttcaaagttatccatatgaaaaaatatagaattaaatattcatatccaattggtggatacctcatgctatactaaaagaagccatttcggatgaattagacttaaatgtgagaagctaaacttttacaactgtaagaagaagaaaatataggagaaagtctacaaatgagtkagagaaagggttttcttaagcaagatactcaaagtgctttaaaaagatattaaaaatg

SEQ ID NO: 258586 - DNA, 609 bp, Homo sapiens
tcctcaggccaaggaaggcagggaggtggaggcagaggtgactgggttcaggagacaggggtttgagcctcagttcttccattaaccccttgggatgctacatttcttccctctctgagcttctctttcctgtctgaggccactgaatgagattttctctaagcatctggtcagttctgaaatgctggggctcactctcttgtggtgaatcatagagccccaaagacttggggagcatttggtggggtggcaaggatgtaaccagaacccccttctcaggtaggtctttcaaacctgtctgcgtggggcacccatatgtttgactggccttcccacaaaatctccacaagccatagaggaaaggctaggatccaatatgattctcctctatcttcacacctcttagaagagaagccttggacaaggagaatgatatttctatagtaatatttatttaaactcccaaaggaaaccaagtcacaaagtcaactgttttgtttttggtgtcattaaagttcaaaatgagcccaatatgcaggagcygaattgcaacccttccctgaatataagcagagggaggaggtgtctgcagagacaaccctgggcagg

SEQ ID NO: 258587 - DNA, 628 bp, Homo sapiens
aaatatgtctataccctacacaggatgatgcagtcggtaagatgtaagacgggacaaatgaagtctcttgataagacagttagtccaaatgagtccaaaagaacagaaaacccaatcaccagattctagaatattacctttttttttttttttttttgatgagatggagtcttgctctgtcacccaggctggagtgcagtagygcagtggcgcaatggaggctcactacaacctctgcctcccaggctcaagcaattctcccacctcagtctcctgagtagctggaattacaggaacctgccaccatgcccagctaatttttgtatttttgtagagacagggttttaccgtgttggccaggctggtcttgaactcctgacctcaggtgatccgcccacctcagcctcccaaagtgctgggattacaggtgtgagccaccacgcctggtccatatgttttaaggagaaatgaaacacctgtaaatgagaaacttgcctgattggactatcatatgtaaatgcaatccatactgtacattcatttccacatactaactgaaacatttgatttcaggcttttgttctatctttggattcttccccatttctcttctatagataaaaatggt

SEQ ID NO: 258588 - DNA, 628 bp, Homo sapiens
aaatatgtctataccctacacaggatgatgcagtcggtaagatgtaagacgggacaaatgaagtctcttgataagacagttagtccaaatgagtccaaaagaacagaaaacccaatcaccagattctagaatattacctttttttttttttttttttgatgagatggagtcttgctctgtcacccaggctggagtgcagtagtgcagtggcgcaatggaggctcactacaacctctgcctcccaggctcaagcaattctcccacctcagtctcctgagtagctggaattacaggaacctgccaccatgcccagctaatttttgtatttttgtagagacagggttttaccgtgttggccaggctggtcttgaactcctgacctcaggtgatccgcccacctcrgcctcccaaagtgctgggattacaggtgtgagccaccacgcctggtccatatgttttaaggagaaatgaaacacctgtaaatgagaaacttgcctgattggactatcatatgtaaatgcaatccatactgtacattcatttccacatactaactgaaacatttgatttcaggcttttgttctatctttggattcttccccatttctcttctatagataaaaatggt

SEQ ID NO: 258589 - DNA, 647 bp, Homo sapiens
ccattatattttgactatgtctctctcccattargggattgcattctttgtccttctggtaaaaagcctcctggatactgtttcaccttataaaacactcattatcatcacaaccactatcagacccaccttccccttcacacatacacacatctgacatctctatcccaatcaaacaaccatttaccagatgttcccctaagacatctaaatctatatgaaagcatcattttagttcaagctaggacacgtacatataagcacacatgcaattatatgcatacaaattatgtgctaaaatcctgaatggcctcatctcctaccacaaacaaacaaaaatattatctatggcaaagaaaggcaatatcacatcatctcacatttgggaaagatctgtcaggatcaggaaatgcaattaagtaatttcataagtgctgatagcattccactcaatatacccttagaacatcttaacaatgaaattaacactcttaaaatccctaaattattttttgtcctaaatggcttgttatcttggaacatttatcaggctgcagattacaaatgggatgcatctaaaaattccacagacaagtaaattgaaacctcttgtttgaaacagtaactactgcctttgcctagcaatg

SEQ ID NO: 258590 - DNA, 532 bp, Homo sapiens
agaaacctaaaaaaatttccttagaaatgtagaaatatttccagttcttgggaacaactgttccaagtatttgagactaagacaagtgactgttgccacatttggttattagacagattttattaataaacctacacgcccaacctacacatcacatttggtatcaaatgtcaggacaggctgtgacaatagagggacacttgggagaatagccactttttggaactacaarccatgatttggtactccaagaaaaacgcaactgctgagtaaatcaactacttcccttaggaagaaactcctacccagagaggcacaagttaaactgcatgtgaagaaatgtactatcaatgtttgaaagaaaggaagtacctatagaacagctagtcaatctctacttgtgatggaatctagatttatctgattgttgactatgggaaagtaaatagtgaccccaggcattcaggatcatttcacctcttttctcctaaatagaatctcaggccatagctcatacctcaaacatttgtcc

SEQ ID NO: 258591 - DNA, 532 bp, Homo sapiens
agaaacctaaaaaaatttccttagaaatgtagaaatatttccagttcttgggaacaactgttccaagtatttgagactaagacaagtgactgttgccacatttggttattagacagattttattaataaacctacacgcccaacctacacatcacatttggtatcaaatgtcaggacaggctgtgacaatagagggacacttgggagaatagccactttttggaactacaaaccatgatttggtactccaagaaaaacgcaactgctgagtaaatcaactacttcccttaggaagaaactcctacccagagaggcacaagttaaactgcatgtgaagaaatgtactatcaatgtttgaaagaaaggaartacctatagaacagctagtcaatctctacttgtgatggaatctagatttatctgattgttgactatgggaaagtaaatagtgaccccaggcattcaggatcatttcacctcttttctcctaaatagaatctcaggccatagctcatacctcaaacatttgtcc

SEQ ID NO: 258592 - DNA, 581 bp, Homo sapiens
ctcaaacatttgtcccaagaatggattgttgactttgcagactttactagagggctctgatatttaagaggcttgccttataaggacaaagagagagrgagatgattttgggtttttagcttacattattcagacatccaagtatttatatgccccaaaatgtcatgacacatttatttctttttattgatactataatcccaagacaattaaaagtttcaccaaattcattgcttagataccagtgatttaacagtatcttctataatttcttttggtgatatttgtttgtatatgactcagagtataaatgtccacaattttgaaatatttgagccaaaaggggcctcacgaatcttttaatttaacttgtttattttataatggtgaactttaagagctttttaaaacatattgcagtaattagtattatagctagctctaaaacctacatcttccaattcccaaaccaatgtttacattcccaaagggttttttataccgctgaattttttttttatttatattagtaatttggccacatattttgttatgtaaccagttagaagtaatagtattat

SEQ ID NO: 258593 - DNA, 581 bp, Homo sapiens
ctcaaacatttgtcccaagaatggattgttgactttgcagactttactagagggctctgatatttaagaggcttgccttataaggacaaagagagagagagatgattttgggtttttagcttacattattcagacatccaagtatttatatgccccaaaatgtcatgacacatttatttctttttattgatactataatcccaagacaattaaaagtttcaccaaattcattgcttagataccagtgatttaacagtatcttctataatttcttttggtgatatttgtttgtatatgactcagagtataaatgtccacaattttgaaatatttgagccaaaaggggcctcacgaatcttttaatttaacttgtttattttataatggtgaactttaagagctttttaaaacatattgcagtaattagtattatagctagctctaaaacctacatcttccaattcccaaaccartgtttacattcccaaagggttttttataccgctgaattttttttttatttatattagtaatttggccacatattttgttatgtaaccagttagaagtaatagtattat

SEQ ID NO: 258594 - DNA, 581 bp, Homo sapiens
ctcaaacatttgtcccaagaatggattgttgactttgcagactttactagagggctctgatatttaagaggcttgccttataaggacaaagagagagagagatgattttgggtttttagcttacattattcagacatccaagtatttatatgccccaaaatgtcatgacacatttatttctttttattgatactataatcccaagacaattaaaagtttcaccaaattcattgcttagataccagtgatttaacagtatcttctataatttcttttggtgatatttgtttgtatatgactcagagtataaatgtccacaattttgaaatatttgagccaaaaggggcctcacgaatcttttaatttaacttgtttattttataatggtgaactttaagagctttttaaaacatattgcagtaattagtattatagctagctctaaaacctacatcttccaattcccaaaccaatgtttacattcccaaagggttttttataccgctgaattttktttttatttatattagtaatttggccacatattttgttatgtaaccagttagaagtaatagtattat

SEQ ID NO: 258595 - DNA, 602 bp, Homo sapiens
gttggttctccaagtactgtttacaaacccctaggtgtccctgaaactcttttaggaggtctgcagcagggggtcagrgtgatactaaaacattatctgctttttaccctttatgatattttctgtaatggtaagaaaacagccatgggtaaaactactggtaccttaacacgaatcaaggtactagtaccaactgtggtagtaccattatattcttcggctccgtactctgacagaaaaaagcgagagcatgattgtgccataatataaaacatatttgtttttttttgttgttgctagttcctatcacagagaacccaaaacacttggaatttactgggtggtaggaatgtcttttgttctttgtaattagccccttttgatctaaatttatactaatgaagtgacttagggtgaaggctccacaaagcctcaggatggggccagtcatcagaaagaccgagtgattagagaattgaatgcttggaacttgctgccccacccaccaacctccaggaaaggtggggtaggatgctggatattaagatctaaagaactcctaaacaataagatttgatgagcttctgggttgctgaacacat

SEQ ID NO: 258596 - DNA, 557 bp, Homo sapiens
accaaactgttatatctttcaggctgaaggaaggaaatgaagtctcttcaatgttatgaactaagtagggtcagttttgctccattttrtcttctcttttgtgttttttcctgctgatctcctgaattgcacttatttatttatttatttatggttttgcacgtcactagtctacctataattttcacctcagagattcaaatcttatgcctctacctccagtctttgtgaatttgggaatatttcagtgtcctctcataaaaatgccagtacatacaattgtcaagtcaattatttttataagtttggcagcagaatctgtatattaaaatctatttatgggagattaagcaattattgtttagttgggagaaaaaaatatactctgtaggtattaaaaaaaggacttatcaaatgaattaaaagtgttaagacacacacacatacacataaaaacgcatacaccccacacacattgaaaagtttggggtacaatcatctgagctactgtccccaatgataggaaatcaagtagtacaataaatatcaaaaaccac

SEQ ID NO: 258597 - DNA, 623 bp, Homo sapiens
catttctactatattatgcagccacgttatattctgtctggaaaaataagtgaaaagttgaactattttaccttttaagagaaagtaagtgtgagccttacacttaaatataaaataaaactaaccagtatgatttggtgctatatcggtagaagaaaaacaagaaattttgttttatgaaaactttttagaaaacataaagcatcagaagctatcatttattaagtgccaactrtgaaccagtttctcaatgtatattatttattctgttttagagatgaagaaatatactcaatgtttctactgtatcagtcaggactcttagttttaatccttgaaaattactctggctaatttaaagagatattagcaattctccaaatctctgggagggccagggaaactagcttaaaggctcggcagccaggacctgtaccagcatgggagcacactttggagaccccacagcatgggattcaaagagaggcaattcatatacccgggaagccaccaatgggttcattgccatctgtctttctgccatattctgccatcttcaccaggaaatgaattattcatagtgccttctctactccaagtcaaaatctcacaaagccacatct

SEQ ID NO: 258598 - DNA, 623 bp, Homo sapiens
catttctactatattatgcagccacgttatattctgtctggaaaaataagtgaaaagttgaactattttaccttttaagagaaagtaagtgtgagccttacacttaaatataaaataaaactaaccagtatgatttggtgctatatcggtagaagaaaaacaagaaattttgttttatgaaaactttttagaaaacataaagcatcagaagctatcatttattaagtgccaactgtgaaccagtttctcaatgtatattatttattctgttttagagatgaagaaatatactcaatgtttctactgtatcagtcaggactcttagttttaatccttgaaaattactctggctaatttaaagagatattagcaattctccaaatctctgggagggccagggaaactagcttaaaggctcggcagccaggaccygtaccagcatgggagcacactttggagaccccacagcatgggattcaaagagaggcaattcatatacccgggaagccaccaatgggttcattgccatctgtctttctgccatattctgccatcttcaccaggaaatgaattattcatagtgccttctctactccaagtcaaaatctcacaaagccacatct

SEQ ID NO: 258599 - DNA, 555 bp, Homo sapiens
acacagttctatcaatgaacttgtatgtggtatgagtgtacgcaacaccacctagacgccagtacctgccgttctgactgtttgccagcaggaagacgctaacataaggcaatcttgttcttaacagtgtttcctggccaggcgtggtggctcacccctgtaatctcagcactttgggaggccgaggcaggtggattgtgaggtcaggaggtccagaccaacctggccaacatggtgaaactccatctctaccaaaaatacaaaaaaaaaaaaaaaattagccgggcatggtggcatgcgcctgtaatcccagctactcaggaggctgaggcaggagaattgcttgaatctgggaggtggaggttgcagtgagccaagatcacggcactgcactccagcctgggctacagaggaagactcggtctcggaaaaataaataaataaataaaaataaaaagtrtttcctgtagtattttattatcattgccatttcagattaatatcgacttttttaattttaagactacgtattctatcttaatttttattttattt

SEQ ID NO: 258600 - DNA, 612 bp, Homo sapiens
tattctttactcttttataagtaagaggttgggggtgagctatatgaggcagtcgactctgaatctatatcacagcttcacagctacaggagagtgacattttccaattcactagcaataactaggtcccggagaactgctataaccaaattaattttatgagaagctaacttataagccttgatggcaattgtataattttagcagagaaaaataactatgggatcaaaatgaccatgctgccacactgttctcatcatcaacacattcaaaaatcatcacaaaaatgcaagttttttttatcatgtccttgcattttcagtatacacagtttgaagcttgtgacttccgtgygctgacaaaatcaatgtactcttaatattctaagacattcattacatagaattaacaattataatatatgaccagatttaaactatttatattttctttctacgaaattaaaaacattatgaggtctccaattgtttttcagaaaaaaagaaaaaaaaacaatttttttttttcaattagcagtatcatagaagtccactgatttcactattacaaatccattccaagctgctggctggtatgaaagaaaggaaaatt

SEQ ID NO: 258601 - DNA, 580 bp, Homo sapiens
cgattcttccactcgaacctcccaagaagctgggatcacaagcatgtgccaccatgccttgataatttttgtattttttttttcgcatggagatggggtcaaaccatattgcacaggttggccttttttttctcttaaacagcaaattagcaatgagagtggtcccttcttccagtttaggatgaattattttccttaaaaggcagaataatacagacttaatgtacatgtttcctttgaattcccattawgcacatttttaaccttgcagtggaaatgaaccacctttacacaacactgagcctgtcttttttgcaattttttattaccaatttaagttacacatgttactagcattggccatttgcttcagggaattactgtagaatgacaatttaaaatattgactctgaagagttgtagtcttttaggattgcaaacattttatacatcaaaaccttatctttttgaattttagagtaacataacaatcagtctcagatcaaactttcttaaaaccatgttgatatttgactcatgaaatgctatttgtggtgtatgatcagtatagaggaaacag

SEQ ID NO: 258602 - DNA, 580 bp, Homo sapiens
cgattcttccactcgaacctcccaagaagctgggatcacaagcatgtgccaccatgccttgataatttttgtattttttttttcgcatggagatggggtcaaaccatattgcacaggttggccttttttttctcttaaacagcaaattagcaatgagagtggtcccttcttccagtttaggatgaattattttccttaaaaggcagaataatacagacttaatgtacatgtttcctttgaattcccattaagcacatttttaaccttgcagtggaaatgaaccacctttacacaacactgagcctgtcttttttgcaattttttattaccaatttaagttacamatgttactagcattggccatttgcttcagggaattactgtagaatgacaatttaaaatattgactctgaagagttgtagtcttttaggattgcaaacattttatacatcaaaaccttatctttttgaattttagagtaacataacaatcagtctcagatcaaactttcttaaaaccatgttgatatttgactcatgaaatgctatttgtggtgtatgatcagtatagaggaaacag

SEQ ID NO: 258603 - DNA, 580 bp, Homo sapiens
cgattcttccactcgaacctcccaagaagctgggatcacaagcatgtgccaccatgccttgataatttttgtattttttttttcgcatggagatggggtcaaaccatattgcacaggttggccttttttttctcttaaacagcaaattagcaatgagagtggtcccttcttccagtttaggatgaattattttccttaaaaggcagaataatacagacttaatgtacatgtttcctttgaattcccattaagcacatttttaaccttgcagtggaaatgaaccacctttacacaacactgagcctgtcttttttgcaattttttattaccaatttaagttacacatgttactagcattggccatttgcytcagggaattactgtagaatgacaatttaaaatattgactctgaagagttgtagtcttttaggattgcaaacattttatacatcaaaaccttatctttttgaattttagagtaacataacaatcagtctcagatcaaactttcttaaaaccatgttgatatttgactcatgaaatgctatttgtggtgtatgatcagtatagaggaaacag

SEQ ID NO: 258604 - DNA, 580 bp, Homo sapiens
cgattcttccactcgaacctcccaagaagctgggatcacaagcatgtgccaccatgccttgataatttttgtattttttttttcgcatggagatggggtcaaaccatattgcacaggttggccttttttttctcttaaacagcaaattagcaatgagagtggtcccttcttccagtttaggatgaattattttccttaaaaggcagaataatacagacttaatgtacatgtttcctttgaattcccattaagcacatttttaaccttgcagtggaaatgaaccacctttacacaacactgagcctgtcttttttgcaattttttattaccaatttaagttacacatgttactagcattggccatttgcttcagggaattactgtagaatgacaatttaaaatattgactctgaagagttgtagtcttttaggattgcaaacattttatacatcaaaaccttatmtttttgaattttagagtaacataacaatcagtctcagatcaaactttcttaaaaccatgttgatatttgactcatgaaatgctatttgtggtgtatgatcagtatagaggaaacag

SEQ ID NO: 258605 - DNA, 583 bp, Homo sapiens
ctcttggtagcaaaatcttcatattgggtgggaagtgaaggactatatttatgctcttctttttratgaaaatgtttgtaacatgaggacaagtgcttgggaacttaagtaaatgtcttgaaaaactacaggctcagtaggtaatggcaagagaaatagcagtttaagaaactctgggcagggtgcagtggctcatgcctgtaatcccagcactttggggggccaaggtgggcagatcacgaggtcaggagatcaaggccatcctggctaacacggtgaaaccctgtctctattaaacatacaaaaaattagctgggtgtggtggcgggtgccggtagtcccagctactcaggaggctgaggcaggagaatggcatgaacctgggaggcggagcttgcagtgagcccagattgcaccactgcactccagcctgggcgacagagagagactccatctcaaaaataaaaataaaaataaataaataaataaataaataaataaactctgaaatttctgttcccctgaaagcaagaagaaaactaacaaaaatggccagaatcaactttttcagatctctggatag

SEQ ID NO: 258606 - DNA, 583 bp, Homo sapiens
ctcttggtagcaaaatcttcatattgggtgggaagtgaaggactatatttatgctcttctttttaatgaaaatgtttgtaacatgaggacaagtgcttgggaacttaagtaaatgtcttgaaaaactacaggctcagtaggtaatggcaagagaaatagcagtttaagaaactctgggcagggtgcrgtggctcatgcctgtaatcccagcactttggggggccaaggtgggcagatcacgaggtcaggagatcaaggccatcctggctaacacggtgaaaccctgtctctattaaacatacaaaaaattagctgggtgtggtggcgggtgccggtagtcccagctactcaggaggctgaggcaggagaatggcatgaacctgggaggcggagcttgcagtgagcccagattgcaccactgcactccagcctgggcgacagagagagactccatctcaaaaataaaaataaaaataaataaataaataaataaataaataaactctgaaatttctgttcccctgaaagcaagaagaaaactaacaaaaatggccagaatcaactttttcagatctctggatag

SEQ ID NO: 258607 - DNA, 623 bp, Homo sapiens
atatttgctatttaccaattctttgtcttcttttaagctttgacaataaaaaaatagaaaaagacagattgtcagtggaatttactcattgaatgaatgtactccattcatttactcattcttttatcattacattttcagtaaagcacaatgattctttgaagagcttttgttttcgaaaatgtctcaggtattaatatgttgtgctttttttgagacggagtctcgctctgtcacccaggctggagtgcagtggtgccatcacggctcactgcaacctctgcctcccgagttcaagcgattcttctgcctcagcctcccaagtagctgggactacaggcgtgcaccactacacccggctaatttttgtatttttagtagagacggggtttcaccatcttggccagtctggtcttgaactcctgaccttgtgatcggcctcccaaaatgctgggattacaggcgtgagccaccgtgcccagccaatatcatgtatttttgaaatgatttatcctaaatctttttttatgatttcgatttgtttctataattattgtgaaggcagggtaaackattcctattaaggccaaataatcgggccttaataggaactgcatattgat

SEQ ID NO: 258608 - DNA, 668 bp, Homo sapiens
atgactacagttaacaataatatgtagtttcacatagctacaaggaagatattgaatgctctccacacaaagaagtgacaaatgtattagatgatgaatatgctaattatcctgatgatgatacattatatgtattgaaacttcactatgtaccccagatatatgtacaattgttatttatcaatttaaataaattaaattttaaaaataaaataaaaatatcaagaaagtgttaaaagacagcctagtaaaatgcactccccttgaaagcatatcaacataaaacattgttcatcttctctttccttggttaatactaaatccctgctaaaagaacacttggttaagggttagattggggctaaagaaaatcaatgactttakgaagacacaaactggggtgggggggagagaatttcataagagacgttactacttgaaatacatatataaacatacatatatatatttccttccttttatatttctgtatatacatatacacatacacaatatatatgtgtgtatatatatatacacatacccatacacaatatatatgtgtgtatatatatatgtacacacacaatactgacacagcttatatttacataatatgatgaaagtaactgcaagtttttaacatctaattattaaaggttagtttg

SEQ ID NO: 258609 - DNA, 592 bp, Homo sapiens
ctggcagtggttcagtggctgagtgacggaatttggcccaattggatatttttattatagatattaaaaggactttagaaattatctgcattctattttctatactttgtagcacagaaaaccaaagagaaatgaaatcaagcattttgccaaaatatccagaagagagtaggaaagtataaaagcagttgcctaagcccatctacacccttactgtgcttcaaacctaattcagaaacatgaaatcagatcacagtttttcttattatttagtatcrtatgaaagctatttttagatggcaaaatacatggtgccattgaagaaaaaaattttcatgcaaaattggttatttccaaaaatgaaaatgactgaactctgagaaatgttccgctagttactcattcacagacagaggtaattaaaatatctcattcacaaatggatatttcagcccatctattcattaatgataaaattggatcagtctacagcctgtcctgccagttgcctggccgtcaatgtttaaatagtccaaatgagctattaagacacagtttcttaataaagattaaatatgttgtcaggaggttt

SEQ ID NO: 258610 - DNA, 592 bp, Homo sapiens
ctggcagtggttcagtggctgagtgacggaatttggcccaattggatatttttattatagatattaaaaggactttagaaattatctgcattctattttctatactttgtagcacagaaaaccaaagagaaatgaaatcaagcattttgccaaaatatccagaagagagtaggaaagtataaaagcagttgcctaagcccatctacacccttactgtgcttcaaacctaattcagaaacatgaaatcagatcacagtttttcttattatttagtatcatatgaaagctatttttagatggcaaaatacatggtgccattgaagaaaaaaattttcrtgcaaaattggttatttccaaaaatgaaaatgactgaactctgagaaatgttccgctagttactcattcacagacagaggtaattaaaatatctcattcacaaatggatatttcagcccatctattcattaatgataaaattggatcagtctacagcctgtcctgccagttgcctggccgtcaatgtttaaatagtccaaatgagctattaagacacagtttcttaataaagattaaatatgttgtcaggaggttt

SEQ ID NO: 258611 - DNA, 622 bp, Homo sapiens
acagagtaaaaagagaaagggttatgattgagccttggtccacttcaaagcctataggtttagttgatgaagatgtgcctgcaagtaatacaagaaggagcattcagcaaggtaagaggaaaaccaagagagattgttaatccaatgaggcaggtgagtgatcaatattmagaatgatggaataataaatcaacacaagttttataaaggtcaaataagatgaatactgacaactaactattggagaacaatatattaatagatgtcactggcaacatatatgcaaaaaagaaattctattagcatagagtctaaattgaggttgataagggcaagtgaaaatggatcaataagttgttatgttctactcaggtcaaagaattaccacaaagtttagaaccaaaggttgtgtactaaatgtcaaatttagattattgagagttcacaggtattcaaaatgacagtgtcaaagtataatacagaattgagtgtttgtgaaagcatgaaaaataaatctttgaaggaaaggaggtcaaaaaacatttagaagaattgtctatggaagttcaactcttaatgcttgtgactaaagcaatgctgtagagaatgatattgagtcaaa

SEQ ID NO: 258612 - DNA, 622 bp, Homo sapiens
acagagtaaaaagagaaagggttatgattgagccttggtccacttcaaagcctataggtttagttgatgaagatgtgcctgcaagtaatacaagaaggagcattcagcaaggtaagaggaaaaccaagagagattgttaatccaatgaggcaggtgagtgatcaatattaagaatgatggaataataaatcaacacaagttttataaaggtcaaataagatgaatactgacaactaactattggagaacaatatattaatagatgtcactggcaacatatatgcaaaaaagaaattctattagcatagagtctaaattgaggttgataagggcaagtgaaaatggatcaataarttgttatgttctactcaggtcaaagaattaccacaaagtttagaaccaaaggttgtgtactaaatgtcaaatttagattattgagagttcacaggtattcaaaatgacagtgtcaaagtataatacagaattgagtgtttgtgaaagcatgaaaaataaatctttgaaggaaaggaggtcaaaaaacatttagaagaattgtctatggaagttcaactcttaatgcttgtgactaaagcaatgctgtagagaatgatattgagtcaaa

SEQ ID NO: 258613 - DNA, 603 bp, Homo sapiens
cgtttgctccaacatgatgggagaacttcttgattcagtgtttcttccccacaacttcctttattcttcctcactgcagagtgctacctcagtttttcctttccatatccattttccctatcttggctacttacagtccagttcctttaattattcactcttcttgcrctcttctactaccttcttccttagaaactactcttcctcacctattgcttgctttcttgctgaccatttggaaactccctcatcattgtttatcccttgaattataatctggttcaagcgcttgtgaaatttcctaaactgcgatagtttcctaacaacttcagccttgcatacacgagacattctttacacagatgtatgttaaaaacacaagccaaacttgtccagttctcttggcaacgtttagtgatccccatttcctacaacatgtttttcatattgtatcatgacacagagagccctttaccaatagtcttatctctacctcttttgctttattcccaggcacgtttttcagggtgacttgttatttataggttagtggaacaagttcaatccaaaacaatcatttatagtgtttcccttgaaaaaaac

SEQ ID NO: 258614 - DNA, 631 bp, Homo sapiens
cgtttgctccaacatgatgggagaacttcttgattcagtgtttcttccccacaacttcctttattcttcctcactgcagagtgctacctcagtttttcctttccatatccattttccctatcttggctacttacagtccagttcctttaattattcactcttcttgcactcttctactaccttcttccttagaaactactcttcctcacctattgcttgctttcttgctraccatttggaaactccctcatcattgtttatcccttgaattataatctggttcaagcgcttgtgaaatttcctaaactgcgatagtttcctaacaacttcagccttgcatacacgagacattctttacacagatgtatgttaaaaacacaagccaaacttgtccagttctcttggcaacgtttagtgatccccatttcctacaacatgtttttcatattgtatcatgacacagagagccctttaccaatagtcttatctctacctcttttgctttattcccaggcacgtttttcagggtgacttgttatttataggttagtggaacaagttcaatccaaaacaatcatttatagtgtttcccttgaaaaaaacagatcaagtgttctaaaaaaaagagatt

SEQ ID NO: 258615 - DNA, 603 bp, Homo sapiens
cgtttgctccaacatgatgggagaacttcttgattcagtgtttcttccccacaacttcctttattcttcctcactgcagagtgctacctcagtttttcctttccatatccattttccctatcttggctacttacagtccagttcctttaattattcactcttcttgcactcttctactaccttcttccttagaaactactcttcctcacctattgcttgctttcttgctgaccatttggaaactccctcatcattgtttatcccttgaattataatctggttcaagcgcttgtgaaatttcctaaactgcgatagtttcctaacaacttcagccttgcatacacgagacattctttacacagatgtatgttaaaaacacaagccaaacttgtccagttctcttggcaaygtttagtgatccccatttcctacaacatgtttttcatattgtatcatgacacagagagccctttaccaatagtcttatctctacctcttttgctttattcccaggcacgtttttcagggtgacttgttatttataggttagtggaacaagttcaatccaaaacaatcatttatagtgtttcccttgaaaaaaac

SEQ ID NO: 258616 - DNA, 441 bp, Homo sapiens
tgctgtaaaagaatactatatcgaaaagccaagggtgctatcataaacaaatcatatttcttgatggtaaatggagacaactgcaaagagcctcaggcatttaacttaaggaaaataataagtaatggattaataataatgttttgtaccctaaaaattgccatctgtaagtagggggctgagggacttccataygttaatcttttaacaaggcaataaagactaaaggttcactattagcatgcttgtctttcccaactgtgcttaatagaataccagaattaatgacctggtgaaaaaaaaaagttactttttcaaataaatttagaaaaccattgcatgatatactcctactcagatattcatagtacacattagcatattaacattcagatgagtttgcagtagagaaacacactgtgtctaatacagaggtctcct

SEQ ID NO: 258617 - DNA, 541 bp, Homo sapiens
agtattccatagtgtataggtgccacattttttattcagtctacaaatgatgggcattcagcctgctattgatgggcatttatgttgattctrtgtctttgatattatgaatagtgctgcagtgaacatacatgtgcatgtgtctttatgatagaatgattatattcctttgggtatatacccagtaatgggatttctagatctaatgacagtcctgtttttagctctttgagaaactgcctcactgctttccacaatgactgaaataatttacactcccatcaacagtgtataagcattctcttttctttgcaacttcgccagtatctgttatgttatgactttttaatcatagccattctggctggtgtgagatgatatctcacggtggtttacaaccagagttttaaaacccagatttatcttttgaatttgagacaaagggattcagctgcttactgcctactgttttctggatttcacaggtatcccaaaccaaatgtgtctcaaacaaagtaatcatctctcaactggaactgtt

SEQ ID NO: 258618 - DNA, 541 bp, Homo sapiens
agtattccatagtgtataggtgccacattttttattcagtctacaaatgatgggcattcagcctgctattgatgggcatttatgttgattctatgtctttgatattatgaatagtgctgcagtgaacatacatgtgcatgtgtctttatgatagaatgattatattcctttgggtatatacccagtaatgggatttctagatctaatgacagtcctgtttttagctctttgagaaactgcctcactgctttccacaatgactgaaataatttacactcccatcaacagtgtataagcattctcttttctttgcaacttcgccagtatctgttatgttaygactttttaatcatagccattctggctggtgtgagatgatatctcacggtggtttacaaccagagttttaaaacccagatttatcttttgaatttgagacaaagggattcagctgcttactgcctactgttttctggatttcacaggtatcccaaaccaaatgtgtctcaaacaaagtaatcatctctcaactggaactgtt

SEQ ID NO: 258619 - DNA, 390 bp, Homo sapiens
agctgcttactgcctactgttttctggatttcacaggtatcccaaaccaaatgtgtctcaaacaaagtaatcatctctcaactggaactgtttcttctgttgtgctccttacctcaaagaattactrtcatctctatttaatggaaatctgtatctcatcctggactcttcatttctaatcctcataatggaccagtcaccacatcccacacacttgttttcaattgttctacttgcctttactctggcactgttccaggtgtacagagggaagtgctgtccatatggccattaaaggaaggacctattttcccaattactgggaggactgtgagtgagtattctctgtctgtaagccctttcaagtatctccatagttccctaaaattt

SEQ ID NO: 258620 - DNA, 593 bp, Homo sapiens
ggggttgtggagtgagttgatatatgggaattgtttgtacattctgctcattttcctgtaaacctaaaactcctcaaaaagtaaaatctattaattaaaaaattctactgtagtattttaatatctttgagataaaatatacattaggaaacaaggatcatgcattatataggaacaaaacattctactgactttgtcttatttggggaatttaattcactttgagtgatttactaaaattctgacataataaaatggtgaaaaagaactatatataaatgctaattaggatactaaggaggctggttaggtgaacccactcattatttcaagccatagagttacatartgcattttgttagaaatattttaaaagtaggcatatgtcaaatgcatataagcaataaatcttatattcatttatcttatcacaaaataaaatatcacatggaaagttttacaataaaacaaaataaaactgaagctgttttacattataagggaagaataatttgagttgaaatataaaatcagatacagaccatactttaatatatttaataatttttgtagttaatgttttagaaacaatt

SEQ ID NO: 258621 - DNA, 501 bp, Homo sapiens
tgtcatctttacctattctcccatctccaacattgggggtaaaagactctgagatcctagtggaggacagattaacaaggaggaaaacccctgctcttctgtttatcatatgcaggaaagccacttaccaaataaaaacaagcccacaggactcttaaatgactgagaaataaactgctgtgttaaatctttgaaattgtaagacttaattctcagagtagcttatagtaccttaatatatttactatgtctcaaagtgtatcttctggaataayagtccaagtagacatgccataaaaaagttctatgaccaaataagttagaaatcatatatcccttttacagacacataatagatacaggataatcaaaagctcaggaaagtcgtgtagctttaaaaaatgtttaactgtgtttaatctagcaatttccaaatttactggcaaattaaatcctttatggcataagaactattaatgttgtatataaatgctattaatc

SEQ ID NO: 258622 - DNA, 574 bp, Homo sapiens
taacaactacttaacatcaactttccctgggaagtataaaagtgataaaatgtcaaakgcattgactgttgattaggggccaaacactttatatgtattatcttattcaattctcacaacgttagcaaatgggtaacattatgatctctaatttgcagctgagaaaattgaggctaagggaagatgaagaatatgcctgaggtcatgcagtataaagtagagaaactggtattttcttgctaactccaaaacttgatcagtcgaccactgtaccctgcaagcaatgactaataatcagctaaatgctagctgaattttccccagtgattccatgacaaactttcttgagcacagaagaaaataaccatgaaatcaatattctgccaacatttactgtgaccatattagcagtccctaaattgacaatggcccgtgtttatgcatgtattcgtgcactcactcatttattcactgacttccctggcaccaccaaagtataagctccataaaagcaccccttatgtatttgtgtgtttgtgtctttaattccatgtaattggttacatgacagtgc

SEQ ID NO: 258623 - DNA, 651 bp, Homo sapiens
tttaatgcagcatatatatgaacaataaatcacttaatatttggcaaagtttgtaaatgctatgttttatgaatttttttaatctaaattctcaaagaaaaccaaaagtaaactctacttttcccctttccccccttgctcctcagggacctattgagcttcttaataaagtgctggcacatagcttttatctccggctctgatttctagggaattcaacctaagatggtaattaagattaaattatatagtaagagaagtggcacaatatcttcctatcacattattttattttgcagggaagttttcccattaaattcctagaccaggaaccagagccatttctttaacacataaatttattcagagagatacatggccttgtaggyatttataaaagcaattcccatgcattttgtgggctgaccatttaaaactaccttgtagattattaaacatatttctcatgtttctgtgcgtgttttgagtatatcacaaacacaaagtccaatatagaggtagatcatagaagaataccagcctctttttatgaggtcttaatgaagtgctgctaccattattaacctaagtgtttggtatgatacttagaagcatattcagttagatactagaaagattatatcaaatcaa

SEQ ID NO: 258624 - DNA, 596 bp, Homo sapiens
attggttacttggtgtacaccctatataaatgaagaagatgaagtaaactttcaaagttatttactcggtgtccaccctatggagaggatatttcctgtaatagctgaagtgggaattggccttctgtttcctgcctccagaccctattttcctgccccagttaaacagaaggcagagtggtggcgtagaattaaatcatcaaatttgaatttttagaataatagccccagagacagtataaaatacaaattggaaagaaaagagattataataaggaaatagttcaggattttttagaacagtccaagtgagaagtgagcacctgaaacaagccagtggatataggaaacatggagagagcagagtccagtgataaaaaagatgtagaattattaacagttgaggtactatttgttgttgaagccatgggagagaaatatatcaagagccacttacatttttctttgcagagcacatggcacgggacataaattaacaatcgcttcagtcaygcaatgaaaccctgatatcgaatgtctgctctgtttcagtcaccatgctaagcaatgagaatgcaaaaatgaatgctataaga

SEQ ID NO: 258625 - DNA, 462 bp, Homo sapiens
gcctccctttgacacatgaagacagctaatgtcagcaggccccagccaagggaaaggaggggctgttcgaagcctttagattgtacagtagattaaatacgtgaattattacaaagagaactttccattttctgaaaatatgctgaaaactcattgggttttgatcaggttttatcaaaagggatagggaagaagtcatcctactgagagagtaggcaatggaggaattccaacttgcagtctcatttaggcttatgggtttacatttcgtttccatactgattagaaaacttgcagtttgatgttggttacttaacctaaatttgactgagtcragagacctggctttcggctctgaccagcataactatggacacatgttttcagcaccttgtgttctgtattcctacatgtacattaaagattcaactcactgatccctgatgtctgatattaaattct

SEQ ID NO: 258626 - DNA, 445 bp, Homo sapiens
ccaaaactctatggaacaaatgaatgtagggtcacaatttttactttatrtaatgcctagactagagtattataatcataattatcactattattattatgagacctatattatgattttaataattttgataatagtgtttcttatttcaatgcctgagaagcatgaatataaaattataagcagtataatttttttgtgaaaaaaattatatgtggaaaaaaatgtatgaagaaagggcacatttgaggttgtctaaataaatgtttagggagcctccaaatgaacgtcacttaccataagctcgtatctggactaagttttgaaggagattgttatatacaataacatggttaggaaactaagtgaagactgtattaaatccttatagcactagaaaaatatagtgttagcacacagaggttttcattctttataacctaaa

SEQ ID NO: 258627 - DNA, 573 bp, Homo sapiens
ttataataatatattacagttgcttatgatttcacgtaagatctggcaattcataaacaaaaattaaatctgcaaacacttcttcctgactgatacacacacacacacacacacacacacacaccctacacacaacttattttttagaagcatatttttagaagcatatgataatatatgtttctaagttctatcttgttctctaatttcaagttatctactrttttattcttaatgacagcatattctatatttacttcttctcaacccttacctccatactctagccttcttttatttatttttcatgaataatgagttcattggttatgcaaaaagatgcctaatgaggacgtcgcatccagtaaattcacaggctgtatgttctgaaataaaatcccacaggcaacctagctatgccttaagttacaaaaagatgtattttctttgaatttctaaatttgcaaaagataatggaaagccagtatggtgaagtaaatttcagaaacagggagttgaaaaaatagtagaaaatgaaagctaaaatcagaatttcccttagagacaactggc

SEQ ID NO: 258628 - DNA, 573 bp, Homo sapiens
ttataataatatattacagttgcttatgatttcacgtaagatctggcaattcataaacaaaaattaaatctgcaaacacttcttcctgactgatacacacacacacacacacacacacacacaccctacacacaacttattttttagaagcatatttttagaagcatatgataatatatgtttctaagttctatcttgttctctaatttcaagttatctactgttttattcttaatgacagcatattctatatttacttcttctcaacccttacctccatactctagccttcttttatytatttttcatgaataatgagttcattggttatgcaaaaagatgcctaatgaggacgtcgcatccagtaaattcacaggctgtatgttctgaaataaaatcccacaggcaacctagctatgccttaagttacaaaaagatgtattttctttgaatttctaaatttgcaaaagataatggaaagccagtatggtgaagtaaatttcagaaacagggagttgaaaaaatagtagaaaatgaaagctaaaatcagaatttcccttagagacaactggc

SEQ ID NO: 258629 - DNA, 573 bp, Homo sapiens
ttataataatatattacagttgcttatgatttcacgtaagatctggcaattcataaacaaaaattaaatctgcaaacacttcttcctgactgatacacacacacacacacacacacacacacaccctacacacaacttattttttagaagcatatttttagaagcatatgataatatatgtttctaagttctatcttgttctctaatttcaagttatctactgttttattcttaatgacagcatattctatatttacttcttctcaacccttacctccatactctagccttcttttatttatttttcatgaataatgagttcattggttatgcaaaaagatgcctaatgaggacgtcrcatccagtaaattcacaggctgtatgttctgaaataaaatcccacaggcaacctagctatgccttaagttacaaaaagatgtattttctttgaatttctaaatttgcaaaagataatggaaagccagtatggtgaagtaaatttcagaaacagggagttgaaaaaatagtagaaaatgaaagctaaaatcagaatttcccttagagacaactggc

SEQ ID NO: 258630 - DNA, 575 bp, Homo sapiens
gcacacctagctaatttttgttttttgtagaggtgaatttttgccatattgcccaggtgggtctcaatgtcgtggattaaagcaatctgtccactttggccttctagtgctaggattrgaggcatgagccaccacgcctggccagaaacctgttcaatctagcttaatattgtatcaccctaaaaataatgaggattatttttaattgaggttaaataaaagtgattttgaagaagattaacaaatgaatactctattatatacgtctaactcagtgttctggccgtaatggtgagaggaatatatcatttaaacaatggtctataaataattaatttagctgtaattaaagtaagagtaaatattagacagtttgatgatatagcttctgtgaacccggaaagttgataactcagattttgtgttgtggatagattcatgtaattgagaaatgagacaaacagattataaggtacactaggtactataaaaacttagagatgctcattggatggagcattttagaaatattggttatggtaaactacatctttctaatgtaaaatcatagtttt

SEQ ID NO: 258631 - DNA, 630 bp, Homo sapiens
aaaagttgaatacattcattcttacatatatcacatccattgtccactgggatttttctgtcatctttgttacgtgtatgttgctaaattgtgatttatcacatattcttttggtttttattttctttaaatgtctttccttagactccatttaagcttacaaggacatttttggctgtactttttagatcacttttgaaaaatttgtagggtcaatatacatttggttaatcaccgtatttattttaacccagrgatgtgaatgaaaccattctgttctccatatcctgaaacctaaataagaatgaaaaactttttaaagttttctagatgttatacatcattgactctactaaacatgtgctttgtgtattactgctagaaaataatagcaaaaataatatactaaaattatatatatagagacagagggattactctatgtaacataatgcattgtttatttactttttcatgtaattctcagaaaagcctagtgatattggtgttattatttttccattttgttgatgaagaattgaggcccaaaattataaaagaacctgtctaatgtcacatatcaagaaagtggtagatccagaatttgactttagtgagacagtttgaata

SEQ ID NO: 258632 - DNA, 603 bp, Homo sapiens
aaactgtcactattagctccgttctccactactatcctcaattttccatgtcattctaattttaagcaatatttgtatccactaaggtagtgattcttaatttttttatatcatagaactttgagaatcagatgaaaagtatcatcatccaaaaattcaaattgaatatacatgcacattttgcatgcaattttaaaaggtttgggggsctccaatttatagaccatctagtgataaaatctaaactaagaacttacatgctatgtaaacggaaataacatgatcatgtcaaattctcttaatacaaatatacatcaaaaaggcattgcttctgaatttaaaacatttaatctgagagaacaacaaggaatatttgtgtcaatacaaaacacatagaggggcctgtgaggttatatcttattgtaataaatataagtacacttctaagaaatatgtgtatgtatatctgggtgtcttggagacataaattaagtttgtcagaaccatactgttctttttttttattatctaaacctcaatgtgcctcaaacgataattatttttcttatttttcctacactccattttgcatttatacgaaca

SEQ ID NO: 258633 - DNA, 603 bp, Homo sapiens
aaactgtcactattagctccgttctccactactatcctcaattttccatgtcattctaattttaagcaatatttgtatccactaaggtagtgattcttaatttttttatatcatagaactttgagaatcagatgaaaagtatcatcatccaaaaattcaaattgaatatacatgcacattttgcatgcaattttaaaaggtttgggggcctccaatttatagaccatctagtgataaaatctaaactaagaacttacatgctatgtaaacggaaataacatgatcatgtcaaattctcttaatacaaatatacatcaaaaaggcattgcttctgaatttaaaacatttaatctgagagaacarcaaggaatatttgtgtcaatacaaaacacatagaggggcctgtgaggttatatcttattgtaataaatataagtacacttctaagaaatatgtgtatgtatatctgggtgtcttggagacataaattaagtttgtcagaaccatactgttctttttttttattatctaaacctcaatgtgcctcaaacgataattatttttcttatttttcctacactccattttgcatttatacgaaca

SEQ ID NO: 258634 - DNA, 603 bp, Homo sapiens
aaactgtcactattagctccgttctccactactatcctcaattttccatgtcattctaattttaagcaatatttgtatccactaaggtagtgattcttaatttttttatatcatagaactttgagaatcagatgaaaagtatcatcatccaaaaattcaaattgaatatacatgcacattttgcatgcaattttaaaaggtttgggggcctccaatttatagaccatctagtgataaaatctaaactaagaacttacatgctatgtaaacggaaataacatgatcatgtcaaattctcttaatacaaatatacatcaaaaaggcattgcttctgaatttaaaacatttaatctgagagaacaacaaggaatatttgtgtcaatmcaaaacacatagaggggcctgtgaggttatatcttattgtaataaatataagtacacttctaagaaatatgtgtatgtatatctgggtgtcttggagacataaattaagtttgtcagaaccatactgttctttttttttattatctaaacctcaatgtgcctcaaacgataattatttttcttatttttcctacactccattttgcatttatacgaaca

SEQ ID NO: 258635 - DNA, 630 bp, Homo sapiens
aaaagttgaatacattcattcttacatatatcacatccattgtccactgggatttttctgtcatctttgttacgtgtatgttgctaaattgtgatttatcacatattcttttggtttttattttctttaaatgtctttccttagactccatttaagcttacaaggacatttttggctgtactttttagatcacttttgaaaaatttgtagggtcaatatacatttggttaatcaccgtatttattttaacccagagatgtgaatgaaaccattctgttctccatatcctgaaacctaaataagaatgaaaaactttttaaagttttctagatgttatacatcattgactctactaaacatgtgctttgtgtattactgctagaaaataatagcaaaaataatatactaaaattatatatatagagacagagggattactctatgtaacataatgcattgtttatttactttttcaygtaattctcagaaaagcctagtgatattggtgttattatttttccattttgttgatgaagaattgaggcccaaaattataaaagaacctgtctaatgtcacatatcaagaaagtggtagatccagaatttgactttagtgagacagtttgaata

SEQ ID NO: 258636 - DNA, 517 bp, Homo sapiens
atatctcagggggaatgtaatagatatgaaaaattctagtaagtttttgatatatccaagaatatttactgccttctgagaggtaatgtacataagccaaaatgaacaaaatctaagctacaatcttaatttttagcatgcttctaagagataaaacacaggtagcacatgtgaacacactcatatttgaaggataaatattctcgcttgttttacatcacgtacatccagaaattaatttctacattaaaattctttgtcatttcttttagaaaatgcatgtctattaawgctgatcagatacatagtatgttgacttaaaatcattaattcaaatcagtgcctttttgaaaaaattattcaagacatatcaaatgcccccttgggatttactgtaactttatattttaatttccagtgaaaatagagaggcacattttatagagtagaaaagctacactgcaggttagttcaaaatggttctctaagatttgtcgggttgaaactaacctccact

SEQ ID NO: 258637 - DNA, 517 bp, Homo sapiens
atatctcagggggaatgtaatagatatgaaaaattctagtaagtttttgatatatccaagaatatttactgccttctgagaggtaatgtacataagccaaaatgaacaaaatctaagctacaatcttaatttttagcatgcttctaagagataaaacacaggtagcacatgtgaacacactcatatttgaaggataaatattctcgcttgttttacatcacgtacatccagaaattaatttctacattaaaattctttgtcatttcttttagaaaatgcatgtctattaatgctgatcagatacatagtatgttgacttaaaatcattaattcaaatcagtgcctttttgaaaaaattattcaagacatatcaaatgcccccttgggatttackgtaactttatattttaatttccagtgaaaatagagaggcacattttatagagtagaaaagctacactgcaggttagttcaaaatggttctctaagatttgtcgggttgaaactaacctccact

SEQ ID NO: 258638 - DNA, 609 bp, Homo sapiens
atcctcatcattatcagttgtctttagaagatcaaagtagtagaattaagtgcaattcagctacattcaggagccaaatcttaaaatatttattttaataaatgttttcatcaattttagtggtatcaagtcaagacatacatatctctaaaaactggatcaacaatctatagagtactatcttttctattatatatttrgaacactattttttctagatggtgatgtgcatatatcaacaatattgacatttttctgtagccaattataatatattctagttattacaaccaccagacattacgcgtaattttgtgatattgtagaatttctgagaaacatgttaaattattatgtagactaaaaactctccacttatttggaagttttttaatgataatgtcataatatcagtaggaatatatttatgtatatatttatttgtgagcttcatttgggagagagaaaggtagaaatatgtcattctcaccgacacaacattactaaaactcctatgtaatctaaaagtcacaaacttttttgtgaccatctaagagttggaattgcaaggcaagcaactacccaaaaatctaaggaaagaaaggtacc

SEQ ID NO: 258639 - DNA, 609 bp, Homo sapiens
atcctcatcattatcagttgtctttagaagatcaaagtagtagaattaagtgcaattcagctacattcaggagccaaatcttaaaatatttattttaataaatgttttcatcaattttagtggtatcaagtcaagacatacatatctctaaaaactggatcaacaatctatagagtactatcttttctattatatatttagaacactattttttctagatggtgatgtgcatatatcaacaatattgacatttttctgtagccaattataatatattctagttattacaaccaccagacattacgmgtaattttgtgatattgtagaatttctgagaaacatgttaaattattatgtagactaaaaactctccacttatttggaagttttttaatgataatgtcataatatcagtaggaatatatttatgtatatatttatttgtgagcttcatttgggagagagaaaggtagaaatatgtcattctcaccgacacaacattactaaaactcctatgtaatctaaaagtcacaaacttttttgtgaccatctaagagttggaattgcaaggcaagcaactacccaaaaatctaaggaaagaaaggtacc

SEQ ID NO: 258640 - DNA, 559 bp, Homo sapiens
ttttgtgatattgtagaatttctgagaaacatgttaaattattatgtagactaaaaactctccacttatttggaagttttttaatgataatgtcataatatcagtaggaatatatttatgtatatatttatttgtgagcttcatttgggagagagaaaggtagaaatatgtcattctcaccgacacaacattactaaaactcctatgtaatctaaaagtcacaaacttttttgtgaccatctaagagttggaattgcaaggcaagcaactacccaaaaatctaaggaaagaaaggtacctccaaggaaagatggaaacttacaactagaaacattctagaagaaaatatataaaaacattgctgygatcttatcttacataaatttttttagatacagtaccaaaatcatgaaccataaaattaaatgtgaaaaaattgttaaatcaaactttaagattgttagggatgctctgattcttgaagaaaactgagaagaaaataaaaagtccagctgatccctttaaaaaaatatttgaaaaatcacatatatgacaaaga

SEQ ID NO: 258641 - DNA, 569 bp, Homo sapiens
aagaagctagcaaaaaagggagtaaattaaattgcaaaataaatatatagaaataagtaattaagagaaattcctgaaagacataattaaaaaaagggaaaagtatcaaaaacagaagtatcttatttgaattatcaataaaattgataaaaactcccrtagaaagtaacacagaagaaaaaagagaaaaccaaaattaccgctttctagaataaaagcaaagacaataatatagagcacattaaagaaataataggagatattataaagactttcatgtacataaatgaatcaaattaggtgaaatggaaaaattccttgaaaaataaaaactaccaaaacctacataaaaagcaatagaacatctaagtaactatatctgatccatttaaacggctatatctgggaagaaagctcagttggtaatttaaaaccttatcaataatgaaaagtataagcacaagtcgctttgttgggaaactatttcaaacttttagaccaactctttcagaaaaaaaaaggagaagactttgccactcattttaggagggagaatgaatggtgataat

SEQ ID NO: 258642 - DNA, 600 bp, Homo sapiens
ggaaaaattccttgaaaaataaaaactaccaaaacctacataaaaagcaatagaacatctaagtaactatatctgatccatttaaacggctatatctgggaagaaagctcagttggtaatttaaaaccttatcaataatgaaaagtataagcacaagtcgctttgttgggaaactatttcaaacttttagaccaactctttcagaaaaaaaaaggagaagactttgccactcattttaggrgggagaatgaatggtgataatacaactagataaaagtcttacaataaaatgaagttacaaaacattcttaccaaatattaacaaaacggccctagcaataaataagaagttatcttgatcaagtgggatttatcctaagaatgtaggatgatttaaatatttattgtgaattaatataattcataatattacagatgagaaaatgagcaaataaaaagattattttaatagatacagaaagataatttgacaaaatttaaaacacattcatgataaatactttccgttcactagttatataaggaattttcttcacagtgatgcattcctatgaaaattctactgtaaatatgaatatc

SEQ ID NO: 258643 - DNA, 600 bp, Homo sapiens
ggaaaaattccttgaaaaataaaaactaccaaaacctacataaaaagcaatagaacatctaagtaactatatctgatccatttaaacggctatatctgggaagaaagctcagttggtaatttaaaaccttatcaataatgaaaagtataagcacaagtcgctttgttgggaaactatttcaaacttttagaccaactctttcagaaaaaaaaaggagaagactttgccactcattttaggagggagaatgaatggtgataatacaactagataaaagtcttacaataaaatgaagttacaaaacattcttaccaaatattaacaaaacggccctagcaataaataaraagttatcttgatcaagtgggatttatcctaagaatgtaggatgatttaaatatttattgtgaattaatataattcataatattacagatgagaaaatgagcaaataaaaagattattttaatagatacagaaagataatttgacaaaatttaaaacacattcatgataaatactttccgttcactagttatataaggaattttcttcacagtgatgcattcctatgaaaattctactgtaaatatgaatatc

SEQ ID NO: 258644 - DNA, 606 bp, Homo sapiens
atttaaacggctatatctgggaagaaagctcagttggtaatttaaaaccttatcaataatgaaaagtataagcacaagtcgctttgttgggaaactatttcaaacttttagaccaactctttcagaaaaaaaaaggagaagactttgccactcattttaggagggagaatgaatggtgataatacaactagataaaagtcttacaataaaatgaagttacaaaacattcttaccaaatattaacaaaacggccctagcaataaataagaagttatcttgatcaagtgggatttatcctaagaatgtaggatgatttaaatatttattgtgaattaatataattcataatattacagatgagaaaatgagcaaataaaaagattattttaatagatacagaaagataatttgacaaaatttaaaacayattcatgataaatactttccgttcactagttatataaggaattttcttcacagtgatgcattcctatgaaaattctactgtaaatatgaatatcatactgaatagaaaagactaaaatttccttttagattggaaataagataaagatatcttctcttgtcattcctattcaatattgt

SEQ ID NO: 258645 - DNA, 647 bp, Homo sapiens
tgtctttttcatcttaattgagcacttatcacacactatggctgtaacttttgtagtttgagttacaacagcaaaactagtatcaaattttatttttccttctttagaattgtatrgatagaagatttgttcttaagatcttagatcttcaaaatccatttttttcattgtcagtcgtgaactttcacattttttctttaaaaaggaaatgcgtttatttcttcattcacttaacattgttagaatatatcgggggaaattcactcctgatatttcacgtaggttcttttctattttccctaagctttggccagtctgagaaataaagggacagagtacaaaagagtgaaattttaaagctgcgtgtccgggggagacatcacacgtcagcaggttccgtgatgccccccgagccgtaaaaccagcaagtttttattagtgattttaaaaaggggagggagtgtacaaatagggtgtgggtcacagagatcacatgcttcacaaggtaataaaatatcacaaggcaaatggaggcagggcgagatcacaggaccaaaggaccagggcgaaattaaaattactaatgaagtttcgggcatgcattgtcattgataacatcttatcaggagacagaatttgagagcaga

SEQ ID NO: 258646 - DNA, 647 bp, Homo sapiens
tgtctttttcatcttaattgagcacttatcacacactatggctgtaacttttgtagtttgagttacaacagcaaaactagtatcaaattttatttttccttctttagaattgtatggatagaagatttgttcttaagatcttagatcttcaaaatccatttttttcattgtcagtcgtgaactttcacattttttctttraaaaggaaatgcgtttatttcttcattcacttaacattgttagaatatatcgggggaaattcactcctgatatttcacgtaggttcttttctattttccctaagctttggccagtctgagaaataaagggacagagtacaaaagagtgaaattttaaagctgcgtgtccgggggagacatcacacgtcagcaggttccgtgatgccccccgagccgtaaaaccagcaagtttttattagtgattttaaaaaggggagggagtgtacaaatagggtgtgggtcacagagatcacatgcttcacaaggtaataaaatatcacaaggcaaatggaggcagggcgagatcacaggaccaaaggaccagggcgaaattaaaattactaatgaagtttcgggcatgcattgtcattgataacatcttatcaggagacagaatttgagagcaga

SEQ ID NO: 258647 - DNA, 647 bp, Homo sapiens
tgtctttttcatcttaattgagcacttatcacacactatggctgtaacttttgtagtttgagttacaacagcaaaactagtatcaaattttatttttccttctttagaattgtatggatagaagatttgttcttaagatcttagatcttcaaaatccatttttttcattgtcagtcgtgaactttcacattttttctttaaaaaggaaatgmgtttatttcttcattcacttaacattgttagaatatatcgggggaaattcactcctgatatttcacgtaggttcttttctattttccctaagctttggccagtctgagaaataaagggacagagtacaaaagagtgaaattttaaagctgcgtgtccgggggagacatcacacgtcagcaggttccgtgatgccccccgagccgtaaaaccagcaagtttttattagtgattttaaaaaggggagggagtgtacaaatagggtgtgggtcacagagatcacatgcttcacaaggtaataaaatatcacaaggcaaatggaggcagggcgagatcacaggaccaaaggaccagggcgaaattaaaattactaatgaagtttcgggcatgcattgtcattgataacatcttatcaggagacagaatttgagagcaga

SEQ ID NO: 258648 - DNA, 569 bp, Homo sapiens
atgatcattttaaaaatttatctcttagccatacgtatgtcttcttttgagaaatttctattcaggtcctttgcctattttctaatcaggctatttgtttccttgctattgagttgtgtgagttccttatatattctggatattaaccccttaccagatgacttttaaaggtggccaaacaagagtagatttagaagataatgttcaagaaggaggtagagtgaagatgcagccagcctccaaccagaaaagatatagccagaaagctcgtatatatgagtaagattcgacayccccacttatgatgtgagaattgacttagaaacacaagaaaatcatcatcatcatcatcatcatcatcatcatcatcaattatccctatcctctcatccttgtcacctatttattagatgcctcatatgtgctcggtcaatgcatctagtttagtattaacatgtacaaccttccttgttgagatttacgtatctgattccccaatgtatgtattatttaagctaagagtctacatctatctctctttatagaatctcctcttcttcatggagctg

SEQ ID NO: 258649 - DNA, 596 bp, Homo sapiens
ctatttgtttccttgctattgagttgtgtgagttccttatatattctggatattaaccccttaccagatgacttttaaaggtggccaaacaagagtagatttagaagataatgttcaagaaggaggtagagtgaagatgcagccagcctccaaccagaaaagatatagccagaaagctcgtatatatgagtaagattcgacacccccacttatgatgtgagaattgacttagaaacacaagaaaatcatcatcatcatcatcatcatcatcatcatcatcaattatccctatcctctcatccttgtcacctatttattagatgcctcatatgtgctcggtcaatgcatctagtttagtattaacatgtacaaccttccttgttgagatttacgtatctgattccccaatgtatgtattatttaagctaagagtctacakctatctctctttatagaatctcctcttcttcatggagctgatccatgttttctgataaaagtataggattattggagtttataatacaatttcaacctcagtagtgattcaaatcacaaaaaaaaacaaacaattgttgaaaagcctaacatcttta

SEQ ID NO: 258650 - DNA, 479 bp, Homo sapiens
ataaaacttgcatgaaatgaacatgaattacatgcatttacgaaatatgggaggttagggttacctttgaagataaaatttaacttttcaccaatcccacaaaaattaaatatcaagataataaattatatatattacaaaggacatggatatctttaaaaacctgtactatacacacataccaacacacaagagttagatgttcatagactagaagtcctaggataaactcaaactacttgcagaaaaagacaaacattgcttcagtaaacaatatgtcagtggattcttacaaatgccaaactaaaatttctccaaaatattacaaccgaatgactctaaaaaacttccagcaaagcctaattcttcaatgatgacatcctgaaacaccagtgtcttcttggtttttagtgaaaatattagccaatttctaaatagcaaaatctctctctmtatatatatagatatcaaaatatcaa

SEQ ID NO: 258651 - DNA, 583 bp, Homo sapiens
gctacatttgaaaactataaggctattttaactgtgtaaaatgaaaactgaaatcattcaatggtaattccagaaatagcacacctagttttgcattaattatggatataatttggttacattacagcagtaagacattgcctaaagtagaaaataaaacagaatcaagcttcagaggtgtgtagacttagcaaaattatcaataaattaaaatttggggaagataagactatgatgattacatgaaaatctttaatattaattgaattgagtattgatgtaaacagcatacatggggcattacaatagtattgcttaacttacagtgttttaatatgtaaagatggtagataaaatagatttagtacatatcktattttactgatattcattttaatataacattaagtcaaatgttaagtctttatagggcaatcaatgtaacaaataatctaccaatataactatcatatgaacaacaaaacatgaattcaaaaggatgaacaatggttagcatgacagatgccttacaattaacattaatgccacagaaataacattttttgatatgaccacagcgtgc

SEQ ID NO: 258652 - DNA, 559 bp, Homo sapiens
agcaaaaatctagaaattttatttgattttgaatttcaaaaataaaattaatcttattaaatttaactaacaaatgttcactcctttaaaaacaaatgcatacaatcatagttcagtctgtcagagagagtgttattactaaactacaaaataaagaaaagctataaaactattaagacaagaaataatgatagtctttgtggtagcttgcaaatttttcccatcgctgtatttccctttgcaaagtgactttactrttcctccagtcagtaagttgaatcaatttcttatcacttaaatccgggctcaaccttgtaacttgtattggtttatgggacattagtaaacttgcccctaagcaaaggattgagaaatactttcactttgggactcactctctattgccgctgggcaccattctgccaccacgtgttcaagcccggactaacctcctactggatgagaccacatggagtgccatttcaaccatcataccgacttagacacttatgttagggtattctaggttattcagccccaggtcactttgtgtaaacaa

SEQ ID NO: 258653 - DNA, 586 bp, Homo sapiens
caaaaacgtatgcagactgttgacccagtcaaacctgggctgaccccacagcagtgtccccaatcagttgacatcttcttcatatctcatttgtacactcactggggatggtgaagttgacagcatcatgtcatagcattttgtcctccagaatttttgacttaaagaactctccacactatcatcagaaatttatctgacatggagatcaatgacccaaaggcaatctgggtcacataaatcacttgaaagttgaaagctgaatgtgcagtataccaaggagtgtgcatcatggtcaccttgtgagttatgcaaatatacagcagctcagtattgtcttcagagggctgcatatatttctgatgcartgcctcgttttgaaataattaaaaatagtatgaaggcaagtaaatggatatgatcctgtctctggaaatttatgctaaggaattagagatctacacagtgattacagcacgagaatgtttatattagcactgcttctaatataaaaagtggacatttcttaatatttaagaacagttgaattatttaatgaattaacatattgttacaaaataaattt

SEQ ID NO: 258654 - DNA, 483 bp, Homo sapiens
gctctaagcccatttttgttactagtctgcaggtgttgtgttgccccatgttcagcactagatggcagcctaagctgaggtttgccgcaggtctactgcggatgttttgttcctgaaggaagggaaatctggcatgtgggtccatggatttctgtctgaggctgaggaagatccagatgctccatccacagtaaccagcctagagtsaggcactgcagagctccactctactctgtctcattgtgaaggacccgatgctggtctccaaggctatgttttctttcaacctccttctcctttccttaaacacacagcatccctgtgcatgctgtgctgcctaaaattgagggatggattaagtagccattcccacagtcaccatggctactgcaatgctaggtcatatttgaagtccatggtcactgggaccagggcagctatggcctccttgtcactgaggttcgcctgtggtctgaggctgct

SEQ ID NO: 258655 - DNA, 483 bp, Homo sapiens
gctctaagcccatttttgttactagtctgcaggtgttgtgttgccccatgttcagcactagatggcagcctaagctgaggtttgccgcaggtctactgcggatgttttgttcctgaaggaagggaaatctggcatgtgggtccatggatttctgtctgaggctgaggaagatccagatgctccatccacagtaaccagcctagagtgaggcactgcagagctccactctactctgtctcattgtgaaggacccgatgctggtctccaaggctatgttttctttcaacctccttctcctttccttaaacacacagcatccctgtgcatgctgtgctgcctaaaattgagggatggattaagtagccattcccacagtcaccatggctactgyaatgctaggtcatatttgaagtccatggtcactgggaccagggcagctatggcctccttgtcactgaggttcgcctgtggtctgaggctgct

SEQ ID NO: 258656 - DNA, 538 bp, Homo sapiens
atcaacgttactctttggtcaaattattgacaagtaaatttaagaataactataaacatccacttagctcaaatagcttatacttggcattggtccagatgaacagactggttttgcattgttcttacagaggctgataaaatattatgttcagcaaaactttyaaagggagtgaactcattgtagagcttcagaagaacaatattggtgatatatattacctcgacctgcaaggaaatatttacactacggtaattctttaacaacaagaacataaactgtcaaaatacttactttctttaaaacctacgctgaattttttgtttagaaaggagcccttttctttaaacattttaataagcatcattctatgtgcttattaaatcacaattaaaaattatgattaaaatattaaaagacaggctttgagtagcagctcagatgtctctgtattagcaaaagaggcaagggaaagaaagttgttttacttgggcaagatatccagtggtttgagaatttaagtgaaattttatattgc

SEQ ID NO: 258657 - DNA, 538 bp, Homo sapiens
atcaacgttactctttggtcaaattattgacaagtaaatttaagaataactataaacatccacttagctcaaatagcttatacttggcattggtccagatgaacagactggttttgcattgttcttacagaggctgataaaatattatgttcagcaaaactttcaaagggagtgaactcattgtagagcttcagaagaacaatattggtgatatatattacctcgacctgcaaggaaatatttacactacggtaattctttaacaacaagaacataaactgtcaaaatrcttactttctttaaaacctacgctgaattttttgtttagaaaggagcccttttctttaaacattttaataagcatcattctatgtgcttattaaatcacaattaaaaattatgattaaaatattaaaagacaggctttgagtagcagctcagatgtctctgtattagcaaaagaggcaagggaaagaaagttgttttacttgggcaagatatccagtggtttgagaatttaagtgaaattttatattgc

SEQ ID NO: 258658 - DNA, 586 bp, Homo sapiens
tggtctatgaataaaaggtgactgggtttttcttgtccaggacttgaccactgatttcagctcaatggttctggtcccctgaactgaccctgagtctagcagcatgctctccaaaggggaagtagcgttcactttargccagcatgctgataatattgtcagatccttaaagtgaagaaaaagtttggaggcatacttaagaccctaggcagaagttgccttttataaatagattctctttccagtgccagcttaagaagtttggattatgctgtttaagggaggtggcttttccctgcaaggactcaatcaatgcaggccccagattccactccaattaaatgatattaaccttgatttaaacagcctttaattctgatatcttttgttttggtcaaagtcagcaatctctcagaagattccatagagagcatagcctctcagtgttccatggcagatttgggagttttaggcatgcctttaactagaggccctcccttgggagccaggaagacagaagcattagagagactcccagcccaggtggggagcccggctcagggaattcagtctgggctcagctggg

SEQ ID NO: 258659 - DNA, 512 bp, Homo sapiens
aacttttaagtgcttctgttttaatccctcatcaaactttagcaacagtgattgaatttccaaacctctttccaatctggctggggtagatacgagccaaggatttagcattgcggatggggtttcagatactcaggacagttaggaggcagctggaaagaygcattacctagacggccctgagctatgaggagaacaaatagttgagatgaggaggtaagtggtatctaggaaaggcctggctgtctcactactgctatagtgagaagagtagcattgggattggctggctggatttgctagccaggctacatgactttagaataaatcactaatctctctgaaactcacctttcttatctgtaacatggggacaataagctctttcttgctttcctcaaaagagtattgtgaagcttgaattatgtaattcatgggaagtggcttcttgtaaacactacagcactgctacagagttaattcaagggaagcaggttttattaaaagctcgg

SEQ ID NO: 258660 - DNA, 598 bp, Homo sapiens
ggagtactgcacagtttgtgggctgtaatgttgatggccaccaccttcatgatatcatagatgacatcaacagtgatgcagtggaatgcccagctagtttagacctatraaggaaaatatttccataaaggatcatttgacaaccaggaaataaaaataccaggagaaagtgtctaattttgcaaatacacttgggaaaatagtattagtcttctgccactcccaaggaagcagatggtgccaaactctttctctgacaatgggaggtgagatggggactcagagaggagaggatatcagcttagcctcacacagtaattctcaggactgaggtgccgtctgctggcagagcaggaggctttccccttggagccatgttggcttgccctccccctcatttccaggttggagatttgagtcagagatgaggcaaatgcttaggcaaggaaaaatgttttaccagcttgctccgcagggaaagagtccgtgttatgatatgaagctgaaaatagagtgcctcaggaaagaaactaccaaccaaagactatctcctggtggagctgtgggggcttcctccaggaaaattggggttgaaatg

SEQ ID NO: 258661 - DNA, 598 bp, Homo sapiens
ggagtactgcacagtttgtgggctgtaatgttgatggccaccaccttcatgatatcatagatgacatcaacagtgatgcagtggaatgcccagctagtttagacctatgaaggaaaatatttccataaaggatcatttgacaaccaggaaataaaaataccaggagaaagtgtctaattttgcaaatacacttgggaaaatagtattagtcttctgccactcccaaggaagcagatggtgccaaactctttctctgacaatgggaggtgagatggggactcagagaggagaggatatcagcttagcctcacacagtaattctcaggactgaggtgccgtctgctggcagagcaggaggctttccccttggagccatgttggcttgccctccccctcatttccaggttggagatttgagtcagagatgaggcaaatgcttaggcarggaaaaatgttttaccagcttgctccgcagggaaagagtccgtgttatgatatgaagctgaaaatagagtgcctcaggaaagaaactaccaaccaaagactatctcctggtggagctgtgggggcttcctccaggaaaattggggttgaaatg

SEQ ID NO: 258662 - DNA, 598 bp, Homo sapiens
ggagtactgcacagtttgtgggctgtaatgttgatggccaccaccttcatgatatcatagatgacatcaacagtgatgcagtggaatgcccagctagtttagacctatgaaggaaaatatttccataaaggatcatttgacaaccaggaaataaaaataccaggagaaagtgtctaattttgcaaatacacttgggaaaatagtattagtcttctgccactcccaaggaagcagatggtgccaaactctttctctgacaatgggaggtgagatggggactcagagaggagaggatatcagcttagcctcacacagtaattctcaggactgaggtgccgtctgctggcagagcaggaggctttccccttggagccatgttggcttgccctccccctcatttccaggttggagatttgagtcagagatgaggcaaatgcttaggcaaggaaaaatgttttaccagcttgctccrcagggaaagagtccgtgttatgatatgaagctgaaaatagagtgcctcaggaaagaaactaccaaccaaagactatctcctggtggagctgtgggggcttcctccaggaaaattggggttgaaatg

SEQ ID NO: 258663 - DNA, 580 bp, Homo sapiens
ttcctttttattctattgcaaagaacactgtgatgaaagtctttatgcagaaatcttggtgcttattgatgaatagtctcttaagattaatttttaaagttagaattactggtaaaaagctatacacattttagaaaccttgtatgtatcttgtcattgtggcttgtaggggcaggttgtgctcactgctctccctgccagggtgaatccatgtttatttgcagatttgacaataccaattgttacttggccacaaaagaagcttttctatttgagagaccaaartgagactttggtctttactgtaattttgtctaattattagaagggtagcattttcctgtatatttctttatcatctaggcttctttttctgtgatttgctagtttaagtccaatgcgtatttttcctattggttatttttctcctattgattaataacaatgctttataaattattaatcttttatttagcatatatagctcaaatatttgtccccttgatttggtcttttatttttcagctttgtttatagtgtgttttcaaatgcagagactttttttagcatttgtgtggtc

SEQ ID NO: 258664 - DNA, 525 bp, Homo sapiens
ccataagtaattacttcctgatatgtacttcagttgactttgaggcaaatagtaaaatgctaatgatgaccttactatgtcagaagtcagcattacattaaccatctcagataaattttagattaatagttgacctagggttaggatttagggttaattcacaataaaacctccctgtgtctcctacccscctcccccaacacacacacatagcattcttaagctgaactctctcctgtgtctgagagtcagataattattatatctagagaccactagcaacagtgttacatactggttaagaatataggttttgaaggcaaatccagactccaccatttactagctgtgtgaacttagacaaagtacttaacctttctaaggctcagtctcctcctctgtaaaatgcagatagtaatagtatataattatagtgctgttgtgaatattaactaagactaaaatgatacgagcttaggacagcacctatcatgaagcaagtaatcaataaactactactgcctc

SEQ ID NO: 258665 - DNA, 409 bp, Homo sapiens
gtcatttctttactctgccttggctttctcatctgtaaaagaaagatgagtaccacctgcctcccaggtgggcagagaggagaaaaggygctgacacatgcagagtgctaagaacagtgcaagacacacaaacacatggggattgtgagcttcctcacagtggttcccccttgggctgcttgcttgaacagccacaccctctgaacaccacatttttcatctactggagtgtgctccccacagtatctgctgcacacatatgggctcatctaattccagagcccactaagatactataaattaaacagcaaagaacacacaacatctcagccgaaaatcatttattgagcacgtactatgtgccaagcactatactggatgtagggtatgcaattaataacttatattc

SEQ ID NO: 258666 - DNA, 409 bp, Homo sapiens
gtcatttctttactctgccttggctttctcatctgtaaaagaaagatgagtaccacctgcctcccaggtgggcagagaggagaaaaggtgctgacacatgcagagtgctaagaacagtgcaagacacacaaacacatggggattgtgagcttcctcacagtggttcccccttgggctgcttgcttgaacmgccacaccctctgaacaccacatttttcatctactggagtgtgctccccacagtatctgctgcacacatatgggctcatctaattccagagcccactaagatactataaattaaacagcaaagaacacacaacatctcagccgaaaatcatttattgagcacgtactatgtgccaagcactatactggatgtagggtatgcaattaataacttatattc

SEQ ID NO: 258667 - DNA, 548 bp, Homo sapiens
ttataatagacacttatatattgtatgatttttacaagtacatatatatatacatatatatgcctttttaaaaattgtagaaagcggcataccaaactgaaaatgaataactgctagggagcttggcaatgcaggtagtcaaatgatatttagtttccactgtaatgttttaattttttacaaggagaatgtattcatgaattcctttgtaattaaaattaatttttaattgaacaaataaaatacaataaaacctatacctcattataaacttcaaattctgatctaagggatgcataataataaccactaatgttaattgagagattatcaaatgtcagacagaccctgttctaagtggtttctatttatgttttcaacgttgctatgtttctatatttcctgtgttttcacctttatcctcaggacagcactatgagaagggcttgttatcaatcctcctgtatggatcgggatgctgaagcaatagagaaatkaagttattggctaaggtcaccacctgcaaggagctgtagagccagaatttg

SEQ ID NO: 258668 - DNA, 635 bp, Homo sapiens
tactaatgggtagcacttactaagtgtctgctaagtgccatgtcttttagccatattacctaacttaatcttcactgtaatataagacaaccggtaatgttacccccatctcacagatgaagaaaccgaggcacagggaggttagataacttccccaagatcatgtaattaatttgtaggtgccagaggagggatttgaacccagggagccttgtgccaaagcccactctgctctacttcctctaatcatacaggatagtattaaagtggaaactctagggcgggaccaaggagtctgcatttgaataagctacacaggtcasttttatgcattcaaagtttagaaaatcagaatattgtgtgccttaaaaaaaacagctgcttctttggaactaactctgttatttagcttatctcaccatgtagactttgcactccttggagaagcaatgttttcattcttaacacttgcctccccgaccctccagcctccttagcacagttccaggtgtggaactcaggcaatacttattagtccggggagaaagctctgaacacaaagtctgaaaatcaaaacttgtattccggctctgttatttaatttgcctaggcaggtctctgcaacagatttaggc

SEQ ID NO: 258669 - DNA, 610 bp, Homo sapiens
cattgcttttactcttataattgcaatttcctgctcgtttccttttcaagttagtggatctaattgtttggtaataaaatatctgcataatatattagaggcagagaacagacgggcttaagggacagttgccaagaacaggagggagagaaaagattgaacagaatcagagtgttcaaagcttgtggggttttcgtaaaatgtataccaggttattcctgccactctcmctgcctgactcttaatggaagcaaatgaatggtccagacaaatcagtaatcttgacctagcttaaaattcatgtcggtaccaggttcagaacagaaaaggagacagaaagtgcaagagacagagtgcacaagagagagagttcagtaggaaaaaatgactgtggtggagaacaacagttttgagatcatgcttggattggataccagctccaccacccattggctgtgccaccttgagaagatcattaacctgcctgagcctccattcgttcatttgtgaagtaggaataaaaagatactccatctcaagagttggtgctccataaagagtagctattcatattattagaaaattagaataggtggttgaagccctgcag

SEQ ID NO: 258670 - DNA, 654 bp, Homo sapiens
aaatgaatggtccagacaaatcagtaatcttgacctagcttaaaattcatgtcggtaccaggttcagaacagaaaaggagacagaaagtgcaagagacagagtgcacaagagagagagttcagtaggaaaaaatgactgtggtggagaacaacagttttgagatcatgcttggattggataccagctccaccacccattggctgtgccaccttgagaagatcattaacctgcctgagcctccattcgttcatttgtgaagtaggaataaaaagatactccatctcaagagttggtgctccataaagagtagctattcatattattagaaaattagaataggtggttgaagccctgcagaggggatgtgatgggctgcaggggtcacctttggcaaaatatcaaaactggggaaaatgttctttgttgccttcagttcaaccattagctgccctttcctccatcttggtgccctgctcccctacctgccccattttttcaaggcctagcccactatcctcaggtcawtgttgtctgatgtttaccatggtattaatgactaccaaggtgctacctgataaagaaatcctgaaggcggccattgtggaggaatgaacagctcctggactggggatgtgctgccgcctcctgcaata

SEQ ID NO: 258671 - DNA, 551 bp, Homo sapiens
aagcctccaatccacccaagagaccacaacacccatctcatgtgcagtcagagaggagtggcacggacagagaccaaaatttgctgtatcatttaaagagatgaacaaacaagccaagatgtgtgttgactaggaaagtttacaaaagacaaacaaacaaatacacaaacaaaaaatcctctactttaaatacataaaaaatgtaaaatctctccatgttccttaatccaactgaatccttttggtgccagcaactcattaaaggctttaacaggccgcttaagagttacaaacayggtatctctaagtaccagagtctccttggaaggttatctgaatgcaaggctccactgaataacatggtccttctgaaaagtcaggaaagattatgccaaactaataagaattataaagtgtccaggaagaatatggtgttcagatatttgtacctgctgatcaccattcaaatcactccaaagttgctctgccccagcaacggggttcataattttcaaaccctgagggtggatggcaacagaaaagaatgctca

SEQ ID NO: 258672 - DNA, 572 bp, Homo sapiens
ggtctatttcaggaatattcctatttgtgggaattgctataagttgttagaggatgtgctctttgaaaaagaggctttcctcaaagcccaccaggatttctccctttcagagctcctatccttccaatcattcctaacttcttctcctatactaatgtggactctctgcccttccaggtcagtctctcactacktcaaatctgtatacacacacatacacacacgaagagagagagagtgtgtgtggaaacatagtgcagtggttaagagcttggatagggatgggtgtggtattcatgcctgtaatcccagtgctgggagaccaagacaggaggatcacttgagcccaggagtttgaggttacggtaagctatgatcacaccattgtactccatccagagtgcaagaccctgtctctgaaaaaagagagagaaagagagcttggatggtggagccagactgcctggctcaaacctgagctttatcactctttagatatgtgaccgtaacaccaacttactcagtctccctttaccttggtgtcctcatctataaaatggggttaatgacgg

SEQ ID NO: 258673 - DNA, 642 bp, Homo sapiens
ctactcaaattgtatatactgcagaccctggcattcacagattctcttacgccatctttgactgttttcatgaaaccccaaatcatacgacataacagtaggttacccttttgctggagtctgatttccatttaggggctgatatagtaggctgaggcaggagcctagagagcaagcctggctgactgccccacactcatcgatcccccagtgtagcggttctcccctttggacaggcactgcacctctcgctagagatctgaaggtgccgcgtcagttcttatttgtgcctctataccttcataacatatctagaatacctccagttgccacttatgcccaccctggactatctcattttccttgggctgttacagcatccttataactcatcagcttatgtctgctttgtccctgatggactgctttgaacacagcaactaatatgatccttgaaaatcataagacacatcctgttgttccttcattcaaactctcccatgtcttcccagccttcccatcacacccaggaccctctgagggcagagactactgtrtcgaggacacagagggcattgagtaaatatttgtagaatgagtgagtgatcattgttctgcatttatagagagagggaactacac

SEQ ID NO: 258674 - DNA, 642 bp, Homo sapiens
ctactcaaattgtatatactgcagaccctggcattcacagattctcttacgccatctttgactgttttcatgaaaccccaaatcatacgacataacagtaggttacccttttgctggagtctgatttccatttaggggctgatatagtaggctgaggcaggagcctagagagcaagcctggctgactgccccacactcatcgatcccccagtgtagcggttctcccctttggacaggcactgcacctctcgctagagatctgaaggtgccgcgtcagttcttatttgtgcctctataccttcataacatatctagaatacctccagttgccacttatgcccaccctggactatctcattttccttgggctgttacagcatccttataactcatcagcttatgtctgctttgtccctgatggactgctttgaacacagcaactaatatgatccttgaaaatcataagacacatcctgttgttccttcattcaaactctcccatgtcttcccagccttcccatcacacccaggaccctctgagggcagagactactgtgtcgaggacacrgagggcattgagtaaatatttgtagaatgagtgagtgatcattgttctgcatttatagagagagggaactacac

SEQ ID NO: 258675 - DNA, 487 bp, Homo sapiens
tattataaagtggcacagaacttggctggattgtgttcatgtcttagtgtttggtggaagatagaacatgcaagcaacagaactggaaatttggcrgaggaaatatctttaaaagtattgaaggagtggcctagttccttttgactgcttagagtaaaatgtgaaaagaaagaaatgacttacaaacagaattattaatcaatatggaaactgaacctaaagaattggaacattttcagaatatctgcattgaaaataatgagaaagactactcaggaaagaatactaagggtgtggccaaataactgtccaatagagattagtcagtcatctcaaaagaagctacaaaaaaaaaatgcagaggagtatccacctgcattgcccaacactgcctcacatcactggcttcactccccacactgcaactccaagcaattcagccaccccaaattgtggcttcagtgggccctagtcggggttaccctgt

SEQ ID NO: 258676 - DNA, 487 bp, Homo sapiens
tattataaagtggcacagaacttggctggattgtgttcatgtcttagtgtttggtggaagatagaacatgcaagcaacagaactggaaatttggcggaggaaatatctttaaaagtattgaaggagtggcctagttccttttgactgcttagagtaaaatgtgaaaagaaagaaatgacttacaaacagaattattaatcaatatggaaactgaacctaaagaattggaacattttcagaatatctgcattgaaaataatgagaaagactactcaggaaagaatactaagggtgtggccaaataactgtccaatagagattagtcagtcatctcaaaagaagctacaaaaaaaaaatgcagaggagtatccacctgcattgcccaacactgcctcacatcactggcttcactccccacactgcaactccragcaattcagccaccccaaattgtggcttcagtgggccctagtcggggttaccctgt

SEQ ID NO: 258677 - DNA, 523 bp, Homo sapiens
cctaacctcagaagtgacaacccaccacctttgtggtattccattcactagaagcatatcgctaggtccagcccatacagggcatgaacactgggaggcagggaccactggaagctgtgagctgtgtgcaaagcaaccaaacacaggggcactgagcatacccaaatccttcaagatcacacagtggatttggggtcagagccaagcagatctccactgtcctccytcctccctccatcttgagcagtgctgtggggcagggctggtggcatgggcaccagtaggttggtaaggagggaagaggagtagtgaaggaaagagggcaccaatccatttacccaaatttattctggaaaagaatttgtttttcaagttatcaaacaggcaaaaataagaagtaactgccggtatggatttattaccactaatgcaaaagctgttcctaataatgttttaaagtattccatgtaatacatctgttcagttcaaatttataaatggggtctagaaagaagcacagcac

SEQ ID NO: 258678 - DNA, 523 bp, Homo sapiens
cctaacctcagaagtgacaacccaccacctttgtggtattccattcactagaagcatatcgctaggtccagcccatacagggcatgaacactgggaggcagggaccactggaagctgtgagctgtgtgcaaagcaaccaaacacaggggcactgagcatacccaaatccttcaagatcacacagtggatttggggtcagagccaagcagatctccactgtcctccttcctccctccatcttgagcagtgctgtggggcagggctggtggcatgggcaccagtaggttggtaaggagggaagaggagtagtgaaggaargagggcaccaatccatttacccaaatttattctggaaaagaatttgtttttcaagttatcaaacaggcaaaaataagaagtaactgccggtatggatttattaccactaatgcaaaagctgttcctaataatgttttaaagtattccatgtaatacatctgttcagttcaaatttataaatggggtctagaaagaagcacagcac

SEQ ID NO: 258679 - DNA, 612 bp, Homo sapiens
aactagaatttgaattcagctctgccatacttcaaagatcaactgacatacagagctagctagtgagggaccagaacacacagagtcctggatgtctcagccagggagtatttcaagatgtagacattgggttgtacctgcagcacgtatacycttttatctacagcacctgccactgtctggtccaccatcaagttagctgcctggggaagaaacctccactgcagaggtagagagggtgatgagaggctttgagaggtggaggtggagctgaatctcccatcttagggaaatgtgcaggggtagcccctgtgggtagtcttccaagactccaacatgcccatcatgggagagcaagtaagctgaggtttagaagccagcagacagtaatggtaagtgaattcaaggaagaaccaccccagtaccatatctgtaaaagatatttgtcactttccatcttggtatctacccttttttgtcataacatactaaagagtgggggagtaggaggtatcctaagagtaacagagctccctctctcatctctttgtcctttgagccatggcctggccaatgctggggaggggaggaaatgacacttatattggatat

SEQ ID NO: 258680 - DNA, 574 bp, Homo sapiens
gctctttaccaaagcaagagagcaaagcaaagaggatatgacatccaggaatgaggtgatccgaggagcttggggagaccaaggcagcaggcccagagacagccagtccaaatcaaataggcaggaggttggggcccaaggaaaagcggttccaagaaaacaaacaaacaaacaaaaaaacactgttcagtcacccagtgggtttgactctattaggagatcttggtacctctgccagagattttgggaaagaatcagtgataggtacatagaaaactaggcaaattgttaaattggacaattattagctcacggaaaaaccaacaattgtttaaaaaggaaaatcatagttgtattcctttgtgaatatttttatagatataaatatgaaaatcctaaaaattcactaagcagaaaataggaatataactgtgttaggaggatgaaggaaagaaaaggaatggtatgwtagctaaaaaagagaaagcctaaattcctgtggatagaaggtaaaaaatatagcctatagatataataatatcatattatttagaagtacgaagttaaatgccag

SEQ ID NO: 258681 - DNA, 608 bp, Homo sapiens
cctaatgacatgccttgatggcaatgccacctgtctctacttgtgactttcagcagaaagatcaaatgcctcttgggtgctgccagatattgctstcagctaaaagtgcccatgaaggaagaagccagggcatctccagtaatgacagccacatgtagtactaggggctgtctgagctggtggagctcttctcaggcccatcctgtgggtgctatcaacattgcttatgctagtaatttgaatatttccacaaagatccccaagcaagtggatgacaagatgtagaggatcatgtgcgcaatgccccttccatcccctgccccatccagcacacccatttcctaaattggagggtagggggaggagaagacttgatcatctgagtctgaagaggaaaggacattaccaaagactcagagagagcttctaatgcctgactgatgccacttcatccccaccaaaaaaaatcttcagcaatcgaaagttaaagtgaatttctcacccatccatccaatccagaatggtagctggtcagcgctgtagcatgatttaagggctctgaaaaaaacccacactgcccccaaaatatctccctggcctgaaattca

SEQ ID NO: 258682 - DNA, 463 bp, Homo sapiens
atagggacaacctcaagtccatgaccaagggccctaaagggtggtgatgaagtcagccctggctccagcaagcccttagatccctagaactacagcttggaggatgagaagtgacagcagggtgagccagatgggaagtgttgtcaaattcggttgggggacggcatcatgatgtgggtgtttggttcattaagagccagacacaaaccacaagtttgggaggcaaggaacagaatccaggctcagagagtstacacagaaacttgccaaagagtcaaggccaaacccaggggcctggacttcaagccagcattctgtcccttccaaagaactggatggcaaggtagaaaagaacaacagaaaaccagtcataatgattgcatcaattggacttaagggattaagggaatgagttttggaatcaggtcaatatggcttgtacatccagtctgttcctcatttg

SEQ ID NO: 258683 - DNA, 495 bp, Homo sapiens
gactaaacttccctcttcctatcacagtgtggagctgggtactggaggggttctgaagaactaacaactcaagcagactttcaacaaatcctcttttttgcccactcccttgctctcagtttcaggatgcctgggacccccatttctttgctgttgaagagagtaatgaatggataaatgaacactatacttgaaacaaaagagaatctggcactgaaatatgtagttcctgttccatgggctgtctggcgtcagatgtgagggagaaattatgggaatctttagaagcattaggaatcatctataaggacagagactgctgcagatggagcacattaagggaccaaggcccagtgtctggaaaagcggggtttactggggggcccctattaaaagcatgttcaaagtgccaaagtgcatcccatgcatacctgagattgtactcaaagactkcttcaagttctaagccttctgtccttcttcaactcattcttt

SEQ ID NO: 258684 - DNA, 620 bp, Homo sapiens
aagtgtcaattgtattattgtaatatggattgtacgggcatctatgtatatgtgtaatgtgtgatgtgtacatattacatatatggaatatgcattgactgttatatttcaataagggatgattgtcaacagattaatctcacactgcctgagtttgtctttttaaatgatgggctctgagttagccagtgcggtggaaacatacccccacctccaacatcctgctgtcacaggggtgttcactttctgagacaggatgggctggtctggcctgccastttcccatgaatgatgaaagctgtggatccttcattgacattttctatgttccaatccgagatcgatatctcttgtgcactgcattcatccctcctttatcagaacagcaaagactaaaccaggaagaagcaaagacaatgagccaggcaattctctctctctatgagatgatgctagaaccttgggtgcagagtgcacatttattaataatatctaaatgtctgtaggtgtgcagctattttttcttacaaaaatgggaatgagatttagagcttgccactgcaatgcagctgtcctcattgttcccttagctctttgtagactcccatgttttaaagtca

SEQ ID NO: 258685 - DNA, 592 bp, Homo sapiens
tgcatgtgtgtatatatataaagatatatatcaagatctacatgtatactgacagaactaactttggaattagaagmtatgctgctgacaggttacatatttctggaaagttatttgctaattagtgccagatatgatgttaacatatctgacaaaaaaaagtgcgtttttttttctttatacctgcaggttttacacttggcttagaaatgaaagccaaggttataaatttgagttataagtacctgaccggggagaaaaacacagaagtgttcagagaagaaggatgaaaaccaggagccgagagtcctaagaaccagggaagggttccattaagcagagaggaagtggtgatccatgacaaagccagggcccaggaggcagggctgagaactctgcactgggcagctggtggcatgcacagagagaggaacctggcagagagattaacgcaggagcagattcagcaggataggagagcggcagctgaggaaaccaaggcagccaacgtgggtcccttgctcaagaagcagggcggaaggaaacagttcccttccaggctgaaaggactatctgaaagatcaggaagaag

SEQ ID NO: 258686 - DNA, 536 bp, Homo sapiens
ttggtagctccttcaggtttgttccttttgaaatactcctatgaccacctccaacctccaattgttttaaatcacttgctcactttctggcacaataagatgctgccaagctcaccttctattttcccttccccagccctagcatcagacattgtctgtggagtcctggttctttttattggagaatgattttagacaccaaattgtaggtgstggtgtgtgccttattgctactaagatgtcacagtttctaagtcctctcagcaggcagaaatagaaaaaaaaaagtgtatgtatattaacccatgtgtaaacatacatatgtatttatttctgtatattcatttgtagacacattaaaataaacagaattcatattaatatctccaactgcaaaccacaaaaatagagtttatcctagcatttcttcccctcttgcttacttgtaacttctttctctgtgggtaagaatcctgggtctcatgatctataatttatttactcacctgtttaattatagtacacaggtaaagttg

SEQ ID NO: 258687 - DNA, 434 bp, Homo sapiens
acaaaaatctaggagagaattcaacttttactgaattatttcaataatttattgaataaaaatgctctaatgttttatttatcttgatctataccaggataatcatataactgacgatttttctaaattctatattctcatataatgaataaaggaaaacataggtaagtgagttggtatctcgaaatctatttcaaaaagtaacctgcagaggatatggcatgatcattcataaaacagattaaacccaatttccaattccttctacatctgttataattctggaaattcttttataaacatgaaatagaaggtactacaagactctgaaattctgagttatccagtattctattatatccagcataatttgagtgttaaaagtgttttggtaatattacaaagctttaagtgkttttttttaaattacctat

SEQ ID NO: 258688 - DNA, 486 bp, Homo sapiens
tgacacttcaatacctctcacattctgcctggctatcttactgatcgtcatactctctagatttttggcttaatattaataaatagttcagtcatttagctgatttaractcaatgtaacaaattcttttctaaccacgattatctacaaatagagcaagctgccttaagagttctgtatcatttgagatagacaagacacagctacatattcattggccatgattactgtaaaagacactgctgctctgtttgcaagattagacaagatcactgtacgatactaatcaccagcttcaccactgaaccactctgattctctgatgcttctggagttacagttctgaagacatcattatggttcctgacatcattacatcttatcaaactaaaaaaattattcctgtagaatccaaaataaatagaatcttattagaaaattatttgtgatttcagttaaatgaaatgtactccagaaacacaaatg

SEQ ID NO: 258689 - DNA, 466 bp, Homo sapiens
ttcattctttctaattttttttgtatccattaaccatacccccgcccctgccccagtgatgtattcttgaagatcttccaaccaaacctgggaaataatatattgtgagataagtcaatataacttttaaattgttctgacttagttaaattattctgatacagtgaacaaaatctgaagttttttttaaccaatgtaataagcatcctcatataaagctacttatgaaaaaattcatcaaatgaaaaattggtataaatcgatatttaatttcaaaatacaactaattcatattaaagtcttctttaaaagttcaacttcatgctgaagaagaagaaataattcatgtggaaagtttcctttggtgctgtgagtgtatgctcaaagtggctcagtgtctgcaaggtatcaacagtcagtgcttgaaraaacttcatgcattttttgacatgtaaccttaaaatgg

SEQ ID NO: 258690 - DNA, 596 bp, Homo sapiens
gggaaaagctgaagcaacgaaaaatgtttggatatatttgctttataagacatgaccagtgccaagtgatcaaaaggaaattgccttgaagaaatgagggggattctacataatatgatgcaggagattgttcacatatttagaccatcaacacgataatgrtactactttattttccacctgataatacttgaaataaagatagcatgtgggcattaatgggatcccttctctctgtatttgccaataatttcagcctgacatttatcagacattagtgtatgtgtgtgatttgcttgtttgaagtgctactctccagcttcctatgttccccattttctatacactacatcgtcccccttgcctctcactggtatgtgattcttagtggcactgaataatataatgagaatcttttgaaaggttttatatctttctcctctctcttttttcagcctccatgtctcattagttagcaagtcccatcaatttttcctttgggactctcatgtccccctctgcattccattcccagcctggttttcattagttaccccagcctagttagtctctccgaaattctttgttcaaagtca

SEQ ID NO: 258691 - DNA, 618 bp, Homo sapiens
ttaacattctccactaaagtcgatttacaggccaaagctagtgtccaaatctagtgatgtttgaaatcttgtttgtctaccctttaggaattaatctcttaatagggaatacaggacttctttttttttaactgcatactttttttctccaaaggaattttcatatgcatttcaaagagttttaaagaccaatgtgggtgcaaatattttatgtagaaaaaaacaatgtggctgattcctatctgtccccaccacacttccrcaaacaacgagggagtctaacaattatcacaagagtcagagcttgcgatgtgccagggactctgccaagctctctcacacatggaattttgacaacagtatataagaaaactaaagttcagaaaaacctagtaatttgtttaaagccacacagtgctgttatctgaatgtcctctctaaaactcacgttgaagtttaattgccattgtgatggtagtaaaaagtgagacctttaagagatgattaggccatgaggactttaccctcatgaatggatttatgtcattattgcagatgtggatttgatctgctttttcgctctgttttgtgcatgcgtttcttcaccatgtgatgctt

SEQ ID NO: 258692 - DNA, 574 bp, Homo sapiens
tgattaggccatgaggactttaccctcatgaatggatttatgtcattattgcagatgtggatttgatctgctttttcgctctgttttgtgcatgcgtttcttcaccatgtgatgctttccaccatattatgatgcaacaagaaatccctcactagacactgcctcttgattttggacttctcagtctctagaactgtgagccaaataacttacattttttataaatcatccagtcagtgttactctgtgatagtagcaggaaacgaactaagacacacagcaaagtgacggagtctgaattcagtcacaggtctaactccaaagtctatacagccactgttctgtactcttaagaaaagataaagaacacaataaatgctacrctggccatatatttcatctatctggccccacactgggtatgatggtggcccaggctattttaagttattccttagctaactgattgcttgttgtttatggaataatttagcatgatattttataaataacaatatacttaagaattatagaaatcttgttttgatatttaaaatttagtttatatctcatc

SEQ ID NO: 258693 - DNA, 567 bp, Homo sapiens
ctttaagagcttatcaggaagaaaaaatgcattgagtggctatattttggcatgctaactaaggtagatattaaaatgaaaagtcaatcctcaaatgtttcatgtttttagaaatgttattatttccttagtaaaaatktcactagatcacattcaaaatataccattagaagctgctggccacattcaacttcaaaatgaaataatgtgcttgtagttttattcagtgttaggcaaccaactacagtttccccctagcttcaattaaaagcatataaaagatgaaacacttgttgagacatttcttccagatactggctaaattatcatatcatgcaagtggtatttcagttaagtgtatattatagcccaattggatactaaaagtcttgaaagcctttttaaaagtgaggttctctagagaagttattttaaagatgtgttctgtaaatcatgggcctttgattatccagcccatggcaggctaagcactccaaattcccatgtaaagccaccaagtcacaaattaagggattgcccaataaatcaaagcattcattcctaatt

SEQ ID NO: 258694 - DNA, 567 bp, Homo sapiens
ctttaagagcttatcaggaagaaaaaatgcattgagtggctatattttggcatgctaactaaggtagatattaaaatgaaaagtcaatcctcaaatgtttcatgtttttagaaatgttattatttccttagtaaaaatttcactagatcacattcaaaatataccattagaagctgctggccacattcaacttcaaaatgaaataatgtgcttgtagttttattcagtgttaggcaaccaactacagtttccccctagcttcaattaaaagcatataaaagatgaaacacttgttgagacatttcttccagataytggctaaattatcatatcatgcaagtggtatttcagttaagtgtatattatagcccaattggatactaaaagtcttgaaagcctttttaaaagtgaggttctctagagaagttattttaaagatgtgttctgtaaatcatgggcctttgattatccagcccatggcaggctaagcactccaaattcccatgtaaagccaccaagtcacaaattaagggattgcccaataaatcaaagcattcattcctaatt

SEQ ID NO: 258695 - DNA, 553 bp, Homo sapiens
tttaccctctatgcatgtttctgaatgatcataaaaaccctgcgagtattaattaggaggtcacaaacaaattttgcaaagttgcaaatatagaatccatgaataatgagaatcaactgtattttcagaaatataattattcacaagctatttctaagaaatctaaaggttgtttcaccaaaattatcgaactaacagaaaaaatgggrggtgggggtctaacacaaaagggaaggaagtccccaaggtggctggtgaagagaagtaccaagatgacagctttgtaacagacccaaagagaaccagtctgggttgcagcaggacaatggaatgctccaggaagaatgaaaaaagtagaccattataagtgccaagtaaacaatgattgtacaagaaggaaatataatcattgcacagtatgttcctcagctgtaaataatatttatatggttatatcaatataaacattgaatattgacctaaccaaacaaaaaagaattaatgaggaaaaaaaatggaagttcacaaattcttcagtacaagtaaacagagc

SEQ ID NO: 258696 - DNA, 540 bp, Homo sapiens
tgcatgtttctgaatgatcataaaaaccctgcgagtattaattaggaggtcacaaacaaattttgcaaagttgcaaatatagaatccatgaataatgagaatcaactgtattttcagaaatataattattcacaagctatttctaagaaatctaaaggttgtttcaccaaaattatcgaactaacagaaaaaatggggggtgggggtctaacacaaaagggaagkaagtccccaaggtggctggtgaagagaagtaccaagatgacagctttgtaacagacccaaagagaaccagtctgggttgcagcaggacaatggaatgctccaggaagaatgaaaaaagtagaccattataagtgccaagtaaacaatgattgtacaagaaggaaatataatcattgcacagtatgttcctcagctgtaaataatatttatatggttatatcaatataaacattgaatattgacctaaccaaacaaaaaagaattaatgaggaaaaaaaatggaagttcacaaattcttcagtacaagtaaacaga

SEQ ID NO: 258697 - DNA, 562 bp, Homo sapiens
aaaatagtgatgagattttttaaaaattttgaataatagtaataggagggagactatctcttctacaaattcatgatttagggataaaaattgacagtaatcagtggggaaaaaaatagaaaccataacaataagtcatgttcacacaaaaaggtcataattgacaaaaggtgcaaatcagttcttttttgcttctataatatttgtatgaaatactcattttagatagtatgtgtccagtgcagtatgagcttgtaacaaaaagacaatagaggacatgtataaatagctaggtattttgggaaaatgggcaatgcagaaaatcaagtgcatgtgcctagaggaatgacaatgtttagtataaaaagatttgctaaaatcttcaatattttaaaataataatggtgataaaaagctgtcctctcattttaatttgaatacgtttactgttttatgctgaattaatattcccyacttgtttttgctacagtctattgtgtttaagtagttttcttattactattttactttgaatataagaaatgcctcttaaattttatca

SEQ ID NO: 258698 - DNA, 481 bp, Homo sapiens
tattttcagtttcagagtctaatctggcagtcacaaattctcccatgcctattatggtcatcaaaaataacagtgcatcatggtatggtttttgcagtcccttaaaaaggaagtacattcttgatccagatcctaggttctatgtgcaactttctaaagaccttaaataggaaaatgtagtatatgcatgttctttaatattagagttgtaattctttttttttgtccagaattttggtttttaatacctcttgttggataaaaggrcattgtttttcattagcttgtcttcaaaagacagagaaataagataaattaccttaaagaaattaaatagaaaattaagggaacatgtaccaaggtggttttagactctcctcagtttctttgaaaaaaggagggcttaatcttactaagtgtccttggtgacatttatagatgttgtctctgtgctctttaatgaggaacttgcagtcattta

SEQ ID NO: 258699 - DNA, 600 bp, Homo sapiens
tgctttgtggcatcatgcgttatttcagatcactttatctgtagaaactgagaaaataaaaaaaaattttaaaatacagagatttgtgttttattgttgatagcatgcgtatactgatatgtaagttagattttaaggttagatcaggggaagaataaaggaagaattagatatttaggacaaataattttgatggtaggttcttaggtcctttgttgtaggcaaatctataattattttcatttatggaatgttacgattttttttaatccagctaatttaytgcctgaggtcagcaattacttttcaacctgagctcttgtccaagtcaaaggaggaaccacttaaagttctagactagggaaagagatttcaattactcgtgaatctttgttgtgcccctaacaagaatgaccataggatacccctactacgaggctttgaacagtgctgtcctaagccttatgcatctgggataggagaaaaagccaatacaggtctttgatctgcatttcacaatcttggttgcaaaagaagaaaatcagaaacattgaaagacttcatggtgcaaccatgagtctgaagcattatgtaagagcc

SEQ ID NO: 258700 - DNA, 605 bp, Homo sapiens
tgaaacttggctcttgaatgaggtgtgaatactgccagtccacctaataaaagctcggaggcagatatagctgttccattgtaatggctttaaaatctttcatctctgattgttgtggattcaaaatatttctaaattccattatccatttgcatacccttcagtcaaaagatttaggattaaatgctcgtgtcactgagaatccccatttgtaactggcataatcattcagtattccaggatcactagaagtaatgagaagttgataaaattgaaatggttttcagaaaaataaggacagtgcagtaaattttttacaaatataaacatatttcatttaaagaattgtcttcgaaatatgagattgttctttccttaagcctttttcccttataaaataattactgtagtcaatagtargctatttattgttgtttttaacatccatacttggcaaaatgaaaaattgtcatcttatgttagtccccagttgttttctttgaaactgtactaaactctaaaaatctagaatgggaactactactattgaaattatcagtgagaacttctgtgattttcctttccatcaagcccagggcttagag

SEQ ID NO: 258701 - DNA, 571 bp, Homo sapiens
tctctcttctctagtcattatgtagtttgtcaacacagattacgttgctcagaatggaaagtgttgctccagatatgatctgactgctgtagcctataacatgactaccatttctgttctgaataccttactgctctcattgacacttcagattgaattggtgatgcttccggttaaagatgatgaattaaacacatgaattgagcagtgttttctcttgaagctgcattaaaaacaaggaaagggtttagcagctggacaggaggtatacctaatttagcacatcctagaaatccaagtccaattttaatcacaaactcccaaaaagctcagaattcaaggcatcatattcccctggaaaataaatggttgaaagtctgtttaggaaacagattcctatgtcccagctatcccaactgcactttgaaagaaggctggagaagtttcctctagtgaaggtaaaacagtgggtctcagggctggtagacaataaggaaacttgagagcacttaaaagcagagagggagaaagtttccgyaattactgtagaaatgcccaccttctccctgac

SEQ ID NO: 258702 - DNA, 571 bp, Homo sapiens
atgcttctgtcagactgcaggcagagctcttgtttctaacagttaagccatccaacctccaggagagattttgccttaatggcagagttcgttaactacaataaaaatgattgaaatcaagtgagatggcaagagtagcaagtctgaaataagaggggacacttattacaaagggatcagaactcttgaagaggagggattccaggtggaaagctggaagcagagatacctgcttattacactttcyctcacatcaaaggctgagtcatatcccatttctgttgagaacagatggccagtggacatgcatgacccatgcaggtcacctaggccaggtcagttgcaggacacattcaccatggctgttcatcctatccctaactccatccaaataagggtactgctgtctttatgccctcaatatctattctcagtaggacagggaagatagcatatgatggattgacagagttcaagatgaaggtctttgaatgctgtgctaagatacatgccaaaatccaacagattgagtactactttcttccttgtaatttacaattccaactaattc

SEQ ID NO: 258703 - DNA, 571 bp, Homo sapiens
atgcttctgtcagactgcaggcagagctcttgtttctaacagttaagccatccaacctccaggagagattttgccttaatggcagagttcgttaactacaataaaaatgattgaaatcaagtgagatggcaagagtagcaagtctgaaataagaggggacacttattacaaagggatcagaactcttgaagaggagggattccaggtggaaagctggaagcagagatacctgcttattacactttctctcacatcaaaggctgagtcatatcccatttctgttgagaacagatggccagtggacatgcatgacccatgcaggtcacctaggccaggtcagttgcaggacacatkcaccatggctgttcatcctatccctaactccatccaaataagggtactgctgtctttatgccctcaatatctattctcagtaggacagggaagatagcatatgatggattgacagagttcaagatgaaggtctttgaatgctgtgctaagatacatgccaaaatccaacagattgagtactactttcttccttgtaatttacaattccaactaattc

SEQ ID NO: 258704 - DNA, 607 bp, Homo sapiens
ttctcaaagtgtgatcccagaccagcagcatcagtataatttagraacatgttacaaatacaaattcctagagcccccttcagcatactgaatcagaatctctcagaatgggacacaagaatctgcgtttttacaaagttctctaagtagttctgatacatcttaaagtttgcaaaatactactctattaattcttgatctttaaccttaactggctactaacactgccaatctttatatgttttttaaattagtaatctttagtgttttccataggagccttttcaaatctttttcattcccctcaaatctgtgatagtgcccatctctcctcattccccagaggttatcactctctgacttatcttagtttgtgcttgaactccctcaaactcctgccacaacatccttagactaatcacagtcacttgcagtggatgagtcttcaggtatgtatacttgtggtctagatccctttcctttcagcattggggatcttttctctttctcttcaccaagttctctctctctactggcatccttcacctaatctcatcacaacttaacattcacactctttgggattttgactctgtgtgtgatgaaa

SEQ ID NO: 258705 - DNA, 607 bp, Homo sapiens
ttctcaaagtgtgatcccagaccagcagcatcagtataatttaggaacatgttacaaatacaaattcctagagcccccttcagcatactgaatcagaatctctcagaatgggacacaagaatctgcgtttttacaaagttctctaagtagttctgatacatcttaaagtttgcaaaatactactctattaattcttgatctttaaccttaactggctactaacactgccaatctttatatgttttttraattagtaatctttagtgttttccataggagccttttcaaatctttttcattcccctcaaatctgtgatagtgcccatctctcctcattccccagaggttatcactctctgacttatcttagtttgtgcttgaactccctcaaactcctgccacaacatccttagactaatcacagtcacttgcagtggatgagtcttcaggtatgtatacttgtggtctagatccctttcctttcagcattggggatcttttctctttctcttcaccaagttctctctctctactggcatccttcacctaatctcatcacaacttaacattcacactctttgggattttgactctgtgtgtgatgaaa

SEQ ID NO: 258706 - DNA, 607 bp, Homo sapiens
ttctcaaagtgtgatcccagaccagcagcatcagtataatttaggaacatgttacaaatacaaattcctagagcccccttcagcatactgaatcagaatctctcagaatgggacacaagaatctgcgtttttacaaagttctctaagtagttctgatacatcttaaagtttgcaaaatactactctattaattcttgatctttaaccttaactggctactaacactgccaatctttatatgttttttaaattagtaatctttagtgttttccataggagccttttcaaatctttttcattcccctcaaatctgtgayagtgcccatctctcctcattccccagaggttatcactctctgacttatcttagtttgtgcttgaactccctcaaactcctgccacaacatccttagactaatcacagtcacttgcagtggatgagtcttcaggtatgtatacttgtggtctagatccctttcctttcagcattggggatcttttctctttctcttcaccaagttctctctctctactggcatccttcacctaatctcatcacaacttaacattcacactctttgggattttgactctgtgtgtgatgaaa

SEQ ID NO: 258707 - DNA, 607 bp, Homo sapiens
ttctcaaagtgtgatcccagaccagcagcatcagtataatttaggaacatgttacaaatacaaattcctagagcccccttcagcatactgaatcagaatctctcagaatgggacacaagaatctgcgtttttacaaagttctctaagtagttctgatacatcttaaagtttgcaaaatactactctattaattcttgatctttaaccttaactggctactaacactgccaatctttatatgttttttaaattagtaatctttagtgttttccataggagccttttcaaatctttttcattcccctcaaatctgtgatagtgcccatctctcctcattccccagaggttatcactctctgacttatcttagtttgtgcttgaactccctcaaactcctgccacaacatccttagactaatcacagtcacttgcagtggakgagtcttcaggtatgtatacttgtggtctagatccctttcctttcagcattggggatcttttctctttctcttcaccaagttctctctctctactggcatccttcacctaatctcatcacaacttaacattcacactctttgggattttgactctgtgtgtgatgaaa

SEQ ID NO: 258708 - DNA, 652 bp, Homo sapiens
gtctatataacatttagcacagaaagtcctatgaagactataaagtggttattgtaaaatgtaaccaagattttttctaaatatagaaaattattatccaatttaagaaggtaaaastgagttaaagaaaaaaatctgtttaatctagagaagactcagttgtttgaattcaaaggaagttaaataaggcaagaaagaccaaaacactctcaattttactcttactgaagatttctaggttttattctcattttccttccacatatcattcattgtgctctacagttctagatctgtaacctaggttaacccacatacacatctattagtaggctccactgagaaaatgatgtgataagttgactagctcgagcattggacagttttgaatcctttaccattaatcacatctcttgttctattctgttgcctctcctatcactgatcctttgactgcacaatggaggtggctactctggttttggccccccactcttcctcctaaaagaagtttttgtacacatcatctaaaccgctcacttcttgccactctatgtcaccctgccgcttgttcaaaatgccctagctttcaagacctagtgttggtacctgaagaaagagagagaaatagaaatttgggattcttataatt

SEQ ID NO: 258709 - DNA, 558 bp, Homo sapiens
tggtcctataatccccattcacttcccatctctctagagaatcatattgtaaattggatttaataaattttcagtttttacacaatttttatggtgaaagtactttgtgcagctaagttgttagtacaggatgaatactttttctttcctgaagaatattttattttctctagaattaaaaattgcctcaagttttaaaaattcgttctctatgtgcttctctttacgtacttatgcaaacttacccctccttctcaaccaatcctctttcccacccagtagctatttcatcaattttgatgtcttaaaaagtctatcccagagcttttgagcagttctgatctggactcatttctttccagatctcttgcacagctcatctcctaggatctctgttacytctatcttgagaattccttttgttttttgcttttagagtccatgctttaggaaggctctgtttttcctctttcttggtttatcgctgtgtttttggtgaagtactctttttagtacttttcagagaaagggcatattaaaacagttaattggaaggcc

SEQ ID NO: 258710 - DNA, 436 bp, Homo sapiens
gcacatgcctgtaattccagctacctgggaggttgaggcaggagaatggcttgaacccgggaggcagaggttgtggtgagccaagattgcaccactgtactccagcctgggcaacaagagcgaaagtttgtcttaaaaaaaaaaaaattctccctatcaatatagtaggaaaacaaaattttttaattgcataagcagtaacaaatttacaagcatgtaaggtagcaccaaagtgaccacaatgttagtgtcatagcaaaaatagcaatggatgaagttaaaaargcaaggaagatttaagactgtttcaacagaaatcaagactattgtagtaagagagagattgaactcagctctgctgaaacaggcaggagagattttaagcactggggtaactagtggaaaagtactggaggatggtagaggaaggtgggtc

SEQ ID NO: 258711 - DNA, 436 bp, Homo sapiens
gcacatgcctgtaattccagctacctgggaggttgaggcaggagaatggcttgaacccgggaggcagaggttgtggtgagccaagattgcaccactgtactccagcctgggcaacaagagcgaaagtttgtcttaaaaaaaaaaaaattctccctatcaatatagtaggaaaacaaaattttttaattgcataagcagtaacaaatttacaagcatgtaaggtagcaccaaagtgaccacaatgttagtgtcatagcaaaaatagcaatggatgaagttaaaaaagcaaggaagatttaagactgtttcaamagaaatcaagactattgtagtaagagagagattgaactcagctctgctgaaacaggcaggagagattttaagcactggggtaactagtggaaaagtactggaggatggtagaggaaggtgggtc

SEQ ID NO: 258712 - DNA, 583 bp, Homo sapiens
ctggcatctcctcagcttccgaggaggccccggaagtataatcatggcagaagatgcagcaggagtaggcaggtcacatgaccagagcaggagcaagagagaaagctaggtgccacacactttcaaacagacagatctcacaagaagtcactcaccattgtgagaacagcaccaagaggatggtgctaaaccattcatgagaaatcctccctcatgatccaatcatctcccaccagatcccacctccattactggggattacaattcaacatgagatttggacggggaacacatattcaagctatatcatatgtctacactgtaatcattggagaatgggcttaatccctaataaaatttattttgatgtcaaaggtaggaggaaggacacagattcaccaggcctccaaatagacactctaaaaatggggaaaygggaagtcagtgtctttgccttttataatggagaaaatcgtttccatttgcccttacaaagtgcagatatacatttatcgattcagttatttgggtttcaggttcagatggacaagccaaatcactgagtctctgaggctcacttcca

SEQ ID NO: 258713 - DNA, 598 bp, Homo sapiens
tattatttttaaaaacaattcattcctaataattaaaacaatactgcatattattaaacttcagaaaagacagataaacaacaaaggaaatcatgcataacaccattatatataaaactttactaagttaaaaaataatttgaggtgaaattcttattgaatttaccattttttaagcgaacacattaattggcatttagtatattcacaatgttgtgtaaccaccacctctatttagttccaaaacatttccataactacaaataaagcctcttactctttgagcagtttatccccatttctccttcccacagcccaacagccaccaatctgtgttctgtctctataggtttatctaatctggctatttcataaaaatggaatcatatatgtgattttacatgtcttatttctttcacttagcatgttttttaaggttcatccacattatagtatacatcagtatgtatgaattatcctttttrtgactgaataatattccattatacggatataccacaatttgttgatccattctgctgttggacatttggcagtttctaccttttggctattgtgaatggtgctgctaggacat

SEQ ID NO: 258714 - DNA, 615 bp, Homo sapiens
tttcctggaaccattattccatatataaacagtactacttcagcaactaaacatgaataaatgtctttggtactggtgtaccttatgctcctacttaaactggcactgcaattgaattttagagctggaaagaacctcagagaccacttagtgtgctctctaattttatggataaggaatctgaggcccagagaggtgatgtagtttaacagaggtcacggttactcagtcattcaggggcaggatgcaaggcaccactgtccttccagtagactaaagttgtgtcttgtatagtcagaaaaacagtgtaagagcaatgttgcaaaattgtggagtgcttttacactgctcttttgttaatgcaaccagcagtatgttttgcatgtctgacttagtaaatcattgaatcattaacaaataaaaattaaaaacctacgtgctccctctgcaggtttcagaggctaaaaatggstgccacaatccaatcaaccattagaacaagccgtgagggggggggatgcaggcagaaactgaccctttcagctttgctaaatgtggtctttttgccccacatagcaaaaagacctaggagaaagtggtgcaaatattttaagt

SEQ ID NO: 258715 - DNA, 267 bp, Homo sapiens
tgttgattttattctgaaatatatcattgcgtgatagtgacaagtggaaagcatgggcctaaagatattatagacatagtcacaaagggcgacttacttgggggaacacgggtgtggaggtgstgtcagactctgctcatgtctgggtgcatgctggtgtgtgctcatgtgtggcttacacccttagtcaggtggatttgcactacaatggactttttacttttactttttttttggaccatggaatgaagctttcattttcaatat

SEQ ID NO: 258716 - DNA, 612 bp, Homo sapiens
aatcaactactgcatatcttgcaatatgcaacccttctatttgacttttatcgtacttattggcagtatcttaacagtattccttttgcctctatgactactttttggccaatgggaagattcatggttgcaacatcaaagacccaatccctgccaagtttacccacagaatgtcacaattatcaatgtcctgtcaacagatgaatcatttaaaaatattaccttcaagtgtgttataaaacagttttttcggttgatttcctctaactcatttgttttcttttacttaatatgaaattgttcagtgtcacagagtcccaggctatttactaagcaccaaatatgcctsgattaaaaatacaatggtcatagtccctgggtttgatagtatggttgttacctggtggtaggcgtagctagtacattcaagataaaatactgacccttcagtatctcataagaggttgagtgtgtttgtttctaatgctgcatggaagtggtacatccagattaccactggtaatggaagtttatcagaaaaatcaagatataacaaggtaacctgggctactgtttcatagatttgttgcaaatttgcgttacgtcctggaa

SEQ ID NO: 258717 - DNA, 555 bp, Homo sapiens
tgttttgtgaggaaaagagatcattagactaatctgaaggaagcatgaagtgggtgtaactgatccagacgtattggcctgttaagtaatatattttgacagaaggccactatgatttggcagagctgggaaactgctaaattaaaagaccactcaaaagccaaaatggcaaatacataaatatttaaactactcttataagctcaacaatttttaaaaaaatactaatttcggagctggaaggggctttagaaattaccaagttcagacaactgggaggtaagctatgaggatgtaaagacatacaaagtgayacaatagcactggggactcggggggaggttgggagagggatgaaggataaaagacaacatactgggtacagtgtacactgtttgggtgacaggtgcactaaaatctcagaattcaccactgaagaactcatccatgtaaccaaaaaccacctgtaccccaaaaactattgaaataaaaaagaaaaaaaaataaatatatgaagcaaaagttgcccaaactataaacaagtaaataaaagaa

SEQ ID NO: 258718 - DNA, 555 bp, Homo sapiens
tgttttgtgaggaaaagagatcattagactaatctgaaggaagcatgaagtgggtgtaactgatccagacgtattggcctgttaagtaatatattttgacagaaggccactatgatttggcagagctgggaaactgctaaattaaaagaccactcaaaagccaaaatggcaaatacataaatatttaaactactcttataagctcaacaatttttaaaaaaatactaatttcggagctggaaggggctttagaaattaccaagttcagacaactgggaggtaagctatgaggatgtaaagacatacaaagtgacacaatagcactggggactcggggggaggttgggagagggatgaaggataaaagacaacatactgggtacagtgtacactgtttgggtgacaggtgcactaaaatctcagaattcaccactgaagaactcatccatgtaaccaaaaaccacctgtaccccaaaaactattgaaataaaaaagaaaaaaaaataaawatatgaagcaaaagttgcccaaactataaacaagtaaataaaagaa

SEQ ID NO: 258719 - DNA, 590 bp, Homo sapiens
agttttggctactttcttaattatctttgcaactgagcaaatgttttctctcctcctctaaagggaaggtaatttgctctttttctctctttttccctgaatgtttgcaaatactatggcctttagcaggttttggatagacttgagagctataaagccaaatcatttgcaatcctataatcttatttgtttcttccaggaatctgctgaggtgttcacagctgcctgcctgcctgccgtgtcagatagtagaagtggtgtgatgatgaccaagttggatggtgaatggaagattctcgacaccaggtactgcccagccaacaagacacaggcttgtcccaccgcagcagaaagttgttctgtaggccaatagcgagactgagaaatggccagatgcaaaagaaaccagttctgactgcactccagctctgcctaccaagtcagggccaggaggcccacgaacactccctcattgctgacactacagagctgagcttcacaaagygctccctgttggctctgcatttagacctcccacaactacagataaaacagagggagactaacatgccttagaaactaagcaaata

SEQ ID NO: 258720 - DNA, 540 bp, Homo sapiens
ccattctcattcagttatttgcaaataatctatatacccacactctcatacatggggtttttaaaatcaattcttttcccacaaaagtgggataattccatatactttttgctgcatcttaactttctgactgaataatggaaatttagcctgtctttaaattatgttttcttatggctacataaaatcccatggatggatataacacaatatattcaattattttcctattgagggacaacttgctgattttttcttctacaaaaatctcttctacagaaagagattttctgagcatatattctaaggcatcagagcttttatttttatgtcatagccttacaggaatagaacttttgagttgaagaatagtacctggtaacagatattaccagattgcttcatatttatgccagaagtrtatgagaatactgtttcaccgaactctgtacatgcactggatgttatcaccttaaacattttactaatataatggataagaattagtatttcatagttaaaatggattgtctttacaca

SEQ ID NO: 258721 - DNA, 468 bp, Homo sapiens
gaggagctatttccaaattatccatctgacaagggattaataaccagaatatataaagagctcaaacatctgtataggaaaaaaatctggtaattccatttaaaatgggcaaaaaatcggagtaggcatttcttaaaagaggacatacaaatggaaaatgagtatattaaaaggkgctcaacatcactgatcatcaaagaaatggaaatttaaactacaatgagatgtcatctcctgttaaaatggtgtttatccaaaagtaaggcgataacaaatgctggcaaggatgtggagaaaagggaaacctacttgtttgctgctggggggaatgtaagtttaaccactatggagaatagtttaacgttttctgaaaaaactaaaaatagaactaccatatgttttgcaatcccactgctaggtaaatacctaaaagaaaggaaattggtgtatcaaagaaatatctgcaca

SEQ ID NO: 258722 - DNA, 507 bp, Homo sapiens
atgctttcaatttctttggatatataaacccagaggtaggattgctgtatcaaacaatagttttatttttagttttttgaggaagctccatactattgtattttctgaagagactacatcaatttatgtaactactaaccatgtacaaagattcccttttctttacattctaaccagtttttatcttttgttattatagccaacagatgtgaagtgatayatcataaagatttttatttgcatttccataatgattagtgatgttgagcacctttttcatatacctgttggccatgccttcttttaagcaatgtctatttagattatttgcccattgttaaagtcatgctatttttccttgctatttagtgatagaagtttcttatatattttagatattaactcataattagatacatagtttgcaaacattttctcccattctgcaggttgccttttcattttgctgactgtatccttcactatgcagaagtattttagtttgtc

SEQ ID NO: 258723 - DNA, 507 bp, Homo sapiens
atgctttcaatttctttggatatataaacccagaggtaggattgctgtatcaaacaatagttttatttttagttttttgaggaagctccatactattgtattttctgaagagactacatcaatttatgtaactactaaccatgtacaaagattcccttttctttacattctaaccagtttttatcttttgttattatagccaacagatgtgaagtgatatatcataaagatttttatttgcatttccataatgattagtgatgttgagcacctttttcatatacctgttggccatgccttcttttaagcaatgtctatttagattatttgcccattgttaaagtcatgctatttttccttgctatttagtgatagaagtttcttatatattttagatattaactcataattagatacatagtttgcaaacattttctcccattctgcaggttgccttttcattttgytgactgtatccttcactatgcagaagtattttagtttgtc

SEQ ID NO: 258724 - DNA, 228 bp, Homo sapiens
tttgcttctgttgcctgtgctcttagtatcataaccaagaatcattgccattccagtgtttagaaactatttcactatgatttgaattggatttcattgaacctgtagcctgctttagatgacatggatatttttacaatattaattcttccaatccataaatatatctttcatttatttatttgtgtctgctttaattttgtttaycactgttttacagtttttagt

SEQ ID NO: 258725 - DNA, 551 bp, Homo sapiens
catgcacagccttgccaggtgtctactgttaaaatgagagcattgattggaaaagaatgggaccccgcaacttggaatgggaacatgtgggaaggaccctgatgaagctggggacgctgagtttgtaaactctgatgaaccttttttgccagaaggtacagcttccccatccctgccaaactcatgctgccatcagcctttccatctttgtctgaggagataaaccctgcactgcctaaggcaacagtgatggcctcccctgaggcagttgccaggcaagayaatgttgattctcctcagaagccacccccaatacctctgtttgcttctagacctgtaactaaagtcctggtgggcccctagaggtaagattgagagtgtggcccatgaggagtgtgctacactcaaataattgtttgagttctctaatttatataaatagcaacctggagaacaggcatgggaataaatgttaagggcatgggataatggtggaagaaacacagagttggatgaggctgaatttattgatttgggcacactaagtagag

SEQ ID NO: 258726 - DNA, 566 bp, Homo sapiens
ctttacagctaaagaagtgtggcaatgggctcatggtaatggaattcactggtcttaccatgttccccatcatcctgaaatagctagattgatagaatggtggaatggccttttgaaatcacaagtacaatgccacctaggtgacaatactttgcagggctggggcaaagttctccagaaggccrtgtatgctctgaaccagtatccaatatatggtactgtttctcccatagccaggattcatgggtccaggaatcaaggggtagaagtggaagtggcaccactcaccatcacccctagtgatccactagcaaaatgtttgtttcctgttcccaagacattatgtgctgcttgcctagaggtcttacttccagggggaggaatgctgccaccaggagacacaacaacgattccattaaactgggtgttaagattgccacctgaacactttgggcttcccctaccttaaatcaacaggctaagaagggagttacagtgttgactggggtgactgacccagacaatcaagataaaatcagtttactattacacaacggaggtaagga

SEQ ID NO: 258727 - DNA, 572 bp, Homo sapiens
ctgcgtagaggccagctcctgagtccaagggaatgaaatactggaaatgcaacgtgaagcatatrtatatatatataaaagattgtgtcccttgtgatagcaaatatcaaatataaacgaatacattttcagatttattacattttccttttaattaaaattttccttagctataaccatatattcattcaattattcatttatataacaaatatttgttaagcagctattatatacctggcaccatttaaagaactttgcataaaacagtgaccaaaagggaaaaatatgttaaaaatatgttagttctcatggagctttcactctattggggtagatgtgttgaaagctaaatgagtaagtaaaacataaactacattagattgttagaaatgaaatggggaacaataaagcagataagaggaatatgaaacattgagggagacaaattttagatacgtggtcaaggaaggcctttgaaaaagttgattaccaagcaaagacccaaaggttaatgaggaacaggccatgggcatatctagggagagcacatgtcaggaaaccctgaatga

SEQ ID NO: 258728 - DNA, 600 bp, Homo sapiens
catgtcaccatgggacattgccattttggagtttgctttttcattgccgatatgagaaaaagaacactcatatcggcactgagtcactgcagttgactcaggcaagaagctcacccactcgctcttctccatcaacacatcactgtgtgcagcgattaaggaataaatgcccccagccaagccaaaaaggaggagtgcagtgtgcctttttctgcgtatcccagaggctagctcttccttgcgaccagcaatcataaggcatcaagtcttcctctgaggggactgtaggctttgctgtctgttttctgcatcaaagtatctctaaatatttgagagtgtggagagcaccaaccagtaaatggcttctattagagtgrtatcagtagtgccaccactgaacctacctcaagcaataggaggtaagatggaattcctcacaagttgtgagcatggtaaaaggcaagtgcctaaggtgtccttgataataaagtctcaacttctttcttcactctgtcctgtctgctgtcaacctaagatttatactcccaatgcatagattgaattatgttagtcccagccctaaactcttcactacctctc

SEQ ID NO: 258729 - DNA, 569 bp, Homo sapiens
atgaagagttagttattgtagtcttcacattctggatttgttgtacctgttcttcttgggaaggctttccaagtattsaaagggaattgagtgtggtggtctaagtctttggtcactacagtcatacgtgcatttaggaggcactccaagcccagtaacgctgacttttgcagatacatacgggtaccgccttggtgatcttgggtaagaaccaagagatttcactgtgttaccagacagagattgttgttctcttcccttactttcccccaaacagaccgtctctctgttctgagctggttggatctgtgggaggggtgacacaaactcccttgtgtccccaccactgggactgtgctgaatcagacctgaaagtcagcataatactggatctcacccaagtcttgtggcaaccaggctggctacccccaatgttcttttaaggaccaagggctctttagacagcaggtggctaatctagccacatttatatccttcccttcagtatggtgagttcctctctgacccagggcagatccaaaaacactgtccaggagccaaggcctgaa

SEQ ID NO: 258730 - DNA, 575 bp, Homo sapiens
  misc_feature (1)...(575): n = A,T,C or G
accccataaatatatgtaattattatgtamatcaattaaataacattaaaataaaaatttaaaaataattttaaaatgttagatgtctgtttatcttacttttggtcaccactttttatgattaactattgttgttccccattttattttttcagcaaacgttgggtggattatactcattttcttttcttgaggtgaataattttctgatggccttgaactgaaaactgatgtcccatctggaagaagagtgcaataatgcttcctgtccccctattgtgacatcgctttaatcatcacatatgtaacagcacataggctacacacacctaagtggctgttatttgctagtgttcctcaagatctgtaacatgaacaacttatataagtgtcacctgtggagcttgccaaaaatgcttattccaggaaactatccaggtctttaaaaaaataaataaatgtatggggtgtaggtgtaattttgttacatggcacatattcaaaacagacttagcacatatacacccactactatcaagtgaacaaaannnnnnnnnnnnnnnnnnnnnnnnnnn

SEQ ID NO: 258731 - DNA, 431 bp, Homo sapiens
aatctgcaagacacttcagggatcttcatagcagcmcctcccatcgcaggcctggaggcataggagggaaaaatggtttcctgggctggactcagagccccactgctctgtgcagccttggtacatggcaccttgcaccccggctgctccagctccagacaggtctaaaagggaccaagttacagatcaggccattgtttcagagggtgcaagccctaccttggaagcttccaagtggtgttgggcctgcgggtccacagaaggcaagaagctgaggtttgggagcctctgcctagatatcagaggatatatggaaatggaaatttccatgtggtgttgggcctgcaggtgcacagaaggcaagagctgaggtttgggagcttctgcctagattttagaggatatatggaaatggctggaagtctaagcag

SEQ ID NO: 258732 - DNA, 431 bp, Homo sapiens
aatctgcaagacacttcagggatcttcatagcagcacctcccatcrcaggcctggaggcataggagggaaaaatggtttcctgggctggactcagagccccactgctctgtgcagccttggtacatggcaccttgcaccccggctgctccagctccagacaggtctaaaagggaccaagttacagatcaggccattgtttcagagggtgcaagccctaccttggaagcttccaagtggtgttgggcctgcgggtccacagaaggcaagaagctgaggtttgggagcctctgcctagatatcagaggatatatggaaatggaaatttccatgtggtgttgggcctgcaggtgcacagaaggcaagagctgaggtttgggagcttctgcctagattttagaggatatatggaaatggctggaagtctaagcag

SEQ ID NO: 258733 - DNA, 431 bp, Homo sapiens
aatctgcaagacacttcagggatcttcatagcagcacctcccatcgcaggcctggaggcataggagggaaaaatggtttcctgggctggactcagagccccactgctctgtgcagccttggtacatggcaccttgcaccccrgctgctccagctccagacaggtctaaaagggaccaagttacagatcaggccattgtttcagagggtgcaagccctaccttggaagcttccaagtggtgttgggcctgcgggtccacagaaggcaagaagctgaggtttgggagcctctgcctagatatcagaggatatatggaaatggaaatttccatgtggtgttgggcctgcaggtgcacagaaggcaagagctgaggtttgggagcttctgcctagattttagaggatatatggaaatggctggaagtctaagcag

SEQ ID NO: 258734 - DNA, 431 bp, Homo sapiens
aatctgcaagacacttcagggatcttcatagcagcacctcccatcgcaggcctggaggcataggagggaaaaatggtttcctgggctggactcagagccccactgctctgtgcagccttggtacatggcaccttgcaccccggctgctcyagctccagacaggtctaaaagggaccaagttacagatcaggccattgtttcagagggtgcaagccctaccttggaagcttccaagtggtgttgggcctgcgggtccacagaaggcaagaagctgaggtttgggagcctctgcctagatatcagaggatatatggaaatggaaatttccatgtggtgttgggcctgcaggtgcacagaaggcaagagctgaggtttgggagcttctgcctagattttagaggatatatggaaatggctggaagtctaagcag

SEQ ID NO: 258735 - DNA, 622 bp, Homo sapiens
aatattttaccactgactagaaatttctggttagcagtacaactgtcattcagcttttagtttcagagttcaaattttaattasttgattaatactgaacttttactaccctgaagaccgcaaggcagcgaatggctaatttaaacctaaagggaagtaaagggaaaaagaggtgaggcattaaatatagaatagaaaacgggagcagaaggcagaaggtgacaatttccattccagacaacattcctaggcactgttctctgagcatgacacattagggaaaaagggggttccccattctttccccttggtggttgcaatcgtcatttaccagtagtcaaattacctcttcccagtttattttttggattcccaaatcactgaagccatcttccaagcttcccgtacccctttcttacaaaaacacgtattcatgcattcatacaaaaggagtataaaattttagagggttcacacatactctctggaactcatccagaagtctcaaagttgggagcctctgacttaaaagttgagtttgtctactagataaaagggaggagggaggagattatttcaggtggataaagtaaataagcaatatgttcaagttgctttaatt

SEQ ID NO: 258736 - DNA, 557 bp, Homo sapiens
atacattcagttggatgtatgtgctgcagattattttaagaagctctgggataggggtgtcaatttgagaattatcaaccataaatgacaaataaagctattagccctagctcagatttccaaaggataaagtatagaaaaggagagcaaaagcttagggcaggaccttgaaaaaaagccaagatttaaaattcagtaagaagctgttaaggacccttagaaggactcatcagagagggatgaggagaactcaaggaacattgtatttcaaagtagtcataggcaatggagacagctgctaaraatcaagcaagatgagatctgaaatttgacaaatgtgtttagccaaatggagagaatggagagctgtttagtgaaggagtagtagttggagccaaactgaagtgtgcaggaaaatgtgcgggacacgatagaagttggagagaacagcagctccagggatctcctgtcgcttaacctggatatatacctggcaactcaacaaaaagatgaatttgaaacatagaacagctgaatttatccaattagaaatcaaa

SEQ ID NO: 258737 - DNA, 622 bp, Homo sapiens
gctaaatttatctgatagaattttgaattccttctctgtgttatcttaagtttagttgagcttcctcaaacagctatattgaattctctgtctgaagggtcacatatctctgtccttccaagtttgatcattggtgcctagttagctcatttggtgaggtcaagttttctggatggtcttgatgattgtggatgttcattcgtgtctatacattgcaaagttaagtatttattgtagacttcatagtctgcacttgtttgtacccatccttcttggaaagagtttccaggtattcaagaagacttgcatgttatgatcaagttttagtcattgcaaccatatgtgcattatactctataatcagcaggtggtaaagccacacaggcttatgtccrtcctttcaggacagtgagtcccccaccaaccccagtcccaagtggggctcagagatatcatccagaagccaggacttggagttagataaaaatctacctaatgctctattctactgcagttaagctggcacccaagacaaaagacaaagtctttcccactcttgcctcctcattccgcaagcagatgagtatccttccatggccactactaccccagtaccacggtg

SEQ ID NO: 258738 - DNA, 624 bp, Homo sapiens
tgcattcaggctgctggactaaaaacatgactcacaaatgaggtgtctctgacagcttttaaaagctatcatttggttgtgttgagaattttttcttttattccatagatgaggataatacgttttaaaatttgtatacttcctttttggtaccatacaccacccaggatcaaccactttattttccaattttaaggacactgagatctcattaattagaacagctaatataaatttaaagtttataataatttggaaaaggggctgattggaaattrtttgtacttagcaaatctttcccgcaaattgttctaaattgcagcttgagctaaattgcaggaggaatgcttaaaatacttaagtgaatgggtgattttgaagcacttttagaaacgcccacatacttacaatatacatgctaacttgaaagcatttctatttttttagactgagttccttagcacctctacaaagagtttcttaggctagtttggaatatcttagtaaaaactaatatatttatattcatttttaaaattatgccattattttactttcactccgctctgattgatttttttccctgtttggtcaacatttgtaaagttttttatttttagtttt

SEQ ID NO: 258739 - DNA, 526 bp, Homo sapiens
catttttggcaatgaggtagaccacagcatagcgtacacataaattttatatgcatggggaaaccatgcatttgtgtgacttattttattgtaatatttattttattgtggcgatctgaaactgaacccacaatatctttgaggtatgcctgtaaatgcatgaaagtattctataaatgtcaattagatcaaagtgtatgatattgctaktcaggtcacatatagccttactgttttcctgcctgcttgatttaatccatcactgacagagggatgttgaagacttcaactgtaagaggggatttatctatttctcctttcacagttccatcagattttgcttcaagtattttgatgctctgtttgttaggttcctacatatttaagattgttgggtgttcttacagaaattgacctctttgtcattatgttaacactctctttgacccagatactttctatggggtaaggccagaaattaagggccaacattatgtgctgtcttaacatctggtaaaatcagaag

SEQ ID NO: 258740 - DNA, 547 bp, Homo sapiens
ctgaggcattcaccaactggagcatgttaagaagaggagaatgggaaggaagagaaaaattgtgtcataagagaaacaatggaaataattgagaatgtgaacttagagaagaaaagtctgaggtgccttcaacaaccctccagctctgaagatcaaaccatccttgggttagctggtgcttcttgtccttgacagtctgttttcagcttttggtgaaaaagctactttgggttcactttttgtcagttcatgccctrtggtaggttccccatatacaatgagtggctttgtttagaccttgatttaaactattggcaaaaacaggttttgggggcttttggatttttttttttttagatagaaaattctaaaattagactggatattggatgataataaaaacttaatgctatttttatcgttgagatactgaccttgcagttatataagaaaataccccttcttacccctcaccacttactttttttagaagatgtattttgttgcaggaagtcagggaccccaaacggagggaccggctgaagcc

SEQ ID NO: 258741 - DNA, 515 bp, Homo sapiens
ctgctgtttttggggtttccttccaatttttttgctgcttccctggggccttggctcttgggcctgctgcctcttcccactctacacctttggattccttatctttggctccaccttattgctccattctccaaagacaaatccacaaggcataggattttacagaatatggggttacagaaacagcatagggaagtgtaaaagcctagaagcttcttacagacgcagccccttgtctgtagctcctgactcccacttaaatgtctgttggaagcaccctggggtagcagaacccagctcagaagatggggcttatccaccatgccttttcstaacctgacacccacccagataatcttttcaatatgcaaactagagcgtatcaccccctgctcagagcctttctgtgacctcccattttgcttcccaggactccttgctccttagccaggtctccaggtcctccgtgatcaggtctctgctcttctgcagcctcatctctgccattcttcacc

SEQ ID NO: 258742 - DNA, 546 bp, Homo sapiens
aaaatcaacagacttcaagtagaataaatgcaaagggatccacacacagatatagcatggaaaaattctgaaagccaatgatagggagaaaatcttaaaagcagtaagagaaagatgactcatcacatagaaaagaagctcaatatgattaacagctgatttttcatcagaaacaatagagccaaaaggaagtgggatgacagatgwaaagtgctgaaagaaaaagaaaactgtcaactaagaatcttcagcaaagaaacttcagcaaagctttcaaaatgaaggaaaaatcgacttttccctattagaaaagaaagagaatttattgctagtaaatgtatcttacaaggagtactaaaggcagttctttaggctgaaaacaaatgaccccagaaagttatttgaatccacacacatgtacattaagagcaccagtaaaagtaattatgcaattataaaagatactacacacgaatattctttctccattctttcaattgatttaaaaaacaattgtataaaacgatatatagataattgtattgt

SEQ ID NO: 258743 - DNA, 623 bp, Homo sapiens
atgattaacagctgatttttcatcagaaacaatagagccaaaaggaagtgggatgacagatgtaaagtgctgaaagaaaaagaaaactgtcaactaagaatcttcagcaaagaaacttcagcaaagctttcaaaatgaaggaaaaatcgacttttccctattagaaaagaaasagaatttattgctagtaaatgtatcttacaaggagtactaaaggcagttctttaggctgaaaacaaatgaccccagaaagttatttgaatccacacacatgtacattaagagcaccagtaaaagtaattatgcaattataaaagatactacacacgaatattctttctccattctttcaattgatttaaaaaacaattgtataaaacgatatatagataattgtattgtttcactctaacatatggaaatatgacttatttgccaataacagcacagaagtgggtgagagcaaagttgtgtcagagtaagacaatgacaccaagccagatggttatcaaaatccacaggaacaaatgaagagaaccagaaattgcaaataagaaggacagagtaccagagaggagagagaggtacagagaattatggaggtggcttccgttgagtatgca

SEQ ID NO: 258744 - DNA, 623 bp, Homo sapiens
atgattaacagctgatttttcatcagaaacaatagagccaaaaggaagtgggatgacagatgtaaagtgctgaaagaaaaagaaaactgtcaactaagaatcttcagcaaagaaacttcagcaaagctttcaaaatgaaggaaaaatcgacttttccctattagaaaagaaagagaatttattgctagtaaatgtatcttacaaggagtactaaaggcagttctttaggctgaaaacaaatgaccccagaaagttatttgaatccacacacatgtacattaagagcaccagtaaaagtaattatgcaattataaaagatactacacacgaatattctttctccattctttcaattgatttaaaaaacaattgtataaaacgatatatagataattgtattgtttcactctaacatatggaaatrtgacttatttgccaataacagcacagaagtgggtgagagcaaagttgtgtcagagtaagacaatgacaccaagccagatggttatcaaaatccacaggaacaaatgaagagaaccagaaattgcaaataagaaggacagagtaccagagaggagagagaggtacagagaattatggaggtggcttccgttgagtatgca

SEQ ID NO: 258745 - DNA, 623 bp, Homo sapiens
atgattaacagctgatttttcatcagaaacaatagagccaaaaggaagtgggatgacagatgtaaagtgctgaaagaaaaagaaaactgtcaactaagaatcttcagcaaagaaacttcagcaaagctttcaaaatgaaggaaaaatcgacttttccctattagaaaagaaagagaatttattgctagtaaatgtatcttacaaggagtactaaaggcagttctttaggctgaaaacaaatgaccccagaaagttatttgaatccacacacatgtacattaagagcaccagtaaaagtaattatgcaattataaaagatactacacacgaatattctttctccattctttcaattgatttaaaaaacaattgtataaaacgatatatagataattgtattgtttcactctaacatatggaaatatgacttatttgccaataacagcacagaagtgggtgagagcaaagttgtrtcagagtaagacaatgacaccaagccagatggttatcaaaatccacaggaacaaatgaagagaaccagaaattgcaaataagaaggacagagtaccagagaggagagagaggtacagagaattatggaggtggcttccgttgagtatgca

SEQ ID NO: 258746 - DNA, 623 bp, Homo sapiens
atgattaacagctgatttttcatcagaaacaatagagccaaaaggaagtgggatgacagatgtaaagtgctgaaagaaaaagaaaactgtcaactaagaatcttcagcaaagaaacttcagcaaagctttcaaaatgaaggaaaaatcgacttttccctattagaaaagaaagagaatttattgctagtaaatgtatcttacaaggagtactaaaggcagttctttaggctgaaaacaaatgaccccagaaagttatttgaatccacacacatgtacattaagagcaccagtaaaagtaattatgcaattataaaagatactacacacgaatattctttctccattctttcaattgatttaaaaaacaattgtataaaacgatatatagataattgtattgtttcactctaacatatggaaatatgacttatttgccaataacagcacagaagtgggtgagagcaaagttgtgtcagagtaagacaatgayaccaagccagatggttatcaaaatccacaggaacaaatgaagagaaccagaaattgcaaataagaaggacagagtaccagagaggagagagaggtacagagaattatggaggtggcttccgttgagtatgca

SEQ ID NO: 258747 - DNA, 558 bp, Homo sapiens
gtgcttggggatgcaaagatcaataacatatacaacctttcctcctgagcagctagggatatgagggggcagggaatgggctgaccacaagttatgatgatacaaatcacagtcataatgtaagtacctggagaaaggcacgtggccagaacccagagggccaaaagagggcactgtcgcaaccattcggacgaagaaccagctatgtatttgggcataagaaaatcaaagagaccaacttgatctgttgtcaataaagatacaattctttgcacaattcccttccygcatgcccttatgacctactgtgaggggggtcctgccctatgaacctggaagcccaggtggagatgacctgggtggaagtgggagtggggatgtggcaggggtgcttcaaggtggtctgaacaccactccagcctgccgtcctccttcagcggtgtcaggcatgaggcctctctgagtccatgggttggaaggatgtgggagagaaaacagggagagaaggggagcagacagtaagcatcctgagcctcaccccgagatggctgggccttc

SEQ ID NO: 258748 - DNA, 558 bp, Homo sapiens
gtgcttggggatgcaaagatcaataacatatacaacctttcctcctgagcagctagggatatgagggggcagggaatgggctgaccacaagttatgatgatacaaatcacagtcataatgtaagtacctggagaaaggcacgtggccagaacccagagggccaaaagagggcactgtcgcaaccattcggacgaagaaccagctatgtatttgggcataagaaaatcaaagagaccaacttgatctgttgtcaataaagatacaattctttgcacaattcccttcccgcatgcccttatgacctactgtgaggggggtcctgccctatgaacctggaagcccaggtggagatgacctgggtggragtgggagtggggatgtggcaggggtgcttcaaggtggtctgaacaccactccagcctgccgtcctccttcagcggtgtcaggcatgaggcctctctgagtccatgggttggaaggatgtgggagagaaaacagggagagaaggggagcagacagtaagcatcctgagcctcaccccgagatggctgggccttc

SEQ ID NO: 258749 - DNA, 582 bp, Homo sapiens
gccacagccacccacagagcactagcacaccaagaagaatcagatctggtccccaccctcacccacagtgacaaactaggtcataacgtggagtcccggccacagaaaagcctaaggaaggaagagrtcagtactccaaggggtggaggtgggaggcagtcagaaaaggcttcatggaagatgcaccttttcagctgaacctcgggagactgtctgccagacggactgcatggggaaggcttcttgggcaaagaaacaacttgaacaaagatacccacaggacatgggcatcctgaggctccacaaggctcaagcctagggggtcagggtggagcgcagagaggcagagcctgagtcacaaaggaccctgtaaccaaactaaaggtgtgcatttttccccaaaagtcaagatttgggggtcattgaagagtaacatttgagcgggcattcccttttaacagctatgggatcccagtcaagatatttaacctctctgggcctcagtttccatatctgtgaaatgggaatagtgagaatatctttttatagggtgcttagggagcttttaaaagatattatgta

SEQ ID NO: 258750 - DNA, 597 bp, Homo sapiens
tagccaggcatgatggtgggtacctgtaatcccagctacaaggaaggctgaggcaggagaattgcttgaacctgggaggcggaggttgcagtgagctgagatcgtgccattgcactccagcctgggcaacaagagcaaaactcctctcaaaaataaataaataaaacaaaataatttaaaacaaaacaaaacaaaaaaagcttgtgtgcggccgggcatggtcactcaygcctttaatcccagcacattgggaggccaaggcgggtggatcacttgaggtcaggagttcgagaccagcctgaccaacatggtgaaaccctgtctccaccaaaaaaaatacaaaaattagtgaggcatgatggtgggtacctgtaatcccagctactggggaggctgaggcagaagaattgcttgaacccgggaggcagagcttgtagtgagccaagatcctgccattgcactccaacctgggcaacaagagcgaaactccatctcaaaacaaaaataaaaacaaaacaaaacaaaacagaaaaacttgtatgcaaataaataaaaattagaggaaacaaaaagaaaataatacttgctgcaataact

SEQ ID NO: 258751 - DNA, 549 bp, Homo sapiens
gaggcccccagactaatggtgacacccaatctgcttgctgctcagctgtcggagcgaagttgcccaggttgtcgtctctgacagttctcatcagcctcgttctccattcttcagatgagtcatttttcttcctttactcttggttatatcttccaagtactggctayagttttggagctttggcgtccaaactggtcagacacagtggcacagagaaaagggagaactggctcttcgtgactgcactactcccaaccacatccgttcattgacctttgtcactcaagactgaaaggccacttgctttcaaaaaaagagataaagatttatgtctcctgccaaaggaaagagaagtctggctctgagccatgacagggctctccctgctgcagcagatgagcagggaggcgtgcaggtcccctctgcttctgccctgtgatgaaggcaacaattcatctaagtagtcacaggacagtcctggtttccagttattgtctcagcataattattcatggagcctcttttagtctccaaagggtcccattttca

SEQ ID NO: 258752 - DNA, 549 bp, Homo sapiens
gaggcccccagactaatggtgacacccaatctgcttgctgctcagctgtcggagcgaagttgcccaggttgtcgtctctgacagttctcatcagcctcgttctccattcttcagatgagtcatttttcttcctttactcttggttatatcttccaagtactggctacagttttggagctttggcgtccaaactggtcagacacagtggcacagagaaaagggagaactggctcttcgtgactgcactactcccaaccacatccgttcattgacctttgtcactcaagactgaaaggccacttgctttcaaaaaaagagataaagatttatgtctcctgccaaaggaaagagaagtctggctctgagccatgacagggctctccctgctgcagcagatgagcagggaggcgtgcaggtcccctctgcttctgccctgtratgaaggcaacaattcatctaagtagtcacaggacagtcctggtttccagttattgtctcagcataattattcatggagcctcttttagtctccaaagggtcccattttca

SEQ ID NO: 258753 - DNA, 608 bp, Homo sapiens
aatgataaatcacatggtcactctacttawgacccatcacggagtgctgcattcaggtgcagtggaagacactctgccgtggggctggaagaccagaacccgagacctgcctccatcactggttccaccggcttgggcaacccacttccgcctctcaggagcctcggttttcctgcctgtagaagggacatattttccttcacaaacttgtgatgagaataagtagcatattggcatgcaagcacttggtcagcttttcaccgctaaacagatgaaagtcctttttatcgtgacaatatatgtcagaagcccattattttgtcctgttatccaatcctattatcctcaataatatcattaatgtcttgcagcaaaatcttatttttcaataggtttctcctttatgcaggtgaagagaatccattttagattagtccctgtcccaggtaacaaatcacttgttctgcatgtgaatttgacattatggaactgtccattgtaaactgccatgccctttgtgaatttcccctttctccttccttttcccaccctaatagtcaccatgtaattcatcccaaaggaatgtggttgaactttctggacactaa

SEQ ID NO: 258754 - DNA, 608 bp, Homo sapiens
aatgataaatcacatggtcactctacttaagacccatcacggagtgctgcattcaggtgcagtggaagacactctgccgtggggctggaagaccagaaccygagacctgcctccatcactggttccaccggcttgggcaacccacttccgcctctcaggagcctcggttttcctgcctgtagaagggacatattttccttcacaaacttgtgatgagaataagtagcatattggcatgcaagcacttggtcagcttttcaccgctaaacagatgaaagtcctttttatcgtgacaatatatgtcagaagcccattattttgtcctgttatccaatcctattatcctcaataatatcattaatgtcttgcagcaaaatcttatttttcaataggtttctcctttatgcaggtgaagagaatccattttagattagtccctgtcccaggtaacaaatcacttgttctgcatgtgaatttgacattatggaactgtccattgtaaactgccatgccctttgtgaatttcccctttctccttccttttcccaccctaatagtcaccatgtaattcatcccaaaggaatgtggttgaactttctggacactaa

SEQ ID NO: 258755 - DNA, 608 bp, Homo sapiens
aatgataaatcacatggtcactctacttaagacccatcacggagtgctgcattcaggtgcagtggaagacactctgccgtggggctggaagaccagaacccgagacctgcctccatcactggttccaccggcttgggcaacccacttccgcctctcaggagcctcggttttcctgcctgtagaagggacatattttccttcacaaacttgtgatgagaataagtagcatattggcatgcaagcacttggtcagcttttcaccgctaaacagatgaaagtcctttttatcgtgacaatatatgtcagaagcccattattttgtcctgttatccaatcctrttatcctcaataatatcattaatgtcttgcagcaaaatcttatttttcaataggtttctcctttatgcaggtgaagagaatccattttagattagtccctgtcccaggtaacaaatcacttgttctgcatgtgaatttgacattatggaactgtccattgtaaactgccatgccctttgtgaatttcccctttctccttccttttcccaccctaatagtcaccatgtaattcatcccaaaggaatgtggttgaactttctggacactaa

SEQ ID NO: 258756 - DNA, 608 bp, Homo sapiens
aatgataaatcacatggtcactctacttaagacccatcacggagtgctgcattcaggtgcagtggaagacactctgccgtggggctggaagaccagaacccgagacctgcctccatcactggttccaccggcttgggcaacccacttccgcctctcaggagcctcggttttcctgcctgtagaagggacatattttccttcacaaacttgtgatgagaataagtagcatattggcatgcaagcacttggtcagcttttcaccgctaaacagatgaaagtcctttttatcgtgacaatatatgtcagaagcccattattttgtcctgttatccaatcctattatcctcaataatatcattaatgtcttgcagcaaaatcttatttttcaataggtttctcctttatgcaggtgaagagaatccattttagattagtccctgtcccasgtaacaaatcacttgttctgcatgtgaatttgacattatggaactgtccattgtaaactgccatgccctttgtgaatttcccctttctccttccttttcccaccctaatagtcaccatgtaattcatcccaaaggaatgtggttgaactttctggacactaa

SEQ ID NO: 258757 - DNA, 521 bp, Homo sapiens
acacacaggtgtgtgttatgtcaactactgaaagcaaataaaggttagcctggaatctgatctctctaccgacacattcttgtgggcattacaaatgctccctgaaggaatattacactaatgctgactaattttttaaaacatcccaaatctcattagatctattccttagcagtattgttcaaaggcatggcctctactaacatcaaactcattgccacttcttagtaaacctttaatgttttctccagtatcacctcctctgttctgtttcactgacaatacaacaggttgaacaacaataaaatattcaatatcaacacatgtaagtttttgtcatgtcatgaaaactatgacagcccacaaacaattaaatgttaggttatcagtaacaaatgcttaagaatactggttcgcattaatggctatgggtcttaagaaaamcattacatattttgactgctgtgtaacaagcctggcacagaaagatggcaacggtactttcatatctgaaattacca

SEQ ID NO: 258758 - DNA, 613 bp, Homo sapiens
atgcaaagtttgtctttctgtggctggcttatttcacttaacataatgatctccagttccakctacgttgttgtaaatgacaggatctcattctttttcatggctgaatagtattctactgtgtgtatgtaccatattttctttatccattcatttgttgatggacaattaggtttcttccaaatcttggctatcatggctgtaataaacatgggcgtgcagatatctcttcaatatacaatttcctttttttttttttttttttgatatttacctagtagtgagattgttggattttatggtagctctagttttagttttttgaggaatatctgaactgttttctgtagtggttgtagtaatttacattcccaccaacagtgtacgagggttcccttttctctacatccttgtcggcatttgttattgccttagacaccccagttttgctgcccacgttgtcaaccctagatctggatgctgccactaaaactggtgctgctgttgcctttcgaaaatcaatgtagctgctgctactcccaccaccaacagttagcatgaatgacctgaggttttttcttgttagtttcctgtaaagtctgggacgggtaca

SEQ ID NO: 258759 - DNA, 509 bp, Homo sapiens
acaactctaataagtgtgttccgcaggaataataaaagaacttctcagtagctctctaaaaccctacccttaaataggaacaagcaagcaagaataaccagaagttacaggcaggtgtttaacatgacatacagaatctacaataaacaggtggaaagaaatttaataagaatttagaagttattctttgaaaaaatttagagaccctaattaatatattcaaaggtaaaataaaattactggctatgtgattcagtaaaaataatattataaaaagaagtgtgcaaagactaagatagamtcttaaaaattatgataaattcaaaagcaatgaaattactaaaatagagtagaagaaataaacataaataataattagaagagaaagtttaaataaattacagaatcaattgagagatccaacatctgaataataggagtttcagaaagagaaaacagagtaaaaggaaggaataaattatcaaggaaataatggaagacatttttaa

SEQ ID NO: 258760 - DNA, 577 bp, Homo sapiens
ctggtctctactaaaaatacaaaaattagctgggcgtggtgatgcgcatctgtaaacccagctactcgggaggttgaggcaggagaatcccttgaacccaggaggcggaggttgcagtgagtagagattgtgccactgcactccagcctgggtgacagagcaagatttcgtaaaaaaaaaaaaaaaagaaagaaaggaagaggatccagctgataatagaaagcatcttagttgcaacagaagttgaagccaaggaatccagggagaagtccattgtggggacaggcratccggaagctgcagttacctctgaaatgataaggggtctaagagatgaaataatgcagttgccaggcacttgctactttttcaggttttagaattttgcatttattttaaacctttggtaaatctattaatgtcttttcttcctgagaaggatgtttgtttgattttgttataaattagtagaacgtttaagagggagctccttattttgtttattggaaaaatctacatgtggttgtttcagagactacatagtaagaagcggtgatcttaagggtagtggctaaat

SEQ ID NO: 258761 - DNA, 427 bp, Homo sapiens
tctgtcttccaatataatctttcctcaacatctgccactgactgtataagaagaaattacaatttctggttagataattttaagattagtaggatataaataaggagtttatcttattcgtaaccattttcttttcacaacatatccttttacttagaaatgcwgcagtttagatctagacaaattatttgacaaactgtaatttatctgtttaaacgtaaaagcatttaaaagttttaaataaaagttagatagaatcttattacttgatatggaaaaacataagtgcagccactgtatgtgaagtgaagagagagggtccaatattctggatgctgaaccctcacattgaccatcctgagttgcttttagaagcatcttccaataatctcattgaaaatctaagaagcgagctgaaagcgccctc

SEQ ID NO: 258762 - DNA, 476 bp, Homo sapiens
tgatgattccaatcttatgacaaaaaggaaaaaaactacattgaaactcatgactttcaacaatcttattggaaaactgagttcacagagtaaataactggctccaactctaagatacagtgtctctagagagaaagcaccacacaaatgcatgcccacctagggtcgatgaaactggacaccagtaagaataattcagctaggattgctgaaaaattgagatagkcctagtgtgggttgttagaatagtgtggaaatacgtgggtgccacaaaaattaagagtctttactcttttgcaggatctgtctctgttaaccacagtgagcactcaaaatacagatcagaaagagccacacaaccattgaaggcaatcaccctgaaggaggacaagaaatctcacttttccacctacacctcttttgttttatggttattgctttaatctaaaccaccctgtcctccagcatactttgca

SEQ ID NO: 258763 - DNA, 480 bp, Homo sapiens
tatgtaacagagtgtacatatccagaaatatttatctttttaaaaacaggctaaatactagaaataacttttagcttcagggatcatattacagtgtcttccttttttttatttaatgaaataaaatatcaaaagggtatttgatattttgattttaatggaaggaaaaattatcaaagcatttagaatagaaaattatgtaaaaatacattagtgctgaaataagacaaaattataattatttgcagacaaaattwtgtgcagactatagttttgtatgtataaaatctaaagaaatcagtgaaaagtaagtaaaaacaatagactgtatctgggtgagtgattgcaaaatttacaaacagcaacatgttacgaagtgaaaaaaattatgaaaaattatggtttaatatcagcacaaattaaatagtaaaactagaaaaatgttcagaatttatggaaatatactgaagtagaaatata

SEQ ID NO: 258764 - DNA, 375 bp, Homo sapiens
gttatttaagactgatactaagctagtatcgtgcatatctctttagaataatagaaatgttctaaatttgacacactgtttatctcagggattatttaattatatattctttaaggtcaggggaaaaactccattaattttatttaaatgaaaacattcattctcagaagctagggaataataattactattattaattattaatagtaatgtggtaatgattattacaataacttgcaattgttttaatgcacttcatygcgtgctttataatttatgcatcttgtttaaatgttttaaaatagcattaagtaaaaaaagttcacaaaaggttatatcaactgctgcttagtttttattattactgaaaaatga

SEQ ID NO: 258765 - DNA, 545 bp, Homo sapiens
aatccaagaaagactttgccatggcacattataataagactatctaaagtcaaactaaaaaagcaaattctgaaaacagcaaaggcatctggtaacctagatggaaactctaccatactaacagtgggcatctcagcagagaccctacaggacagggggaaattgactgatatattcaaagtgctcaaagaaaatttttaaatcaataatataaattcagcaaggctggtttgcataaataaaggataagtagtctttttcagacaaacaaattctgaggaaattgatccaacctaggatgagcctataagaaatgcttaagtgagtcctacacttggaagcaaaaggaatatattcaccatcatgaaaacacagaaatgtataaaagtcactgataaagcaatcatacaaagaaaaagaatcaaatagcaagattaaggacttasaaaacctaatgtattaataataaccttgagtgtaaattgattactctacttaatatacaaagattggtgaatggattaaataaaatgatccaactacat

SEQ ID NO: 258766 - DNA, 561 bp, Homo sapiens
tttgcgtataccatctttttttaatgtcaggacactgcaagttacaatcttgtatattacatttgcctccgtttgaaaagagaaagtgtggagaaaggtgcaaggaagacacactaagaaaaaaaacgggaaattatgcactattttttacattttaaaaagctatcttttaattcacatacagtaaaatttactcttttgagggctacagccctgcagcattaagtacaatatgtaaaattgtgtaactaccagtgcacttaaaatcaagaacagtcccatgaccatccaaaatttatttgcattgctctttgtggttaaatgccatccccatctctaaccctggcaatcactgatctgtttgccatccctgttgctttgtattttayatttccacaaaaattgatttgtaaaatatgctgtctttgggtctggcttctttcactttgcctgttgcctttgagattcatccatgcatttgtgaatattaacagttaactcatctatattactgcatagtatccatcatttctttttttaaaattttattattattatact

SEQ ID NO: 258767 - DNA, 432 bp, Homo sapiens
ccgctgcactccagcctgggcgactgagaatttgtctcaaaaaaattgtactactaattaaaaaattaaataaacataggagcaaatatactaattattttttttcttttggatatatatatagccatgggatttctgggtcatayggtagttcaatttttttgtttattaagataccttcatactgtttttcacagtggttgtattaagttgccttccctgcaagagagtatgagggttgcccttgctccacatttcttcactttcattatcttgttgtctttttgataaaagccatgcttctccaattctttcggttgtgatgttaggttgttaatttgagatatttctaactctttgatgtgagcatttaatgctataaatttcccacttatcactgccttagctgtgtcccagagattctgatatgtt

SEQ ID NO: 258768 - DNA, 529 bp, Homo sapiens
ttttatttcaatattgtattgtattgcattgtattgtrttgtatttattgtattgtattgtattttaatttttattttaattttttattttaatatttcattttattttgttttattttattttattttatttttttaatttttttgcggagtcttgctctgtcgcccaggctggagtgcagtggtgcgatctcggctcactgcaagctctgcctcccgggttcacgccattctcctgcctcagcctccagagtagctgggactacaggcgcccaccaccacacctggctaattttttgtatttttaatagagacgggttttcgccgtgttagccaggatgatctcaatctcctgacctcgtgatccgcccgccttggcctcccaaaatgctgggattacaggcgtgagccaccgcgcctggccagtagatgatgtgttgttataatagtctgtcccggtgtcttggctgacttttcggtctttcttcctgtgatatgagttcagttaatgaaaactcaaggaagggac

SEQ ID NO: 258769 - DNA, 529 bp, Homo sapiens
ttttatttcaatattgtattgtattgcattgtattgtgttgtatttattgtattgtattgtattttaatttttattttaattttttattttaatatttcattttattttgttttattttattttattttatttttttaatttttttgcggagtcttgctctgtcgcccaggctggagtgcagtggtgcgatctcggctcactgcaagctctgcctcccgggttcacgccattctcctgcctcagcctccagagtagctgggactacaggcgcccaccaccacrcctggctaattttttgtatttttaatagagacgggttttcgccgtgttagccaggatgatctcaatctcctgacctcgtgatccgcccgccttggcctcccaaaatgctgggattacaggcgtgagccaccgcgcctggccagtagatgatgtgttgttataatagtctgtcccggtgtcttggctgacttttcggtctttcttcctgtgatatgagttcagttaatgaaaactcaaggaagggac

SEQ ID NO: 258770 - DNA, 529 bp, Homo sapiens
ttttatttcaatattgtattgtattgcattgtattgtgttgtatttattgtattgtattgtattttaatttttattttaattttttattttaatatttcattttattttgttttattttattttattttatttttttaatttttttgcggagtcttgctctgtcgcccaggctggagtgcagtggtgcgatctcggctcactgcaagctctgcctcccgggttcacgccattctcctgcctcagcctccagagtagctgggactacaggcgcccaccaccacacctggctaattttttgtatttttaatagagacgggttttcgcygtgttagccaggatgatctcaatctcctgacctcgtgatccgcccgccttggcctcccaaaatgctgggattacaggcgtgagccaccgcgcctggccagtagatgatgtgttgttataatagtctgtcccggtgtcttggctgacttttcggtctttcttcctgtgatatgagttcagttaatgaaaactcaaggaagggac

SEQ ID NO: 258771 - DNA, 484 bp, Homo sapiens
gaaacaataagctggttctttgaaaagataaataaattgatagaccactagsaagattatccaaaaaaagtagagaaataatccaaataaactcaattagaaacaaaatagaagatattacaactgacaccacagaaatataaaagatcctacaaggatactatgaacgcctttaggcacataaactaggttaaatcaggaataaataaataccctgcacagaccaataacaagcagtgagattgaaattttaataaaaaattaccaacaaaaaaagtcgaggaacagatggagtcatggcagaattctagcaaactttcaaagaagaaattgtagcaatcctgttgacactatttcttgaggtattcttaagtaaatttaatctagttagtgttttacaaccttcttgtttttgaacattcatatctttctctaggttttgaaattatctgttattacctctttgcatatagtttctatgcct

SEQ ID NO: 258772 - DNA, 484 bp, Homo sapiens
gaaacaataagctggttctttgaaaagataaataaattgatagaccactaggaagattatccaaaaaaagtagagaaataatccaaataaactcaattagaaacaaaatagaagatattacaactgacaccacagaaatataaaagatcctacaaggatactatgaacgcctttaggcacataaactaggttaaatcaggaataaataaataccctgcacagaccaataacaagcagtgagattgaaattttaataaaaaattaccaacaaaaaaagtcgaggaacagatggagtcatggcagaattctagcaractttcaaagaagaaattgtagcaatcctgttgacactatttcttgaggtattcttaagtaaatttaatctagttagtgttttacaaccttcttgtttttgaacattcatatctttctctaggttttgaaattatctgttattacctctttgcatatagtttctatgcct

SEQ ID NO: 258773 - DNA, 492 bp, Homo sapiens
cagtttcctcccactgtatctctcccatgacacatggaaattatgggagctacagtttgagatttgggtggagatacaaagcttaaccatatcattccaatcctggccactcccaaatctcatgtcctcacatttcaaaactaatcatgccttccaaacagtccscaaagtcttaactaatttcagcattaactgaaaagtccacagtacaaagtctcaattgagacaaggcaagttccttcccctctgagcctgtaaaatcaaaagcaagttagttacttcctagatacaatgcggggtacaggcattcctagatacaataggaggtatatccattccagttgagataaatcgtccaaaacaaaagggttacagccacatgcaagtctgaaatctaatagagtagtaattaggccttaaagttccaaagtgatatcctttgacttcatgtcttacatctaggtcatgctgatgaaaaaggtaggttcccat

SEQ ID NO: 258774 - DNA, 549 bp, Homo sapiens
gacccatctcattattcaattacttctcactgggtctctctcacaacatgtgagaattatgagagctacaatttgagatatgggtggagacacagccaaactgtaccrctagctctataaaaagcaagaaatgtataaatcaagttataaatgtataaattttattataaactttaatgtattgtatcccattaatggtagatgaaacaaaactaatgaattttttaggattaaaaaataatctcagagccattagtttgacattttttcctttccccagccttcttctgaatatcactttcagcctgaagaccataaaaatggctttaagctgggcatggggcacttacccctatcccagcactttggaaggtcaaagcaggaggatgtcttgagctcagaagttatagatgagcctgggcaaaatagtgggatttcatctctacaaaaataaaaagaaaaagaaagaaataaatttaagattttccaaagtttatattattttatttttaaatcatgtttttcttggtctccaataaatgtgaacta

SEQ ID NO: 258775 - DNA, 549 bp, Homo sapiens
gacccatctcattattcaattacttctcactgggtctctctcacaacatgtgagaattatgagagctacaatttgagatatgggtggagacacagccaaactgtaccactagctctataaaaagcaagaaatgtataaatcaagttataaatgtataaattttattataaactttaatgtattgtatcccattaatggtagatgaaacaaaactaatgaattttttaggattaaaaaataatctcagagccattagtttgacattttttcctttccccagccttcttctgaatatcactttcagcctgaagaccataaaaatggctttaagctgggcatggggcacttacccctatcccagcactktggaaggtcaaagcaggaggatgtcttgagctcagaagttatagatgagcctgggcaaaatagtgggatttcatctctacaaaaataaaaagaaaaagaaagaaataaatttaagattttccaaagtttatattattttatttttaaatcatgtttttcttggtctccaataaatgtgaacta

SEQ ID NO: 258776 - DNA, 622 bp, Homo sapiens
gaagtcccacaataggccatctgcaaactgaagagcaaggaagccagtctgagtcccaaaacctcaaaagtagggaagccgacagtgcagccttcagtctgtggctgaaggcccaaaagcccctggaaaaccacttgtgtaggtccaaaagtccaaaagctgaagagcttggagtctgatgttcaaggacaggaagcatccagcacggagaaagatggatgygacaagacttaggcagtctagtccttccacattcttctgcctgcttttatcctagccatgttggcagatgattagagggtgcccacccatattgagggtgcatctgcgcctcctagttcactgactcaaatgttaatttttatttttggcaacaccctcacagacacacccagcaacaatactttgcatctttcaatccaatcgagttgacactcaatattcaccatcacttgggccctttgggagttacagtaattaggaatggattagctcatgaaggtggggctttcctgatgggaaagctttatagatagctctctttctcgctctctttcatgcctgcatggagaaaaggccatgtgaggacatagcaagaagggagccccctgcaagccaggaa

SEQ ID NO: 258777 - DNA, 549 bp, Homo sapiens
gacacggaattagaagaatatagagagcatcctctctcccatactgtattgctgcacaaaccagtctctaccataatacagtgccttacaactgaatatatttcatgacacagactctctgtggrcagtaatatgtatgagaattcaaagttaagaggggagacaaaagcaagaacgtgaggaacatgaagcatctgactccattgataaaggagtttagaagaaattacttaggtagattgtgagggtatggaagtccttggtaaggttttccttttaatgaaaagtagccccaaattatttttccttctaacacagagcagcttgtaaattcgagctgcagacatagatgcctgcagtcgtgccaatcatactcaagatggtggctccttttttcctcctctttgtcagccacctgtagagtaaggagcagacaagatggcccatgccaaagggaaaatttatatgcataataaaattagagtggggcagccagtcttccccatgcactatgtaaacgtcatacctgatggaaccaatctgtgaacc

SEQ ID NO: 258778 - DNA, 653 bp, Homo sapiens
gcaacagtgaccacttcctatctccttctacaaggtctgcattgccctaataccaaaatataaaaatatgtaaaaaaaaaaaaaaacaaacagcaatgtctcttatgaatatggatgyaaacaatcttaatataatagctatgtaaacccaacaatgtattagaatatacaccaccactaaatgagatatatttgaaagacatcgtttgctgcagtatttgaaacccaatcagtgcatcccactatatcgacagactgaataagaaaaactgtagaatcctatgcattaatgcagagaaaatattttctaaagacctaataatgatgcataatagaaaaatagaaaactaggaatagggaggaccttacccaacttattaacaatgatctatgtcaaacgtacagctcatacacttgatagtgaaagcttggtcgtgttcgtcctaagaatgggaaaaagacaaggatgtcctctatgcttattaacactgttgttaaaccgtaccagcaatcttaggtgtctggggggaaaaaaggcaacaaataaaatgtacatagattgaaaaaaaaaagaaataaaactctctgttcactctgttagagtggctaaaatatacaagttagtaccaaacgctggtgaggatgtgaagcaa

SEQ ID NO: 258779 - DNA, 653 bp, Homo sapiens
gcaacagtgaccacttcctatctccttctacaaggtctgcattgccctaataccaaaatataaaaatatgtaaaaaaaaaaaaaaacaaacagcaatgtctcttatgaatatggatgcaaacaatcttaatataatagctatgtaaacccaacaatgtattagaatatacaccaccactaaatgagatatatttgaaagacatcgtttgctgcagtatttgaaacccaatcagtgcatcccactatatcgacagactgaataagaaaaactgtagaatcctatgcattaatgcagagaaaatattttctaaagacctaataatgatgcataatagaaaaatagawaactaggaatagggaggaccttacccaacttattaacaatgatctatgtcaaacgtacagctcatacacttgatagtgaaagcttggtcgtgttcgtcctaagaatgggaaaaagacaaggatgtcctctatgcttattaacactgttgttaaaccgtaccagcaatcttaggtgtctggggggaaaaaaggcaacaaataaaatgtacatagattgaaaaaaaaaagaaataaaactctctgttcactctgttagagtggctaaaatatacaagttagtaccaaacgctggtgaggatgtgaagcaa

SEQ ID NO: 258780 - DNA, 653 bp, Homo sapiens
gcaacagtgaccacttcctatctccttctacaaggtctgcattgccctaataccaaaatataaaaatatgtaaaaaaaaaaaaaaacaaacagcaatgtctcttatgaatatggatgcaaacaatcttaatataatagctatgtaaacccaacaatgtattagaatatacaccaccactaaatgagatatatttgaaagacatcgtttgctgcagtatttgaaacccaatcagtgcatcccactatatcgacagactgaataagaaaaactgtagaatcctatgcattaatgcagagaaaatattttctaaagacctaataatgatgcataatagaaaaatagaaaactaggaatagggaggacctkacccaacttattaacaatgatctatgtcaaacgtacagctcatacacttgatagtgaaagcttggtcgtgttcgtcctaagaatgggaaaaagacaaggatgtcctctatgcttattaacactgttgttaaaccgtaccagcaatcttaggtgtctggggggaaaaaaggcaacaaataaaatgtacatagattgaaaaaaaaaagaaataaaactctctgttcactctgttagagtggctaaaatatacaagttagtaccaaacgctggtgaggatgtgaagcaa

SEQ ID NO: 258781 - DNA, 653 bp, Homo sapiens
gcaacagtgaccacttcctatctccttctacaaggtctgcattgccctaataccaaaatataaaaatatgtaaaaaaaaaaaaaaacaaacagcaatgtctcttatgaatatggatgcaaacaatcttaatataatagctatgtaaacccaacaatgtattagaatatacaccaccactaaatgagatatatttgaaagacatcgtttgctgcagtatttgaaacccaatcagtgcatcccactatatcgacagactgaataagaaaaactgtagaatcctatgcattaatgcagagaaaatattttctaaagacctaataatgatgcataatagaaaaatagaaaactaggaatagggaggaccttacccaacttattaacaatgatctatgtcaaacgtacagctcatacacttgatagtgaaagcytggtcgtgttcgtcctaagaatgggaaaaagacaaggatgtcctctatgcttattaacactgttgttaaaccgtaccagcaatcttaggtgtctggggggaaaaaaggcaacaaataaaatgtacatagattgaaaaaaaaaagaaataaaactctctgttcactctgttagagtggctaaaatatacaagttagtaccaaacgctggtgaggatgtgaagcaa

SEQ ID NO: 258782 - DNA, 522 bp, Homo sapiens
aactctctttcccacaaccattctaagtgttacttatttactgaatcctcaatcataaccttatgaactagataattttccttgttcaggtgcagcaaccaaggcacagagattttctcacctgaaatcacagaattacaataagttaatcgcaaaattacaataagttaagtaaatatattcagaatcctagacaggcccttttggaatgtcttgtgaatctacagacccctttcttaaccactataactataccttactaatttgcatacgcatattgtagaaaaacatacacccccccacacacacagtaagaaagagaaaaacagactgaaagaaaaattaaaatatatgtagaagctctatttccttggtttcacgtatttgattattgtgacatttcctatgtaagtgcaycccatgttctctagaagtggatgctaagtcagtgtttcagctgtaagactttattagtgatcggcacttatgagtgggggacaaggctgaacagagaaagaacat

SEQ ID NO: 258783 - DNA, 522 bp, Homo sapiens
aactctctttcccacaaccattctaagtgttacttatttactgaatcctcaatcataaccttatgaactagataattttccttgttcaggtgcagcaaccaaggcacagagattttctcacctgaaatcacagaattacaataagttaatcgcaaaattacaataagttaagtaaatatattcagaatcctagacaggcccttttggaatgtcttgtgaatctacagacccctttcttaaccactataactataccttactaatttgcatacgcatattgtagaaaaacatacacccccccacacacacagtaagaaagagaaaaacagactgaaagaaaaattaaaatatatgtagaagctctatttccttggtttcacgtatttgattattgtgacatttcctatgtaagtgcaccccatgttctctagaagtggatgctaagtcagwgtttcagctgtaagactttattagtgatcggcacttatgagtgggggacaaggctgaacagagaaagaacat

SEQ ID NO: 258784 - DNA, 522 bp, Homo sapiens
aactctctttcccacaaccattctaagtgttacttatttactgaatcctcaatcataaccttatgaactagataattttccttgttcaggtgcagcaaccaaggcacagagattttctcacctgaaatcacagaattacaataagttaatcgcaaaattacaataagttaagtaaatatattcagaatcctagacaggcccttttggaatgtcttgtgaatctacagacccctttcttaaccactataactataccttactaatttgcatacgcatattgtagaaaaacatacacccccccacacacacagtaagaaagagaaaaacagactgaaagaaaaattaaaatatatgtagaagctctatttccttggtttcacgtatttgattattgtgacatttcctatgtaagtgcaccccatgttctctagaagtggatgctaagtcagtgtttcagctgtaagactttattagtgatcrgcacttatgagtgggggacaaggctgaacagagaaagaacat

SEQ ID NO: 258785 - DNA, 602 bp, Homo sapiens
catattaaagaacaaactaagcccaaatttagttgaataatagaaatataataattagggttgaaataaatttttaaaatagacaaacaatagaaaaaattggtgacactaagatatgtttttttgaaaaattaatgaaaatggcaaacattaagttaatgasaggagagttaaataaagaaaacagaaataaaaagggatccaactactaagagcaaccatatgccaacaaattggacaacgtaggagacagtaataagttcctagaaacatacaatcaacaaaaactgaatcatgaagaattagaaaatctgaagaaaccaataactattaagtagattgaatcagtaagccaaacttcccaacaaaggacccaggaccagatgtcctcatagctgaatgctaccacattttaagaagaatcaaaagtaatcattctcaaatttttccaatatcaaagaggaggacacacttccaaacttattttataatgttcatataacactggtagtaaagccagtgacactacaagaatgaaaactgtaggccaacatttcagataaacacaaatgcaaaaatcctgatcaaaatactagccaacc

SEQ ID NO: 258786 - DNA, 571 bp, Homo sapiens
taagtggtctagctcagtggatcccacccccacgtagcccagcaagctaagatctcctggctagaaattstcgctgccagcacagctgtctgaagtagacctgggatgcttgagctaggcagggggagggatgaatgccattactaaggcttgagcaggaggtttttccctcacactgtaaacaaagccactgggaagtttgaactgtggggatcccaccacagctcagcaaagacacgtagccagactgcctctctagattcctcctctcttggaaaggcatctgtgaaagaaaagcagcagccccagtcatgggtttatagataaaactcccaactccctgagaaagagctgctgggggaaggggcggccatgggtgcaacttcagcagatgtaaacgttcctgcctgctggctctgaagaaagcagcagatctcccagcacagtgcttgacctctgctaagggacagacttcctcctcaagtgggtccctgatcccgtgcctccagactgaaagacaccccacagcaggggtcaacaaataacttagaaaggagagctccagctggca

SEQ ID NO: 258787 - DNA, 646 bp, Homo sapiens
cagatgtaaacgttcctgcctgctggctctgaagaaagcagcagatctcccagcacagtgcttgacctctgctaagggacagacttcctcctcaagtgggtccctgatcccgtgcctccagactgaaagacaccccacagcaggggtcaacaaataacttagaaaggagagctccagctggcatctggcatgtgcccctctgggacaaagcttccagaggaagaagcaggcagcaatcgttgctgttctgcagcctccgctggtgatacccacgcaaacagggtctggagtggacctcaagcaaatccagcagacctgcagcagacgggcctggcttttagaaggaaaactaacaaarggaaagcaatatcatcgacgtcaatgaaaaggaccttcacacaaaaaccccatcctgaggtcagcaacatcaaagaccaaaggtagataaaaccatgaatgaagaaaaactaccacaaaaaggctgaaaattccaaaaaccagaatgcctcttttccaaagggtcacaactccttgtcagcaagggaacaaaactggatggagaatgagtttgacggattgacagaagtaggcttcagaacgtgggtaataacaaactactccgagctaaaggagcatatactaaccc

SEQ ID NO: 258788 - DNA, 547 bp, Homo sapiens
tgaaaggcacactgtaggtatgcacgatcacttctcctggagtcccagcaggaaagagctagagtttatagacactctccagagagagatcttaaggccaaattagagaaaattacaactatcaatatatgtaacctggaataatcattcaaccgttagttgtgcaacttagttaagttacttaawtactttgataatgaaaagaataatacctaactggaggagttgtgaggactacaaattatatttctaacgcagttaacacattgtctggcatgttgaagatgatcaataaacaaatacatctataattctagttctcattgtgtaggttacttttttatcatcaatctatttgtaatagtaattaagctctctgagtggttgaaatctcaatttttaaaactcgaaaggggcagaaactctctgattctaatatatcaaactcctatgcttagattggtcaagagcacatcatatagcttaaaaattctgtctttataagattaattgtgtgtatactgagtttaagaacaaaagtaatgcc

SEQ ID NO: 258789 - DNA, 573 bp, Homo sapiens
cctccctccctgcttccccccaccaaataataataaataataataataataataataataatgcactgcttatttgattgctcaaaaggttctggctttggccattgtgagctctttcagttagtgcctgtgtccctytaacatacctctatattgtgattttggtgaattcttccttatctaaccttacaagatactctatactcattgccggacccactcctggaattaattatttagtaaggaacccaggctccgtttattagagaatcatattagaaaccagtatctgagagctggatgtgctgctactactgcactgtccttgcctctaggcctctcacttaacagagttaagatgatatatctctgtatgatgtatgtaattttgtaatgtttgtatatactcatatctataaatatttctatattaagctaaacgtgttcatactgatgttttcaactctaatacattaccatatgaattattattttctttttgtttgtctaacacctcacatttcaacaatgagaagctttccttctaccatctgttatcactttactttgttg

SEQ ID NO: 258790 - DNA, 573 bp, Homo sapiens
cctccctccctgcttccccccaccaaataataataaataataataataataataataataatgcactgcttatttgattgctcaaaaggttctggctttggccattgtgagctctttcagttagtgcctgtgtccctttaacatacctctatattgtgattttggtgaattcttccttatctaaccttacaagatactctatactcattgccggacccactcctggaattaattatttagtaaggaacccaggctccgtttattagagaatyatattagaaaccagtatctgagagctggatgtgctgctactactgcactgtccttgcctctaggcctctcacttaacagagttaagatgatatatctctgtatgatgtatgtaattttgtaatgtttgtatatactcatatctataaatatttctatattaagctaaacgtgttcatactgatgttttcaactctaatacattaccatatgaattattattttctttttgtttgtctaacacctcacatttcaacaatgagaagctttccttctaccatctgttatcactttactttgttg

SEQ ID NO: 258791 - DNA, 573 bp, Homo sapiens
cctccctccctgcttccccccaccaaataataataaataataataataataataataataatgcactgcttatttgattgctcaaaaggttctggctttggccattgtgagctctttcagttagtgcctgtgtccctttaacatacctctatattgtgattttggtgaattcttccttatctaaccttacaagatactctatactcattgccggacccactcctggaattaattatttagtaaggaacccaggctccgtttattagagaatcatattagaaaccagtatctsagagctggatgtgctgctactactgcactgtccttgcctctaggcctctcacttaacagagttaagatgatatatctctgtatgatgtatgtaattttgtaatgtttgtatatactcatatctataaatatttctatattaagctaaacgtgttcatactgatgttttcaactctaatacattaccatatgaattattattttctttttgtttgtctaacacctcacatttcaacaatgagaagctttccttctaccatctgttatcactttactttgttg

SEQ ID NO: 258792 - DNA, 573 bp, Homo sapiens
cctccctccctgcttccccccaccaaataataataaataataataataataataataataatgcactgcttatttgattgctcaaaaggttctggctttggccattgtgagctctttcagttagtgcctgtgtccctttaacatacctctatattgtgattttggtgaattcttccttatctaaccttacaagatactctatactcattgccggacccactcctggaattaattatttagtaaggaacccaggctccgtttattagagaatcatattagaaaccagtatctgagagctggatgtgctgctactactgcactgtccttgcctctaggcctctcacttaacagagttaagatgatatatctctgtatgatgtatrtaattttgtaatgtttgtatatactcatatctataaatatttctatattaagctaaacgtgttcatactgatgttttcaactctaatacattaccatatgaattattattttctttttgtttgtctaacacctcacatttcaacaatgagaagctttccttctaccatctgttatcactttactttgttg

SEQ ID NO: 258793 - DNA, 611 bp, Homo sapiens
gcacatatgtgcgggtttgttatatatgtaaaytgcatatgtagaggtttggtgtacaaactgtattgtcacccaaggaatgagcatagttcctgataggtattaggtttttgccattactttcaatggcaaaaactgcaattatttttgcaccaacctaaaagattttagatctatgtactcctccctgcttccactctgaagtaggcccttgtgtgtatttttcttctttgtgtccatgtgtacttaatatttacctcccactaataagtgataacatgtggtatttggttttctgttcctacattaattcacttaggagaatggcctctaacaaccttgcatcccaggagtaaagcctacttgaatagcgtggattagctttttgatgtgctgcagggttcaatttgttggtattttttttttttttttttttagtatttttgctattctatgttcatcaggcatattggcccacagctttcctttgtcgctttgtctctgtcagattttagtgtcagaacgatgctgtccttatagaatgagctggggaggagtttctccttttcaattttttctgcaaagtttcattataattgataccagccctt

SEQ ID NO: 258794 - DNA, 565 bp, Homo sapiens
ttacaattttaaatatatatgcacccaacatgggaccacacaaatacaggaagtaaatattattagtgctaaagaaagagataggcccaaatacaataatagctgaaagctttaacaccccattttcagcaatgggcaatcttccaaacagaaaataaacaaaagaacatcagacttaatctgcactatagaccaaatggatctaacaaatatttacaggagagttcatccaagagatacaaatacacagtatttttctcagtgcatggaccattctcaaggggggaccatatgttaggttaccaaacaagtattaaactactctacaaaattgaaataatatgcagcatcatccttgaccatgatgaaatgaaactaaaaattagtaacaataaatatttaggaaactacacaaatgcaaggaaattaaaccatatgcttttaaattagcagtaggtcaataaagaaattaagaagcygataaaaaatttattgaaataaatgataatgaaaaaaatatcaaaacctatgggatagagcaaaagcagtattcagagggaagttt

SEQ ID NO: 258795 - DNA, 490 bp, Homo sapiens
agcacaataaaatagttaaagaaccaatattaaggaacattcaggatatagacagacatcatgcattatctcacaagctgttagtctagtacagatgacttagagaggaagtcaaggtaaggtaaaaggtattccaagatcgctgatctctctaacaacgccaatattgtagaaaaagagtctggtatagtatctacccttactatctattataactgatatcaacattagatatacaatgtaatgctttgtaaaggcaggcagaaaataaaaataagttgaaagatcaaccttctctctgggtaacatgggatcagaagaacagcttaaaagtttagagatgtttttagcaaaacaggaccagagaacccmcagacaatagtatttctcctagtaaaaaaaaataaaggatatcagtaggctatttctgaaaaagatgtctgttaaaaataccttctattctccgttctcccagtgtataactcatgag

SEQ ID NO: 258796 - DNA, 483 bp, Homo sapiens
gacacctccaagaaacaaaataattatccacctatatatcttaataaaaaaacttcaaaatttcagataaagaatataaaatatgtattcaatgatgcacaatgggaagcaagagaaattgaaactaataccagaaagttagaaaattaattgagtttgtgaatgagaactttaccaaggagacagatattttaaaaacaagtaaacaaacaataaacaaaaaattctgaaattaacaaatttattgataataatacaaaatacatttgaaagcttcaatcatagactagactgagcagaagaataaatttcagaactaggagagaagtattttgaaataatctagttagaggaaaataaagaaaaaaatcatagaaatgtcaggaaacaacagatgctggagaggatgtggagaaataggaacactttgacactgttggtggsactgtaaactagttcaaccattgtagaagtcagtgtggc

SEQ ID NO: 258797 - DNA, 591 bp, Homo sapiens
ttggcctcataaaatgtgtttagaaaatgccaaagccaagtatgtatccataataatttaaaatttcaaaaaattaaagaaaatcaaaataaaatgagtttgaaaatattccctcttcttcagttttctggaaaggtttgagaactattggtattagttttccaaatgtttggtagaactcagctgcgaagctgaattctttgatggcagactattactgattcaatctctttattcattattagtctgcttaggtgttttatttcttcatgattcagctttggtgggttgtacaggtgtagaaatgtatccatttcttctagattatccatttttggtgtctaaatgtttacaatagtttcctataaacctttgtatttctgtggtatcagttgtaatatctctactttcattctaattttatttatgtgttattttttcctagttaggttagctaagggtttgtctattttatcttttatctaaatgaactcttagttgtrttggtttctattgcttttctagactctatttcatttagaaatagagtctgtgatctttgttatttccttcttcctactaattttgggc

SEQ ID NO: 258798 - DNA, 580 bp, Homo sapiens
cactggcagaggagcagagcagtgtggcagagaaggacagaagagaagaagcgtctgaacatctaagagacaactggatggtcagaaaggagttcggctctttctgagaaagatgattttcccactccaycctgtttccagttccccatcccactgagagccacctccatcactcaaaacctccacattcaccatccttcaagtccatgtgacctgattcttcctgggcattagacaaagacccaagtaccaaaagggcagggtgtaaagggctgtcaccctgactctccactgagctgattaacacttagctgttgtggacagcaactgctaaaagagcattaattgtaacacacccctggatgctacaatggggctgaagcctagaagccctcgccctggccctaccacccacttgcctgcatgctccccctcctgcaagggctttgaacacggaggccaggtaagcaagccacacccctgttgtaagtcatgcgaaggggtccagggtcctctcgcatctcacaaggatcttcttcatatggcagcaggagaaagaagtgcaggtgggtgaaatgtc

SEQ ID NO: 258799 - DNA, 626 bp, Homo sapiens
aacatgccaagcacaatggctcacacctataatcctataatcccagcactttgggaagctgaggtgggtgaatttcttgagcccaacagttcgagacaagcctgggcaacatgaagaaaccttatctatacaaaatatacaaaaatcagctgggtatgaagcatgcatctgtggtcccagctacttgaggagctgaagtgggaggattgcttgagcccaggaggtggaggctgcagtgagctgagatcacacccctgcactccagcctggatgacagagcaagaccctgtctcaaaaatacaaacaacaacaacaacaaaacactttgaaatctatagagtgcaaataaacactaggatgatatcagtatgatactagtgatagaggcaagasacagccaaatgcctgggcaaatagggaaaggccccccagggaatctctgacctgccccacaagtatatacaccagatgtctttgtacagataagggaaccttcacggggtcttgcccaggcctgccccacaatggactggagacccccatgccttggggggaacaggggggagcccctaagaactcacaccctttgcaggggaagagtctggcctcttctgctcatgggtggt

SEQ ID NO: 258800 - DNA, 507 bp, Homo sapiens
aaattgtttccaagtaacttaactacatcccagtaaaggcataaaagtattgtagggagacaaatggaacagaatagagagcccagaaataaagctgcacacctaaaatcatctaattttctatacagccaacaaaaacaagcaatggggaaaggactccctattcaataaacagtgctgtgataactggctagccatatgcagaagaatgaaatggacctgtacatttcaccataaacaaaaattaactcaaaatggattaaagayctaaatgtaagacctcaaaccataaaaatcctatgagaaaacctaggaaatactattctggatattggccttggcaagcaatttaagtcctcaaaaaaaattgcaacaaaaacaaaaattgacatgtgggacctagtaaaactaagcttctgcacagcaaaagaagctatcagcagactaaataggcaacccatagaacaggaaaaaaataacattcacaaactacacatctaacaaaag

SEQ ID NO: 258801 - DNA, 591 bp, Homo sapiens
taaagatattataaatccaggtagtatcattgtagcagaaaaacaaaaacaaaaatgaagagcagaaataggcagagatagacagaaacccagtggatagaagtatttcattccctcagaggcttagagagaggggtaagggagaagtagacataaagaagtaggaargggaggatgtgaaaaagagagggagcctccatttcatgaatgggagggtggggttcttccctgcccttccagatcttcaggaaattgagaaaagaaaggaaaccagatggccctttccctcaccctccacatccatcatcaaatcccatcagatccattggagaatactgttcatgcctgcctcctttgccccactttgtgcccacaatgccagtcctccctggccacagggtagctctccgccaactcatcacctccaccctggattcctgcaggcatctcccagctaggctgtcggtcctaccaccccagtctgttctgcacctagaagcaccactcgttttccaaaaacaacatctaatcttgccatctccatcttttgtcttcgaagtaatattcacattccttatcctagcttagaaa

SEQ ID NO: 258802 - DNA, 477 bp, Homo sapiens
ctcaccccatcacccatggcaacccctctctatccaacaactctgctttatttgtcttcacagtacttaattctgacacactagtatattaaccatttactattgtctgtctttccctctataatataagctccacaagggcaggggcgttatatgatttaaaactatatccccactagaacctgacacatgggaggtgcacaataaatatttgttgaatgaaggagtaatattgagttatctcaacaaccaagccaaatagagattatttccattcacagttgacaawacagattgtctaaaaacatgaattactacttgctcaaaatcgtgcaatttgtaagtgatgaagccctgattcaaactcaaggttttatggtccccagtacaggtccctgctcacagagtagaacacacagttcctaaaaaggcctaaagcaggaggagaatcattactaattcagaatgagtttactt

SEQ ID NO: 258803 - DNA, 580 bp, Homo sapiens
tccctgcaagggtaaaataagagagcctgtcaaatgcctaactgaaattcagacacatatgtcttcagcattttccttgtctcccgctctagtaattttatcaaaagagaaaatgagttaggtctggcttgaattgttcatcccacatccatgctggctccatattgatctcatttgattttctcaattcctgccttgcccacaatcaacacagaatttaaaagagtttaattaatgaaacccacactctcctgcttctcatcttttaagtatattaactcaaccttagcttgtctctaccttctaatgcctttccttttctccagttttcctcaatgcaaattctcatgggtttagccacttcgttttgtgatttctttcagaagcctgagatggaattcacctggtcaggagcactttgcttgtttaatatagttggctgccatttttgagcatgattctgccccatcttgttctttaattctacctttgaggttcattcttgccttttggggttttctggcatttctctttacagaagatacamacaaaacaggaactgatatcctaggctttatca

SEQ ID NO: 258804 - DNA, 563 bp, Homo sapiens
tcaactaataaattagtaggacttttgccctctttctagattccttttatgctggttcatgaagatatactcagtcatccaacacctctttagtttgtagctataataatctatgyctgcatattaattttaagataatgaaataagtgttaaacacaagaaacaaatatataccattatagaattttagttaattatttaaaataataatttaaataagaatttccttttatgttgcaaacaaataaaatgcttttacattttttaaactgtcttttattttaggaagaaatcttgtattacatacttatcactgtcatcttcccattgaggtcccattaatattaaaaggagttcagttcaatacattaacatctcagtgagaatctgtctcgttataattatcactgaccttgtcaatttaaaattttagcctgagtcaaaattaaatctcagctattagaaacaaagtaaaagcaaaatgaaaggcagattattcctaattaaaggcataagaagaaatcaatatgttaactgtggaacttgtatgtaaacattacatg

SEQ ID NO: 258805 - DNA, 531 bp, Homo sapiens
ccttcagaatattgaaatggtgtataccactttcagttatcttatatttaaatttatcttaataacatgtttcataattatctacagagcttwtaaaattagagatacaatggtaactcctagaaattctgattcagtgagtatgagtgaatctcatgcctgtttgttatttaaaaatgacactaatagttctgattcaccctcagggttaagaacctctgttatgtgttatagaggatttaagtacatccactttaatctatgaatttgaaccctaaatccagttgcagtttcaataattctctctaattgcactcagaattgttattttggcaagactttggggacacatatattccatcagcacacaaatcttgcattgacctcaatgacatttaataaagctacaatttccaaccattgctcctagaccagataaataaagtcttgcagaaaagctgctgcaaagctatctactgacattgacaatttaactgaattccaggttttagaaacaagtagagttcagca

SEQ ID NO: 258806 - DNA, 577 bp, Homo sapiens
ccaaccctgtgtatgtatcaggtaccatttttcctaaccctttgtgtggttgtttttcccacttttggtattttcgtaaccctcagctgtgaagtaaactcaattcttggctgaatgcttgaaagttacataagcagatctccagtgttacctctgtgaaattaccacctccatatttgaacagctttaatctctctagatgctcagcttcacctcctcaattcagagtctgttggacttstctgtactgcagcctaaaaattcttctcgtcatattaaatgttctaattattgagagcttaactattttatttcccatctctcagagacatattcaatgttttaaaaccattgtttcatatgtttctatttttgttttttcagaagggaggacagatcttctcccttttactccatctttgtttaaaataatttatatttgaactcattaaaaaaagaacttttatttttgaactaggggtacctgtgaaggtttgttacattggtaaactcgtgtcatgagggtttgttttatagattatttcatcaaccagatattaagctcagtactcagtaa

SEQ ID NO: 258807 - DNA, 538 bp, Homo sapiens
ttgtcctggtaaagtctcctgggtgttatgcagatagagtgaatcaaaccttagaaatataataacataatacataagaaatctagaaagtaagaacttgactttattggggtttcttgcagtggagtaaaatttgcaaggagcaattgaagaagtgaggtgtgctggaggaactgtatgtttagtaattgagtttaagcccataacaataatctttatttcacttaagtattttccttttgaactctgaaaaatacatagtacagatttaattgttcatcccatttataaacaattatcacagctaatatttaaaaraaatttgtgtgcattgtacagtcaagtgtggagtctggaggagcaggaaacaacatttcatcaagggagatccattctatttagatatagcagcatatggagtagcagatcagacggatcaaggagttttacttgtggtaatgtcataatataacataaggtgtgacaaaataaattcctagacaatcaactgccacatttgaattattataataaaaaa

SEQ ID NO: 258808 - DNA, 403 bp, Homo sapiens
ttaactattttatttcccatctctcagagacatattcaatgttttaaaaccattgtttcatatgtttctatttttgttttttcagaagggaggacagatcttctcccttttactccatctttgtttaaaataatttatatttgaactcattaaaaaaagaacttttatttttgaactaggggtacctgtgaaggtttgttacattggtaaactcgtgtcatgagggtttgttttatagattatttcatcaaccagatattaagctcagtactcagtaaatatcttctttgtttctctcyctcctcctatcctccaccctcaagtagaccccaggatctgttgttcccttcttcatgttcatgagttctcatcatttaactcccacttataaatgagaacactc

SEQ ID NO: 258809 - DNA, 595 bp, Homo sapiens
ggccacaaaacaactctcaatacatataaaagaatctgggtcacctaaaatgatttctggctacaatgaaattaaattagatatcaataacaaaataattggaataagtaaataaaattttgaaataactcattggttaatgagraaatcaagagagaaattaaacatattttgaaatgaatgagaacaaaacacaatatatcaatatttctgcaatgtcattaaagcaattcttaggggagaatttgtatcattaaatgttgatgatagaaaagaagaaaggaactacaatcagtagcctcagcttctagctcaagaagctagaaaaagaaagaaaattaaacctgaataagaaaagaggaaataatgaagatcagaaagaaatcagtgatttggaacacagtaaaacagtagagaaaattaatgaaatataaagttatttcttcaagaagatcaataaagttggtaaaccactctcctattcaaaaaaaaagacagaaattataataacaagaaagatagaagtaagttatagattctacaaaccataaaagataagcaactttatccaataaaactgaaaaattaaatgaaa

SEQ ID NO: 258810 - DNA, 597 bp, Homo sapiens
ttcaaactgactgcagaaatttgcataagtaatgaggagccaaatgtgaatcaccaagaaaatggggcaaatgtctcctgtgcatgtcggagacctttgcaacagctccctgatctcaggcctggaggcctactagggaaaaatacttttgtggcagggttcagggccccccagtgtgtgcagtcttgggacttggtcccctgtgacgcagccaccacagccatggctaaaaggggccaaggtatagctcaggccattgcttcagagggtacaagccccaagccttggagcttccacatggtgtttgtctaggtatgcagaagacaagaattgaggtttgggaactaccgcctagatttcagaggatgtatgaaaattcytgaatgtccagtcaaaggttgctgtatgggtggagctttcatgtagaatctctgctagggcagtgcacaagggaaatgtggggttagagctcccatacagagtccccactagaccactgccttggagagctatgtaaagaggaccaccatccttcagacaccagaacgatagatccactgagaggttgcattaggcacttggaaaagctgcagaaat

SEQ ID NO: 258811 - DNA, 597 bp, Homo sapiens
ttcaaactgactgcagaaatttgcataagtaatgaggagccaaatgtgaatcaccaagaaaatggggcaaatgtctcctgtgcatgtcggagacctttgcaacagctccctgatctcaggcctggaggcctactagggaaaaatacttttgtggcagggttcagggccccccagtgtgtgcagtcttgggacttggtcccctgtgacgcagccaccacagccatggctaaaaggggccaaggtatagctcaggccattgcttcagagggtacaagccccaagccttggagcttccacatggtgtttgtctaggtatgcagaagacaagaattgaggtttgggaactaccgcctagatttcagaggatgtatgaaaattcttgaatgtccagtcaaaggttgctgtatgggtggagctttcatgtagaatctctgctagggcagtgcasaagggaaatgtggggttagagctcccatacagagtccccactagaccactgccttggagagctatgtaaagaggaccaccatccttcagacaccagaacgatagatccactgagaggttgcattaggcacttggaaaagctgcagaaat

SEQ ID NO: 258812 - DNA, 598 bp, Homo sapiens
ctgtagtgaattaagactttgagggactgttaggaaggcatgattggttttcaaatgtggaagggacatgagacatgggaggggccatgggcagaatgatatggttagactttgtactcccacccaagtctcatcttgaattgtaatccccagttgttgagggaagaatctggtgagaggtgattggattatgggtacagttttcccctatactgttctcatgatagtgagagaattctcatgagatctgatagttttataaggggctattccccctttgctttctcttctctcttctgacatcatgtgaagaagatccttgcttccccttcaccttccaccatgattgtaagtttcctgaggactccacagctatgcagaagtctgagtcaattaaacctctttgctttagaaattacccagtctcaggtatgtctttatagcagtgtgagaatggactaatacaggttgcaatccttatttctgacaaaacaaactttaaaccaacgaagatttttttwaaaaagaaaggcattacgtaatggtaaagggttcaattcaataagaagagttaactatcttaaaaatacatgcaagc

SEQ ID NO: 258813 - DNA, 604 bp, Homo sapiens
gaatgattcttgagtaaataatgaaattaatacagaaatcagtaagttctcaaaaactaatgagaacaaagagacaatgtaccagaatctttgggacacagctatagcaaagttaagagggaattttatagcgctaaatgcccacatcaaaaagctaaaaatatctcaagttaaatacctaacatctcaactaaaagaactagagaaccaagcacagacaaaccccaaggctagcagaagacaaacaataaccaagatcagagctgaactgwaggaactaagactcaaaaaatcaatgaatctaatagttttttaaataataaaatagatacactgctatctagaataatgaagaagaaaagagagaagattcaaataaacacaatcagaaatgataaggggtatatcatcacttaccccacaaaaatacaaacagccatcagagaatactgtaaacacctctatacatatataacttagaaaatctagaagacattgataaattcctggacacatatcccctcccaacactgaatcaggaagaaattaaatccctgaatacaccaataatgagttctcaaactgagggagcaatatatagcct

SEQ ID NO: 258814 - DNA, 521 bp, Homo sapiens
gggacaaggatggagctggaagctaatatcctcagcaaactaatacaggatgagaaaaccaaacagccatatgttctcacttagtagtggtacagccactttgggaaaacgtttggtagtttttaaaaagttaaatakacatgcattatataatctagtctttctacccttaggtatttatccaagatataagacaacacacctgtacaaaaacttgtgcatgaatgttcatagcagctttattgtaatagcaaaaaaatgaaaaaaaaaaagtcaaattttcatctataggttaatgaataaacaaattttgacatatccacatactgggatatttcttagaaatataaacgaatgaactatttgaacatgcagaaacattggtgaatttcaaaataattatgcagatttaagcagacagacaaaaatatgatgtaaaatctcacttacataaaattttaaaacacacagtgctttgggaggctgaggagagaggatcacttgaggttcatagttgcaga

SEQ ID NO: 258815 - DNA, 521 bp, Homo sapiens
gggacaaggatggagctggaagctaatatcctcagcaaactaatacaggatgagaaaaccaaacagccatatgttctcacttagtagtggtacagccactttgggaaaacgtttggtagtttttaaaaagttaaatatacatgcattatataatctagtctttctacccttaggtatttatccaagatataagacaacacacctgtacaaaaacttgtgcatgaatgttcatagcagctttattgtaatagcaaaaaaatgaaaaaaaaaaagtcaaattttcatctataggttaatgaataaacaaattttgacatatccacatactgggatatttyttagaaatataaacgaatgaactatttgaacatgcagaaacattggtgaatttcaaaataattatgcagatttaagcagacagacaaaaatatgatgtaaaatctcacttacataaaattttaaaacacacagtgctttgggaggctgaggagagaggatcacttgaggttcatagttgcaga

SEQ ID NO: 258816 - DNA, 603 bp, Homo sapiens
aatggaccccggcagaagcattctgctgaatgtccatctccagtgtggtcacagagcataacagacatggtagattctctcaaaaattaaagccagtaattgcaagactggctggtctagaaactaagttcactcttaggagaatgtttcatctcatttctgtcctgcrtaactggatatgtgctgtggcctggtgactaccatgttgtttcctataggccctgttttccaaatgaagttatgtctttcaacattctgacacttgaggaatctgagtgtggatatctcgatgtctatcctagtccaagtttattgattttcatagatatgtaaattaatgtgtttcatcatatttgagaagttttcagctattatttctcccaaaactttttctgctgtttttttctccaacattctgattcttgaggaatcggagtgtggatagctcagtgtctaccctagttcaagtttattgatttttgtagatatgtaaatcaatgtgtttcatcatagttgagaagttttcagctattatttctcccaaaactttttctgcttttttccctctcctctccttcttgtattcctgttatatgttgccta

SEQ ID NO: 258817 - DNA, 603 bp, Homo sapiens
aatggaccccggcagaagcattctgctgaatgtccatctccagtgtggtcacagagcataacagacatggtagattctctcaaaaattaaagccagtaattgcaagactggctggtctagaaactaagttcactcttaggagaatgtttcatctcatttctgtcctgcgtaactggatatgtgctgtggcctggtgactaccatgttgtttcctataggccctgttttccaaatgaagttatgtctttcaacattctgacacttgaggaatctgagkgtggatatctcgatgtctatcctagtccaagtttattgattttcatagatatgtaaattaatgtgtttcatcatatttgagaagttttcagctattatttctcccaaaactttttctgctgtttttttctccaacattctgattcttgaggaatcggagtgtggatagctcagtgtctaccctagttcaagtttattgatttttgtagatatgtaaatcaatgtgtttcatcatagttgagaagttttcagctattatttctcccaaaactttttctgcttttttccctctcctctccttcttgtattcctgttatatgttgccta

SEQ ID NO: 258818 - DNA, 558 bp, Homo sapiens
tatgtgtgaggtgttttgagacctaaaacatgaaataaagattcttgaaaataggagtagtggtttctgacttcaaagagtaaatttattaggcttaaatctcttattttcttcaaatcagtccttaaaaagattctcaggcttttaatggaaatcatcaaaataattaaattgcgcacacatgaagattaaagtcagarccaacagagaagcaggagaaacatttcagcaaatgcagtaggagaaaaaaaaacaagacataagatctgttcacagaacacttcccaaaagttacagatctgctccaggcaaatagcaacagagaatcacccttaaatcttttagaagattaggaccaataacaaattaagcaataaaaacacaaggaacacttgcagctctctgtactcctctaaatcaaacaacaacagcagcagcagtgtagcttgcattaatgtttgttgaatcaaacagtttttcttctctctgctctgctttgtactttgagctttgtagacagctgatcattttctgttgctattctctgatgtatttagc

SEQ ID NO: 258819 - DNA, 549 bp, Homo sapiens
taattaaacattctcattgtttaagccacttttggctggtattgtatttcttgtagtcaaaagtattctgaaaaaagagttttgtgatgcttcaagcatgctgaaaaccaaacttagagagaacatgaatcagaattgcaatgttggaatcttggattgggagaaccaagaaagccataaagactatgaggagactgataagatagatcatattaaaacagctcaactggtatcaataattcaaggatgctcctaattaattctgttctcaatttagttggaatttttatttcttccaaaagctggaatatattatgacttattaactagctttaagcagattccacttgccttgctttgaatatcttttccctacagattctagatcctaakttttagttttcactgattttttcatactcatcaaagtataattagctccttcacacaacctggactctccaaagaaaagtaatattattacaataaagagagaaacccttttcttatatggagcattgaaaaacaaaaataaaattggcttaaaat

SEQ ID NO: 258820 - DNA, 594 bp, Homo sapiens
tatgggacactattaagtaaacaaatacttgcatcatgaaatttcaagagggagaagagatggagaaaacctgtttaacaaaatagtagctaaaattgtccctagttttgacacagatacgaacatttagatccaggaaatccaaaattcccccaatagattaaacccaaaattgtcctctcagaggcacattataataaaactgtcaaaatccaaagacaaagagagaattgtaaaagcagcaaaaggaaaatatcaagttgcatataaaagaattctcattagattatcaacagatttagcaaaaaaatgataattatgatcatgaaaataggtgaaagtgtaaaactcactagtasaggtaaattcataacaaaattctgaatatgacagaactataatgtaggtatgtaaatctttcaaatttgtattatgaaggctaaaagtcaaaataataaaatataactatagctacaataagttgttaagaaaaatataacacaaagatacaaattaaggcaaaaaaaaagttgtggacaaaatagtaaaaatttacagtatttttatgtgaccaaagttaagttgttgttggct

SEQ ID NO: 258821 - DNA, 642 bp, Homo sapiens
gtagcattttatattctaatagtgaactatctgagaaagaaatcaagaaaacaatcccaattacaaaagctacaataatctaaggtacctagcaattagtttatctaagcaggtgaaagattagtaaactaaaaactacaaaaccttggtgaaaaaaaatcgaagaagatacaaataaatggaaagatatcctgcgttctcaattggaaaaaataatactattaaaatgtctatactacccaaagcgatctatatcttcaatgtaatccctatcatattccaatgacattccacatagaaatagaaaaaagaaamtaagattcatatggaactataaaagatcccaaatagccaaagcaattatgagaaccaaatttaaaacttgaaagtataataccacttgacttcaatatataatgcacagctacagcaaccaaaacatatatattgaagatatatttatgtattgacataaaagacacatagactaatggaaaaaaaatagcccagaaataattctacacttctacagcaactaatttttgacaaagctgtcaaaaacacactttggagaaagcacagtctttttaataaatggttctgagaaaattcaatgtccacatgcagaagaatgacaatgga

SEQ ID NO: 258822 - DNA, 521 bp, Homo sapiens
aggcaacaaaagcaaaagtagacacctgggactgtatcaatctaaaaaagctactggacatcaaaagaaacaaccaacagagtaaggatacaaattatagaatgagataaaatatttgcaaactacatatctggcaaacggttaatatccagaacgtataagaaactcaaacaattcaatagcaaataataataacaatccgattaaaaatgggcaaaaaaataaacatttctaaaagaacacatacaaatggccaacagacacgcagaaaaaaaattcagcctaactaatcattagggaaatrcaaataaaaacaataaaatatcacttcattccagttagaatggctattacaaaaaagacaaataataaataaatgttggaaaggatgtggagcaaagggttcccttgtccacaggtggtgggaatgtaaattagtacattcctcaaaaaattgaaacaagaactaccatctgatccaacaatcccactgcggagtatatatctgaagaaaatgaaat

SEQ ID NO: 258823 - DNA, 575 bp, Homo sapiens
ttagaatggctattacaaaaaagacaaataataaataaatgttggaaaggatgtggagcaaagggttcccttgtccacaggtggtgggaatgtaaattagtacattmctcaaaaaattgaaacaagaactaccatctgatccaacaatcccactgcggagtatatatctgaagaaaatgaaatcagtatgtagaagggatatctgtactcccaggaccattgtagtactattcataatagccaagatattaatagaatcaacttaagtgtccaacaatggataaatggatgaagaaaacgtggtatatatacacagtagaatgctatttaacattaaaaagaatgaaattctgccatttgtgacaatatggatgaagttggaggatattatgttaagtgaaataagccagacacagaaagacaaatacagcatgttctccctcatatagggaatctaagaatattaaagtcataaataaaacagctcttacctttccagagaccgggcaagaggagtggagggatggggagagcatggccaatgtgtacaaagttacaagtacaaaggaataata

SEQ ID NO: 258824 - DNA, 461 bp, Homo sapiens
atccaacaatcccactgcggagtatatatctgaagaaaatgaaatcagtatgtagaagggatatctgtactcccaggaccattgtagtactattcataatagccaagatattaatagaatcaacttaagtgtccaacaatggataaatggatgaagaaaacgtggtatatatacacagtagaatgctatttaacattaaaaagaatgaaattctgycatttgtgacaatatggatgaagttggaggatattatgttaagtgaaataagccagacacagaaagacaaatacagcatgttctccctcatatagggaatctaagaatattaaagtcataaataaaacagctcttacctttccagagaccgggcaagaggagtggagggatggggagagcatggccaatgtgtacaaagttacaagtacaaaggaataataagttctgttgtcctatcgcacatt

SEQ ID NO: 258825 - DNA, 519 bp, Homo sapiens
aagattagctgggcgtggtggcaggtacctataatcccagctacatggcaggctgaggcaggaaggaggcrgagggtgcagtgagcccagattgtgccattgcactccagcctgggcaaaaagagtgaaactgtctcaaaaataaaaaaaaagaaaagaaaagaaaagaaaaacttatgataatatagcccaatagtccaatattacttaagaataaaacagaaatatatcacgtcatatattttgtcatataaatttctaaaacatatgttcatagaaaaaatgaaaagctttctatcttaaatggtgagattaaaggccatttttatatttcttaacaataatcatgttctacttcagaaaaatgtgttatttcaacgaaaaggcttatgtacttctagagatggaaaagatggaacttggagttaagtagctataaaaaacatttttgttttaattaagtactaaccaacaatcattcaatagcaaatagtctactgtggcccttttaataccaac

SEQ ID NO: 258826 - DNA, 462 bp, Homo sapiens
actttcctcaaaatataacataagaaatttggtctttagtgcagtttatgaaaaagttgagatttttgtcttttttttttttttttttttttttttacttcagggaatttagctttaacttaaaagccctttcactggtgaaaattgattttttttcttaatctagaggaaacgaaatatgtgtagcccagcagaggagggagaggaggtcaaggggtaaacagtttgatgcggcacatyttgagctcaatcctgggcatgtgatctctcacacttatgtcctcccaacagggagaatccagcagtggtttaggcttaaaatgctgagaaaaacttcaaacaaatgtctaagagagtccctagaacatttaaacttttctgtcacagtctttgctgttcaattattttttttttaacaggatagatgtacactggcaactcagctgaaattttctttatggt

SEQ ID NO: 258827 - DNA, 592 bp, Homo sapiens
ctttgaagtcaggtattgacttctcctctctagcaaagtcctaaattacattgtcttccaaaagaaggctgtttcatctacattaaaaatctttcgtttagtgtaaccacctccatcaatgatcttagctagatatgaataacttgctgctttaccttgcacttttattttatgaaggcagcctttttccttaaacctcatgaaccaacctctgccagcttcaaacttcttctgcagcttcctcacctctttcagcctccacagaattgaaaaaagtgagygccttcctctggattgagttttggcttaaatgaatgatgtggctggtttgaacttctatctagaccactaaaactttctgtatttcagcaataaaactgtttcacattcttatcatctgtgtgttcactttttattttttttcaagaatttttcctgtgcattcataacttggctaagtgtttggcacaaaaagcttagtttttggcttgtctcagcttttggcatgtctttctcactaaacttagtcatttctatctgcttttgatttaaagcaagggacaagactccttctttaacttgaacattagag

SEQ ID NO: 258828 - DNA, 623 bp, Homo sapiens
gggtggaggttttgatattgttaaacagcagtaggattgtaaatctcagactatagcattttaatctagtttgatagagatgtcatgtgttctttttatttaaaaatatttttatttgtaattgatgagtaataattgtatacatatatgggtacaatgtgatgttttgaagcatgtatatagtgtgcaatgatcaaatcaggctaatcaatatattcatcacctaaaatatttatcatttatttgtaatgaaaacattttaaatcctctcttttgcctatttttaawtataaaataaataatattcttattaactatagtcatcatgctgcacaccaggttaccagaacttattctttctaactaaaactttttgcatcctttgagcaatatctcccctttcctgattcactctccaaccaaacctaacttctatgagtttgacttttttagattttacacataaatgagatcagacagtatttatctctctgtgcttggcgtatttcccttagtataatgtccccaagttcattcatgttgtataaaatgacataatttcctgcttttttaaggctgaataggtttctattgtgtatctatgccacatgttttaagccatt

SEQ ID NO: 258829 - DNA, 589 bp, Homo sapiens
cataaaattatcttatcctgggcttttctttgataggagactttaattaacaattcagtttcctggattgttattggtctgttcagatttacaatttctttgtaattcagtcttggaaggttatatgtttctagaaatttatttatttatgaggttgttgaatttgttgacatatagttattcatagtagtttcttagctaacctgtatttctctgctataatrtcttccctttcatttctaattttatttatttgaggttcttctctttttcacctggttagtctagctaagtgtttgtcaattttgtttagcttttcaaaaaactgactcttagaaaaactgactcagttttgttgatcttttctattgtctttctagtttctgtttcatttatctctagtctgatatttgctgtctcctaacttctgctaacattgggcttaatttgtttcttctagttccttaaggtgcaatgttatgttgcttatttgagatatttctcctgttttaatgcagacatttattgctataattttttttcttacaactgattttggagtttctggagatttatcttgttctttcat

SEQ ID NO: 258830 - DNA, 627 bp, Homo sapiens
tatgcagatggatggtggtgatgtttgcataacattatgaatgtatttaccaccacttaaaatggttaagatgataaatcttatgtgtattttaccacaataaaaaattggaaaaaatatacttagtatctaaacatagaaatgttaagttaatacaaatactttgaagttctttgttgttgtttttaaatgatggtagagccaatcatcaccacaagcaagttggtaatgatggtgaattgtggtaaacaatgatgcattttttttttttttgcttctctaggattttcaagtgaagaactgggactaagtaaaaaaaaaaaaaaaaagattcacaaggaactactagaagtcataagaaattaaaaactaacagaagtttcaccaagraagaagaaaacaacataatttaacacaagagagggttcacaataggtaagaagtgcagaaagcacacaagtgattttaagagtggacttaagtagagcctgaagcatacacaatatgaaggacaaacccttaaggagaaaaattaaaattttaaacatatattaggtacagagttaatggagaccttgtgagagaaagccttgaaacttatttttaattgcctcttcaataaacctg

SEQ ID NO: 258831 - DNA, 605 bp, Homo sapiens
tcacattatttaagtaataaaaattttatgggctatacatccaaccagaaggtattgctaggtacactgcagtataataaatattattctaccatcaaaataatgttgtgggaaaaactagtgatgttttcatgttgtgacatatttagcaaaaaagctaataaacaagttacctaacattatgacctaatttgtaaaggatgtttatcaattttacatattcttacagtgtgctgcccactgttttaagcacttaaaacatattaatttctccagtcttaaatctaacactcatgtgaaataggtactatagtttttcccattttaccaataaatacactaaaggatgaagagtttaaataacttccctgaagtaatgaaactattaaaaggcagacattcaarcccagccacttcattccagtttgcattttaatgtactattaccttaagttttgcaaatctgtgtgtacatgtgtgcatgtatgtacacccacacacgcacataactttatgcacatgtgtaaatgaacacatgatatatgtacatacataattgtaacaaattttaagcatgtgtgtaatttttttctggcattgtatta

SEQ ID NO: 258832 - DNA, 590 bp, Homo sapiens
agatatataacaaccttcaaaagtatacatctgcagtgccattcatttatttaatgaacacttacagagtacctgtgatgcctctggaaatgttttaagtgccaaatgctaggtattaaagaatgagtaaagtatatgttktcagagtgaagagatttaggaggaaagaagctctaaagatgctaaaaaatagcaatgctgtcaccagactaattctaatgatgacattttcattcacaaccaccaaagagttgtttcatttcttcacactcatgttttgctctgaactgcagtaatgctactgacaaagaagcagaaagagaaatcaaaccataataattttatttttttttgaaaattataaagcaatctttaaagttactttgctttcaaagtaattaatttaaaaatagcaagtggaaaatctacagttactcaggacccattattcagaattcattattcaccaaagcatttaaaagactgttttggcagtgtaaaataaggaaaataaagcttaaaagagaacaactactgacaggagatgtaggtaatgttcccagcgggaaaataatatattatcataagaa

SEQ ID NO: 258833 - DNA, 585 bp, Homo sapiens
aacaactactgacaggagatgtaggtaatgttcccagcgggaaaataatatattatcataagaagaaacacttaccataaaacattccagagggragtcattgggattatgtccccttcctctatgtttacacaatgtgaaaacagccagttacatcagctctgagttttaattacacctaatataacaaccagataacattgacaatatcaggcacttttcaacatgttttgcatggggtggataaagctgtaagtctgtcttgtggtcagttcttcatacaatttcagttaaaaatgtcaaaggttggattagtttatagatatttgctgaagatacatatcattttcagttagaaattgttcattttcttgataatttgggactttaattttatgcaggattgtcctcctagaaaggcaaattgatgcaattgcccacagaccctcaggatctatgaggggaggggaaaaaaggcagctagcagctggtagctgaaatataattagtgtcaatatgtaaaatacaattagtatcagcatgcaacctgctccctaggcctgcctcagctgtctttggtcttct

SEQ ID NO: 258834 - DNA, 532 bp, Homo sapiens
tgccttgtgactctctaaaaaaaggataaaatatgcatcattttccaaacaatttgattatacagattrcataactcttttttgtggaagttatattccactaacatgctttgaaaaaacactgcttacgttttgctctatatattcttctgtaatccatttttcacgcttaacttatcattgatattccatatcaatgcattctaacctaaatatttaatacagttgcatattatgccagtgaatgagcacttcataatttaacaaatttgctattgactaatattttgattgtttttaggtttttgctattcagggcactaactactccagtccttgtcacttcaactttggccagttgctgattaactcctcagagaaatacctagaagtggaattgatacatagactcaaatgtccaccaaaaagatggtactaattttcagcatcccatcaacagtatataaatatgacaggttctcaacacatgaaaacaaaatttgaaacattttaacatgtactaatgtagtag

SEQ ID NO: 258835 - DNA, 585 bp, Homo sapiens
aacaactactgacaggagatgtaggtaatgttcccagcgggaaaataatatattatcataagaagaaacacttaccataaaacattccagagggaagtcattgggattatgtccccttcctctatgtttacacaatgtgaaaacagccagttacatcagctctgagttttaattacacctaatataacaaccagataacattgacaatatcaggcacttttcaacatgttttgcatggggtggataaagctgtaagtctgtcttgtggtcagttcttcatacaatttcagttaaaaatgtcaaaggttggattagtttatagatatttgctgaagatacatatcattttcagttagaaattgttcattttcttgataatttgrgactttaattttatgcaggattgtcctcctagaaaggcaaattgatgcaattgcccacagaccctcaggatctatgaggggaggggaaaaaaggcagctagcagctggtagctgaaatataattagtgtcaatatgtaaaatacaattagtatcagcatgcaacctgctccctaggcctgcctcagctgtctttggtcttct

SEQ ID NO: 258836 - DNA, 585 bp, Homo sapiens
aacaactactgacaggagatgtaggtaatgttcccagcgggaaaataatatattatcataagaagaaacacttaccataaaacattccagagggaagtcattgggattatgtccccttcctctatgtttacacaatgtgaaaacagccagttacatcagctctgagttttaattacacctaatataacaaccagataacattgacaatatcaggcacttttcaacatgttttgcatggggtggataaagctgtaagtctgtcttgtggtcagttcttcatacaatttcagttaaaaatgtcaaaggttggattagtttatagatatttgctgaagatacatatcattttcagttagaaattgttcattttcttgataatttgggactttaattttatgcaggattgtcctcctagaaaggcaaattgatgcaattgcccacagaccctcaggatctatgaggggaggggraaaaaggcagctagcagctggtagctgaaatataattagtgtcaatatgtaaaatacaattagtatcagcatgcaacctgctccctaggcctgcctcagctgtctttggtcttct

SEQ ID NO: 258837 - DNA, 522 bp, Homo sapiens
tgaagatgtttttgctgataaaatagaaagcctagaaatttattctatatttctttagaacctagaagtcacaagaatgtaaattttgatgtacaatgaagtcacaagaatataaattttgatgtacaatgaatattacttgttctgctaatatttaaaatgccttgatcactacaactctaatgtttgctagtcaaactaagagtattgcaacatggcactaggaactgtggaaacaattgaaatctgagatggaaaatttacactcttccaaaagagtataaactagattataaagctagtttacaacttagtttgtatagtagttatatgtttacatctaacactgactgacataaaattaaggctaaaggaagatgtataattgttaacactgtggactctggaaaaatatcgaggtagataagaactggagattaaaaaaaaacttcatgtaaaaggtaaaatttacagctgttcctrgagctttaatcagattcacaaggaggaatggggtaacca

SEQ ID NO: 258838 - DNA, 467 bp, Homo sapiens
caaggatatttatacttacatattgaaatatgtagccattttaccattaaaattgcagtagttcacgtccgtaatccccacactctgggaggctgaggtgggtggatcatctgaggtcaggaattcgagaccagcctggccaaaatggtgaaaccccgtctctactaaaaatacaaaaattagctgggcatgatggtgggtgcctgtaatcccacctactcaggaggctgaggcaggagaattgcttgaacccaaaaggcagaggttgcagttagccaagactgtgccattrgactcctgcccgggtgacaagagctaaactcagtctcaaaaaacaaaaaaaagttttaaaatatcgttttcccttcattccaagtctgatccctaaatattgatttataaacatattttagaacagtttgctccatagaagatgcaaagaggctattgagaagagatggatttat

SEQ ID NO: 258839 - DNA, 467 bp, Homo sapiens
caaggatatttatacttacatattgaaatatgtagccattttaccattaaaattgcagtagttcacgtccgtaatccccacactctgggaggctgaggtgggtggatcatctgaggtcaggaattcgagaccagcctggccaaaatggtgaaaccccgtctctactaaaaatacaaaaattagctgggcatgatggtgggtgcctgtaatcccacctactcaggaggctgaggcaggagaattgcttgaacccaaaaggcagaggttgcagttagccaagactgtgccattggactcctgcccgggtgacaagagctaaactcagtctcaaaaaacaaaaaaaagttttaaaatatcgttttcccttcattccaagtctgatccctaaatattgatttrtaaacatattttagaacagtttgctccatagaagatgcaaagaggctattgagaagagatggatttat

SEQ ID NO: 258840 - DNA, 546 bp, Homo sapiens
aatttgtcacaataaaacactggagtttaaaactagaagaacttttgctgctatgttgtcatgttattaagattagacagctacataccagaaatattgagatttataaaatagtaatagaataatgtttgataagatcacacttaaattttgttaaattctgatttatgtaataaaaaataagccagtttaacctcattaagatgaaagaagataaaagctaacaaacccttttccttcaagaaaagtaataaacacatttatcaattaggagtgaatagtgctttaaacatttatttgtgaggcatttgtttggaatttagagtgtgttttcttagacacattggatttaacatgttcaagtttataggggagccaagaagtctctgaaatcyatgacatacctggagataggatacagcccaatacagggctttgtctaaggttaaggatcttgcaacttctgttgtaaaactcatacatctaagagttcgtatcgaatctcattaatgtcctcttccctctctcccttcctttttctttttt

SEQ ID NO: 258841 - DNA, 567 bp, Homo sapiens
acagtgcgaaaagaaggataaggttgggagcagagtgaatgaggagacctgtctgtatgatcctgtgctttacagataagctactctgctatgatgcgctgtgtcaaagagataagttgtataagaagtgaagaaagaaagcagtttcttagagtggtgatatwagggatgctactggaggcagtattaacgaaaagtttaaaacagggaagtgaatctgaaatttgttcatacttgcttcagaagagggagctacagataccaatgttagcaacttgagggcacaaaataaatacagatattcacaggtacattatggcttgagtctgtggtctgtgtattcttggtgttatccagagaccagcaacaactgctacagggttggagttaagagctcaatgttaccattttttctttccattaaactgaatcttttatttaatatttaagtacttattcttctccaccttcctctctaaatcagctttatattcttctaggaagttctcactgttactttttgagttattccaagttttttccacactgtcaagcttggccttatca

SEQ ID NO: 258842 - DNA, 567 bp, Homo sapiens
acagtgcgaaaagaaggataaggttgggagcagagtgaatgaggagacctgtctgtatgatcctgtgctttacagataagctactctgctatgatgcgctgtgtcaaagagataagttgtataagaagtgaagaaagaaagcagtttcttagagtggtgatattagggatgctactggaggcagtattaacgaaaagtttaaaacagggaagtgaatytgaaatttgttcatacttgcttcagaagagggagctacagataccaatgttagcaacttgagggcacaaaataaatacagatattcacaggtacattatggcttgagtctgtggtctgtgtattcttggtgttatccagagaccagcaacaactgctacagggttggagttaagagctcaatgttaccattttttctttccattaaactgaatcttttatttaatatttaagtacttattcttctccaccttcctctctaaatcagctttatattcttctaggaagttctcactgttactttttgagttattccaagttttttccacactgtcaagcttggccttatca

SEQ ID NO: 258843 - DNA, 451 bp, Homo sapiens
ttgaaacccaacactgacattgttgagtcgactcagggtgtaggatagaagtggcctcattatcagaggtccacagtagyatttacagaattaagtgtgggcttttgcaaactgtggtttctcccctgcctgtgaggtctctgtcctcttcccacccatgattttcttataaatctttagcctttgattaatatcttaaacatgatttgttgcttaaaaatgagggctttttcaatcagattaggtacaaaaaccacctaggaacttagattctaagtaatctgctcttaccacttggtgtctttgcttgcatcattctccctttaagtacaaagttcttccaaaatcaactgtatgcatattttttttttttttactagagctctcctcaaacaaaacaaaacaaaacaaaaaccatattgttttgaaggtactaatcttttctcactag

SEQ ID NO: 258844 - DNA, 451 bp, Homo sapiens
ttgaaacccaacactgacattgttgagtcgactcagggtgtaggatagaagtggcctcattatcagaggtccacagtagtatttacagaattaagtgtgggcttttgcaaactgtggtttctcccctgcctgtgaggtctctgtcctcttcccacccatgattttcttataaatctttagcctttgattaatatcttaaacatgatttgttgcttaaaaatgagggctttttcaatcagattaggtacaaaaamcacctaggaacttagattctaagtaatctgctcttaccacttggtgtctttgcttgcatcattctccctttaagtacaaagttcttccaaaatcaactgtatgcatattttttttttttttactagagctctcctcaaacaaaacaaaacaaaacaaaaaccatattgttttgaaggtactaatcttttctcactag

SEQ ID NO: 258845 - DNA, 555 bp, Homo sapiens
aagaaacaataatagtacttacccccccagtttgatatgtgcttagaacgatgcctgacacattgtatgtgctcaatagtataaatacttatattttcgccactataatacagcaggtatatttgtctgttttattgcctgcatgatttctggcacttacatgcctggaacaaagttgaaattgaatgagtatttgttgatggaactcaacaatggaatattattgagttttacacacatacagaatgaaactatgctgtcattgaatgagctggatgggttgattttcctttatgtaacacattcctcttttgacttgagtataatcaggtcagcactataaatttcacagctatcagttgattaaccaataagtgtctaagttaatactgatgtgttattattggtacacctgctaccgccctacaaattcaaaagtacccatttctgtgttgttaattgatttgatcattacctttatgaacagacactgatgttttcctggagagagwactgcgcacattcaaacgtgctctgaggttacacagtgaaaat

SEQ ID NO: 258846 - DNA, 600 bp, Homo sapiens
tttccaaaatgcttccccccattttattacccctcagttaaataatacctccacacacatgaccttaaagtttttcttaattgattatcaaattatttatttcaaaaactactcatatgccggaagaattatcatttgatcaaatttcagtgactcagtttacaaagggaagaagctttatgaaatgcaaagatgatccattggtttatctagtcattttctccaaaatgtggatactcaacgttagatgttaataaattttgagaagtacatatataaacaatgccyagtatgatgtcaatcatgcaggaatattacttgtgtccttcttgggtgtttggatctcgctgccattttaatacagaatcagtgctaatcttgcatcctttttcagagaatatcctatggagtcttagttcctgaagaaggtcactcaggatgaattagaatattaatgaggttgtacagtcacaagatggggttgatacaggacttacctacttttaggttttatgtttttcatgtgtgttaagaggtggatgttaagacagcagtcaataaaacttggcaaataaggtgacctacttgaaataaagcaga

SEQ ID NO: 258847 - DNA, 611 bp, Homo sapiens
tatgccatgtaattctaccttttaaactgtatgattcaatgttttttagtatatttacagagttgcacaactatyactgctacctaattctaaaacatttttatcaacccggagagaaacttcatacctattaaagattactcctcatccagggcaaccactaccttctttttattataaacacttcacatagaatcataccatttgtggggtcttttgtaactagcttctttcacatagcatattgtttttaaggtccatcatcataataatatggaaattacattattcctttttatggcaaaataatattctattgtattgacagatcacattttgtttatccatttatcagttggaaatgaaattgctaaatcatttttgtcactattctttcaactgctaagaatagcaataatggttttatatttcttgctttggaacgattctatttctttgttatttggaataaaaacattacttaagaagaaaaatctagaaaactcgaatgagaccttttttgacacatagttgataaatccaaaagcactagtttaattagaatattccaaattaatctagagtatatgtttacaatgtacatgtttatt

SEQ ID NO: 258848 - DNA, 566 bp, Homo sapiens
tttgtcagttttcttttcagacccagccagggaccctaagaggactgaggaaaatcttcttccccacaaaagataaaatatatttaaaaagaacttgggcaaaccagagtcacttaggactctgccttgatttctttaatgtaatatgctggagttggaatagatcatctccaaatcccttcctgttctcaaactctgtgtcttatgatagtatttttagatttctrctgtttcaaggaaaaccaaggctagatgtttaatcaaactttgtttattttccgcaaggaatagatatgtagtctaagtcattttgcttcaaccaccagttttcaacacacagaattaagatattatttgacctcaagttgtcacaaagtgtgaaaatgcagtatgcaattttatatgctttcttatgtcttctgcgcattctgtaagtttttcctatttcccttcttcccatggttatagacttcaagcatctgaattttattttaagtcaattggaaacattaggttgatgtggattatacacaggggatctgaatgggaaacttgtttatttcatc

SEQ ID NO: 258849 - DNA, 602 bp, Homo sapiens
agagtcacttaggactctgccttgatttctttaatgtaatatgctggagttggaatagatcatctccaaatcccttcctgttctcaaactctgtgtcttatgatagtatttttagatttctactgtttcaaggaaaaccaaggctagatgtttaatcaaactttgtttattttccgcaaggaatagatatgtagtctaagtcattttgcttcaaccaccagttttcaacacacagaattaagatattatttgacctcaarttgtcacaaagtgtgaaaatgcagtatgcaattttatatgctttcttatgtcttctgcgcattctgtaagtttttcctatttcccttcttcccatggttatagacttcaagcatctgaattttattttaagtcaattggaaacattaggttgatgtggattatacacaggggatctgaatgggaaacttgtttatttcatccatatgggtttattgtaacttcaccagaaaagcctacaaaagagcaactcagtgagagagaaaatagcattatttttattttcaactccaaaagggaaaactaaaatttcttcccagggagcattccatctaaccagatca

SEQ ID NO: 258850 - DNA, 583 bp, Homo sapiens
agtctaagtatctttgtaggtctctaagaacttgatttatgaatctgggtgctcctgtattgggtgcatatatatttaggatagttgaagctacaaatacatgtcaaattacccgtagaaaattatcatatataagagacctcttttaaaaacagtaaaggaactaatggaaatgagcacatgaaaattatactgcagtcttctcagaacacgtataaaatgatcttttgtagagcaaacaaatcaggtgagattgcattgctaaaataaaagaaaaatattgaaatgataatgaacacgctctaaggatatgctactaaatactacatacattctagattctattgggaaaaaaatcaccttgaagtatttgtgagtgttattaaaacactaggcaaatctaacttatattaataacaatgttttatatrtgtgtgtgtgtgtgtgtgtgtgtgtgtgtatatatatatataacatatagggcctgtatgtgaaattatcccacagcttttcagaaaaaagagaacagaatgttttctagtgacattgaagaaatgtgactagaaaatgtctagtgacattg

SEQ ID NO: 258851 - DNA, 576 bp, Homo sapiens
ggtgacaattcactcagcatttgcttctgtgtgaaatattttatttctcctttatttataaagcttaattttgctggatataaaatacttggcttttatttcttccagcaatttgaaagtaccctcccattttctttgccctcttaagttttctcctgagcactccactgtttgtctgatacagttttctttataggtgactagatatttttctcrctgatttatttattttttcttcattttggccttagacattctgataataatgtgtcatggtgaaatcctttttgcaatgtatttaccaaagatcactggacctcatgtatgcgggtgtctatatctcttgctagatttgggaagttttcatcaattattttcttaaataagttttttaagtttttttgacatttgttccttcttaggattacctataatttgcaaattcagctgctttatgtaattccaaacatctagaaggccatgtttattatttttattttgtgttgttatatttgtctgaatagactattttaaaaggtctgtcttcaaattctgagattctttcttctggttggc

SEQ ID NO: 258852 - DNA, 597 bp, Homo sapiens
aagttttctcctgagcactccactgtttgtctgatacagttttctttataggtgactagatatttttctcgctgatttatttattttttcttcattttggccttagacattctgataataatgtgtcatggtgaaatcctttttgcaatgtatttaccaaagatcactggacctcatgtatgcgggtgtctatatctcttgctagatttgggaagttttcatcaattattttcttaaataagttttttaagtttttttgacatttgttccttcttaggattacctataatttgcaaattcagctgctttatgtaattccaaacatctagaaggccatgtttattatttttattttktgttgttatatttgtctgaatagactattttaaaaggtctgtcttcaaattctgagattctttcttctggttggcctggtctattacagaaatttttaaatgtattttataatgtcttcaattaatttttcagtttgagaatttctgttgttcatgtgtttgttttttaagatacctattcccttattaaatttctcattcatatcctgacttcattttctgatttctttgtgttggtttt

SEQ ID NO: 258853 - DNA, 562 bp, Homo sapiens
ttcttagtgtctttttttttttactttttgaggtatctgttgtcatgttctcaagctcagatgctctttcttccactgtgtccrgcttactacggatcctaccaaagtcattattcatttccattgtagtgcttttaatctctggtatttccttttgaatatttctaagaatgtccatctctttgcttacatcatctatctgttactttgctgtttactttttcctttaatgcttttgtcatattcatcatagtgatgatttttctttaaaaaaatttggtctgctatagtcaacagtcttgttgtgttctacctggttcataggtttgttcagtctcttcaaattatgggttttgtttgttttatttatttatttatttatttatttttggcattttagtctgccttttaatttttttgttgtaaggtgaacattttttactaggtaaaagaaactatggtaaataagccttcattaatgtaatggtaaggtttgtggggagaagaagcattctgcagtcctgtgattaggtctcagtcttttgtagacctgtaccctccg

SEQ ID NO: 258854 - DNA, 562 bp, Homo sapiens
ttcttagtgtctttttttttttactttttgaggtatctgttgtcatgttctcaagctcagatgctctttcttccactgtgtccagcttactacggatcctaccaaagtcattattcatttccattgtagtgcttttaatctctggtatttccttttgaatatttctaagaatgtccatctctttgcttacatcatctatctgttactttgctgtttactttttcctttaatgcttttgtcatattcatcatagtgatgatttttctttaaaaaaatttggtctgctatagtcaacagtcttgttrtgttctacctggttcataggtttgttcagtctcttcaaattatgggttttgtttgttttatttatttatttatttatttatttttggcattttagtctgccttttaatttttttgttgtaaggtgaacattttttactaggtaaaagaaactatggtaaataagccttcattaatgtaatggtaaggtttgtggggagaagaagcattctgcagtcctgtgattaggtctcagtcttttgtagacctgtaccctccg

SEQ ID NO: 258855 - DNA, 599 bp, Homo sapiens
ttcttaatgctgcacatatggcaagggccattccttcctaataagctgaggttttcaaagaatcacactaggcaactgaaatgcgacagaccctgaaatctacctataaattggctttatctgaaaagcatttatattcctgacaaccaatgtaattatcccaatacctacatacaaggcttcacacagtcatgatgatgaaacaatttgtaaaatactcttggtttgtggcacagtgaagctgcttaattgctgaaaataaactttactaaaatttccttttgaaactgttttcttttttattgttacagatcattaggattagatacaagaagatatttcagggacatatagctggaaaagtgaaactgcctttggtttgctcttcttcttttactgtggccttattcatattctcaactcttttattcagttaatttataaaatacatttaataaaattaaataaaatygatgagataggaaccgttgcgattttccaattcttccacaaattgtttaattgaagttactgtaaacttttacttgaactattgaaagagtcttctaaattcattagatcagtatttttaaaaatgc

SEQ ID NO: 258856 - DNA, 595 bp, Homo sapiens
taaaggtgaagtaaaattgtaagaatgattgctgtttcttcatatttgctatagccatataacttgaaagaggaaatgggaatggaactcggaaaatctatagactttccttgcttccctttgtaccacagtgagctatttgggatttgccactttctttgtaatattttagagagtgaacacaaaggaaaagtcaaagttgagtcattttgttgaattaagagaaatagactgttgactgtaaacacaaccaggagatacactattctcattgaattgattgattaatttgttccaacaacaaatttgacttgtatcttctttcagtatattgactaactacattggttgcttttgtatatttggttatacatgaacagctgtagcatatttagttcacgtgggccttcgagtcagacagcccttcagaaacaactgtgttattttgcttcagtgatctcatgtgtaaaatggkgattatactaatactaacctcttagatttattgtgagaactaaatacatagacttgaacagtacaaaataagccttttaaccattattttatcataattacatatgtgggtgtacaaata

SEQ ID NO: 258857 - DNA, 600 bp, Homo sapiens
ataacaatttaaataaatttatttaatttgaattgcagcttaaaatcatgtggagaaaataaccagatgatgtttgacaacctatgttatgtcaacttgccatgaaaaaagtcaattcaattaaaaaatgtaattattsattccaatgatctgtttacacagtaccaggcgtttagtttggccacatttttacttaattgctccaataattggacttttggtagatagagcctagaatggtcaaatttgatgctactgaatgatttggttgtttagatttgtcatgactcattgactataaatagcaacagaattatttctggtttcctgccactcacaggatcatgtagttaggatgcagaaaatataaacattttcttattgtatctaattgtacttcatccatgagaatacaatataaattttaaaaatttagtattcattccattttggagagactgtctctctccatatatgtatatatatatacatatacatatatacacacatatgtatatatacacacatatgtatatatacatatacacatatacacatgtgtatatatacatacacatacatatacatgcgtgtatatac

SEQ ID NO: 258858 - DNA, 600 bp, Homo sapiens
ataacaatttaaataaatttatttaatttgaattgcagcttaaaatcatgtggagaaaataaccagatgatgtttgacaacctatgttatgtcaacttgccatgaaaaaagtcaattcaattaaaaaatgtaattattgattccaatgatctgtttacacagtaccaggcgtttagtttggccacatttttacttaattgctccaataattgracttttggtagatagagcctagaatggtcaaatttgatgctactgaatgatttggttgtttagatttgtcatgactcattgactataaatagcaacagaattatttctggtttcctgccactcacaggatcatgtagttaggatgcagaaaatataaacattttcttattgtatctaattgtacttcatccatgagaatacaatataaattttaaaaatttagtattcattccattttggagagactgtctctctccatatatgtatatatatatacatatacatatatacacacatatgtatatatacacacatatgtatatatacatatacacatatacacatgtgtatatatacatacacatacatatacatgcgtgtatatac

SEQ ID NO: 258859 - DNA, 586 bp, Homo sapiens
ctatgaatataaaaatttttggaaagaagatctttgcagaggtaattaagtagacgtgaggtcattagggtgggcctgaatccaatatgatggattctcaatataggaggagagaaatttgtacacagacaagtatttacagtgagaatgccaagtgacaatggagaatgaggttggagttacacagctgcaagccaagaaacactaagaattgccagcaacaccagaagctgagaagaacataaaacagaatcttcctagaaactccaagaaagcatgacccagctttatttcagacttgtagcctcygtaactatgaaaaaataaatttctgttgctttatgccaccaagtttgtggtaggttttaatggaagccccggggaagtaatatagggcctaacagaaatctatcgaacactccatttaacaatggcaaaacacatatactttacaagtacacatagaacattctcctgggtagtccataggctagaccataaaacaagccaaaataaatttcaaaagtttcttgtcatacaaagtatattcttggatctcaatgaagtgaaattgaaatgaataaca

SEQ ID NO: 258860 - DNA, 517 bp, Homo sapiens
ctaaacacaaagcaagcagaatgagggaaataataattagtgtgataattgataaaatagagtacagaagaataagaaagaaaatcaacaataccaactgttggttctttaaaaagatcaataaaattgacaaaatcttagctagactgattcagaaaaacaccaagaagattcaaattactaaaataaaaaatgtaatggaggwtattactccttaccttacagaaatgaaaaaaatatataaggaaatactgtgaacagttatatatatatgccaaaaagtttttattcttcagatctctgtttttcttgaattccaattcagttggctctgtctcaaaaaaatttaaaagtatttagctttttctttgttagaaaaagttgatatcaatgaactttaataagttagataaatattgtttgcacacttaggggatccaaattatgcttcagataaattaagttttgcttattggtaatttgggggttggtcttctaccttgtcacagaggtgagt

SEQ ID NO: 258861 - DNA, 552 bp, Homo sapiens
aaatagtgagtgttaagtgtgtaaagtggaatgtttaacaaaacgctaggtggccaatgagtctcttgtggatggggaaaggggaggatagtaaccactgaggtatgttttaaaggcccagaatttggcttttcctctatgtgtgccaagaatgccatctgggcttttgagtatagtattggcatgctctgacttgtctttttaaaataccactggctgtttctacaaatawaaagggcagaaaatatattataaataattaaaacgtgattaccatataatgtgtctattatttgccaggcactactcgaagtgcttcctatctgtaaattcatgtaatcctcacaatcaaatggtaaagagatatgctagcattattcccattttacagagaaggaaatgaaggcattcagagagtaaccatggttaccttgataataagtatggcaatctagctccagtgcagtgatcttcctaactgtaatatgtcgacacaatccccagggttgttctgagaaatgactgagacaattaatataaaaggtttagaag

SEQ ID NO: 258862 - DNA, 619 bp, Homo sapiens
ccactgcaggcacccgcatctggacaaggggaacttggtggttcccggaagcttggagatgccaggtaccacagaaccccaaagaggatgtcacagccttgactcagggagccccraagtttgagctccccaaagggctgcagctcttcttcttcttgttgcctgcaaggtggtgagtggagtggcttgttttagcctgcttgtgttacagctctttgagtcctgacatttggcaggtcccaagttcttgtctggtgtctaggaagaatgagatacatggacaactgcagggtgagcaaggcagaaaggggctttattgagcagcagaacaggtttcaggagacccgaagtgaggacctcctctccacaggcaggtcatcccaacatctgcccatgtctggctgagtccaggatttttactggcttcagaagggaggaagtgggtcctgattggtccatgggcaaccatgggtgggcctggaaaaaacaccataagttcttatttgggtctgtggaactggcagcccagctcccaggcctcacactgtccctggcctgaatgtagggtttcactggggactcaccccattttgcttgggagcctgcatgcctcctgctg

SEQ ID NO: 258863 - DNA, 619 bp, Homo sapiens
ccactgcaggcacccgcatctggacaaggggaacttggtggttcccggaagcttggagatgccaggtaccacagaaccccaaagaggatgtcacagccttgactcagggagccccgaagtttgagctccccaaagggctgcagctcttcttcttcttgttgcctgcaaggtggtgagtggagtggcttgttttagcctgcttgtgttacagctctttgagtcctgacatttggcaggtcccaagttcttgtctggtgtctaggaagaatgagatacatggacaactgcagggtgagcaaggcagaaaggggctttattgagcagcagaacaggtttcaggagacccgaagtgaggacctcctctccacaggcaggtcatcccaacatctgcccatgtctggctgagtccaggatttttactggcttcagaagggaggaagtgggtcctgattggtccatgggcaaccatgggtgggcctggaaaaaacaccataagttcttatttgggtctgyggaactggcagcccagctcccaggcctcacactgtccctggcctgaatgtagggtttcactggggactcaccccattttgcttgggagcctgcatgcctcctgctg

SEQ ID NO: 258864 - DNA, 212 bp, Homo sapiens
atatgctttaacaattaatttatgttmtctgacttaaaacaaaaaatattgtaaaatatcagattctagagacaaataataagtaaaaataaagttttgatgtctgctagctaaggtttagtatcatgcttatttacaatatgtggatatcctattatgttgccgattcctttagcttttctgtagttactatgtcatcctaaattatttca

SEQ ID NO: 258865 - DNA, 487 bp, Homo sapiens
ctccccactttctggcaagttaagtttagccacctgatacaagaagggacattcagaggtaggatggcacaaagacacagggtccactggagatcactggaagcagctgcagcagggttaagagaagggagtcccagcgagtcttcagtcaccacacactaacatcatcagtgaaaagytcctgggcctgaagatccagctatgttgtttctagttgactattttaagtgacagaacttggcccaagcattgaccattttggttcctcaataagcctgattcaacagggtcacctttgaatctgtcctccacctttccaataaacctattttatgcatcattcagtgagttatttatttatttacttttttgctgagaaacatgactagatttaggaaaaatgtagaattttacttttttttcaatattttctgggttttccagagttttcacgtgtttcacaccttcctttgcttcccaccattcc

SEQ ID NO: 258866 - DNA, 427 bp, Homo sapiens
tttctgtgattttttttttatttttaacttttattttacattcaggagtacatgtgcatatttgttatacatttaaactcatgtcatgggttttttgtacagattatctaatcmccagggtattaagtctagtaaccaatagttattttttctgttcctctaccttttcccaacctctgccctgcagtaaaccacagtgtttgctgtttccttcttcgtgttcatgagtactcattatttagctcccacttataagtgagaacatgcagtatttggttttctgttccttcattagtttcctaaggataatgatttccagcttcatccacgttcccacaaaagacatgatattattcttttttatggctgaataatattccatggtgtatatgtaccacagtttctttatctaatctgtcgttgatgg

SEQ ID NO: 258867 - DNA, 427 bp, Homo sapiens
tttctgtgattttttttttatttttaacttttattttacattcaggagtacatgtgcatatttgttatacatttaaactcatgtcatgggttttttgtacagattatctaatcaccagggtattaagtctagtaaccaatagttattttttctgttcctctaccttttcccaacctctgccctgcagtaaaccacagtgtttgctgtttccttcttcgtgttcatgagtactcattatttagctcccacttataagtgagaacatgcagtatttggttttctgttccttcattagtttcctaaggataatgatttccagcttcatccacgttcccacaaaagacatgatattattcttktttatggctgaataatattccatggtgtatatgtaccacagtttctttatctaatctgtcgttgatgg

SEQ ID NO: 258868 - DNA, 553 bp, Homo sapiens
agaaatcgcggcctcttcgcttcctctccgcccccaccttccaggagtctcccacttggcggtggccgtcgcgtccccggccctctgcggcagcggcgccgcgcggggcgctcccactcgcgctcgggctggcgcggccgcgggtcccggcggcggggtgggcgggggaggcagcgggtgacagatgtactcctctgacagctctcagtatcagcccagtggctcccagccattggctcagtgcaatggaccggcaacgccgctcactataataacactcatgcctgccagcagcagcaactccgagtgcaggcgccgagcgcgggggatgctgccgccgccgccgcttctgctgccgcgcgggcggytcccgcagccccgctccgcccggccaccgcgcgggcactgactcccgctcggttccgtttcgccggcccggccccctcctaggctggaatcctcccgcggggctcgtcgtcccgacgcgaatctgaggagaaacaggagcgagagactgaggggagagcgcggcgagcatgcggaggcgggggag

SEQ ID NO: 258869 - DNA, 444 bp, Homo sapiens
aatattctagatctattcataaatgaatgatttcaattttaaaaagagctgtctatactcaccccaaagtgattctttatagcacataggatgctatgagcacttacatatatgctaaaacatactgtcacttagaaataggaaactggatctgaaacttctaaaaattagcaactcaataagaaatacaaacatcatcttagaaggtatatatgccacattctataaattttcaagtaagaatttatgcttatcatggttttacagttttattttttattttttaaattgacagataaacytgtgtttatcgtgtacaatgattttaatcccagttttatggagtaataattatgatatctttccaactttatattttattttaatatatttgaattttgccattaaaaatcatcacatttttgtattttgaatcgtgtacca

SEQ ID NO: 258870 - DNA, 558 bp, Homo sapiens
tggtctctagtcatcctttgttgtaatgtattttgccagttttaatactaagataactctggtgttattaaaggatttagcaaatgttctttctgcttctcttttattagtagtagtactttttttgaaactgacaaatgaaaattgtatttattgatggtatagaacatgttatttcaaaatatgtatctctgcctctgctttctggaagaaattgtgaataattggtataatttcttawaggtttggcagactaaactagtgcagccattgagctgtatgttttgtttttggatgttattaattattagtacaaatgctctaatataaattggctactcatattatctattatccttgtgtgaattttgttatttcatgtcttttaaggaattggaccattttatctaagtggtcaaatttgtggcctcacgtagttttaataatattcatctattatacttctaaatttcatgggatcaatagtgatgcccgtctttcatttcagatattggaaatgtgttatcttctctattttttttttgttagcctggctag

SEQ ID NO: 258871 - DNA, 596 bp, Homo sapiens
agagagaccaagagacagaaagaaagagagagagtgaaaaaagaataaacagaaaataaaaccatggattatgatcctatgggatttcatgtttctccagcacttcttccccaagattgaagcactcatcaccacagcttcaggagtgatggtagctgatagattttagctaagtctttttctggtacttggactgggctaaagagctgtctcactcaaagttataattggcagatgcagggggataaagcttttgtcccatttctccaatttaggatgacttcaaagagcgatatcagccatataagcctcatatcaacctcatgtaatcaactgaggtctttgtttcaacttcatcacagtccagttaacactcttccccgtcctgcttcctttacctccctaaacacattgatctcaagagcactccctaatgaactttctacttgcaaatctctgagtaagaccctgcttcctaagaaasctggaatcagaaatagttaaagaaaggcctgaaaagaggaatttcgagctgtgccaaccaccagctcaccagcaatcagagccctaccactggtgatagtccataatgaagc

SEQ ID NO: 258872 - DNA, 636 bp, Homo sapiens
cctgtttttaaacctaaaatcaatccaaagtatatttttttaaattggaaaataaatatcctggaaatacatgattagttgatctagggccattctaaattacagcgcagttttatttccaaaagcaaaagatgggcttgattatcacacaatattttattctgtttatctcaactttatttaaaacctacactaggacattcatgcagaaaaatactattcacaccaatatatgcagttacaaagtacagttcttggtacgattttagtccagataagtttccatttgtttacatgaccaaaaaagattwtaacattaagaaaagaataggctgataatacattcaccaattcatattttccctctgtttcctctttgtttattgaactctcacaatgaaaaggaagatgttttttcagaaccaattcgatgctttctttacattcgtgtatctatcatttattaaagtaatgaagaaaatgttttaaatgttataatacgttcaatcaacattaacagtctattctgatataatttattacattgcaggtttgttttatttctcagtaaaagagatcacataaacttttgaatcctataagctgttaattattttttcttttggataaaggaaa

SEQ ID NO: 258873 - DNA, 535 bp, Homo sapiens
tgacaagatgttccagcttcctctttccctcttaggaaacggatacatgacctaaaagggaagcaccactttgaatcccagactgccttaattattttctctatctacaggcttcatcatctgaaaaactttaaatgagtattaatgaatacatgaatgaatgattatttaattacacttgaatacatacatgaaagggttataaattatttgaagttcgtaatttgaaataattaaggtccaagaattttttcatctaagcttgttatactggttaaatcattgctcttctatttattttcaaaactcatattttytcccacaattttacatattcctttccaggaggagtttgtcttcaattgcaaaaaaaaaaaaaaaaaaaaaaaaaaagaagaagaaaccaggtaagattaatatattcatgaattaactgatgcaatgactcattcaacaaacacattgaggttcctaccagctagaatgcatccattggctaacaagtaagctcacctgttatcttaaaggcagaatg

SEQ ID NO: 258874 - DNA, 607 bp, Homo sapiens
tcatattatatacttagtctgaaatggttttttattgcaactttgcatcttggagcattttccaaaaagcacacttaggttcatgttctttttaatggttgcatgattccctacaatataaccctattatagttatttaatcagtctctcagagatggttattgaagtcaatttcaatattttctatgattaatgaggttgcaatgaatattcttaaatctaaacatttctctgagtcctgaggtagaattaaaagtatttcactttctgattaatacattgccaatctacttgtcccttcaaaaagtgttttataaatctgtagtcctaccagcagctatgtcactggatactttctaatacccctactggcactagacatattcagagttttacactgttgacagatgattctataactttaaatattttctgtcttatgtaaatgcaagggctgaaattcaaatacctttaggaatcaagcatgtaaaatacatttttaaatcagagtggtaaagaacttgggaaattggaaagggtatgctttgattactttwgatattgaaatttatacttttctgaaaatactctgttggcctagtaaaag

SEQ ID NO: 258875 - DNA, 601 bp, Homo sapiens
atatcaagatgctagagtctaacttttttgtcaacttaaaagaggaaactgaggcaaaattaataatataactagagattttatttcagccaaatttgaaaactgcaacccattagacataggttcaagttgccctgaaaatatacactgattaccagcagttactggtgggtttttaaaggaaaaaaagaatgaggcaattttgaagttatttattaataatttacataatttacattggttaattaaagtattagattatgttatcagggttaatgcaaaatattagcttgttattagatcggtgcacagtattaacttatagcatattagctgaaggtattcataacattagctattaattagctatacatcgttctttgtgttaaaaattttaggaaccggatgataatgaatwaggatcacactgtgcaacttgtgataacaattatgtaacgtataagctagtctggaaactacagggaaaagaagaaaaaacaaaatgcctttaaacaattacctctgggcttggctgcaggagacataattgaagtctcatgctatgtctctctgggtctgataaattctgcatgcctcacat

SEQ ID NO: 258876 - DNA, 564 bp, Homo sapiens
taatacattttaaaatttcaaaagaattttttttgttaactctacatggcctgtgtgtattcagtgagaaatttcttacctgacttgccaacctgtgagatatcaatcttatttagagcctcctatgctaaatggttatcagttaaaatgggtgagttttatgatctttaacgtggaaagtgcttgggatttgtgtggttttgaaagggtaattcaaggcaataatataatagtcatttatagtagtaatccccagggatgctgctgtacatatgagtgtgtctatgtgatttagtcagagcaataggaaaaataattatttgacctttcattgaactctcagctgttatttacattataactacatttctaatatgtatagaaacactagaagygatttaagtttttccacgtctcctgcaagatgtgaaaaatcagtatgtttaagtcctaatactatgtgaaaaatggatagaacttagtatagaggatgattgtttacaagattctaattttctcccaaattccaacctcttttacattgtactcatccctctgggcggg

SEQ ID NO: 258877 - DNA, 564 bp, Homo sapiens
tttctttcttcttttatcttatttgatgaccttgtgggttgaattgtggtataaggttggttccgttgactggattcatttctggaacattttagggggctaagggtcagttcacaactcctgtactgcatgctgtagattggggaatttgtttgggccctgactttgttctccractccttgaccttaaggacccactccaatgggggtgacaaaatattcctagtcccagcacttcaatggatgatgccagccaaagggtggtggcagcaagatctgtcctctttcacacatgtcaacagcagcaagcatggctatggcagagttcacacttaacagctgtgtcagggtgctagcaggtatcagggtgctggcctccatggcgtgttagccccaacattggaggcagcacagttgaggagtaccccactggtgactgtacatatggttgcattgctagtggtgtttgaatggggctagggcattgcattcacaggactgtatacaccctctgtgagcattcacagaggcagaggtggctgcttagggtaggggagggtccac

SEQ ID NO: 258878 - DNA, 604 bp, Homo sapiens
tgtatttcaaacacttagctaacagcttctcttaattaacatactctctcatagtaggatctattttgtctgttttgatgatttatgcttattttgagtaccagctgttcatctcgattccagtctcacaactccctttttctgcaagtgaatttaacttggaattagctatcactttaatgaatagaagtgagctagagggggtttctattattttctatcaaaataaattcacttaatgtataagaatgaacttacttctccatatctcaccccactttcctgtcccctatactgtacagctgtagatggagagaaatatatcttatgttaattgtataccctccaagaatgtaccacaattatctacatatggaatgccatcaatatgtgaattttaattgaattaataatagaatgagtaaattgtcacttaatttttattatgctttatgagcatmatatttgttcatttatgatggaattaatgtcactaggactcagaccatatcttagaaagtgaaggcaaaataaatactgctttatttaaatcaaatatctggagaactggataatgaatctctcatttctgcttcatgcttcc

SEQ ID NO: 258879 - DNA, 408 bp, Homo sapiens
tgaagatatatttccttctaatagttttagtaaagtatataatatttgagtaattatttgttatctgtgctcaaattctctatttaaaaatgaagaagtttctctcacaatgtcatcatttgtattgaattatttcctttacaccagaatgacaattggaaaattagcatttgccaattgtttattacagttgatgtcctactaataaaaagatattgtctagtcctcactcagtccctgcarcaagcattatgttttatacctgctgattcaggtcaacttggttacaaatacatcaggaaaaagttagggaaaagtctgtcctttctgctactttcccctcctattctttcattgaatgccatgcattcctagacctttgtagactacttgatttgtctaatgtca

SEQ ID NO: 258880 - DNA, 583 bp, Homo sapiens
ttacaaatgtatgcttgtgtcaaaatgtcacatggacctccaaaatatgtataactattatgtagtcatacaaacataaaattataaaaatatatatttataataggaagcagaaataaatggatactttaaccaatttaacttcatttcatgttatttctatgaaataaaagaaattgcrtataataaattaaaacatggcttaaaaaaatgactgggaaataaatgtaaaaataaattgggtgagaaatataaaatgtgtgagtcaattaataacccaattggagaattaaagataatgcaagaaatgaagagtgcatttggtactataagtaatgggcaatcaattatgcagagtatataccagtcagaggaactgaaaaatgtgattaaaagggtcagacagaaatgaaagctctgaagactacagaagagcagctcaagatacaaataatatactcttccccaaaagaaaaattgtatgagtggaaaatatgaaataattgataacataatagccgaaactttctgaactgaaaatagtattttcactacatgacaggtactataaatgagtttaaat

SEQ ID NO: 258881 - DNA, 566 bp, Homo sapiens
ttaaaggatcagtgaaacttcttcagcaaaggaattgtatgtgctagagcataaaagcatgagaaagcatgatatattcaaagcaccagaarcacttaaaacagctgtaacataaagttaactatagaagatgagcagtatctatatatgtctgatttcttcatttcagaaataatatttattgtagtgacttaaaagcaaaatcatttatttagagacaattatgtagactatactctcggggaggaccaagacaaggggctacatgttatgtagccaacagcacaaaaactggaagtttgcttgggtcaaaacaatgtttaaatgggtcaagagtgtctctactccagagatagttcaggcccactacctgggcatgactgattcctctggaatctccactgagtgcctcaggtaactactaattgctttccactatggctggatggagcacaactgtgttcattctctgtgctgtgggaatagtttggcttctactttcccgctattctttacttagctttggggattttattgctacagatatgcagccttttacccaacaa

SEQ ID NO: 258882 - DNA, 533 bp, Homo sapiens
ttctcccactgttgacatcttaaataacaatagaacatttgtcacaagtgatgaaacaacattggtacgttattaactaaatttcttactttatttatgcattttcttaatttttacccctcgtctttttttctccctcaggatcctatctaagtttccatattacatttagttgtcatgtctatcctagctcctccsgactgtaaccatttctcaaaacttcctagttttttatgacttagtcattctttcttgactgaataattaagtagtcaagagggaaaaccaagagaataaattgattggaaaaagtaagagtcagagtgttctttattgacctctattatatcaaagcttatatttggtgaaagcaggggtaatgctcaatattctcattatttaagtagattgtgaattgtcacttaaaaataaagtttttggccattcattatgtaccctccccatagtgaataaaaatctgtaaacaccattttttccccataaccagcagtcagaactgtttctggatcatc

SEQ ID NO: 258883 - DNA, 572 bp, Homo sapiens
tgtggaaacacatgatgaatgatactcagagaactgtttccttcagtatttttggaaaggccatgtgttcagcatagtwtatgtcaaaaggtacagaccacaaatacagattctctccatatgcttgaaggtcagacaatggcaatgaacactaaaaaaaagacatctcttgttactgcttctatttatgatctgtccctatgaaaaatctcattttagaatgcttttctgagaaaaatttggaatcaaaacgtagacgcgacctgttgaaaattcatctcagtctaagcacaatatttatcctgttcattggaagaagttgcttatagggtcaggattactctgttgttgtaagaggaaaactcttaactgcacctgtatgtggcttaaatcatatcttcaatcatttaataagaagtaatatccagttgtaaagtatccaaatctcactatcagttaccagtggctctatccctttctacatggcattattttataagaatatgtctacagtatattcttgtagagcctctaatttttttcagaaataccaaatcaaaatttagagacat

SEQ ID NO: 258884 - DNA, 561 bp, Homo sapiens
ggaggggaaagaactaacctaaataacttagaaatactaccttgcttgaatactgtaagaacaaagacaaaagaactgtaaataaatactgtaatccacttagtaaatgtatttttcacaagggtatgtgttagtaattcttaaactattttgtgtgagcacaataattgaatatataaatgtagttttgataataagatccagtttctcacaaagtgagaaaaatgttgcaaagcaagtcctgtggtgttggatggaaatcaatagatggttrcatttgtgtgagttagagtacatgcatgtatttcttatgaggtctctcttctgctagagacccagaagccatgacacgtcagcaagcagtgagaacacttagtgcccagctctttgtttcaaaagaccatcctccaacaaaaagaaccaggggtccatggataagtggttgatcctaaggtcaggataggacaaatacaagtttgataccttgtggtgctacaaagtgaagaaaatatttttttgacatgagaactcattgaaagaatacaaaagtcaacctgaaca

SEQ ID NO: 258885 - DNA, 561 bp, Homo sapiens
ggaggggaaagaactaacctaaataacttagaaatactaccttgcttgaatactgtaagaacaaagacaaaagaactgtaaataaatactgtaatccacttagtaaatgtatttttcacaagggtatgtgttagtaattcttaaactattttgtgtgagcacaataattgaatatataaatgtagttttgataataagatccagtttctcacaaagtgagaaaaatgttgcaaagcaagtcctgtggtgttggatggaaatcaatagatggttacatttgtgtgagttagagtacatgcatgtatttcttatgaggtctctcytctgctagagacccagaagccatgacacgtcagcaagcagtgagaacacttagtgcccagctctttgtttcaaaagaccatcctccaacaaaaagaaccaggggtccatggataagtggttgatcctaaggtcaggataggacaaatacaagtttgataccttgtggtgctacaaagtgaagaaaatatttttttgacatgagaactcattgaaagaatacaaaagtcaacctgaaca

SEQ ID NO: 258886 - DNA, 561 bp, Homo sapiens
ggaggggaaagaactaacctaaataacttagaaatactaccttgcttgaatactgtaagaacaaagacaaaagaactgtaaataaatactgtaatccacttagtaaatgtatttttcacaagggtatgtgttagtaattcttaaactattttgtgtgagcacaataattgaatatataaatgtagttttgataataagatccagtttctcacaaagtgagaaaaatgttgcaaagcaagtcctgtggtgttggatggaaatcaatagatggttacatttgtgtgagttagagtacatgcatgtatttcttatgaggtctctcttctgctagagacccagaagccatgacacgtcagcaagcagtgagaacacttagtgcccagctctttgtttcaaaagaccatcctccarcaaaaagaaccaggggtccatggataagtggttgatcctaaggtcaggataggacaaatacaagtttgataccttgtggtgctacaaagtgaagaaaatatttttttgacatgagaactcattgaaagaatacaaaagtcaacctgaaca

SEQ ID NO: 258887 - DNA, 594 bp, Homo sapiens
gaagtactaggctctcaataaacatttgctgaatgaacaaatgaatgtatgaatgagtggagtagttataaaaattaaatgagataatgtgcctttgaaaatatatgattttttgtatataaattgaataaaccagcacattatgacatttaaagtacttgtgagatagtcaggctttgccaattctccccttgatagtttgggatggtagaagaattcactatggggtaggggaaaatgaaagcaaaaagcatgcaattatatcatccagattcaagcaaagcagtatatttatcttttatatactgagttccaccttgagttcagacaaasaggagaagtcaatagctaaacatacataaatacacaatgaggatgatgataataactaaacaaaagccagaaaaacaaactcagaggaattgaacaccattgtgataagaaataaatagggttatgatctggactgagatcagactagaagcctgtcatcaaagcagaagtcaatgccaactcctaaagtggtccaaagtagggttcaggtactgaatcagatcacacaaaaaggatgatgttcaaagttaagaaacagct

SEQ ID NO: 258888 - DNA, 568 bp, Homo sapiens
acaaatgcaaaaagcaagtgcaacaagctgggagttttaggtaacagaaaatagggcaaygtagtgggaacagagagtgggatgagcagagaagtaggtacccatacagcgtgctttctttcaaaatctccatgtaatttcatacttatttatttcagcttttagagctccacatttgaaaatgttaaactgatcagcaacagatttttgatggctttgaatgagtgctgatagaggtagaacataacccaaagattttcctggcatgagtgtatccttggccatactgaaatcatgtttctcctgttttatcttgcatctccctaaaaagtaatttctttaaagataactcttaatgaactttaccctttatctcacttccacatgatctttactgaatgtaatagaaagttcacttatctcctcaagttagcttatttcaaatctgacattgactttcaaaatcagtttatgtcaacaacttatttgctgtgataatactatttctgtcttacagaagagtctttttaaatttttccctttcttcaagctcctctgtataatatgt

SEQ ID NO: 258889 - DNA, 550 bp, Homo sapiens
aattttcttacttttacctataaatcctcaaggtaggtgatgggctgcagtttaacagttggtttcacaatctcttggaatgtcctgcatggagagcctggcatctatatttcttggtcttaaaatgctctgctgaaaatctgagacaacaggaaaagrgtcatttaacatcttattacatataaataaatgactaaaatcaactcgaaaattgctaaaaatgaagcagcaaaagatttatctctgaaaaggaaacatctggctgggcatgctggttcacacctgtaatccctgcattttgaggggccaaggcaggagaatcacttgagccaagagttcaagaccggtctgggcaacatagctagccaggaatggtggtgtgcacctgtaatcccagctactcaggaggctgggtcggggagatcacttgagccccagagatcaaggctgcaatgagctatgattgtgcactgcattctagcctgggtgacagaggaagacgtctcaagaaaagaaaaataatcaaccgtgatagttttaaagtatgttt

SEQ ID NO: 258890 - DNA, 548 bp, Homo sapiens
tcatgaaatttaaaaattatacacttgagcactaaaaagtgttgatgaggctatggaacactggaaatactaatatacgacaactctggagaataatatggctattctggtaaagttgaaaatgcaatatctacaaatcagcaattcttttcctggctatatattctgcaatagtgttttacaaactgtaggacttggatatattagtaggtagagaaattaattcagtgggacaaggaaagtcctttttaaatggaatgggatgatgtcttagtctgttttgtgttgctataacagaatatctgaggttgggtaatttataaagaaaagaagttaatttggctcatgattctggtggctggaaagtccaaaagcatggtgctgacatctgcttgcttctggtgagggcttttttgctgagtcataacatgacagaaaagtggaaatgggagcaggcacatgctaaaaragaccaaacacaaggaggaacaacctgctgctgcaggaacaaatcaatttcctcaacaattaatccagtcttaagagat

SEQ ID NO: 258891 - DNA, 617 bp, Homo sapiens
actggaaattggtatcgtgctcctgacaggatgtcacgacaaaaatgcagcatcattctgtggtatttctgccagagatgtggaacacaaatctagggggatcttttaaaaaatctaaattaacacacagtctatagagtagcctataacctacaatactgccaaagtcataaaagtcaaagaaagactgaggaattattccagactgttccagaccaaagaagactaaataggtgtgagcatcagatacaacatgagattctgaacttcatcttttggttaaaaaaaaaaaaaacacacattggggacaattggcaatacttgaatagaatctgagatttgatatcagtttcctgattttgaggattggaggatagctgtgttgagaatgtccttgtttgtaggtaatacacacttaagtatctgtgggtgatagggcatgaggtcagcaacttactgtcaaatgcacaggggaaaacgttttttgtactctcyttaccaattttctgtaaatttgtgatcatttcaaaatttaataaaattaaaaacttatgaagagttacattattgaatgagaagtaaacaggtcaatacaaaaaggtgtatggtggaggcct

SEQ ID NO: 258892 - DNA, 576 bp, Homo sapiens
acctgttttagttagcgtatcagttcattttctcactactatagagaactacctgaaacggggtaatttatgaagaaaagaggttcaattggctcacagttccacaggctgtacaggaagcatggctgagaggcctcagaaaacttacaatcctggtggagatgaaggggaagcaagcatgtcttagcatggtggagcaggagacagagagtgaagggggaartgctacacacttttaaataaccagatcttgtgagaactcactcactatcatgagaacagctagggagaaatttgccccatgatccaatcacctcccaccaggtccctcccccgacactgggaattacaattcaacatgagatttgggtgaagacagagagacaaactatatcattctgcccctgggccctcctaaatctcatgtcctcacatttcaaaacacaataatgccttccaagcagtcccccaaagtctgaactcattccagcattaaaagtacaaatccaaagtctttggattttaccagtctgtaaaatcaaaaacaagttagctacatccaagatacaatgaggg

SEQ ID NO: 258893 - DNA, 579 bp, Homo sapiens
atggtggctctacccctgcagcagatctgcctggacatccaagcatttccatacatcatctgaaatctaggttgaggcttccaaaccgcagctcttgccttctgcacatctgcaggccaaacaccacatggaagccaccaagggttggaagcttggggcttgcactatctgaagtaatggcctgagctctaccttggtcccttttaaccacagctggagctgaggtggctgggatgcaggatgccatgttccaaggcagcacagagtagcagggccctgtgcctggtccataaaamcatttttctctactaggcctccaggcctgtgatggtaggggctgccactagagtctctgaaatgccttggaggcattttccccattgtgttggctattaacatttggctcttcttatgcaagtttctgtagccttgaattcctcccaagaaaacggattgttcctttccaccacatggttgggctgcaaattttctaaacttttatgctctgcttcccttttaaatataagttctaatttcaggtcattttttgtgtatgcaaatgagaataggcttttagaa

SEQ ID NO: 258894 - DNA, 551 bp, Homo sapiens
ttcttctaccaaaggattctgggataaatatatttttggccatttggcatactatagattagggatcagcaaatttgtcccgtgaaggaccagatagtaaatattttaggctttgtgggttatatagggtcttcttctcctcttcctcttctcccttcmccttctctccctcctcctccttccacttcttcacaaccctttaaaaatataatgaatattcttagcttggaagctgtacaaaaacaggctgtgggccatgtttggcccatggactggtagtttgcccactccttaatattcgaaatatatattagcacagtaaagactctgaaaagatctgtaagataaaaatctgtttaaccagatttatcccaaacttattggaccagaaaactctttttctcttaaccatttcatatctcacataattagttttccatggaaaatactttggaaaattctgaccttttttatatagagagaataataaaatttatccctactatataaagaaacactccaaatggcttaaagacataaatagaaaaagt

SEQ ID NO: 258895 - DNA, 551 bp, Homo sapiens
ttcttctaccaaaggattctgggataaatatatttttggccatttggcatactatagattagggatcagcaaatttgtcccgtgaaggaccagatagtaaatattttaggctttgtgggttatatagggtcttcttctcctcttcctcttctcccttcaccttctctccctcctcctccttccacttcttcacaaccctttaaaaatataatgaatattcttagcttggaagytgtacaaaaacaggctgtgggccatgtttggcccatggactggtagtttgcccactccttaatattcgaaatatatattagcacagtaaagactctgaaaagatctgtaagataaaaatctgtttaaccagatttatcccaaacttattggaccagaaaactctttttctcttaaccatttcatatctcacataattagttttccatggaaaatactttggaaaattctgaccttttttatatagagagaataataaaatttatccctactatataaagaaacactccaaatggcttaaagacataaatagaaaaagt

SEQ ID NO: 258896 - DNA, 507 bp, Homo sapiens
tgcacaactttcagcatgccaggtgtctcctacatgaaaagttgtgttttgggcagccttctccaagcctccatctatgtgatcctaaactgatgtctcttggggagaactctagcctaatccagtccagagctttcacatgtaggtttgtgagctgtcaacatgagtattctgatatcagaggggacttgtacacagaaaacactatygttatcagatagaaatcaaattagttgattaaataacaaatttaaaaccttgtttactttaaggacttgaggtttaacttaaaaatgttattgggctattatatctgatccattcacatcaaacattctaagcatctgtaacaaggaactcccctttcaaaattagttaatcaaataccttttaacactttaagcctcattaataaaaataatgcatttcattttttcagcccttcaaatgcctaaatggcttctggcttacaaccagaagaagcaatagcttcttcaaatacttaga

SEQ ID NO: 258897 - DNA, 557 bp, Homo sapiens
accaccatttcctacccattatcttgtgtttcaaaatccatgactaatccttttgatatcaccattctcgtaaccccacatttttattatatctcataaccccccagcttacctttattcacctttaatccacatcttttgaaaagatattaatttggggctraatcaccaatggtttgggatttttaaaactatttttcaaatcaatttcataacctgcaaaatatttcacggatgtgaagtgtgaagacagtctatcaccatcccctgcagaagaagtctaaatgagacattaccttcccaggcaccgagttggttcctcagattaggacattgggtttctagtacacatctgggacaaataaaggttttgtttttttcttaagcttctgatttataggtcaacaaaacagcatgttctctgcaaaaatgctcttaagatgcatggtatttctctagtgagacaaacatgccatttaatagtcatcagatatttataaggtgacaattcattcacttcactgttgccccattgctgttcaggaaaggcttcaaag

SEQ ID NO: 258898 - DNA, 576 bp, Homo sapiens
gcgaggtaggaggagattgaacaggtcagtaagggcaccgttacaaaaggctttacatgccatccaggaaagagtttgaattttaacctgaaagcaatgggaagtcattgactgatagcttctgagaaaacatttactcaacaagtattggagtacatacaacatcctagtcactctgtggctacctcagaacaggacagacacagaccccgccttcctgcttcaatcgggattggcgagcaggaaacataggttttggagcagggycaatcagtagatactaatgtggagaactgcaggttacaaaaatgaagccatgtgagaaaatgaagccatgtgagtaaatgaatcaaaagactcaaccaaaggcagagctccacagtgtatcagcagggcctggactagggtaaggcaagtaaggttcccaggggtcaaaatgtaatgaggtgctcactcttaggctcatgcaagtgcaggattgatgcctgagaatgagtacctccttatattattctttttttaattttaattgtagagacagcatctcactctgttgcccaggagagagtacagtgg

SEQ ID NO: 258899 - DNA, 494 bp, Homo sapiens
attgtggcggggacctcatgctggtgaacatcccttcctttgctaagatttaattgcaagactgcatcaagctgcaaaggtgggggaggagctggcagaaatagagtccctagctgctcacccactttttagcagcaactctaccctgtatgaaagaggagcatggacttttgatatacagccaggtatgtctgatagggatggaaaccttccygaaatgcatgagtactgctcctgaatgatgcagagaacataatcctttcttgaaaacttagtgcagttgtttcccagtgtgtgttcctagttaacctaatcctgtgaggtgctcccaaaacaaaactaaacaagacaaaagtcttgtggtcagaacgccataattacaatttccacaaagggaacatttttggatgtgaattgcattttaacatatgtgactcttttaattcatttcagattacttaaatggatggattttttttttaaactgtcactct

SEQ ID NO: 258900 - DNA, 494 bp, Homo sapiens
attgtggcggggacctcatgctggtgaacatcccttcctttgctaagatttaattgcaagactgcatcaagctgcaaaggtgggggaggagctggcagaaatagagtccctagctgctcacccactttttagcagcaactctaccctgtatgaaagaggagcatggacttttgatatacagccaggtatgtctgatagggatggaaaccttcctgaaatgcatgagtactgctcctgaatgatgcagagaacataatcctttcttgaaaacttagtgcagttgtttcccagtgtgtgttcctagttaacctaatcctgtgaggtgctcccaaaacaaaactaaacaagacaaaagtcttgtggtcagaacrccataattacaatttccacaaagggaacatttttggatgtgaattgcattttaacatatgtgactcttttaattcatttcagattacttaaatggatggattttttttttaaactgtcactct

SEQ ID NO: 258901 - DNA, 610 bp, Homo sapiens
gtttgtctgatttatcatgattcatctagccttacattgatgtctatgccttggaaggagcaaacacctcttccagtgtttagaaacttctttcagcaggaaaatgccttctcctttcaggttcctgggatgatgcaattgcctctgtaatcataataaagtgtggtcaaagctggttgatgcggcttttggtgggtctgcagttagttctttgtttggcaaacctgttaccaggtactagggcagctgtggatcctgtctggaccttgacaggctggctgcctccaagaccttgttcagtagggcaagtactgggacaagggcctgcttcaaagtctgcagttgstcagcaggtggggggtctaataccaggtgcatggataggtgaggctctcactatgccctttggtaggtctgtggttggtcaagactggcccaagactgtggctaaaaggtactgggactaacttacaagggttctttagggtgtgcagtctgcaggcctgtctccaagggcacagatgggcatgcttcctgctggcttcctagggtacttgcctcaaatagtgtttcagtgagttttaaacatattctattaaaatgttctgtg

SEQ ID NO: 258902 - DNA, 499 bp, Homo sapiens
tttacattagagtttgatgaaacttttccaagtatttttattccagggaaatattaagataaatgtgctattagaattttgtcctttaaatatcaaactacttcaaagagctttgtttgtcaggtatggtgatttattttgctagctcaaataaaggagtagaggaatagtgtaaaaacatgaaagaaaacctattaggatttcaagccaatgtttatccatgcttaagatgaagaggacctagaaaactgtagttgttgaggtcagtttctmctttctcagaatatgtatgctttctttattcctgtttgtctctcatagtccttatgacttctttcgtttcttttcctttcttcacagactgttctcctggaagattattttgtttgcatgtagcccaacacagatactttcctaagtaaataccaacatacattccagtggccaccgccaagagattatacccataatatctagcaatagacaattgtaagaaaaa

SEQ ID NO: 258903 - DNA, 427 bp, Homo sapiens
gattttgactgatttaataatatcaacatattgaaagaatgtctaataatgctgattattagacattatagtatattagactttttaaaatgttagacattatatataatacatataatatattattagacattataacatgatgtctaataatcagcatttttagacaatatattgaaaggwtttttaataatgctgattattagacattatagtataacaaacatttttcatctatgttgtgaatagctgatatattcatggttttaatataccacttgcctatattaaaagtatttcattaatagccaatgacaaaagcaactttcaaaaggaagtctcctcttctcaaattatatatatgtatatacacacatgagaacacaataactgtcaatgaattaattactaaaactaaatcaaaccc

SEQ ID NO: 258904 - DNA, 596 bp, Homo sapiens
atatatatgcagtttggcagagtgacctagaaaaacacacagtggtaggagattaaatgattggtgatcagatttgtaaaaggcgatgagtagaatacaaaacatcatttgaagaggagagaaaaataagcagaagatgatggggtggctatttcaaagggcaatgatgagaaaaacattgaacatacaaatgaaaagaaaaagtatataaaaatattgaatccataggatatagcagtgaaatacaaatcacagagctctagtttggaggttaytgccaactaaaatactgaacatgggaagaaaaacaatatgctgatagagataatcattgattttttatttcttattaaattacattaacatgtatatgtgttaggaaattctacttcttgaaacctagatgagaaatacaattatattaagcaaagtcacttaaattaagaatgccagtatttcaattttagcactttctgtgaaaatacataagaagatggtgcggagttttggatagactgacatgaattgtgaacatataaacaacaactagagttgaaggttttactaattggaaaacagatgacctgagtgaatta

SEQ ID NO: 258905 - DNA, 353 bp, Homo sapiens
agaaaaaattccaagaaaggaaggaagctgtcagtagcttaaagagtgagagaaaagtgtttgtgcagaacccttaaaaagaccagcatttaagtgacaggacaaagtttaatagcccacaaaggagatgttgcaaaattaytacgcacaaaggtgtgaaaacaaggagcatgttgagtcagggaattcagggagtagagctgcacgaataaatgagtaacattttgtaatttggcagtgatgtacatttaaaaaccaaagctatacttgctgattttatatggcaccattgaagttgcagctgctattaatgagaattgttccagagacacaacagagatacatacaaaaac

SEQ ID NO: 258906 - DNA, 617 bp, Homo sapiens
accgtaagaagaatatatttttagaattgcaatcaagcctaaaaatcagacaataggcagatattaactacatacttaaattcagagtcacaaaatgcatttctgaataaagctaacataattttttctctatcactaatttagtgttgacttaaatttgaaaaatatgaacacacatattgtttgattaaaaaagaggaactttatgaacactctattgtctgtgttcaagttaagtgctttatgattcactgaatgtcattcattgatgagttaatactgtgcaatcatctgcagaaaatgtcaagagaatttgcatggtgataaattcttaatgttattcttaggtcataaaaagtaatttttattcactattaatgcagaaacaaataatcatatattttcgcacaaatattttaattttctactaggtttacaattatttttttaaattacatagatayaaaatgatgttttagtgaaaaaattatactttaaatatttggatactttatagaaaacctaagggtttatattaagctttcatatagacatacatcattaactaacttaaatctcaactttaaataaataataataatgtgttagtccgttct

SEQ ID NO: 258907 - DNA, 617 bp, Homo sapiens
accgtaagaagaatatatttttagaattgcaatcaagcctaaaaatcagacaataggcagatattaactacatacttaaattcagagtcacaaaatgcatttctgaataaagctaacataattttttctctatcactaatttagtgttgacttaaatttgaaaaatatgaacacacatattgtttgattaaaaaagaggaactttatgaacactctattgtctgtgttcaagttaagtgctttatgattcactgaatgtcattcattgatgagttaatactgtgcaatcatctgcagaaaatgtcaagagaatttgcatggtgataaattcttaatgttattcttaggtcataaaaagtaatttttattcactattaatgcagaaacaaataatcatatattttcgcacaaatattttaattttctactaggtttacaattatttttttaaattacatagatataaaatgatgttttagtgaaaaaattatactttaaatatttggatactttatagaaaacctaagggtttwtattaagctttcatatagacatacatcattaactaacttaaatctcaactttaaataaataataataatgtgttagtccgttct

SEQ ID NO: 258908 - DNA, 450 bp, Homo sapiens
taatattttcaattttctatagactgtatttgtattcatttcataattttggcccatttgttttagaatctccctcatgcttcatatgtgacagaactcatgcttgtcatcacattgtttaccaaagctgagtgaagagcatttatcaattgttttcatgtgttctcatcaaaatttcattctagtagtactcacactatactktaatcactttattttcaaacttcgtgtccagaaagttaatggatataggatttatttctattttatgttgactaatttattacaagtacccatcagaatgcatagcaggtgcttattaaatgtttactgaaataacacatgttaaattaagtcacaactaaatataaaaagtgtaacgctatatagaagtacaattcagcagatataaatctaaagtttaaaaatatacctaatccattatgactt

SEQ ID NO: 258909 - DNA, 573 bp, Homo sapiens
gcttttgtttttcatagttttcaactccaataacactactatattagaaatattatggaatactatgcagtcatagtatttttaatgtagtagtgttactggaatactatgcaaccatggtaatagtttgggacatggatgaagctggaagccattatcctcagtaaaccaacacagaaacagaaaaccaaacactgcatgttctcacttataagtgggagccgaacaatgagagcacatggacacagggcggggaaagacacacactggtgactgttgtgggagggcaggtcggcggagagcataaggaaaaataactaatgcatgccaggcttaatacctaggaattgggttggtaggtgaagcaaaccactatggcacacatttacctacgtaccaaacctacacatcctgcacatgtaccctggagcttaaaataaaaaagaaattaaaaagaaaaaatatataacatatattaaaaattatyacatatgcttactttgactgttagacataattaaaaataattatttcattgtcaagctttaaataaaatatcacctaaacatctac

SEQ ID NO: 258910 - DNA, 618 bp, Homo sapiens
acattttgttttagtgatctaagttttttattcttttattataaatccacctgattttatcatctcctctctatatacattgtcttctacattaagtggaccaaaatggtcatgctctttattgaaattaattaaagaacttttcaaaattatttaatattattttatttttgttatatctatacatgatgctacagtaagcaaaattttcctgcagtattttcacccataatattcttctttggtcttttgacgaagcctcttaactgtcaactgactttgtcatgcctttgtcatggttgagaggactttggttcacaactgggcttctcaaaaaagttgtctatttgtgcacccctcagttattcgtgttgcatgtcattgatgttcccaaatacaaagaaaratatgatttatcgactctacatatttcttatcatcctttacactttttctaaaaaaaaaacacaaaacttaccttttgaaatattttctctcagattccataatattatcagcattttttcattaattcacctattgtttagtcaacaaaaattaattttaggattagtaaacatttccttctctcaagtggaatgtagaggaataaatgta

SEQ ID NO: 258911 - DNA, 522 bp, Homo sapiens
atcttggtatggtttgtttgaaggacataaaaagtgttttaagaaatttcaggccgggtgtggtggttcacgcctgtaatctcagcactttgggaggccaaggcggacggatcacgaggtcaggagatcaataccatcctagctaacacggtgaaaccccgcctctactaaaaatacaaaaaaaaaaaaaaaaattagccaggcatggtggcgggtgcctgtagtcccagttactcgggaggctgaggcgggagaatggcgtgaacccgggaggtggagcttgcagtcagcaagatcctgccactgcactccagcctgggcaacagagcgaggctgtctcaaaaaaaacaaaaaaacaaaacaaaacaaaaaacaagaaatttctagaaaatgaggtaagtattaataatgatatatctgtgaatgcaatatgtacacayacacaaacatattcatctagagtataccaaaatgtatctatttttatattatatgtgcctatatgtattataagcatgtata

SEQ ID NO: 258912 - DNA, 547 bp, Homo sapiens
gtttttatatgcagacaacatgattgtctattttgaaaattagatgactgttaaagtgctactagagctaacacctaattttaaaaacttttaagtataaaagaacaataaaactgattttgcttcaaaatattagcaacatttactgggggtcatattttaaaacaacactacttataataggaccaaaaataatacatgaaaataaatctgaaaaaaacaagtgcaaggcctgtatgttcaaatctataaaacattgtgggcataactaaagactaattaaataaaatatataccattagggtttatataccttaaaagtaaatgaactaaactttttaatttaaaggcagaggttggcagataaattttaaaacatatatgaaaccactacatattgtctacaaaagactcactttagatccaattaaacagataagttgagagaaaaagaatgagaaaatatattcaatgcaaatggtaaccaattaagagctaggacrgctaaactaatatcagaacaaaatagaccttaagttaatttttt

SEQ ID NO: 258913 - DNA, 630 bp, Homo sapiens
tcagtttcagatatattctataagcagcagaaaacaaagacacactttcctagctggttggtctttttgatacctgcaccatgaatacatgaaagtctcaggagctccacattcttctacatatttatgctgctatttttttttaatttcagccattatagtcttttaagtatgatcttttaaatttcagccattttccctaaaattgatatggctgagcactttttcaaggccttattgaacaatcatatttattttctggtgaattctgggtcctatatctttcctcactgwcactgttttttcgttaatttctttttgttattgatttcatgtaaataaaatatactctaattttcaatattttatcagataatatgcattgaaaatattttctctgtgtctgtgaattatcagttttcttgagtttcttttaatttaagacaaaaattgttgattttaatgatgtctaattttctgatatttttaaattttattttcactgtgtttactatttacaatattattctacctcatggttataaatattttctctttattgaaagactatataaatatagatacatgtcactttaatatttgtgcataatgtgaggtagtgattagtat

SEQ ID NO: 258914 - DNA, 566 bp, Homo sapiens
agtccttttcaattaaaggtaaattatagaatctatgttagtgcctttttaatagctggcgtagaaaatcttattggtatcttgttgaacctacaggtcgatttatagagaattgataacaatattgcattttagcaacaatgagtatgatctatctctccacttgtttacatcttccttgctccactcagcaatgtttacgatttctcagtcccatagaattcccatctgtgtttctctgctactcactaccaaggtatcatccgctttcctgacttctaacactgtagcctgattgtgaaatttataaaagtggagtcatacaacaggtactctcttggacctggaaycttgaacaatatgattacaagaattatccattcttattgttgtactacgcttcgtggtataaatataccacgatttatgtatttattctactgcttttgtacatctgtgcaaaatttattgatagcacagtagagacacatttaaaagtttaaaaagtaggatgttaaagagtttcctgaaattatgacacctgatctgagatttatgttgtttaa

SEQ ID NO: 258915 - DNA, 554 bp, Homo sapiens
aaaaatgtaaatatatatatatatatatcccataatcttactgtgatgcttcctctacattgttgcataggtggagagagagtgctcaataactatttgttaacaataaatttgcctatactttgaattctttttttttttttaagagggagtttygctcttgttgcccaggctacagtgcaatggcatgatcttggctcactgcaacctccgcctcccgggttcaagcgattttcctgcctcagcctcccaagtagctgggattacaggcatgtgcaaacatgcccagctaattttgtatttttagtagagatggggtttctccatattggtcagactggtctcaaactcccgacctcaggtgatctgccagcctcggcctcccaaagtgctgggattagagacatgagccactgtgcctggtctacttcaaatatttttataagatgactttgtttggctaaaactaaggttatgtttcacaaaattagaatcaagcttacatgtaaatagacttaatgtccagcaaaaatagaggggattcatcattatac

SEQ ID NO: 258916 - DNA, 554 bp, Homo sapiens
aaaaatgtaaatatatatatatatatatcccataatcttactgtgatgcttcctctacattgttgcataggtggagagagagtgctcaataactatttgttaacaataaatttgcctatactttgaattctttttttttttttaagagggagttttgctcttgttgcccaggctacagtgcaatggcatgatcttggctcactgcaacctccgcctcccgggttcaagcgattttcctgcctcagcctcccaagtagctgggattacaggcatgtgcaaacatgcccagctaattttgtatttttagtagagatggggtttctccatattggtcagactkgtctcaaactcccgacctcaggtgatctgccagcctcggcctcccaaagtgctgggattagagacatgagccactgtgcctggtctacttcaaatatttttataagatgactttgtttggctaaaactaaggttatgtttcacaaaattagaatcaagcttacatgtaaatagacttaatgtccagcaaaaatagaggggattcatcattatac

SEQ ID NO: 258917 - DNA, 554 bp, Homo sapiens
aaaaatgtaaatatatatatatatatatcccataatcttactgtgatgcttcctctacattgttgcataggtggagagagagtgctcaataactatttgttaacaataaatttgcctatactttgaattctttttttttttttaagagggagttttgctcttgttgcccaggctacagtgcaatggcatgatcttggctcactgcaacctccgcctcccgggttcaagcgattttcctgcctcagcctcccaagtagctgggattacaggcatgtgcaaacatgcccagctaattttgtatttttagtagagatggggtttctccatattggtcagactggtctcraactcccgacctcaggtgatctgccagcctcggcctcccaaagtgctgggattagagacatgagccactgtgcctggtctacttcaaatatttttataagatgactttgtttggctaaaactaaggttatgtttcacaaaattagaatcaagcttacatgtaaatagacttaatgtccagcaaaaatagaggggattcatcattatac

SEQ ID NO: 258918 - DNA, 599 bp, Homo sapiens
ctggaatcatctgggatgtccttctattccaaatggtccaatttatgcagctccattgccctgggagttcagctgggcatgaggatggaaaatccaaatggctcacccacatgtctagtgccttarttatggtagctgagacatctgggtgaggctcaacttcactagaagcagcatagttatacttcttacgtggtggcacagacctcgaagagagcaatataaagttggtaggtctcatttctgtccatgctattggtcaaagcaagttgcagtgtcaactggaattcaagaagggaagtaaactgtactgtatggagagagttgcaaaaaaatataaaagggtgggagaatagttgacaattgtcatttaagaaaaggcagaaaaaggaatattaaggtatatgaagatagcaacagcagagtgcagttacccacctagtgctgatgaaacaaagggaagaagttgagaaaattaaaacttaaaagggtagaggagtagccaaatgaggctggaactcagactcctgatcagaaggcactattcagctggagcaatgtctaggaacctaacagagtttcctcatattttaagtatt

SEQ ID NO: 258919 - DNA, 590 bp, Homo sapiens
ataaatatttaatcagagcagcccctcccatttcaaatacaaattatttctataagaatttgacacctgggagtactaagaacaaatgtaaaaaaggcaagacttgaaacctggtccatttcctaatcataatagttcaaattcttacattaagtgacaattgaaagagagaaggtgtagtcatttgtaggcataaaagctgtcattttatacactgtagttcaatttaacttatggcataaaaaagaaatatatgaggcatacataagtctaaggaaagcaatacacacccaagatccaaagtcagattcagataaaacatcagtgcaggatctccctatctatgataaatacgttgaagtctttcagggaaggtacagaacatgcaggatcatatgggtaatgtcagaagaaatatgaaaattataacaaataattaaaaattatagaagtgaaaacagcaacaaagacgataaatgtgttggcactggcttgtgatagtttcatgtgttgaattggctaggctatagtatccagttaytcaattaaacactaatctaggtgttgttcttgagtattttatagatgta

SEQ ID NO: 258920 - DNA, 416 bp, Homo sapiens
ctgctagcttttgagggtattcactcctcattcctactgaaagtggacttccagggaagagttatttcttaataatacaatatgccatattcagtgtgctcttctggaggtagccacctcggtctctgatgtctattctaattttctgtktgaatggttggcagagatagacttaggcaggagatcactggttggtggtactcacggtaatactctggcaaacattggcattactcccagcccatcttcttgtgcttatagcagaacatacctagtgttcccactttcatctttcagtaattgctctcagttcctgcactccctggtgtttcctttttttatttaagaaaattattctgctcttttaaggcagctactgtatggtagagcagcttcagtgagtattcacaaattag

SEQ ID NO: 258921 - DNA, 416 bp, Homo sapiens
ctgctagcttttgagggtattcactcctcattcctactgaaagtggacttccagggaagagttatttcttaataatacaatatgccatattcagtgtgctcttctggaggtagccacctcggtctctgatgtctattctaattttctgtgtgaatggttggcagagatagacttaggcaggagatcactggttggtggtactcacggtaatactctggcaaacattggcattactcccagcccatcttcttgtgcttatagcagaacatacctagtgttcccactttyatctttcagtaattgctctcagttcctgcactccctggtgtttcctttttttatttaagaaaattattctgctcttttaaggcagctactgtatggtagagcagcttcagtgagtattcacaaattag

SEQ ID NO: 258922 - DNA, 574 bp, Homo sapiens
actgtggtctttgaaaatcactggtgttcatttaaagcattttgttcactggatggtcagagattctgtttgcaaaatgtattaggccatttttgcattgctgtaaagaaatacctcaggccaggcatggtgactcaggcccataatcccaccactttggaaggccaaagtgggcagatcrcttgaggccaggagttcaagaccaacctggccaacatggtgaaatcctgtctctactaaaaatacaaaattagcccaccaggtgtggttgcacacccctgtagccccagctaccagggaagctgagtcatgagaatcacttgaacccaggaggcaaaggttgcagtgagccgagattgcgccactgcactgcagcttggtctgggcaacagaggagtgagactgtctcaaaaaacaaaaacaaaacaaaacaaaacaaaaaacacaaaaaaacggagactgagtaatttataaagaaaagaagtttaactggcccaaggttctgcaggccatacaagaatcatagtgctggcatctgcttctggggatgccttgggaagcttacagtcatggc

SEQ ID NO: 258923 - DNA, 574 bp, Homo sapiens
actgtggtctttgaaaatcactggtgttcatttaaagcattttgttcactggatggtcagagattctgtttgcaaaatgtattaggccatttttgcattgctgtaaagaaatacctcaggccaggcatggtgactcaggcccataatcccaccactttggaaggccaaagtgggcagatcgcttgaggccaggagttcaagaccaacctggccaacatggtgaaatcctgtctctactaaaaatacaaaattagcccaccaggtgtggttgcacacccctgtagccccagctaccagggaagctgagtcatgagaatcacttgaacccaggaggcaaaggttgcagtgagccgagattgcgccactgcactgcagcttggtctgggcaacagaggagtgagactgtctcaaaaaacaaaaacaaaacaaaacaaaacaaaaaacacaaaaaaacggagamtgagtaatttataaagaaaagaagtttaactggcccaaggttctgcaggccatacaagaatcatagtgctggcatctgcttctggggatgccttgggaagcttacagtcatggc

SEQ ID NO: 258924 - DNA, 574 bp, Homo sapiens
actgtggtctttgaaaatcactggtgttcatttaaagcattttgttcactggatggtcagagattctgtttgcaaaatgtattaggccatttttgcattgctgtaaagaaatacctcaggccaggcatggtgactcaggcccataatcccaccactttggaaggccaaagtgggcagatcgcttgaggccaggagttcaagaccaacctggccaacatggtgaaatcctgtctctactaaaaatacaaaattagcccaccaggtgtggttgcacacccctgtagccccagctaccagggaagctgagtcatgagaatcacttgaacccaggaggcaaaggttgcagtgagccgagattgcgccactgcactgcagcttggtctgggcaacagaggagtgagactgtctcaaaaaacaaaaacaaaacaaaacaaaacaaaaaacacaaaaaaacggagactgagtaatttataaagaaaagaagtttaactggcccawggttctgcaggccatacaagaatcatagtgctggcatctgcttctggggatgccttgggaagcttacagtcatggc

SEQ ID NO: 258925 - DNA, 637 bp, Homo sapiens
ataaatatattagatacatagtgtatgcatgtattagaaataatgcataatttttctttttgtataattagtttctggttataattccctctttccagtggcatacaaacatgacaagcrtaatctcataactgaggaaaaaataagacattagctaatagatgatatcacataaaatgtttatttaatatgtgtaagagaatagattagatggaaattgaaacaaaagagaactacaaagaagtagcaagaaggacttaagacaaatacaggatattgtaatgaatttgattgtaaaataagatgaaatagtgaaaagagaaaaaatagacaagtgaaaaagtaaacagtgagaattaattaaataacaatatttggaagtgtggatagttttcaagatatttgtacccatttttaatgagacttttaacaaagaagcatggtatctttagaaggaaaatttccagaaattatgtaacatttcatattagtgtgtcattgagtacacttaacaaaatacacattttataagatgctaacacaatgaaaaattgctataatttattttattttcttattgaggttggttctacacttccttgtaggtcattctttctaaggtttcttcaaatcatct

SEQ ID NO: 258926 - DNA, 603 bp, Homo sapiens
tgccattttaaggctattttctagatctctgtaagtgtgcttcattcctatttattctgttttcttttgatccttttgcctgtatatttccaaatagcgtttcttcaatctcactaattctttattcygcttgatccactctgctgttgagagactctgacatattcctcaataaaatttttcagctccagaatttctgcctgattttaaaattatttcaacctcattgttaaaatgatctgataagattctgaattccttctctgtgttttctttaatttagttaaacttccccaaaacagctattttaaattgtctctctgaaaggtcatctatctctgtcactctgggattggtcaccagttacctatttagttcacttggtgaggtatgttttcctggatggtcttgatgcttgtgaatgtttgtcaatgtctgggcattgaaaagttagttacatattctaatcagagtctgggcttgtttgtccccatattcttgagaaagctttccagatattcaaagggaattgagtattgtggtctagctttttggtcactgcacctgtattttcattagggggcaccacaagcccagtaacac

SEQ ID NO: 258927 - DNA, 262 bp, Homo sapiens
gttgcatataacatggtttrctttctttttaatgctgaaaaatataccaaacctcctttattgattcatcaatcaatgaccatttactttgcttccacaactttgctactgtgaataatattacaaataaatgtggatgtgcaaatatctctttgagatcctgatttcaattgttttggatatatatccagaagcaggcttgctggatcgtatggtagttatacttttaattttttgaggaatttccatattgtattccata

SEQ ID NO: 258928 - DNA, 495 bp, Homo sapiens
ttaaaaatatacactactgttcacataacttacttcttttcttactattgggaagaaaataaaaaggtaatgtgaaagtagaaactagcagttagatacatcctgtttttttaagtcagtttgaccttagaaaaatttagccacttaaaacttctgaacttcttatttcctatctatatatttataaataggaaagttttactgatctcttccaacttcaaaattcagtaagtcaaaacttgtccaaaatattgtttcatctttgagtaaggctgtcaggaatcacaaaaaacatagwtgcatcagggattttcagattcagaaataaaagttgacatgtcagtcacagggaacagacaaagccagtgacagtgtctgaggacttatgagccatgtgtcatctgtggggtttacataaagctgtccatgctaaatctttaataaaagtctgtctcacagcatggaatcaaatttccaattggtgaatatttaaac

SEQ ID NO: 258929 - DNA, 471 bp, Homo sapiens
ccaatggtcatgttccactgaaaccatcccagcacctcaccacctgggctccatgcacattccaagttctgcctactctctgggcagttcccctgccactcaaatgtctatggaatttgtggagtttcctgtagctatgatccttgaggtccatggtgaaagtaggctgcttggcatttatttcactcacctcttctttaggagctrttcagggccaggaatgatttctggttcttggcaacctgatgtgtggttcccagcttcctcccgcttcagcaccagcatttagggtgtctgtctatcaactcccagtacattctctcagatgatgtttggattctgccaatctattcaatgttctggtctgtctcaatgggagaaattcttcctgacttcatgtagttggccattttttcaccctctctatttttaaatttttcacacaaaaaaattttgtgtaaattttgtcaa

SEQ ID NO: 258930 - DNA, 609 bp, Homo sapiens
taaaacttgcaatgctgtcatttatttccataattagtgaattcatggttatttagtttttaacatattttcatattttgttttattgtttgagaaatcaaatcaaaaaatttaacctcccagattttgttttgaaactgtaataaaattataccatattatctaatagtctataaagttttcaatatgctgttaaatttcagttttatgattaaaatatgtttataaattgttttggtcacgtgttcttccataaccagcacaaaagttagtggctgaaaacaagcatcaacaaagaatttcccactgcttgtgacctggttttttatgatcttctaactattcatgttttccacatttttaaaaggttgtgaaaacagatgccatatatgaatcacaaattctaaaatatttagtttgtaactttttcttaaaaatcgttgctaacatctggcttaaacaaaccaccagttcattatatatcacatttggatagggcttacctggttgttttctgatctttcttctgacctcctatgyggttggactcagatggtagttgggcttatggctagaggtggttgtttgtaaccttatacttttcatgtg

SEQ ID NO: 258931 - DNA, 582 bp, Homo sapiens
tggtttatgagttacaacgatttaattagttatagtttgcttccttttccatacagcttgtttttccatttcaatttaaaagagtatatttaacattccatctaatatattgtgatagtcatgaattgttttttgtgagaaaggtaagagggaaattaatctataatgaagatcaacagtaaagagagacatagtcttccttggtgatctttagtcatttacaacattttataaaaccatgtaggtaaggaagaagtctaatctataaagagaaacataggttatagatagctgcctatgttacagctgcctgatgtgagtctcccctaatcacatttccccaaggctgaaaatattttaaagtttcaacagcttacattttgaattacttatttccayacagcatttgctccatcaatagcagcatacaaggtaacaggagatgtgttaatttgctcaagtaatgaaagcacatctgcaaaagcaactgcaatttgaacatttacaataatccactgtccccttctccaagatccatttgttttctgagtatgccaaatacatgacttgaataaggctcta

SEQ ID NO: 258932 - DNA, 587 bp, Homo sapiens
gtggcactaatctttgcaatacckccaaaaatgcattattgctttcagtttattatatgttggggtagaggcaattatattggcttatacttaaacttttctaccataatagctctcaatatacaggtcagggaaccaatgtgtggactgtgccagttgctgagtatgtctattccaattttacattctagaactggaaaaataacatcaaatgggttcgtggatacattggtccactgtgagatagatctaagcaaaaattccacaatcgccataatttctcaactctggtagactacagtaacaatttgggtcttcaggaaagagtgtgtcatttcagatccagtctccagtaatctccaaaatgtttgattatttccccttttccattgcatcattaccctagtaaacatccataggtccatttggaaaaagatggtaaaaaaacaagcagtacacatttttcgtggtgtagaagtgtcctgaaaattggttcatattttagaattgattgataggtcatgaatatcttttttggtacttcaaattagacctctattcactaaacctagaagtttccctcttac

SEQ ID NO: 258933 - DNA, 620 bp, Homo sapiens
agactattaatgatcacctttgtatgaaatttccttaatttcattgaaatatacacatttaaagggctctgtcagaaattaaagaactttctaaaacaaatactatacctaaaaacatatatttagccttactgaattttctgtgaaagtccccagaaatgctttgctctgtcccatttctttttattttaacttttattttaggttcggggtacatgtgaagttttgatatgtaggtaaatttgtgtcactggagtttgttgtacagattattttgtygtctaggtactaagcctagtacccaatagttattttttctgctcctctccctcctttcaccctctgacctcaagtaggcctcactgtctgttgatcctcactttgtgtccatgaattctcatcatttagctccccacttataagtgagaatatgtggtttctgttcctgtgttagtttgctaaggataatggcctccagctccatccatgttcctgcaaaggacatgatttttttctttcttgtggctgcatagtgtaccatggtacatatgtaacacattttctttatccagtctgctgctgatgggcatttaggttgattccatatctttgctgttatg

SEQ ID NO: 258934 - DNA, 447 bp, Homo sapiens
ggctatggagttttctagctatagaaacatgtcatctgcaaacaaggacagttagacttacctgtcttcctgtttggatgccctcatttactttttcttgcctgattgctctggccaggtgttctgtcccatttttaaaaaaatattattgytttattactctatttataaattattacagtcttccttttatagtgaatgtaatgttccttcataaaatgaacaaatggctgaagattttaaaattaatatctttcttagtctacattgcctataatattgagggattgaaggtggcagaaatgtaataagtaacaaatgcaacaaatcatcatgattgctatgaaaaatttacactacatgctaaaacatctttttaaggatatttcttagttgcaatgatcataattaaacagatatttctcttcttatagttcagaaagtatg

SEQ ID NO: 258935 - DNA, 620 bp, Homo sapiens
aggctggaaaaagaagatacattcccagagtcttttgcagcaaaaggtggccaaagaagtacagacagaagttccaggagagagaattctttgtcacataaaaatgcaaaatctctaagagaaaataatttttcttcttccgcctttttcctgcataaaccagacacacctcaaracacagccacagccacagtgcaaaaataaggcaaaaagccacaggctgaagatggtggaggcagggaagagggaagacacggggctcctgatgcccttgagcagctcttggagcctggactgcttagccccagacttctcattaggtgagaaggacaaacccctggcttgtttaagccactctgtgtcaggtttcctgttagtcgcagccaaatacattcttgcctgtaaaagtcattggtataacaaacctctctagctatgtatttatcaatgatcaacttcaccaaaaccctccaagtcttcatagagataagtgactgagagtgcttgctccatgcccgtgagcgtgaggttttactgcccctctcagtgcatcctcacggaactctacgagaagcaaagtgaggacctcctcaatccaagttagtctgaaagcagctcct

SEQ ID NO: 258936 - DNA, 620 bp, Homo sapiens
aggctggaaaaagaagatacattcccagagtcttttgcagcaaaaggtggccaaagaagtacagacagaagttccaggagagagaattctttgtcacataaaaatgcaaaatctctaagagaaaataatttttcttcttccgcctttttcctgcataaaccagacacacctcaaaacacagccacagccacagtgcaaaaataaggcaaaaagccacaggctgaagatggtggaggcagggaagagggaagacacggggctcctgatgcccttgagcagctcttggagcctggactgcttagccccagacttctcattaggtgagaaggacaaacccctggcttgtttaagccactctgtgtcaggtttcctgttagtcgcagccaaatacattcttgcctgtaaaagtcattggtataacaaacctctctagctatgtatttatcaatgatcaacttcaccaaaaccctccaagtcttcatagagataagtgactgagagtgcttgctccatgcccgtgagcgtgaggttttactgcccctctcagtgcatcctcacggaactctacragaagcaaagtgaggacctcctcaatccaagttagtctgaaagcagctcct

SEQ ID NO: 258937 - DNA, 582 bp, Homo sapiens
cttgtgttttggtcaacaactaaccacatacactacaatggtcccgtaagattataaagaagctgaaaaattcctatcgcctagtgatgtcatagccatagtaacataacacattacctttccaatgtttagatatatttagatacacaaataccactgtgccacaactgtctacagtattgggtatagtaacacgccttgtagcctagtaacattatttgtagcctaggagcaatagactataccatatagcytaggtagtaggtgtagcaggctacacaacctaggtttgtgtaactacactccatgatgtttgcacaatgaaaatgcctaaggacacatttctaacaaggtatcccagtcgtagtccttaagcatggactgcatgactgtatatcggttgttcaagagatgttaagactttctgtaaaagaaactattactgcaaagcaatttcaaaccgtctcagatcgtagtatcacatctattaatacaaaagagccttcaaattttcaaaaagtctcctcaaaatttcattttattcgaagtgaaaatgaattaaatcaaaaaaggaaattcact

SEQ ID NO: 258938 - DNA, 582 bp, Homo sapiens
cttgtgttttggtcaacaactaaccacatacactacaatggtcccgtaagattataaagaagctgaaaaattcctatcgcctagtgatgtcatagccatagtaacataacacattacctttccaatgtttagatatatttagatacacaaataccactgtgccacaactgtctacagtattgggtatagtaacacgccttgtagcctagtaacattatttgtagcctaggagcaatagactataccatatagcttaggtagtaggtgtagcaggctacacaacctaggtttgtgtaactacactccatgatgtttgcacaatgaaaatgcctaaggacacatttctaacaaggtatcccagtcgtagtccttaagcatggactgcatgactgtatatcggttgttcaagagatgttaagactttctgtaaaagmaactattactgcaaagcaatttcaaaccgtctcagatcgtagtatcacatctattaatacaaaagagccttcaaattttcaaaaagtctcctcaaaatttcattttattcgaagtgaaaatgaattaaatcaaaaaaggaaattcact

SEQ ID NO: 258939 - DNA, 582 bp, Homo sapiens
cttgtgttttggtcaacaactaaccacatacactacaatggtcccgtaagattataaagaagctgaaaaattcctatcgcctagtgatgtcatagccatagtaacataacacattacctttccaatgtttagatatatttagatacacaaataccactgtgccacaactgtctacagtattgggtatagtaacacgccttgtagcctagtaacattatttgtagcctaggagcaatagactataccatatagcttaggtagtaggtgtagcaggctacacaacctaggtttgtgtaactacactccatgatgtttgcacaatgaaaatgcctaaggacacatttctaacaaggtatcccagtcgtagtccttaagcatggactgcatgactgtatatcggttgttcaagagatgttaagactttctgtaaaagaaactattactgcaaagcaatttcaaaccrtctcagatcgtagtatcacatctattaatacaaaagagccttcaaattttcaaaaagtctcctcaaaatttcattttattcgaagtgaaaatgaattaaatcaaaaaaggaaattcact

SEQ ID NO: 258940 - DNA, 582 bp, Homo sapiens
cttgtgttttggtcaacaactaaccacatacactacaatggtcccgtaagattataaagaagctgaaaaattcctatcgcctagtgatgtcatagccatagtaacataacacattacctttccaatgtttagatatatttagatacacaaataccactgtgccacaactgtctacagtattgggtatagtaacacgccttgtagcctagtaacattatttgtagcctaggagcaatagactataccatatagcttaggtagtaggtgtagcaggctacacaacctaggtttgtgtaactacactccatgatgtttgcacaatgaaaatgcctaaggacacatttctaacaaggtatcccagtcgtagtccttaagcatggactgcatgactgtatatcggttgttcaagagatgttaagactttctgtaaaagaaactattactgcaaagcaatttcaaaccgtctcagatcgtartatcacatctattaatacaaaagagccttcaaattttcaaaaagtctcctcaaaatttcattttattcgaagtgaaaatgaattaaatcaaaaaaggaaattcact

SEQ ID NO: 258941 - DNA, 411 bp, Homo sapiens
ttaaaatgtgttacttgtttataggtaacaattctagcmatctacctgggtcagactgtctagggaaaaagaagagacttagaagaaaagggaaccaaggaatgtgactttttaaaattctgacagtggtcaagtagaggacagtgtaatgtgaaaggatatagaagcagcagtgaaagaagaatgaagaaacaaagctgtgtcatgtaaactcagaaaaagactattacaaaaaggaaagtgtgatcatctttgtttactaagggaagtcaacattttttttatgagattgctgagaccttggcaagaaagccataatggagtggttgaggactgggtatagctaatgaaatgagaagtaacaacaactctttggaaaaggtttggctgagaaagggaggaaggagcaat

SEQ ID NO: 258942 - DNA, 205 bp, Homo sapiens
tttataccccgcaaaactatcaaccaaacataaggctaaaatccattctcaaaaaaaaaaaaaagttttatttatttatgccctgtctgaggtagctactgaagattgcttgccaccraaacaagattaaatcaagataaggagaaaatgtagaatatagaaaacaagcaagctagcacatgatagaggcaaaagagttcctcaa

SEQ ID NO: 258943 - DNA, 590 bp, Homo sapiens
atgtttcaaaaatcaggaggaagaaatgtaagcatattatttggagacacagtggcaaaagtaatatcaagctaaacgttttggaagtcattgctgtaggaaatgggaaatggggggaaggcatacagtacttctggtttttatwcaagtcttctagaacaatttgatgggtgtataactttaattttggaaatgcaaatgaagtaatacatgcttattacaccattattaataatgataaatatcattatcattaatgaataataaataaatagcagaaccttgaattcatgacttctgagtcaggtgctctttctacaaaaatcaaaccagaattagaatatttaccaatctttttgtttttatagagcatacatatatatatctgtttgtctttatctttccacttcattcaagaaaataatacttttcaatccattcgaagtctaggaacagatcagatgccaagtaatcaattgtatagattttctttaatggagtaaggctctcaaacaaaaaaatcactgagaaaatttaaataactaagatcacagcaaatcttcaagttcacaaaatatgaaaacccaaaa

SEQ ID NO: 258944 - DNA, 590 bp, Homo sapiens
atgtttcaaaaatcaggaggaagaaatgtaagcatattatttggagacacagtggcaaaagtaatatcaagctaaacgttttggaagtcattgctgtaggaaatgggaaatggggggaaggcatacagtacttctggtttttatacaagtcttctagaacaatttgrtgggtgtataactttaattttggaaatgcaaatgaagtaatacatgcttattacaccattattaataatgataaatatcattatcattaatgaataataaataaatagcagaaccttgaattcatgacttctgagtcaggtgctctttctacaaaaatcaaaccagaattagaatatttaccaatctttttgtttttatagagcatacatatatatatctgtttgtctttatctttccacttcattcaagaaaataatacttttcaatccattcgaagtctaggaacagatcagatgccaagtaatcaattgtatagattttctttaatggagtaaggctctcaaacaaaaaaatcactgagaaaatttaaataactaagatcacagcaaatcttcaagttcacaaaatatgaaaacccaaaa

SEQ ID NO: 258945 - DNA, 590 bp, Homo sapiens
atgtttcaaaaatcaggaggaagaaatgtaagcatattatttggagacacagtggcaaaagtaatatcaagctaaacgttttggaagtcattgctgtaggaaatgggaaatggggggaaggcatacagtacttctggtttttatacaagtcttctagaacaatttgatgggtgtataactttaattttggaaatgcaaatgaagtaatacatgcttattacaccattattaataatgataaatatcattatcattaatgaataataaataaatagcagaaccttgaattcatgacttctgagtcaggtgctctttctacaaaaatcaaaccagaattagaatatttaccaatctttttgtttttatagagcatacatatatatatctgtttgtctttatctttccacttcattcaagaaaakaatacttttcaatccattcgaagtctaggaacagatcagatgccaagtaatcaattgtatagattttctttaatggagtaaggctctcaaacaaaaaaatcactgagaaaatttaaataactaagatcacagcaaatcttcaagttcacaaaatatgaaaacccaaaa

SEQ ID NO: 258946 - DNA, 431 bp, Homo sapiens
tttcttccaaggctacctacaaaaatattgatcttgaatttttgtatttttgtaayactttcagaagcttatattaaaactgcttttctatttgaatttaaaaccttaacattacaattatgtttgaaaaatctcaacatatgtccagatattaatcaattaaatggcttacaaagctctcaggcccatttgtctctcccacctcctctttttgcatttcatatttcaacagttccaaactatttgtaatttctggtctagtcctgtcttttcatcttgagctctttgcacacagtattcctccagcttggaatattctctctcattttttcccctagccttcacaaacacccagccaccaggctgatttaggttctctagatcttttgtctccagtgaatattgtacttattcctattaaagcaattatc

SEQ ID NO: 258947 - DNA, 625 bp, Homo sapiens
ttgaaattaccacccatggagatatttgagccccccacccccccatagctctttcagttgtccagatttcaaggtacatgttaattgtgcttttgatctacagcakcagcattttaccctgtcttttacttctggactaacactcacatgtaaatttattctcatgaccccctgggactgagaaagatggaatgtttttgtaaaagacaacagagtaagcatgtgcaaagttgtacctccctgcattatttatttatttatttatttgatgtactgacagtctgctggcaatgtgatttttgggtctagccagaaacaaagactacaaagccatacaagcatccaacccacaaggatttgagaactggctctgtttctaacaccacactcagttacaaggtaaattccaccaatgccacttgtgtgctaaatctcacatcaaatgagaaaaagattccagaaattagggccaagggagccttgagagtgagccttcctgggcaacttgtgtgggaagaatgggtcataacaggaagagagtgggtcatcaaaggaaggagtcggaccaaaatccacagaaatcccagtgggcaaatatatggcatgcactccaccacacccccaa

SEQ ID NO: 258948 - DNA, 625 bp, Homo sapiens
ttgaaattaccacccatggagatatttgagccccccacccccccatagctctttcagttgtccagatttcaaggtacatgttaattgtgcttttgatctacagcagcagcattttaccctgtcttttacttctggactaacactcacatgtaaatttattctcatgaccccctgggactgagaaagatggaatgtttttgtaaaagacaacagagtaagcatgtgcaaagttgtacctccctgcattatttatttatttatttatttgatgtactgacagtctgctggcaatgtgatttttgggtctagccagaaacaaagactacaaagccatacaagcatccaacmcacaaggatttgagaactggctctgtttctaacaccacactcagttacaaggtaaattccaccaatgccacttgtgtgctaaatctcacatcaaatgagaaaaagattccagaaattagggccaagggagccttgagagtgagccttcctgggcaacttgtgtgggaagaatgggtcataacaggaagagagtgggtcatcaaaggaaggagtcggaccaaaatccacagaaatcccagtgggcaaatatatggcatgcactccaccacacccccaa

SEQ ID NO: 258949 - DNA, 566 bp, Homo sapiens
caggcagaagaataaaagaaggaaatgaacactttccagtcacttatttgaattctaacattgcctaacatagaactctgccaaaaagagggttaaaagacaacaatactacaatgttgaaattaccacccatggagatatttgagccccccacccccccatagctctttcagttgtccagatttcaaggtacatgttaattgtgcttttgatctacagcagcagcattttaccctgtcttttacttctggactaacactcacatgtaaatttattctcatgaccccctgggactgagaaagatggaatgtttttgtaaaagacaacagagtaagcatgtgcaaagttgtacctccctgcattatttatttatttatttatttgatgtactgacagtctgctggcaatgtgatttttgggtctagccagaaacaaagactacaaagccatacaagcatccaacccacaaggatttgagaactggctctgtttctaacaccacwctcagttacaaggtaaattccaccaatgccacttgtgtgctaaatctcacatcaaatgagaaa

SEQ ID NO: 258950 - DNA, 598 bp, Homo sapiens
taggattcagttccttataggctcttggactgaaagcctcagtaccttgctgactgttggccgaaagcctccttcaattccttctacctgagtctctccatagagcaacacacarcatagcagctggcttccatcagagtgagctggcaagaaagcaagagagagtgagtacccaacttgcattctttttgtgaactaatctcagaagtgacataacatacactttccatactctactcattagaagtaagtaactgggtacagcccacactggaggggaagggattacacaaggctgtgaatacaaggaggcaagaattattggtgccattttagaatctgcttactccaaactggaaccaattattttacttctctaaacctcagtttatttttaaatgggtataaaatagctatatccaaaagttcttgtaaagattaacgaacattttatgaaacatttaatccattcagcactcaacaatggttattgaagcaagcactcaataatggttattatttttaataactgttttgtgcttaactagaaaaattaagaaatctgctcgaggaaagaagacatattcatatacctaaa

SEQ ID NO: 258951 - DNA, 615 bp, Homo sapiens
actccagcctgggtgacagagtgagaccctgtctcaccaaaaaaaaagaacaaaactttaatgaaataaaagatgacataaatctatatactaggaaaatcaacccagaatagccaaccctgaatcatgttccagtcaaaagtattgtattttaaataaaaagaggacttatttgggctaccaggcaagaagatcaactcacttataaggaaaaataataagactgtcattagcttttcagcagcaaaacttatgccagaagacacagaaataatacacttaagttattcgagaggaagaaaactaagatgtgcaagaaagaaaataggaaaacaaaatttacaaaaattagctgggcatagtggtgcatgcctgtaaccccagctactcaggaggctgaggcacaagaatcacttgaacctggaargtggaggttgcagtgagccaagactgcaccactgcacttcagcctgggtgacagagcgagaccctgtctccataaaaaaaagaaaagaaaagaaaaaagttttaattttgatgatatccagtttatctgtttgttttgttgcttgtccttttggtgtcatatctgagcccattgtaaaacctacgttt

SEQ ID NO: 258952 - DNA, 578 bp, Homo sapiens
attctttcatttgtggatatctgttgtcctagcaccatttgttgaaaagattattctttactkaattatcctgacacccttgtgaaaaatcaattgatcacagatatatgtgtttacatctgaagtctcaattccattacattgatttatatgtcatctttattgccagtatcacactgtctcaattcctgtagtttgtagtaagttttgtaattggaaatatgagatctccaactttttttgaagttattttggctattctggatctcttttattttcatatgaattttaggatcagcttatcaatgtctttaaagaacccagctgggttttgatagggattatgttggatctgtagttaaagttggtgcttttgtatactagcttctagtattctgtgtcatcaacggcatcttcatattaacttgcatatggcagattataaattttctctgtacaaaatattgaagcatgattgcgggctaacctaccagtgagaggggctattatgcaactaatagtatttcatatttgttgaaaggcaggagaaacagcacattcaattacctcatgttggg

SEQ ID NO: 258953 - DNA, 413 bp, Homo sapiens
gatatttattgaaagctacttaattacagagtagggcgtcctcagaaagcaagaggaggaatggactgtctttaagtttttcttatatagggatcttgtctatgtaaagactaaactaagctgtgcctgcaggtggatggacagatagcatgacaaaatttagtacttyatcaatttaaagaaatctatccttgacatcttagtgtgtaagtacatcaaagcataactataattatcttgaaagcatatattattatgggtgttgggacacctggactttctgttgtagaaatttctccttgccggtgtctttcaactctctccttagctgtaaacatagtcatgacctagtcaggactattgatcaagaccaggaaggaatatgccttgtcagtattaagatgaagttgatt

SEQ ID NO: 258954 - DNA, 449 bp, Homo sapiens
gggttcctcctacaatatgtgggaattatgggagttacaaggtgasatttgggtggggacacagaaccaaaccatatcagaggtagtggaaagaagaatcatcagtggaggctatttatgtatgcatactccctacttggtagaaattttctcatttttaagactcaacaagatgcacttcctcagtggagactttcctaccaattcctatctcaaaggcataattaaccacttccctaatgtattaacgatatgtctacctgattgtatcatggcccctctgacaatttagttattgtatacatacccatcttcatctatcagatcacacatccctttagagcaaggtctatcccatttatctttatctttatatccccagcacttaacaaagttggcacactgaaggcactaaataaagtgaatgaattaatgttctccttgccaac

SEQ ID NO: 258955 - DNA, 449 bp, Homo sapiens
gggttcctcctacaatatgtgggaattatgggagttacaaggtgagatttgggtggggacacagaaccaaaccatatcagaggtagtggaaagaagaatcatcagtggaggctatttatgtatgcatactccctacttggtagaaattttctcrtttttaagactcaacaagatgcacttcctcagtggagactttcctaccaattcctatctcaaaggcataattaaccacttccctaatgtattaacgatatgtctacctgattgtatcatggcccctctgacaatttagttattgtatacatacccatcttcatctatcagatcacacatccctttagagcaaggtctatcccatttatctttatctttatatccccagcacttaacaaagttggcacactgaaggcactaaataaagtgaatgaattaatgttctccttgccaac

SEQ ID NO: 258956 - DNA, 597 bp, Homo sapiens
ccagcacttaacaaagttggcacactgaaggcactaaataaagtgaatgaattaatgttctccttgccaacaaagctgaataaaatgtgaaaataaaaaacaatcaagaattctgctcaagtacaaaatatagggatagcttggagatattgggggtttggttccagagcacctcaataaagcgaatgtcacaataaagtgagtcacacacattttttggtttcccagtgcatacagaagttgtgcctacactatactgtagtatattaagtgtgaagtggcattcagttttgtaaaatttacataccctagttaaaaaatcctttattgccaaaaaatgctaatgatcatctgagcctttagtgagtcccaatctctttgcaggtggagggtcttacctcagtgytaatggctgctgactgatcagggtggtggttgctacaagttggggtggctgtgggaatttctgaaaataagacaacaatgaagtttactgcattgactgactcttcctttcgggaaatatttttatgtggcatgtgatattgtttgatagcattttaccgatagaacttctttaaaaattggaatcagtct

SEQ ID NO: 258957 - DNA, 594 bp, Homo sapiens
gtgggtaagagatattaagtacttatctgtggcactccacgaagaactgaatatatgaaataccactgtacagttttatacatgagtaaatggaaatacagacaataagacaaataaataaaaacacagataaagtaccacgtagaattttctggagaatagttttcttcccagcctacagcctggttgtgctcctcctgctctggagaagaatggatttaaaagaattgtcatttttccccaccyataggaaaatagctgaaacaatacatatttagtttcccagggagtgcttccagcatgagaaaaaccaagttatggcagaatcaagaacctgccaataccaaaagtgagctttgttctccagcctggacctgcctttttcataaattagcccatagattcaccatctgtatttgcacgcacacacacacacacacacacacacacaactagccaggaatggatgcacagtgtctatggcagagagctcccagcttaacaggagggctgtatcaatgagatggtcagtctttgagctgatacaacaatagtcttcaaaaagaacatgcacattccccttgttcacttatt

SEQ ID NO: 258958 - DNA, 594 bp, Homo sapiens
gtgggtaagagatattaagtacttatctgtggcactccacgaagaactgaatatatgaaataccactgtacagttttatacatgagtaaatggaaatacagacaataagacaaataaataaaaacacagataaagtaccacgtagaattttctggagaatagttttcttcccagcctacagcctggttgtgctcctcctgctctggagaagaatggatttaaaagaattgtcatttttccccacccrtaggaaaatagctgaaacaatacatatttagtttcccagggagtgcttccagcatgagaaaaaccaagttatggcagaatcaagaacctgccaataccaaaagtgagctttgttctccagcctggacctgcctttttcataaattagcccatagattcaccatctgtatttgcacgcacacacacacacacacacacacacacaactagccaggaatggatgcacagtgtctatggcagagagctcccagcttaacaggagggctgtatcaatgagatggtcagtctttgagctgatacaacaatagtcttcaaaaagaacatgcacattccccttgttcacttatt

SEQ ID NO: 258959 - DNA, 594 bp, Homo sapiens
gtgggtaagagatattaagtacttatctgtggcactccacgaagaactgaatatatgaaataccactgtacagttttatacatgagtaaatggaaatacagacaataagacaaataaataaaaacacagataaagtaccacgtagaattttctggagaatagttttcttcccagcctacagcctggttgtgctcctcctgctctggagaagaatggatttaaaagaattgtcatttttccccacccataggaaaatagctgaaacaatacatatttagtttcccagggagtgcttccagcatgagaaaaaccaagttatggcagaatcaagawcctgccaataccaaaagtgagctttgttctccagcctggacctgcctttttcataaattagcccatagattcaccatctgtatttgcacgcacacacacacacacacacacacacacaactagccaggaatggatgcacagtgtctatggcagagagctcccagcttaacaggagggctgtatcaatgagatggtcagtctttgagctgatacaacaatagtcttcaaaaagaacatgcacattccccttgttcacttatt

SEQ ID NO: 258960 - DNA, 577 bp, Homo sapiens
gtacctgtttcagatccccaggcttctctgtttttgggaggtcttaggatgcagggctttgccaattgtgtggcctgggatgacagccaattgatggaagctggaattcagggctttcttctcaacagaagttaaagaargcaaaaaaaaaaaaaaaaacccaaacaaaaaatctggccacaagtgatgtctatcagtgttgtgtgggtgtgagagcctgcccctttgtcttaatagagaatagaaacatacctgaggaggagccccaaaggcctgataggaatgggtcattttgagaaaaagtttccaatgggaaagataaaaatctagttgttttgcccttcaatgttttagagtttcctcagagcacagagaaatcttagtttgcttctccttaaggtactgctcataaagtcccgtcttttaaagaaaaggaacagagtgaaaaatgattgatgcatcaaagtgaagtttccttttccaaacatgtgtccgtaagttgctgatctggggtcccttcagaattgcatgctgtgtctttaacccatttcctgtttggaaaaaaatgtggctcact

SEQ ID NO: 258961 - DNA, 577 bp, Homo sapiens
gtacctgtttcagatccccaggcttctctgtttttgggaggtcttaggatgcagggctttgccaattgtgtggcctgggatgacagccaattgatggaagctggaattcagggctttcttctcaacagaagttaaagaaggcaaaaaaaaaaaaaaaaacccaaacaaaaaatctggccacaagtgatgtctatcagtgttgtgtgggtgtgagagcctgcccctttgtcttaatagagaatakaaacatacctgaggaggagccccaaaggcctgataggaatgggtcattttgagaaaaagtttccaatgggaaagataaaaatctagttgttttgcccttcaatgttttagagtttcctcagagcacagagaaatcttagtttgcttctccttaaggtactgctcataaagtcccgtcttttaaagaaaaggaacagagtgaaaaatgattgatgcatcaaagtgaagtttccttttccaaacatgtgtccgtaagttgctgatctggggtcccttcagaattgcatgctgtgtctttaacccatttcctgtttggaaaaaaatgtggctcact

SEQ ID NO: 258962 - DNA, 577 bp, Homo sapiens
gtacctgtttcagatccccaggcttctctgtttttgggaggtcttaggatgcagggctttgccaattgtgtggcctgggatgacagccaattgatggaagctggaattcagggctttcttctcaacagaagttaaagaaggcaaaaaaaaaaaaaaaaacccaaacaaaaaatctggccacaagtgatgtctatcagtgttgtgtgggtgtgagagcctgcccctttgtcttaatagagaatagaaacatacctgaggaggagccccaaaggcctgataggaatgggtcattttgagaaaaagtttccaatgggaaagataaaaatctagttgttttgcccttcaatgttttagagtttcctcagagcacagagaaatcttagtttgcttctccttaaggtactgctcataaagtcccgkcttttaaagaaaaggaacagagtgaaaaatgattgatgcatcaaagtgaagtttccttttccaaacatgtgtccgtaagttgctgatctggggtcccttcagaattgcatgctgtgtctttaacccatttcctgtttggaaaaaaatgtggctcact

SEQ ID NO: 258963 - DNA, 598 bp, Homo sapiens
gaactctgtttttactctatatcaaataaaaccctttatctacacttaaaattgtgtggattaaaaaatcagattgtcctctctgtgtgtagcttataaattgttaagaaatccccattaacatatcacagagaggttcaatttgtgtgaagctaaatattatttgtgtaattctatccaagatggataagccacttaagctttatttccaccaattagcaatgaactggtccagggaatacataatttagggattttatagggcagtatattaactaggttgaggctacccacataccacacactgatttsttgcagaaaaaaaaaaaaaaaggaagaatttttatgctgcaactaaatttttgacagggtaaatgaagaaagaggattcaaacaaatcattacaggctgtcttttgtttgtttgtttgctcatctgtctttcatttttcagcctggtttgatgctgtaggcaaaataacttcaatactatgtaaaaatttttaactcaataatccattaccaaagaaggaaaatattccctttgaggtcttttccagtctttaattgtggattgtatggataggcaagaataacaa

SEQ ID NO: 258964 - DNA, 598 bp, Homo sapiens
gaactctgtttttactctatatcaaataaaaccctttatctacacttaaaattgtgtggattaaaaaatcagattgtcctctctgtgtgtagcttataaattgttaagaaatccccattaacatatcacagagaggttcaatttgtgtgaagctaaatattatttgtgtaattctatccaagatggataagccacttaagctttatttccaccaattagcaatgaactggtccagggaatacataatttagggattttatagggcagtatattaactaggttgaggctacccacataccacacactgatttgttgcagaaaaaaaaaaaaaaaggaakaatttttatgctgcaactaaatttttgacagggtaaatgaagaaagaggattcaaacaaatcattacaggctgtcttttgtttgtttgtttgctcatctgtctttcatttttcagcctggtttgatgctgtaggcaaaataacttcaatactatgtaaaaatttttaactcaataatccattaccaaagaaggaaaatattccctttgaggtcttttccagtctttaattgtggattgtatggataggcaagaataacaa

SEQ ID NO: 258965 - DNA, 589 bp, Homo sapiens
atttacctttctctatttgtatgcatacatccatgccaataaaaattagacatattcaaggtttcacattcaacagtaagagactagcattttaaactcaacctaggaggtataactttcgcaatcaccctaagttaataatttgtcataatattaactatcccccaacactcgaaaactagaaattccacaatcttacaaataggcttctcattctataattgatggattatctaaataaccataattaaggaaataaaaaaaaattttaagaataaacaattcaacattacttcccattcaaacactatctaactgggaatgacagttcgggtccttagtgtagaacataatgtttaragaaccaataccacacacagaactgattctctttagtgataacacagtggtgaaatatttcacttgattctccagtaatccaagttaaaggctttgaagtcactatatttgttcaccaacttcatccatttccatttaatcattaaaaccctgtttcactgaagtcaagcctgcttggccatcatttgagttccagagatgccaggccaacacttagtttcgcatgaca

SEQ ID NO: 258966 - DNA, 520 bp, Homo sapiens
agaatctagcaaatgtataaaatacactcagtgacggaatgggaaagatgctgacctgagcatccttacaaataagtggagtaggtaagactaaaggcaaaaggcactgtgcataagctctgtggataaaactgtttctcacagggtatttagttaggaattctaaaatcactattatactgtatactggagttgaacaatgcaaatggatcgtggctcttgggagccagatctctcagtgtttgaatgacagtttacagagaagcaatgagagaaaactccaatgagccatgtggtaacagattaagagttgaagtcatcagtataaacacatatttggcttaatatagacaracacaaatacaaatatttataaatatgtgaacatacacagattattatacacaacatatttccttgctctgtcagctgaaagagcctagaagcaacacatcccagtagcaatgagcatagcagatcttggtttctagtaacagtctccaataaaagaaaccagggc

SEQ ID NO: 258967 - DNA, 571 bp, Homo sapiens
gtgtcctgcaactttgctaaatttgtttattagttctagcagttttatgtgtgtgtgtggaatcattagggttttctacgtacaagatcatgtcacctatgaaaagatcattatatttattcctttcctatttggatgctttttgtttttcttgcctgcttggtctgggtaaaatttttaatacaatgttgaatagaagtggtgagaaaaggaatccttcccttgtgcatcatcttaaagagaaaggattcagttttcaccactgagtatgatgtcagttgtgggcttttcacacatggccctttatttcattgaggtaatttccttctattccttgtttggttagtgttttgtcatgaaasggtgtatgactttctcaaatgcttcttctgcatcaattgagatgatcatgtgttacatttccttcattctgttaacatatcagtattaccttgatttttatatgctggaccatacttgcatttcagtaataaatcccacttggtcataatgcaccactctttcaatgtggtgttgaattcagtttgctaaaattttgttgaggattttt

SEQ ID NO: 258968 - DNA, 595 bp, Homo sapiens
tctgctagctttgagtttggtttgttctttttctagttccctgaggcatgacattagcttgtcaatttgtaaccttgcagattttttgatgtaggtatttagtgctataaacgcctcttaacactgcttttgctgtgtcctagaggttctgagaacttgtgtcattgttatcaatcatttcagaaatttttcaattttcatcttgatttcattgttaacccaaaaatcactcaggaacagattaacttccatgtatttatacagttttgaggattactcttggaattgattttattctgctgtggtctgagaatatggttgatgtgatttcaatttttaaaaaatttattgagatttgttttgcagcttacatatgatctattttggagaatgttccatgtgctgataagaagaatgtatattctgcagttcttgggtagttcttgagtagaatgttctgtaaatatctcttaggtcagttwgttctagagtccagtatttctttgttgactttctgcctcagtgctctgtctagtgctgccagtggagtgaaagccctctactattattgtgtttctgtctatctctgttctta

SEQ ID NO: 258969 - DNA, 518 bp, Homo sapiens
tctgattggttttcttttaaaaatctatctctttaaaaaaaattttttcattgatatcctaattttttttaatttgtgttggtttttacctttatcttgtatctccttgagtaaattaataatcaaccttttgaatttttatctggtgtttcaaagatttaatcttggtttgaatccactgctggagagttagtgtgttttttgggaggtgttacagaaccctgttttttcatattgccagaattatttttctggttccttctcatttgggtagactatttcttctcrttatttttgaatttatttttcatttaactggggtttttatttcttttattccccttgagggtatgactttaatgtttataatttattgtcacctagctttggctctaggtgctttcagtggtgaagactctgtataagtttcttggttatagagaatctttgtgtgatgtttttctcagatgctcgttgtagtagtgatatgcttggtattgagcaggttcagtgtttcc

SEQ ID NO: 258970 - DNA, 518 bp, Homo sapiens
tctgattggttttcttttaaaaatctatctctttaaaaaaaattttttcattgatatcctaattttttttaatttgtgttggtttttacctttatcttgtatctccttgagtaaattaataatcaaccttttgaatttttatctggtgtttcaaagatttaatcttggtttgaatccactgctggagagttagtgtgttttttgggaggtgttacagaaccctgttttttcatattgccagaattatttttctggttccttctcatttgggtagactatttcttctcgttatttttgaatttatttttcatttaactggggtttttatttcttttattccccttgagggtatgactttaatgtttataatttattgtcacctagctttggctctaggtgctttcagtggtgaagactctgtataagtttcttggttatagagaatctttgtgtgatgtttttctcagatgctcgttgtagtagtgatatgcttggtrttgagcaggttcagtgtttcc

SEQ ID NO: 258971 - DNA, 608 bp, Homo sapiens
tttctcctgttgcccttaagatattkgtttttggaaagttgattagaatgtgtcttagtgtgaatttctttagtttcatcatgactgtagtcctttgagcttcttatatttggatatctatttcctttttcacatttggaaggttttggctattgtagtttgaaaaatattctgtccctcatttcctctatattcctcttctgaaattcatgtaatgcatatattgattcacttgatggtgccccataagtcccttaggctttcttcatttttcctttttctttttgttccactgactcaataatttcaaatgacctgtctttgagtttgctgattctttctcttgcttaataaagtctgctgttgatcccctataattttttttctcaaatcagttactgtattcttcagcttcagaattcctgtttagttatttagaattcctgtttggatctttacagtttccatctcttaattgatattctcattttattcacagtttcattgtatatgttttcttgtagtgcactaatttaaaatgttccttttaaactatttgtcaggtaattcatagatctccatttcttttgggtcagtttacggacagt

SEQ ID NO: 258972 - DNA, 608 bp, Homo sapiens
tttctcctgttgcccttaagatattggtttttggaaagttgattagaatgtgtcttagtgtgaatttctttagtttcatcatgactgtagtcctttgagcttcttatatttggatatctatttcctttttcacatttggaaggttttggctattgtagtttgaaaaatattctgtccctcatttcctctatattcctcttctgaaattcatgtaatgcatatattgattcacttgatggygccccataagtcccttaggctttcttcatttttcctttttctttttgttccactgactcaataatttcaaatgacctgtctttgagtttgctgattctttctcttgcttaataaagtctgctgttgatcccctataattttttttctcaaatcagttactgtattcttcagcttcagaattcctgtttagttatttagaattcctgtttggatctttacagtttccatctcttaattgatattctcattttattcacagtttcattgtatatgttttcttgtagtgcactaatttaaaatgttccttttaaactatttgtcaggtaattcatagatctccatttcttttgggtcagtttacggacagt

SEQ ID NO: 258973 - DNA, 400 bp, Homo sapiens
tttcctttttcacatttggaaggttttggctattgtagtttgaaaaatattctgtccctcatttcctctatattcctcttctgaaattcatgtaatgcatatattgattcacttgatggtgccccataagtcccttargctttcttcatttttcctttttctttttgttccactgactcaataatttcaaatgacctgtctttgagtttgctgattctttctcttgcttaataaagtctgctgttgatcccctataattttttttctcaaatcagttactgtattcttcagcttcagaattcctgtttagttatttagaattcctgtttggatctttacagtttccatctcttaattgatattctcattttattcacagtttcattgtatatgttttctt

SEQ ID NO: 258974 - DNA, 608 bp, Homo sapiens
tttctcctgttgcccttaagatattggtttttggaaagttgattagaatgtgtcttagtgtgaatttctttagtttcatcatgactgtagtcctttgagcttcttatatttggatatctatttcctttttcacatttggaaggttttggctattgtagtttgaaaaatattctgtccctcatttcctctatattcctcttctgaaattcatgtaatgcatatattgattcacttgatggtgccccataagtcccttaggctttcttcatttttcctttttctttttgttccwctgactcaataatttcaaatgacctgtctttgagtttgctgattctttctcttgcttaataaagtctgctgttgatcccctataattttttttctcaaatcagttactgtattcttcagcttcagaattcctgtttagttatttagaattcctgtttggatctttacagtttccatctcttaattgatattctcattttattcacagtttcattgtatatgttttcttgtagtgcactaatttaaaatgttccttttaaactatttgtcaggtaattcatagatctccatttcttttgggtcagtttacggacagt

SEQ ID NO: 258975 - DNA, 608 bp, Homo sapiens
tttctcctgttgcccttaagatattggtttttggaaagttgattagaatgtgtcttagtgtgaatttctttagtttcatcatgactgtagtcctttgagcttcttatatttggatatctatttcctttttcacatttggaaggttttggctattgtagtttgaaaaatattctgtccctcatttcctctatattcctcttctgaaattcatgtaatgcatatattgattcacttgatggtgccccataagtcccttaggctttcttcatttttcctttttctttttgttccactgactcaataatttcaaatgacctgtctttgagtttgctgattctttctcttgcttaataaagtctgctgttgatcccctataattttttttytcaaatcagttactgtattcttcagcttcagaattcctgtttagttatttagaattcctgtttggatctttacagtttccatctcttaattgatattctcattttattcacagtttcattgtatatgttttcttgtagtgcactaatttaaaatgttccttttaaactatttgtcaggtaattcatagatctccatttcttttgggtcagtttacggacagt

SEQ ID NO: 258976 - DNA, 568 bp, Homo sapiens
tttcacaaccagacaaagttttctggtttctttttcaggagtctacagtctcttgcaccctctggtgtctgtttgcagtactacgggtattttggtactgccaccaaccgctgagctctcttgttctcagcagtccccaggcaaycaaggtatgcctattcctcatcagcactccaagtcaagcaaggcagaaaccagtcacttgagtagtctcaaaaagccagcacattggacataattccattttactctttttctcccaagggagaaaccagtcactggactttttttcctcatcattagctgtggtggcttggggaaggggccgactcagatgaaatgaaacagcttttcttacctgtttcaaaaccatggttcttggttttaaactggagttctgtgacttcataagtgatttctggccttctcataaaggctttattggaccacatattgttaagtcagtatttctgtaggggtagaagtctggtgcttcctattcctccatcttgctgactgcagacaggcttatttttgtaatctcataaagcattctctacatgaagaa

SEQ ID NO: 258977 - DNA, 568 bp, Homo sapiens
tttcacaaccagacaaagttttctggtttctttttcaggagtctacagtctcttgcaccctctggtgtctgtttgcagtactacgggtattttggtactgccaccaaccgctgagctctcttgttctcagcagtccccaggcaaccaargtatgcctattcctcatcagcactccaagtcaagcaaggcagaaaccagtcacttgagtagtctcaaaaagccagcacattggacataattccattttactctttttctcccaagggagaaaccagtcactggactttttttcctcatcattagctgtggtggcttggggaaggggccgactcagatgaaatgaaacagcttttcttacctgtttcaaaaccatggttcttggttttaaactggagttctgtgacttcataagtgatttctggccttctcataaaggctttattggaccacatattgttaagtcagtatttctgtaggggtagaagtctggtgcttcctattcctccatcttgctgactgcagacaggcttatttttgtaatctcataaagcattctctacatgaagaa

SEQ ID NO: 258978 - DNA, 568 bp, Homo sapiens
tttcacaaccagacaaagttttctggtttctttttcaggagtctacagtctcttgcaccctctggtgtctgtttgcagtactacgggtattttggtactgccaccaaccgctgagctctcttgttctcagcagtccccaggcaaccaaggtatgcctattcctcatcagcactccaagtcaagcaaggcagaaaccagtcacttgagtagtctcaaaaagccagcacattggacataattccattttactctttttctcccaagggagaaaccagtcactggactttttttcctcatcattagctgtggtggcttggggaaggggccgactcagatgaaatgaaacagcttttcttacctgtttcaaaaccatggttcttggttttaaactggagttctgtgacttcataagtgatttctggccttctcataaaggctttattggaccacatattgttaagtcagtatttctgtaggggtagaagtctggtgctycctattcctccatcttgctgactgcagacaggcttatttttgtaatctcataaagcattctctacatgaagaa

SEQ ID NO: 258979 - DNA, 617 bp, Homo sapiens
acctgtttcctcaaggagtgctctgccaagaatgagcagatggacacaaaagctccttgttctttaggctgttcaggtatcacctcctccaggaagcctttggatcctttcccaccaatcagactggggtatgtgaccttcctctgattttccaaagcaccccctccccmcaaaaatgaaaagatcaaatatcaaatgtgaactaacttcagcatgttaccatttctttatggggtcgatgtaggtctcatttcctcagaaaataggttccctaggaagactttttcaccttcaagatggctgccaggtaggacattttatagagagctggtgtcagcttctctataaagcttaatttttgaaccagggcaaaccagccccctctaggctcacaaacaccccacagtttcctcttaggcatatctggctgagaggcagctgctgctgacaatgtgtgctggggtctggtcccacagctcctgggatgaaacaggcaggtgagatcgatgtgaaagagcaaccatcaggtggaagcacagggcgaggttgtcttttttatattttatatgaaacttttctgtgaactaagaaaaaaacataaattgagtaggatttta

SEQ ID NO: 258980 - DNA, 520 bp, Homo sapiens
ggagttcaattgatagatgaattgcccatatgggaaggattgcagctaaatgaaaactctaggtwgggatgcactctagataggattgcattacacattgggaggtcaatgggtagcaagtcagcctttagagattggtggttctcactagatgaaaaagaatagaaaacctgggtaccgactcaggctctgtaacactccctggcagtgattgtgcttccttctggcatctcaatctaatcctatcccacctaatggcacccaaaccccccaatctttccccttgattgtgatctagtttccagagatgcttaggtaacacatggcctcagggaacaagggtagtgaagagacttaagtctgttctaaggtcatcttcagacccttttagccttggtatgagaccaaatttgtccttccttaattagaacattggcctctcagtactgcttatgttgctgacaagtgtggccccacctcaacctattttcttcagtccacatatactatatatttccca

SEQ ID NO: 258981 - DNA, 592 bp, Homo sapiens
ggtggtttctgctaatttaagtaccttagagacatacttaaatagtgtctgaaacattttgaatttttctagttacaataccagagaaaatcaatttttatgaattacctgttgcctcttaagactatctgcataaaacacatctcacatttgttcatatctcattgatcaaagcaaattatayggcatatttgaaatcaaaagagaagtgccatcttctcatgtgctcagaatgtgaaagaggactgatgtttttgatagcagtcctagggtctcttccattatactttaataactcccaattctttatatccctctttttttcagtctactcacaagagtgatgtagaaaattgctaattttcatatagaacactttgtggacaccaaaacatgatgggacagatgattttttgaaaccaggaaggaaatggcatttttcttccttgccttcacatatatattcatattttcattcattaaaaccaatattctttgagctcctaatatgtgttgggcatttactagatcatccatcattctcatgttgtaagtcatacagatattagtcatcatactactccagtagaaa

SEQ ID NO: 258982 - DNA, 592 bp, Homo sapiens
ggtggtttctgctaatttaagtaccttagagacatacttaaatagtgtctgaaacattttgaatttttctagttacaataccagagaaaatcaatttttatgaattacctgttgcctcttaagactatctgcataaaacacatctcacatttgttcatatctcattgatcaaagcaaattatacggcatatttgaaatcaaaagagaagtgccatcttctcatgtgctcagaatgtgaaagaggactgatgtttttgatagcagtcctagggtctcttccattatactttaataactcccaattctttatatccctctttttttcagtctactcacaagagtgatgtagaaaattgctaattttcatatagaacactttgtggacaccaaaacatgatgggacagatgattttttgaaamcaggaaggaaatggcatttttcttccttgccttcacatatatattcatattttcattcattaaaaccaatattctttgagctcctaatatgtgttgggcatttactagatcatccatcattctcatgttgtaagtcatacagatattagtcatcatactactccagtagaaa

SEQ ID NO: 258983 - DNA, 577 bp, Homo sapiens
caatctgtttgtattctcatttgtcacataaactatatatgtggagatctttgagagaaaggaagaataaattattgaggaaaaatttgcaaattttatttctgcctccatcatttcagagttgtttgatgttgagcaagttacttagttctctgaatttcatttttcttayatggaaatgttaaagaataacactgattttcaatagtatttgtggagataaaatgagaaaatatatgtgaataagcttaggatatggtgagcatccagtgtttttctgtagattaattaatcaagatgatgaagacttccacttgagttttagtttgtgttatacataacagattaatgttgtgtataacttaatatacttattttgcctaaagaacttcaataagaagtgcttggaggaaatcaaaacctttgtctttgcaggcccgtgataaagattttggattttatctttgcagcattagaagccactgaaacactttaaggatggcaatcacaggattaaattttcatatttaacaaagattactctagctgttacatgtagaatgggttggtaatttta

SEQ ID NO: 258984 - DNA, 623 bp, Homo sapiens
tagcaaactgtcttagaaataatttgtttattgtgctaatgagattaactgattagagatacttgatggaataatgaaaaacttattagttccactgggaaaacagctcaaagccttattgaagttaaataaatccatgacaagaggaaaatgtcttatatttattgagyggctactgtgtgccacacatgcctggtacctcttcatatgttgcccatttatttatgacagtagtcttacgaggtaggtgttataacatctacttcataggagtactgtcataaataatttataatttgttcaattaaacatttgaaagtataaaaattttaaactatctgattaaaatctgacagcataccaaatcacatacccagaattcataggtatgtgatattttggacatctactgagtattggactcctactgagtattccttctattaccatgacatcccaaaagaggtccagtgacgtaatttctatacttgaagacacctcatagatgtcaatgaatagcacacatattttacaaataaaataaaaaatgttaaaagtccattattataattatcctcataacatttaactagtacagtagtttaataacagttcatttcttt

SEQ ID NO: 258985 - DNA, 519 bp, Homo sapiens
tacaaataaaatatttaacagtcttaacaatcttaattttaygattattaattctttcacttgggaagttggtattttataggggttaaaaaatgtaagtccaaagtcatattgtctgggttcaaactaaccatgtcctttctgttaggcttcagttcctgtaaaatagtaataattcatatttcatgatgatattgtgaggataatacaagcaagtacatagcatgtacttgtgctatggtgtagacatggtttgtttgttctcaccaatctcatgttgagatttgaatgtggggcctaatggggggtgtttggtcgtgagggtagaataggttaatgaatagcttaatgctttccctcgggagtgtgtcggttctcatgttatatgcaagatctgattgttaaaaagagcatggcaccttcccacccctacttttcttctctcttgccacatgatctctgcaaaaatcaactccctttcaccttccaccgtgagtggatgtagcctgaggctctcac

SEQ ID NO: 258986 - DNA, 577 bp, Homo sapiens
agaaagaaccccaaaattaagttagaaatgttgtgtttaagacatacagctttgctttctgctagatgcatgacatcaagaaagttaatgtatgtctgacattcaatttgcttatatttgaagtgacaataaaatgacacactgttataggatcataagaagcaatgtgtgttaatatgcctgctaactttaaaacattatttaaacatgtgttattattaaatgaatttggaagataagtttaccttgacatgcatacaatttcattattttggcaacaattgtacattaacatatagggtccaattcctttagtcagttttctaacaagactaaggtttcactttctttggctcccaaatttctctccaaaagaaaaatctcttaattcaaatggacagaatatatccaaaaggaaaaaggaagaaaaaactggcacattaaaatgggggaataaaaaaacctayaccaatgtttcacatcaaaagaatttatttcagttgagatacagaaaaaaattaaaattgcctctagtttttatgccacatgaaaaaaaaaaaggcagaaatggtagtgt

SEQ ID NO: 258987 - DNA, 640 bp, Homo sapiens
ttcatggaaggcaacttccaagacggcccccaataattctgccctcgtttaatctgtgggctggcccaaatgattcgcttttagtaaaaagaatatggccaagtatggaggccatatttgagattaggttaccaaaagcctgtgtcttctgtcatcgtcacattktcttgctctctccctcactagccatgatagaagtcagctaccatgctatgaattgccctatggagaaacccatgtggcaaagaactgatgtcttcaaccaacaactagtggctacccaaggcttgtcaatagccacatgagtaaaattcagagcagactctgtcccaatagagccttgaaactgtgagataaataattactaaatggggggggggggtaatttgttacttaataagaagtaacaaatataatatccaaaactgaactcatggatttaaattggtcgatggttttaatttactaacatgctttactttattgaagctcagactgcctcatttgggaaaaatggggatctttgttcatgactattagtttttgatagtcctgctcatcacattgacaaaatttgttctatgctaattttgtatgtttcctgacccatactggattcaaccattttctaagaagccct

SEQ ID NO: 258988 - DNA, 516 bp, Homo sapiens
tcaaaaacacaatcaaggttataagtacaattgaccttagaacaacatgggtttgaattgcatgtgtctacttacatgcagatttttttcaataaataaagttggtcctctgtatccagggttctgcatctacatccacatatagaaagttcagtattcatgggatgtgaaacccgcatargaaaggcatacttttctataggcaggttctgcagatccagctgcaggacttgaatattcatggagttggtacacatgggggtcctggaaccaataccctgagtatatggagtaactactctacagtcattgttactgagttggttattgtttttaggccctttagattagatatatgaagataaaatacctcctgactttacacttggcatccaattaaaattctcaactacaggattttactttctttcttctatattacatgtgtttattttcttccacattgagaatctggttctcaggtacagaagatataatataatttgattatcctaa

SEQ ID NO: 258989 - DNA, 516 bp, Homo sapiens
tcaaaaacacaatcaaggttataagtacaattgaccttagaacaacatgggtttgaattgcatgtgtctacttacatgcagatttttttcaataaataaagttggtcctctgtatccagggttctgcatctacatccacatatagaaagttcagtattcatgggatgtgaaacccgcataggaaaggcatacttttctataggcaggttctgcagatccagctgcaggacttgaatattcatggagttggtacacatgggggtcctggaaccaataccctgagtatatggagtaactactctacagtcattgttactgagttggttattgtttttargccctttagattagatatatgaagataaaatacctcctgactttacacttggcatccaattaaaattctcaactacaggattttactttctttcttctatattacatgtgtttattttcttccacattgagaatctggttctcaggtacagaagatataatataatttgattatcctaa

SEQ ID NO: 258990 - DNA, 516 bp, Homo sapiens
tcaaaaacacaatcaaggttataagtacaattgaccttagaacaacatgggtttgaattgcatgtgtctacttacatgcagatttttttcaataaataaagttggtcctctgtatccagggttctgcatctacatccacatatagaaagttcagtattcatgggatgtgaaacccgcataggaaaggcatacttttctataggcaggttctgcagatccagctgcaggacttgaatattcatggagttggtacacatgggggtcctggaaccaataccctgagtatatggagtaactactctacagtcattgttactgagttggttattgtttttaggccctttagattagatatatgaagataaaatacctcctgactttacacttggcatccaattaaaattctcaactacargattttactttctttcttctatattacatgtgtttattttcttccacattgagaatctggttctcaggtacagaagatataatataatttgattatcctaa

SEQ ID NO: 258991 - DNA, 580 bp, Homo sapiens
gctgggattaagcaaatactattaatgactaatagtatttgtcattactgctctttctcctgctctcatttcccttctacctatctttcctctctcctgctctcatttcccttctacctatctactacgtaacaggatcaacatttagagcaattccaattgcaaaggattttataagtacacaaaagcatgttataaatctctagtaggagtagagttaatgagttgtgaaaggaacagactaaagtagatttaggaagtaaaggtatgggcaaagaggttagctattctttctgatgtgtagatatttatcaaagtcctttttccgatccaacagaataatcttcctaaacaactcattgtctcctacaattcatcttgctcgatgaataaacatggaaaggtaaacatttgaaacaaaaacatggcatctagtagacactayatatttggagaaaaacacagtcataatagtagtggctattgctaacaattattgtgtgctataattaattataattattgtgtgctatttttatcatttctctctgaatgaatatttgattcctagtttccagac

SEQ ID NO: 258992 - DNA, 533 bp, Homo sapiens
ctcagaaagtaagacacatgttattagaaaatgagggaggtaatttcctacattttatgtaatggtcattttttagcaaaattgagtccggaaaagaacaactcttaatcagtatagttgaatatttagctgagattatttccaagcaaaatgtttatagtgttgtcttgtttattcatactactaatagtaagatgtgagaagtgagcaaactttgagagatgaactgttgagcaaaatgagtctatgaaatttgtatttgggtaattatgagcctatccagttaatgaaagatgctaaaattcagatatgtttgcgatagagaaagggctgaggatgtagctgtacatttgtttgatgaaatctcaaaaatagcattatgtcactttagtaatattaagaatgtgccttgcacatcttctcaatcaaaccacgaatcataaagtaaaagattgttttcctcactcatctaatcaaaaccaraaatagagaaaagaagtttataattcatcctatgcatgtcctaccacttt

SEQ ID NO: 258993 - DNA, 573 bp, Homo sapiens
agaagtttataattcatcctatgcatgtcctaccactttatattaaaastgttgaggtctgttaacttgtctttttgattttgctggtccagagacagagaggaatttttctccaagaagcatgctaatcaaatttagatgagattctggagttttgagctgataagatttagattaaaatttggaatctgtactgatgctgtaatgggatgagacttttgaagacattagaatagggtaaatacattttgtattttgaataagtatgaatcatctgggggccaggtgatggaatgtagtaggcagaattctaaagaggccgcccccaccaaatttatgtcccatggttattcaaccaaacgttaacctaagtacggctgtgatgggattttgcatatgtctttagagtcctaagtcagttgaccctaaaatatggagattatctgggtgggcttagcccaatcaggcatcagatgagtgttttataagtagggagttttcattaaatattagtagctgtcatatattcaaatggtgaggaagatttgctacaaggtgagatccattgttgag

SEQ ID NO: 258994 - DNA, 583 bp, Homo sapiens
tggtgttttataattcaattgaatcaagtacttcagcaccttataaaaataaaagtcttaaaatgcattgtaaagtgtatcactgtctactgttacataaatcttttattttattatcgagtgtcttaattgaatatttcctgatgtgtctttactctaaaccccatttcattagtatgagagtttaaatcactattcattaatgagaacattttgatgatgcatatctttattctcctgtagtactttattatcatggtaatattaatttagatactacccaaaacttataatagttcaacattaagaattgaatgtctcttcatcacttctaattatacactaggtcttttaatttcatatataaaacatgaagaaacttcattttcttcaaaaacttttatagaaaaataaaaagttttattatattaaaaatatgtagaaatacaaataaaaaaattgctttcatctctcrtatgacctctaagaacatacatatatttatatttagtgtgagttatttatataaatacaaatgtttcttttcctagatgtaaaaatgtttcattagctagttattttt

SEQ ID NO: 258995 - DNA, 535 bp, Homo sapiens
gattaaaacaccagttttcatattttttataatataaattttattttcaagtacggaatcacaaaaatcatattatgcatacaggaaataataagatttcagcttatttttataaatttgtgaccactatctagaaactaatcagaytgtatatcacagaggatattttataattggatatactgaggcacagttcagatatgggagactaagtcacttgcatagtaaatgatgggagaagtacatagatcacacggttcctctcacatcaaggtctgttttctttccattgtattcatttgtcagagtcacacagagaccagaatataagaattcatttccaataatattacaattccaaacatgtatttcacgtgcatttttccctcttttccatcagattcactcctttgaaccttctcagcattattcatggcaaagtcaactggagttttgttttagtaaaaaatgcctgctacataggattttctcttagacaaaaatcaaatggactcttggatgattattctctttc

SEQ ID NO: 258996 - DNA, 639 bp, Homo sapiens
ctagatatcaggttataattatagttatttaggagtacagtttatcaatctacttcctattgtgaggttcacaatgtaatttggtcataaaggtgttaaatttgaattttattaaagttgtgataggtaactcattataayggcttaaaatatttctagaatgaaattattaaagacattcttaaggcagcagatgtttgattcttaattttccatttgcccatgtgttgaattggtcttagagcagttatctgagataagtgtttacttgttcatatgtgttccacataccagcttgtagagatgttggcggctttccattcaggcagctgtcttagctagtgttcttaccaaccataagataatctcccatctagttgttaaaatatacacatcagcccttattggacaatatagacattgtggactataacacttgactgtaatataatcttggtttctctcttcttcgagtcttttttgtttcggtttttctgaaaattttgttgtgagaaataacattcatggagtttttctcaagtcatatgtaattgatttactctttatgtcatcatatttatctcagaatcatgtcaattcatcagagattttatatattcagtatatattattctgaat

SEQ ID NO: 258997 - DNA, 581 bp, Homo sapiens
ggctcttgaacggttctacctctcactcactcacacagggaggtcagctgcttctttctctgagccgccttaccctctgggacacgcctccagcacagatttccgcgtagcctaccttcrctcatctagatacatcatcttccctggcagatggagtgcttctgaaaggcagagacttagctttgaattcccagtgcctagcatggagcctggtccataaaaaccactccatccatgttcatgaaatgactgagaaacagcaagggctcctgtgcacttgggtgtggctccagaagaggcagcttctgtggctattccccttggaggccggctggccactctccctgcacagagcaggctggcttcgccatcacaggctgcttctcagaagctcagctacctctccttcctcacctcccagacccctcggaaagtgttccccaccagaaatgtctttttggtggcctcaacctgagaaggaaggctacagagcttacagatttaaacttaaatgcataaacaattcacagtggtcccctggcttaggctgaatctcaacttggaggacttggtgtccatgg

SEQ ID NO: 258998 - DNA, 581 bp, Homo sapiens
ggctcttgaacggttctacctctcactcactcacacagggaggtcagctgcttctttctctgagccgccttaccctctgggacacgcctccagcacagatttccgcgtagcctaccttcactcatctagatacatcatcttccctggcagatggagtgcttctgaaaggcagagacttagctttgaattcccagtgcctagcatggagcctggtccataaaaaccactccatccatgttcatgaaatgactgagaaacagcaagggctcctgtgcacttgggtgtggctccagaagaggcagcttctgtggctattccccttggaggccggcyggccactctccctgcacagagcaggctggcttcgccatcacaggctgcttctcagaagctcagctacctctccttcctcacctcccagacccctcggaaagtgttccccaccagaaatgtctttttggtggcctcaacctgagaaggaaggctacagagcttacagatttaaacttaaatgcataaacaattcacagtggtcccctggcttaggctgaatctcaacttggaggacttggtgtccatgg

SEQ ID NO: 258999 - DNA, 586 bp, Homo sapiens
acctgctgcacacaggaattagcttccaggctgaagtggggccagtgtagggcccacaggaacctggaccaccttgactctttgtatagggaggggaaaggaggcaggagaagccctgagtacttgtcagtggagtgaagcctgttaagctttaagcgggaggattcagttcagtaagtaacttcgtcccctgggagggcccccaggtcccttctgtgttggctccatggcctctcttctctyctgcattaattcaagtgaggaaggcctgagcttgcctccctgaattccctgcaccccacagacgctgccccattctcaaggtgccatgtgtaatcaggaagcagacgctagctccaaagctttcggggcagagggaggagggcaatggctgggcagtgggctgtcctgttgctgaggagaccttgaggaggaggcttttggggcaggcatgcctgttgcaggcttggagtgggccctggggaggggcagtaccctctaggccagaaaacacaactgggccatcttccctcatctctagcagaatggctgcctccttagtccagactgagtcctgtggaatgtg

SEQ ID NO: 259000 - DNA, 573 bp, Homo sapiens
acatgcactttccatgcattcatgcagtcttcacaataattgaatgtggaaggtgccattgttccctgtattgtaccgctggccagtgagagccaggagcctgtgctcatcacrataccatagttttcagccccccaggctaacatctatcctctctcgtggtgcctgggacccttctggacctgatcaaggtgtagcagctaatggactcggaacaagtctctgtagatttgagtggaggcgccacttgggctggagaggcttgcggggagctttgcaggggaaatgaagcttgactcttgggtcctcagggtttaaggtttgccttttttctcaaaaaagacttaaagggaaccaggtcccttgtacctgctgtgtgcacctggcaaagagtgcatcgggtggaatgcagtcctctctcaccaagctcttgcactccattgccccctagcctagaatacttgctccctgctcagtaaagaatcaaattcctgcaaatatccatcctcggtcctaggctacaggtctgcgccctctcggaggcccttgctggtgctctttccactaagcctc

SEQ ID NO: 259001 - DNA, 573 bp, Homo sapiens
acatgcactttccatgcattcatgcagtcttcacaataattgaatgtggaaggtgccattgttccctgtattgtaccgctggccagtgagagccaggagcctgtgctcatcacaataccatagttttcagccccccaggctaacatctatcctctctcgtggtgcctgggacccttctggacctgatcaaggtgtagcagctaatggactcggaacaagtctctgtagatttgagtggaggcgccacttgggctggagaggcttgcggggagctttgcaggggaaatgaagcttgactcttgggtcctcagggtttaaggtttgccttttttctcaaaaaagacttaaagggaaccaggtcccttgtacctgctgtgtgcacctggcaaagagtgcatcgggtggaatgcagtcctctctcaccaagctcttgcactccattgccccctagcctagaatacttgctccctgctcagtaaagaatcaaattcctgcaaatatccaycctcggtcctaggctacaggtctgcgccctctcggaggcccttgctggtgctctttccactaagcctc

SEQ ID NO: 259002 - DNA, 544 bp, Homo sapiens
cttgactcttgggtcctcagggtttaaggtttgccttttttctcaaaaaagacttaaagggaaccaggtcccttgtacctgctgtgtgcacctggcaaagagtgcatcgggtggaatgcagtcctctctcaccaagctcttgcactccattgccccctagcctagaatacttgctccctgctcagtaaagaatcaaattcctgcaaatatccatcctcggtcctaggctacaggtctgcgccctctyggaggcccttgctggtgctctttccactaagcctcactgcctctcctgtcttcaaggggactgattgcactagggaagtgtggagggagggtatatgcacccagggaagaaagcagcacagcacttctcacagctctggtctacagttgctccactcagcaagtggggacagttccagcttctgggctcttcttgcccctaaacttctcctcgatcaggagtaatatagtctgagaatgagcacaaagaacactttttcttttaaggattgaccttttgctcaatgagcaggattga

SEQ ID NO: 259003 - DNA, 544 bp, Homo sapiens
cttgactcttgggtcctcagggtttaaggtttgccttttttctcaaaaaagacttaaagggaaccaggtcccttgtacctgctgtgtgcacctggcaaagagtgcatcgggtggaatgcagtcctctctcaccaagctcttgcactccattgccccctagcctagaatacttgctccctgctcagtaaagaatcaaattcctgcaaatatccatcctcggtcctaggctacaggtctgcgccctctcggaggcccttgctggtgctctttccactaagcctcactgcctctcctgtcttcaaggggactgattgcactagggaagtgtggagggagggtatatgcacccagggaagaaagcagcacagcacttctcacagctctggtctacagttgctccactcrgcaagtggggacagttccagcttctgggctcttcttgcccctaaacttctcctcgatcaggagtaatatagtctgagaatgagcacaaagaacactttttcttttaaggattgaccttttgctcaatgagcaggattga

SEQ ID NO: 259004 - DNA, 574 bp, Homo sapiens
ctgaattcagatatttaaatgatggtagggtaagtcattatgccaatgggagaatgaggcaaaaagcggagttcatccttgtgctaaccaaagaaaagatgaaatggtgagggctcatcaattctgggccaggaggaagataggcactagtaggtctgatctgtctggaggattcctttaaraaaacccaaggttctggaggtcactggcaggctggaatttcagcccctcagagtgaagggatgggcttctttggttgagttccggtgtctgttaaccccccaccccttgttctttgtgtgaaaccagcacccactggccaaaaagcccgggttggggtctctgtgggttgatggatataaaccatcttctttacttagggcacaaagaagaaccaagacaggagaggaagcctgggccaagcctgcctagggagtctatcgtggtaggaacaagagctaccatgccttgagcccattctaaatggtaggcaagtgctagatatttggctcacacatttcatcctcataacagccctatggtgtagagaatatcattatctccacttcacagg

SEQ ID NO: 259005 - DNA, 494 bp, Homo sapiens
tcttaagaagtctgcaagtcaggcacacaggtcagttccaaagacctatgagtccagagaagagaagaaaaaacaaaaagcctctggtcttaggcctatttgtcagtatgttctcatccagcaagtggggtacggccttcctcactagttgctgctccaagaagaaagcagaagttatcttctctgggtttggatgatttattagaagctaaagaaggaatttaaagtggggtatgaggcaggaagaagagatcaagagacctataaaagcattgaagaaggcagcaagggaatgaatgtgggaccaggaagraactaattgtaacatctgcttagtagagaaatcctttgatttaacttcctagggcagtggttctcaaggaggaggctctgcttgagactttaatgagagctatggactctcctcctagaaatgcatacacaacacacatgcacaggcaccccataaacaatggtgtgtggtgtatgtgggc

SEQ ID NO: 259006 - DNA, 494 bp, Homo sapiens
tcttaagaagtctgcaagtcaggcacacaggtcagttccaaagacctatgagtccagagaagagaagaaaaaacaaaaagcctctggtcttaggcctatttgtcagtatgttctcatccagcaagtggggtacggccttcctcactagttgctgctccaagaagaaagcagaagttatcttctctgggtttggatgatttattagaagctaaagaaggaatttaaagtggggtatgaggcaggaagaagagatcaagagacctataaaagcattgaagaaggcagcaagggaatgaatgtgggaccaggaagaaactaattgtaacatctgcttagtagagaaatcctttgatttaacttcctagggcagtggttctcaaggaggaggctctgcttgagactttaatgagagctatggactctcctcctagaaatgcatacacaacacacatgcacaggcaccccataracaatggtgtgtggtgtatgtgggc

SEQ ID NO: 259007 - DNA, 591 bp, Homo sapiens
ggcctcctccagacaaggacggcctctaccaccatcatccaaggaaggcaggaaagccactgagcacacaaacacactcagaagaaaacggggacagccagcttggggatgagcgggggcaaacccatgggcatgataatgtttttgtttatggacaggcaacaatgagatgtatggagatgtcaagaaagaaatgcccatgcgggtgttagcaccatttccaaaccatgactgcttcctttgtgcccagagtcarcaagtcaggcaactaatgcacagggcactgaaatgaacccttttttttgctttgatcgctcctgatagcgcactctgccagagatatcatatctttgatctcttggcactgatgctaagtctctggagctcactagcatctccttgagattaattcttcatggcatacgaggcaccacgctgtcctctcccatacatcacactgggtcacgtgactttctggcctgctgcctcagtggttacccacaggcttaagaaataacccctaatgtcctgccttctcctggccacctctcacctaatacccacattggttaaaaccccattaagcaggca

SEQ ID NO: 259008 - DNA, 621 bp, Homo sapiens
gccaattccaccgtgggagacaaaggatagtttcatgatagaggtgacgcttgaagcttaccatctagtaagagaaatgagatttcgtgcggaaatcaccatgatgcaaaggagtgcttcctgaaaagtgatatttgagctaggccttgccaatgaatagaattttcaacattcattcattcatccaacagatatgtactgagtagttgttttcccagataacggggaatgcagtaattcagaagacagacaaaaatccttgtccacacggagcttacattctagtggggaagacataaagtacatgacatgcatgagttagagcacrgctcagcacatttttcctggaaaaggctaatcactagtcagtaaacattccagtctttacagatcttgtggtcttttttgcaactactcagttttgccattgtggcatgaaagtagtcatagacaatacataaatgagtaagcatgtctgtgttctaataaaactttatttacaaaaacagggagtggactgaatttggccccaagggccatcgtttgccaacccctgatatggtgtaagttagatagtcagaagagctaaacagaaaacataaatcaggaataaataaatac

SEQ ID NO: 259009 - DNA, 611 bp, Homo sapiens
ccctcgtccttatatttgtctcaatagcttagtgtctgtgatttggtgagtcatctttctatggcaatttttcatttccgtgcagcctcttggagttgggttccgcaacttgcacctgcatgcagctaggatcttcaaagagctgcttcccactgagtgagcccagccagggagcccctgcccctccctcagagccatagcacagaagaggtgggtgtctggctgcagttctgggtgggcccgcctgcctgagcctgaggcagagggcagaaatgtggctgcaggagatggaagggtgtgagagagcccagagctgggatgcaagccctcctctcagcgcaaattccggtgatgctaccttgcccaggtaggagatcattgaatctcttacccagaaagacaaagctcttgtcatgaggcaagggatattttaacttctatccatgaacctcccaatgaaaaaatgtagagttctgtcaaaacaggttagcatattagcaatcacggctcactaccatctgtatttgttccatttgtgcygtttatgatggttatccacattaattatttcactgctaaagtcccttctaatttctgaacactgttatttc

SEQ ID NO: 259010 - DNA, 608 bp, Homo sapiens
tgatggaagctgactacttagtttggcaatgactctgaactcattaaaacagacgagaaccactaggtgggggtgactggccagcaggaggacagagatgagtgaggatggaggacaaggtgtgtggtgacagccattcccaagcctggccacgccaacctgcctgagcagagtctacaaggaacagttccccgygagaactttcaaagcatctgagtcaatagatctagggtaatagggtaaggcatagccaacagctgggacattctatcactgctggttcacatagccacttgtacaacagtggcaccttcagagcagtgaccactgtcaaagtacttgagtttataaactataatcacgcttccactatttcattaaataacatgacagccttggacgggagctgttattgttagcatatccaagacaccatagaataattagcttctctcctaactcccaacctcaggcttccgaaaggatgccagtgggttcaacagctaaagtccagcgaggacagccttgaaggtaaggaccagcgtgaaggtctaaggaaggcaaagaaatctccctttgtggcgttctttgttttaaagtgatgtttg

SEQ ID NO: 259011 - DNA, 559 bp, Homo sapiens
ggtgtgtggtgacagccattcccaagcctggccacgccaacctgcctgagcagagtctacaaggaacagttccccgcgagaacttycaaagcatctgagtcaatagatctagggtaatagggtaaggcatagccaacagctgggacattctatcactgctggttcacatagccacttgtacaacagtggcaccttcagagcagtgaccactgtcaaagtacttgagtttataaactataatcacgcttccactatttcattaaataacatgacagccttggacgggagctgttattgttagcatatccaagacaccatagaataattagcttctctcctaactcccaacctcaggcttccgaaaggatgccagtgggttcaacagctaaagtccagcgaggacagccttgaaggtaaggaccagcgtgaaggtctaaggaaggcaaagaaatctccctttgtggcgttctttgttttaaagtgatgtttgagatggtgatctgacctgggtgaggaagaatcaaatgcttcttccagaacccttccagttcaagcacgt

SEQ ID NO: 259012 - DNA, 559 bp, Homo sapiens
ggtgtgtggtgacagccattcccaagcctggccacgccaacctgcctgagcagagtctacaaggaacagttccccgcgagaactttcaaagcatctgagtcaatagatctagggtaatagggtaaggcatagccaacagctgggacattctatcactgctggttcacatagccacttgtacaacagtggcaccttcagagcagtgaccactgtcaaagtacttgagtttataaactataatcacgcttccactatttcattaaataacatgacagccttggacgggagctgttattgttagcatatccaagacaccatagaataattagcttctctcctaactcccaacctcaggcttccraaaggatgccagtgggttcaacagctaaagtccagcgaggacagccttgaaggtaaggaccagcgtgaaggtctaaggaaggcaaagaaatctccctttgtggcgttctttgttttaaagtgatgtttgagatggtgatctgacctgggtgaggaagaatcaaatgcttcttccagaacccttccagttcaagcacgt

SEQ ID NO: 259013 - DNA, 608 bp, Homo sapiens
tgatggaagctgactacttagtttggcaatgactctgaactcattaaaacagacgagaaccactaggtgggggtgactggccagcaggaggacagagatgagtgaggatggaggacaaggtgtgtggtgacagccattcccaagcctggccacgccaacctgcctgagcagagtctacaaggaacagttccccgcgagaactttcaaagcatctgagtcaatagatctagggtaatagggtaaggcatagccaacagctgggacattctatcactgctggttcacatagccacttgtacaacagtggcaccttcagagcagtgaccactgtcaaagtacttgagtttataaactataatcacgcttccactatttcattaaataacatgacagccttggacgggagctgttattgttagcatatccaagacaccatagaataattagcttctctcctaactcccaacctcaggcttccgaaaggatgccagtgggttcaacagctaaagtccagcgaggacagccttgaaggtaaggaccagcgtgaagrtctaaggaaggcaaagaaatctccctttgtggcgttctttgttttaaagtgatgtttg

SEQ ID NO: 259014 - DNA, 509 bp, Homo sapiens
aaactttcttcataaggtaaaaggaaatatactgcaaataaatgaaaatataattattcttagcacagagagagaaacaatgaaaataaccaaatgcaaattttaagccttaaaaaaatgcaatattttaaataagaagctcactgaataacctcaattgcagaagacagataacagaggaagtgaagataaaaaagatcgacaaaaagtattcaattaaaaatacagagaagaaacattaaaacataatgagcagagtctcaggtacctgtgagaaaatataacataaaaatctaacacacatgtctttggagtttcagaaagagaaaaatccttgaaaatatgataaaggtttttcaaatttggtgaaacacatccacttatagacttragaaatcaagtgagctacaaaaaaaggtaaacacaaagacaaccacacctatacatacataaattaaattgctgataaaataaacattttgaaagcttctacagaaaaaagcataaca

SEQ ID NO: 259015 - DNA, 563 bp, Homo sapiens
aggcgaaaaaaaatatggatttgggttcaggttggttggtagatttgctgatgagaaaatgagaaaatttctgacataatgtttcactatactatttctaacgtagttaagtagtaggctagaagattaacttaagtatagaggaggggaaggtgtttcagagtgatgagatgtaaaatattcattttggagaattataaaaatcagtaaataagttgtgctcattgaactttgggaccagaaatttaaattgcaattgatgtgaatttttttcaataatgttaaatcactgcagtgtaggcaaatagtaagtaaatacttggttttaaacatattttggatccttttcacatgctttcacaatggagaaagcaaagagcaagtaaacatacggtattttgtgatgataatttcaggccatggcaggtaaggaaggaaagagaggaatgagatgcatgtttcaactgtaaaagagttataaaatcagtcaacagaaatctcaattagaaaaaaagtacytgtagcatagaagtattttttttttaatgaggcaaaaatatact

SEQ ID NO: 259016 - DNA, 602 bp, Homo sapiens
tttcttcaggagacataacatattttcatctccattttattttttcactccaccctggcaaagactttttacctaaatcatgaagaaataccgggagaggggtcaaacaagatggctgaatagaagcctctactaatcatttcccccaacaagaacaccaaatttaaaaactatgtacaccaaaaaaagcacttccataaaatgaaaaatcaggtaccagcttggccagagcggggtagagcaccaaacagagtcctaggatccctgattccgggccttggttcttggatcgcatttctggacctgctgtgggccagagggagttcactgccaaaagggtgagtcccaggccaggcagcattcgccacaagctaattgaagagccctttggtcttaaaagaacatcagcagtagcctggcagtacttctcatgggtgtgtgctgatggtggccagggggagaggctgctcttcctgtaaaaagaggagggaagaatgggaaggactttgtctcattgttttagtgccaggttaactgcagtagaatagagcaccaggtatatttytaaggtttttgactttagtccctggcttcctgactgc

SEQ ID NO: 259017 - DNA, 588 bp, Homo sapiens
gagcagcagacatgtaacgtgatcctctatgaatactcagagataatgttccaaagtggtggacaatgggttggtagagasaaacacaaaaaaacaaacggaaagacacccacatacaaaatacaccaggaatcaaaaatataatgaataaaaactcatcatgttgaggaaacattgacaacaaaatcagaagtcaagaacttcatatattcagtttatcagacacaaaatataaattgagaatattttgtaagcgtaaagatttttttaattcaaatatgagtaaagagaaagaggctacaaaaagtgaccaagaagatacagagaagaactaaagaaaaaaatctttagaaactataacaattaaaatataaaactcaacaacagcctttagactcacccctttaaacatcatttaaaaactgaaattagagctaaagaaatctttggaatatatcacagaggagaaaaaataaaagaaatattaagacacttgaaaatagattaagaatgactagcatattcttaagcaaagactgaagagaaagaaataaaataatggtaggaggaaatatttgaagaaataaa

SEQ ID NO: 259018 - DNA, 614 bp, Homo sapiens
tattcatccttaaaaaataaggatatcttgcttatgtgacaataaaaatgaacctgtaggacattatcataagtgaaataaatcagttacagaaggatgagtgatgcatgattccacatacatgaactatttaaaacagtcaaactcatagaaacaaaatgtaaaatagcagctgccacgggctggagcgagggggaaatggaaagttgatgttcaatggtgataaagtttaagttatgcactataaatacattctagagatctctgtacaacatcatattttttacttaaaaatgtgttaagtagctcagtgtcacattaagtgtcccataccaaaatgttaaaaaaaatctatattcataagtacacttaatgacacttaayaatttcttatttctatgactgagttctaccattatagagattttgtctcttcctttttatattttaagttaattatttaattttaattatatatattaattgttcatatttttggaatacatgccatattttgatacctgtatacaatatgtaataatcaaattaaggtacttaggatatccatcaccccaaatattgatctcttctttgtgatgggaacattacaaatc

SEQ ID NO: 259019 - DNA, 580 bp, Homo sapiens
cctttgcctcgcatcatgactgaaagcttcctgaggcctccccagaaacagaagccactgtgcttcctgtggagcctacagaaccatgagccaattaaaactcttttttaatatatataaattacscagtctcagatatttctttacagcagtgtgagaatggaccaatacatctactgtactactattcaatagtacagaacttattctttccacctaactgtatttttatacccctcaaccagcctctcttcatcctctctctctcctttccttctcagcctttggtcataaccataccactctttacctcaatgagatacactttcttagctctcacatataagtaagaacatgcaatatttgtctttctgtgcctagcttattttacttaacataaagacctccagttccatccatgttgtcataaaagacagaattttattctttttgtagctgaatgatatttcattttgaatatgtacaacattttcctcatccagtcccctgttgatggacacataggttggttctatatcttagttattatgaacagtgctgtaaaaaacatgagattagc

SEQ ID NO: 259020 - DNA, 401 bp, Homo sapiens
tctgcatttctttttacaaatagttcattgtgaggttatagaaatgccactgaatttgtacgttgaattcatatcctgcaacttactgaatttgtttatggatcctaacagttttttggaggagttgtcaaggttttctatatataaggtcatattgttggcaaacaaggataatttaacttctttcttgccaatataaatgccttttatttctttctcatgcctaattgctctagctaggtcttccagcactatatcaagtakaagaaatgagagtgggcatctttgtcttgtaccttatctcacaggaaaagctgtcatcttttcactgttgagtataatgttagcttttggcttgtcatgtatgaccattattttatattccttccaaatttaatttg

SEQ ID NO: 259021 - DNA, 565 bp, Homo sapiens
tgttttggtttggttttgtttgtttgttttttggttttttttttttttttgaaacgaagtctcactcttgtcacccaggctagagtgcaatggcgcaatcttggctcactgcaacctccacttcccaggttcaagtgattctcctgcctcagtctcctgagtagctgatattacaggtgcctgccactacacccaggtaactttttttatttttagtagagatggggttttaccgtgttggccaggctggtctcaaactcctgacatcaggtgatctgcccrcctgggcctcccaaagtgctgggattacaggcatgatccaccgtgcccagcctgcttttttttttttttccacaaaagaacatatacttacctttttcccagaagaggactccaaatccttggatgatgttcactctcctcctttgatatcctgtaacttactgcaaaataaagttaacagccatttaagggaataagacagggaagaaacttttaaaaaatggttaataagatatgcaaacatattcaaaataaaataaggaaggaatacgtataactctta

SEQ ID NO: 259022 - DNA, 565 bp, Homo sapiens
tgttttggtttggttttgtttgtttgttttttggttttttttttttttttgaaacgaagtctcactcttgtcacccaggctagagtgcaatggcgcaatcttggctcactgcaacctccacttcccaggttcaagtgattctcctgcctcagtctcctgagtagctgatattacaggtgcctgccactacacccaggtaactttttttatttttagtagagatggggttttaccgtgttggccaggctggtctcaaactcctgacatcaggtgatctgcccgcctgggcctcccaaagtgctgggattacaggcatgatcyaccgtgcccagcctgcttttttttttttttccacaaaagaacatatacttacctttttcccagaagaggactccaaatccttggatgatgttcactctcctcctttgatatcctgtaacttactgcaaaataaagttaacagccatttaagggaataagacagggaagaaacttttaaaaaatggttaataagatatgcaaacatattcaaaataaaataaggaaggaatacgtataactctta

SEQ ID NO: 259023 - DNA, 565 bp, Homo sapiens
tgttttggtttggttttgtttgtttgttttttggttttttttttttttttgaaacgaagtctcactcttgtcacccaggctagagtgcaatggcgcaatcttggctcactgcaacctccacttcccaggttcaagtgattctcctgcctcagtctcctgagtagctgatattacaggtgcctgccactacacccaggtaactttttttatttttagtagagatggggttttaccgtgttggccaggctggtctcaaactcctgacatcaggtgatctgcccgcctgggcctcccaaagtgctgggattacaggcatgatccaccrtgcccagcctgcttttttttttttttccacaaaagaacatatacttacctttttcccagaagaggactccaaatccttggatgatgttcactctcctcctttgatatcctgtaacttactgcaaaataaagttaacagccatttaagggaataagacagggaagaaacttttaaaaaatggttaataagatatgcaaacatattcaaaataaaataaggaaggaatacgtataactctta

SEQ ID NO: 259024 - DNA, 565 bp, Homo sapiens
tgttttggtttggttttgtttgtttgttttttggttttttttttttttttgaaacgaagtctcactcttgtcacccaggctagagtgcaatggcgcaatcttggctcactgcaacctccacttcccaggttcaagtgattctcctgcctcagtctcctgagtagctgatattacaggtgcctgccactacacccaggtaactttttttatttttagtagagatggggttttaccgtgttggccaggctggtctcaaactcctgacatcaggtgatctgcccgcctgggcctcccaaagtgctgggattacaggcatgatccaccgtgcccagcctgcttttttttttttttccacaaaagaacatatacttacctttttcccagaagaggactccaaatccttggatgatgttcactctcctcctttgatatcctgtaacttactgcaaaataaagttaacagccatttaagggaataagacagggaagaaacttttaaaaawtggttaataagatatgcaaacatattcaaaataaaataaggaaggaatacgtataactctta

SEQ ID NO: 259025 - DNA, 626 bp, Homo sapiens
gccctccattgcaactactttttctgatgactttgtgtagaactcctctgggagaaggaggcagagaggcagcattggctccaagactttgtacacaaaggactagcaatacatcttttgtgatgataatgttcatccatgacatccgtagctcaaggaatggcaatgtctcccaaagtrggtctacagaatacactgtttatttttctgttatgtatttcagaaacttatttggccacaatttttttccatcaagagttattacaatcctgcaaaacatacgtaagaaaatattgcaaaccaaaaaaattaaaaaacacagttcactaatttcaccagtagccagagtttctatgtatttgtttagacaataagggaacatggcttcacaaaactgactggttccaggatttcagaaatatagtttaaaatctaagggagagaaactagatatttttcccctaaggatgggaatgagaaaaggatgtccactctcaacattcctattcaacatcacattggaagttttggctgatgcaataagaaatggaaaggaagtaaaatgtatatagattgagaaggaagacataaaatgtctgcttgtagatggcatgcttaaaccacca

SEQ ID NO: 259026 - DNA, 491 bp, Homo sapiens
tgaatgcatgatatattaaatattagtctattttatcattttctgctgtaaaatacgtacaaatctattgtaaaaagttaagtgttattaaacacaaacacagacattacatgttgccatttgcagtcaagttaagtggatgcaaygatgcagtattaaatcataactgtataaaattgactatagtacatgctatactaccgtaataatttcatagccacctcctattgctactgcggtgagctcgtgttgtgagtatccactttaaatgcagtgtgtctctaatcatctctacgttagcagctcgtctctccagtaaattgtgtatcacagtaaaaagtaatctctcgcagttcttgtgtatttttcatcatgtttggtacaataccgcgaaccttgaataacaccgtcagacccataggaagtgccactagtgatgctggaagtgatcccaagaaccagaaaaaagtcacgacattacaagaaaaagc

SEQ ID NO: 259027 - DNA, 462 bp, Homo sapiens
ttaaatacaaaaaaaaaaaaaatgtccaggactataccattagtgctgcactggttaatttgtcatacagccactgtttgttttggtttgttcctattttgaaactaattcatactgaaatttggattgaattcttggcatcayaaattacacaatgtgtctcaggctctaaagaggccttaacagggtgcagggctcatcatgtctagttgttacaatatagcaaaataaatattatggtaagacattaggccagagatagtaatgctcaccaaacacggtgtttgttacccttaatttctcagcaaacttaatgagttaggaacatatcaacaattctggcaactgttctatggtcataactgatttctgggtcaaagcacagaagtgcagtttgcaaaactctaatcaaccatgcatttaacaccatgagagttattggtaaactcgatgaaaatagtt

SEQ ID NO: 259028 - DNA, 462 bp, Homo sapiens
ttaaatacaaaaaaaaaaaaaatgtccaggactataccattagtgctgcactggttaatttgtcatacagccactgtttgttttggtttgttcctattttgaaactaattcatactgaaatttggattgaattcttggcatcacaaattacacaatgtgtctcaggctctaaagaggccttaacagggtgcagggctcatcatgtctagttgttacaatatagcaaaataaatattatggtaagacattaggccagagatagtaatgctcaccaaacacsgtgtttgttacccttaatttctcagcaaacttaatgagttaggaacatatcaacaattctggcaactgttctatggtcataactgatttctgggtcaaagcacagaagtgcagtttgcaaaactctaatcaaccatgcatttaacaccatgagagttattggtaaactcgatgaaaatagtt

SEQ ID NO: 259029 - DNA, 557 bp, Homo sapiens
aaagatgaattttagatataaaatgagctacctattaagagtaaggaattttaaatgtaataaaattttagagctaaatattattgtcttcccttgaaaagggaaaaaattaattgggattgttaataataagttattccacaagtagccatactctctggaaaagtttttccagctcagtgtttgctgtatagatcagggtttggcaaactacaacctttgggtcaaattggaccgacatgtgtttatagaaataaggatgtattgtaacacagccatgttcattcatttactattgtcactagctgttttcatgctacaaaggcaaagttggrtgtgacaaagatctattttctgcaaagccaaaaatattaagtttctagctgtttacaaaaaaaaattgcagacccctgattaaaaatgattggctcagttgaggctggcctctgaaatttagattaaaataatacactagcataaatatcaaaataactgccaagagttaaagaaagaatgtgccaatcacaagaagagagtttggttatcaatggtatctt

SEQ ID NO: 259030 - DNA, 439 bp, Homo sapiens
gacatgtatgtatcattttagtatcatacagaatagttcgctgccctaaaaaatcctctgtgctctgcctattcatccctctctcacccatctcctgacaatcactaattttttttactgccatcatagttttaccctttccagaatgtcatatctttggtacaaaatagtatgtagacttttcaatttggcttcctttgcttggcaatatccatttaaaattcttcaatgtrttttcattgcttgatggtttattttattttatagctgaataatattccattctctggatgtaccacagtttatttttccattaatctactaaaggatatcttgtttgtgtccaagcttgggcaattatgaaaaaagctgctgtaaatgctcatgtacagattttgaggtggatataagttttcaattcctttggataaatattgta

SEQ ID NO: 259031 - DNA, 579 bp, Homo sapiens
ggaaccattttgattaattaacgtcagaatggactcactgtaaagcatgagtgactctgagtggtagaggggctgggtgcagatgctattgatgcccgagctgacatctcagcccaccttaaagctgatctgcagcaccaataagaacaatgtatggtatgctgacaggatcctatcttaagcaccaaggtttctcttctttttctaaaggctccttccagcactatgaaagcttgttcaactgcactaaagaacaatctgaaaatatagaggaattaaaatctcaggacacatgaagaaccagtcatgttctayatcattttaaaattagtctccagtaagattgaactttgatggccagagtagtaacctatatattaatgcatcctttattactttttcacaatttccgatctaaaatctctccacccttatttgggatttccagaatcatctctcacctaaactatatacatacaagactttttcttaggtcaacttttgggcaaaaccaaaccaagacaaaaaccctctctgtctcagtgttcatatctcatatttcaaggacaactgacccct

SEQ ID NO: 259032 - DNA, 447 bp, Homo sapiens
atcctcagcatatttagtttttaatcctggggcttttagttcctggttttgctgtttgcacagggtggcaagaagrcatgttctgggtttggtatgagctggatttggtccaagatagaagatgtcataggagtaaggcactaaacagactgaaagtggatttcatctttggcagcctatgacatttacctttgctctcttgtcaccaagtttaccacacctagcccatgatggcagacagtgggatgagtgggtataaaaaccaaagttacaagggcccttgtagacttgtctctccagaatgactatcctccatttctaggtcccaaatcacaaccatgaagttgatcttatggtacttggttgtggcactttggtgcttcttcaaaggtaagaaactaatttaaagaattctttcaaatgtgatggaccccaagtatatatttg

SEQ ID NO: 259033 - DNA, 426 bp, Homo sapiens
tggaagccttactttaccgacaaaaatcaggtcagtatctttcaggaattaatctttactttgaaacattatgctgcattgtgaggctgcttttggaatcataaaattagtgtgtttcttacacacttggttttgtgaatgagctcccatgatgcctcatttaccccatgtgatctgaactccttaatgacaggattttggtctatgctgttcaccctatattcataatgccaagagcagtggctgyaatggagtaggtcctcagtacatctttgttttaaatgaataaaataaattgggatgatcaatataagatttattttgcctacaagaattttctacatgaaagtaaccaaatgctttgcaaggtaaactttctgaaataaaccaaggataccctaacttcttaccaaagaagacatggga

SEQ ID NO: 259034 - DNA, 582 bp, Homo sapiens
ttcaacagtcttactagatcccatcaggtgactgaatatcaccattatcctttactgtttgtttctctacccactgaaatgaaaaaatgaaccatagcaaatcaacaagactgcttttatgaagtttttctgaaatccaacgttaatattattgctaatatcaacttagactcaattttattctggtctattgtacacagcaatcaaaatagcccaatatacgttcctgtgcttttcttatagggcattttacatccctacctcattctacaacataaataaaatgtaattttaaacagccttctttgagggaaaacataaactgagattaggcagcagctcagttgtgtcaggaagacagcaagattatttttcacagccatggacaggactcattaagttccatcacagtgatatagtwagagtttctctacaaaatctggttgttacttttgtaaatgggggcatacgagttttcagcattcctttagaagcccccattcacaaatgagaaggaagtaagggtacgcttggggttctatagttctctgaaagttctttaaaattctgaggaattgaatt

SEQ ID NO: 259035 - DNA, 537 bp, Homo sapiens
gtgtgtagggagagaagtctcttctcctattttgagtatggagaattaaactacttatttttacttgcatttgctcttacgtattcttcaagttttactcacaaataatgtgcttcattctcttgtctattcactgttcaaaatgtatgtcttccacaactttacaggaatgtcatcattattatgacattattaattctaaagtatttcaattttatcgtaaagatttaaaaaaatgccttgayggaaagcacatatgcatcatgtaagacagtatttcttctcttaaaagtgatcttgttggtgaatgtatttactaaataaatatgaattgagtatcctgtatagttcaggcactcctcttgtcacctgggatacttcagtgaattaaacaggcaaagaaacattgggtttatgcagcttaaaacctagaaggatacagtcaataaacaaaaaacattataagcagtaaacatgttatattacaaggtgataaaatctgtgggataaaatagagtaatattaaatataatggta

SEQ ID NO: 259036 - DNA, 537 bp, Homo sapiens
gtgtgtagggagagaagtctcttctcctattttgagtatggagaattaaactacttatttttacttgcatttgctcttacgtattcttcaagttttactcacaaataatgtgcttcattctcttgtctattcactgttcaaaatgtatgtcttccacaactttacaggaatgtcatcattattatgacattattaattctaaagtatttcaattttatcgtaaagatttaaaaaaatgccttgatggaaagcacatatgcatcatgtaagacagtatttcttctcttaaaagtgmtcttgttggtgaatgtatttactaaataaatatgaattgagtatcctgtatagttcaggcactcctcttgtcacctgggatacttcagtgaattaaacaggcaaagaaacattgggtttatgcagcttaaaacctagaaggatacagtcaataaacaaaaaacattataagcagtaaacatgttatattacaaggtgataaaatctgtgggataaaatagagtaatattaaatataatggta

SEQ ID NO: 259037 - DNA, 570 bp, Homo sapiens
acacatacacaaacacagacacacacacacattaatctccactatttacctttcttaaataatttcaacagtgataagccaactagtaactatacacataaagtaagtgatttactatattgttaaagtgtcagatgcaatgttttattccaaaataaatgatacatgtcagtaggaggtttacactagaagcaaaatatatttatttatttaatacatctattatagactacagttagtttgacaattaaaagaatagatagtgaatttccatgtagcaattaattttttaaggttttctttacctgcttggaaccagcaaatattcttctcctattggcaaagcaatctggaatttttctaggagcttaaaatactgtgacatgtagttctttggaaatttccttttttttgaaagaaatttttccacatctctacgcgaaataatkcccttagggtgttttggacaaccttccactttcactgtcaaaatctgaaagattcgagtcataaataatcactaaaatttattttctgaaatgttgcaaatttaaagcattttatgtctct

SEQ ID NO: 259038 - DNA, 530 bp, Homo sapiens
gttgctgtgagaattacatgagctaatctttgaaaagcacatattaacctcatgtatgttagccattattatctagttattctaatytattttactaagatacacttattttttaaagagtttgtgcttgattttcctagtggatctatagcgtgctaccactatttatagtggaagtttccaaagatggacacatcatttccatccctatacataggtgctattcatatagagtctcttttccttcccctttaatctgagctaggtttgtggttgctctggttactagaatgtagcagaattaatatttttgccagtccttggcctagcctttaagaggacagaaaaaatctgcttcatttctcttggtaaccagccaccatgaaagatgtctaattattctgtgatcaccgtgccacgaggaagcccaacttagccatatgataggccacatggagaagcaccaatactccaaaaacatgcatgtacctttcttgcactttccagctcagtttaatgaatgaagccaa

SEQ ID NO: 259039 - DNA, 530 bp, Homo sapiens
gttgctgtgagaattacatgagctaatctttgaaaagcacatattaacctcatgtatgttagccattattatctagttattctaatctattttactaagatacacttattttttaaagagtttgtgcttgattttcctagtggatctatagcgtgctaccactatttatagtggaagtttccaaagatggacacatcatttccatccctatacataggtgctattcatatagagtctcttttccttcccctttaatctgagctaggtttgtggttgctctgkttactagaatgtagcagaattaatatttttgccagtccttggcctagcctttaagaggacagaaaaaatctgcttcatttctcttggtaaccagccaccatgaaagatgtctaattattctgtgatcaccgtgccacgaggaagcccaacttagccatatgataggccacatggagaagcaccaatactccaaaaacatgcatgtacctttcttgcactttccagctcagtttaatgaatgaagccaa

SEQ ID NO: 259040 - DNA, 538 bp, Homo sapiens
gccttaactaaacccaaattctaaaatgctcaatgctctgggcgccatctgttctatgctttgaccataacccccgtgccacaaaaataaaagacaccaacctgtgccatgattttacaaagccacttgggttccacaaagtacaagtcacttaactgcagtgctgggtcttgaaaatgaagaaggactcctgtagtaaaaagtcatcaaacagtgaaacatggaatctagaacaaatatcaaggggctttagaaaaaatctagtccaacttcctcattttrcaggtgaagaaatttcagcatagctagtgacagagctgggactagaagctgtgcatcctatggtctaaagttccaatattataatggagtatttttaaactacataaaatgatcatatttaagcatatttgagacactgacatgcattacagagcatatttcacacataagtagaaattcataattttctgtttcgcttgctgaatacacactacaaagacatgttttattttcaaatacagataagaaacacagc

SEQ ID NO: 259041 - DNA, 538 bp, Homo sapiens
gccttaactaaacccaaattctaaaatgctcaatgctctgggcgccatctgttctatgctttgaccataacccccgtgccacaaaaataaaagacaccaacctgtgccatgattttacaaagccacttgggttccacaaagtacaagtcacttaactgcagtgctgggtcttgaaaatgaagaaggactcctgtagtaaaaagtcatcaaacagtgaaacatggaatctagaacaaatatcaaggggctttagaaaaaatctagtccaacttcctcattttgcaggtgaagaaatttcagcatagctagtgrcagagctgggactagaagctgtgcatcctatggtctaaagttccaatattataatggagtatttttaaactacataaaatgatcatatttaagcatatttgagacactgacatgcattacagagcatatttcacacataagtagaaattcataattttctgtttcgcttgctgaatacacactacaaagacatgttttattttcaaatacagataagaaacacagc

SEQ ID NO: 259042 - DNA, 494 bp, Homo sapiens
ggggaaacaatttcaagtccagcatctagagagcaaagcctgccttcctttggcaggtatggtctcagcagtgatccctgcccatgtaacctaaagaacagagtatccctttgcagtatgcagccyttaaaagtctatggtctaaccttcttgttcagaaagtggtaacttgaacaagcaaacctacatgaatgtgaagaatgcccattctagttacctttaataatcaatacagtccttctttaacaatcaatagagtacttacttcatacgaagtcacccaaaactactcaatttggaaaactgacaagataaaagagaaagatcaagatgaacccacagagcaaataacctcagagaaaaaagcaataatgcaagtaatacaaaaaaaaattctaattgacatgaacagaaacacctatggacattttatccaaaaacatggctacaaaggaacaaccagaggggatggaaagaattgctggaaatggaaa

SEQ ID NO: 259043 - DNA, 494 bp, Homo sapiens
ggggaaacaatttcaagtccagcatctagagagcaaagcctgccttcctttggcaggtatggtctcagcagtgatccctgcccatgtaacctaaagaacagagtatccctttgcagtatgcagcccttaaaagtctatggtctaaccttcttgttcagaaagtggtaacttgaacaagcaaacctacatgaatgtgaagaatgcccattctagttacctttaataatcaatacagtccttytttaacaatcaatagagtacttacttcatacgaagtcacccaaaactactcaatttggaaaactgacaagataaaagagaaagatcaagatgaacccacagagcaaataacctcagagaaaaaagcaataatgcaagtaatacaaaaaaaaattctaattgacatgaacagaaacacctatggacattttatccaaaaacatggctacaaaggaacaaccagaggggatggaaagaattgctggaaatggaaa

SEQ ID NO: 259044 - DNA, 557 bp, Homo sapiens
gtgtgagaagtttgtttctctccttctttttttgaagttccaaaacactataaaattgcaaaatggtattgtttacataaagtaagcaatggatttccatggatttttcaatgaaaattaacactgaaatagagaaaatacctgactatttattatttatgaaaacctcaaattaataaaggcttatttttaagtgcataggccctcaataaacatttgatgagttttatcacatccctggcaatgggcaggcattgggaatacaaaggtaaaacatggcctcttccttcaggagttcactgataatccacaacagctgtttagggtaaattcaaatttatttttataaacctgctatatcaaatcataaatataaattttaaaaaatatttctccttttccctccaagtccttatagactaagtgttactcaatataaaaatatccaagctgcagacaaccagaagctragaaatgttgaaaaaaccataaactgcaaaaatcagcctctgcttaacagagaatttattgccattgttgatatacattccatttac

SEQ ID NO: 259045 - DNA, 568 bp, Homo sapiens
cagtgccaggcaacagtgattagggcataaagatctgcttattttattttatttttaaattttaaaaattattttcaaaaatgtggatacatagtagatatatacatatatagcatacatgagatattttgatacaggcatgtcatgtgaaataagcacatcatggagaatggggtatccatcccctcaagcatttaccctttgtgttctaaataatccaattatgttccttattttaaaatatataattattattggctatagtcaccctattgtgctatcaaatagtaggtcttattcattcttttaatttttttrtacccattaaccatccccacctctccctcacccctcactacacttcctagctctagtaaccatccttctacattctgtggtcatgagttcaatggatttgatttttctagatcccacaaagtaagaacatgtgatgtttgtctttctgtgcctggtttatttcacttaacataatgatctctcattccatccatgttgttgcaaatgactgaatcccattcttttttatggctgaatagtactccatttc

SEQ ID NO: 259046 - DNA, 527 bp, Homo sapiens
aataaaatatttgacaatagtcatggttacacaatgcataaattatggctaaattattatcaggaaggaaaaatctttacttattatttcaaaagctattttgcyagtctattaaaagctattagaactgcacttcttaagattaaattctataattgaacattttaactaaccaagatattatctctttgccactgacattatttcaaattaagcttaactatttctttttagcctttggaaagtattctgaaagagtctgtgttctataaatatacttaaagaggcatgtcttataaaggatttggatactattcaatgatgtatgacttggctttagcttttttattcttaatctctcagcttttctcttcagcaggggaagagtacctaatggcctttcagtaatcccttggtaaatttttctttcaagcccattacttactgtgaaggtcaacttcattagtgtatttatcttatttttttcagcccaaaataggtatattgaaatgaatgggcctaatgtc

SEQ ID NO: 259047 - DNA, 527 bp, Homo sapiens
aataaaatatttgacaatagtcatggttacacaatgcataaattatggctaaattattatcaggaaggaaaaatctttacttattatttcaaaagctattttgctagtctattaaaagctattagaactgcacttcttaagattaaattctataattgaacattttaactaaccaagatattatctctttsccactgacattatttcaaattaagcttaactatttctttttagcctttggaaagtattctgaaagagtctgtgttctataaatatacttaaagaggcatgtcttataaaggatttggatactattcaatgatgtatgacttggctttagcttttttattcttaatctctcagcttttctcttcagcaggggaagagtacctaatggcctttcagtaatcccttggtaaatttttctttcaagcccattacttactgtgaaggtcaacttcattagtgtatttatcttatttttttcagcccaaaataggtatattgaaatgaatgggcctaatgtc

SEQ ID NO: 259048 - DNA, 527 bp, Homo sapiens
aataaaatatttgacaatagtcatggttacacaatgcataaattatggctaaattattatcaggaaggaaaaatctttacttattatttcaaaagctattttgctagtctattaaaagctattagaactgcacttcttaagattaaattctataattgaacattttaactaaccaagatattatctctttgccactgacattatttcaaattaagcttaactatttctttttagcctttggaaagtattctgaaagagtctgtgttctataaatatacttaaagaggcatgtcttataaaggatttggatactattcaatgatgtatgacttggctttagcttttttattcttaatctctcagcttttctcttcagcaggggaagagtacctaatggcctttcagtaatcccttggtaaatttttctttcaagcccattasttactgtgaaggtcaacttcattagtgtatttatcttatttttttcagcccaaaataggtatattgaaatgaatgggcctaatgtc

SEQ ID NO: 259049 - DNA, 418 bp, Homo sapiens
aatctaaaataaacttgtatattcaaatggaacatattctttaataatgtcatttttaagggctctgcatttattccataaatgctgccattattgttcagtttttcttaattacctgcattcactttagaaaacagaaaaaaaaaaaaaaaaaaaaaaaccggaaccggtkgcaaaaaaaagcacccaaaaaaaacatacttttaaaatggaaaaaaacctgggtctaaattctaaattgggcattaacttagaaatcggaacgggagcaagttgcacaaataaccaaaaaataattttttttttttgtaaaagggcaaaagtagtatacccaccttttaaaaggatgagtgtaaataaaggaattgtgcaattaattcccaggcaagtcacacacaagcaccaccttatgagggaa

SEQ ID NO: 259050 - DNA, 418 bp, Homo sapiens
aatctaaaataaacttgtatattcaaatggaacatattctttaataatgtcatttttaagggctctgcatttattccataaatgctgccattattgttcagtttttcttaattacctgcattcactttagaaaacagaaaaaaaaaaaaaaaaaaaaaaaccggaaccggtggcaaaaaaaagcacccaaaaaaaacatacwtttaaaatggaaaaaaacctgggtctaaattctaaattgggcattaacttagaaatcggaacgggagcaagttgcacaaataaccaaaaaataattttttttttttgtaaaagggcaaaagtagtatacccaccttttaaaaggatgagtgtaaataaaggaattgtgcaattaattcccaggcaagtcacacacaagcaccaccttatgagggaa

SEQ ID NO: 259051 - DNA, 418 bp, Homo sapiens
aatctaaaataaacttgtatattcaaatggaacatattctttaataatgtcatttttaagggctctgcatttattccataaatgctgccattattgttcagtttttcttaattacctgcattcactttagaaaacagaaaaaaaaaaaaaaaaaaaaaaaccggaaccggtggcaaaaaaaagcacccaaaaaaaacatacttttaaaatkgaaaaaaacctgggtctaaattctaaattgggcattaacttagaaatcggaacgggagcaagttgcacaaataaccaaaaaataattttttttttttgtaaaagggcaaaagtagtatacccaccttttaaaaggatgagtgtaaataaaggaattgtgcaattaattcccaggcaagtcacacacaagcaccaccttatgagggaa

SEQ ID NO: 259052 - DNA, 584 bp, Homo sapiens
aatctctgcacaagcagataaataaaaactttctgctttggctgaaataactgcttttaggaaaagaaagagtatatgcttattaatatagcttgggatgtggacctctttgacgagactatacaattcaaggtagacaaagtatgcctaaaaataaatctaaaataaacttgtatattcaaatggaacatattctttaataatgtcatttttaagggctctgcatttattccataaatgctgccattattgttcagtttttcttaattacctgcattcactttagaaaacagaaaaaaaaaaaaaaaaaaaaaaaccggaaccggtggcaaaaaaaagcacccaaaaaaaacatacttttaaaatggaaaaaaacctgggtctaaattctarattgggcattaacttagaaatcggaacgggagcaagttgcacaaataaccaaaaaataattttttttttttgtaaaagggcaaaagtagtatacccaccttttaaaaggatgagtgtaaataaaggaattgtgcaattaattcccaggcaagtcacacacaagcaccaccttatgagggaattcatattag

SEQ ID NO: 259053 - DNA, 584 bp, Homo sapiens
aatctctgcacaagcagataaataaaaactttctgctttggctgaaataactgcttttaggaaaagaaagagtatatgcttattaatatagcttgggatgtggacctctttgacgagactatacaattcaaggtagacaaagtatgcctaaaaataaatctaaaataaacttgtatattcaaatggaacatattctttaataatgtcatttttaagggctctgcatttattccataaatgctgccattattgttcagtttttcttaattacctgcattcactttagaaaacagaaaaaaaaaaaaaaaaaaaaaaaccggaaccggtggcaaaaaaaagcacccaaaaaaaacatacttttaaaatggaaaaaaacctgggtctaaattctaaattkggcattaacttagaaatcggaacgggagcaagttgcacaaataaccaaaaaataattttttttttttgtaaaagggcaaaagtagtatacccaccttttaaaaggatgagtgtaaataaaggaattgtgcaattaattcccaggcaagtcacacacaagcaccaccttatgagggaattcatattag

SEQ ID NO: 259054 - DNA, 584 bp, Homo sapiens
aatctctgcacaagcagataaataaaaactttctgctttggctgaaataactgcttttaggaaaagaaagagtatatgcttattaatatagcttgggatgtggacctctttgacgagactatacaattcaaggtagacaaagtatgcctaaaaataaatctaaaataaacttgtatattcaaatggaacatattctttaataatgtcatttttaagggctctgcatttattccataaatgctgccattattgttcagtttttcttaattacctgcattcactttagaaaacagaaaaaaaaaaaaaaaaaaaaaaaccggaaccggtggcaaaaaaaagcacccaaaaaaaacatacttttaaaatggaaaaaaacctgggtctaaattctaaattgggcattwacttagaaatcggaacgggagcaagttgcacaaataaccaaaaaataattttttttttttgtaaaagggcaaaagtagtatacccaccttttaaaaggatgagtgtaaataaaggaattgtgcaattaattcccaggcaagtcacacacaagcaccaccttatgagggaattcatattag

SEQ ID NO: 259055 - DNA, 582 bp, Homo sapiens
tctttctttgtacaaatgtcctcatatacaaaaagatataaaaatactaccacagacagctgttgtgaggagcatgttgttctcagattctccttatacccaagcctaaaaggacttttaggtgctttctatttgttgataagaaaaaggagagttttaaagtttgaagctggtaggtggaaccaatattctggtgattattcactgaactgatttacttgagtgagtgaaagattaaggtccctggattataaagcagtgaccaggaaagctggtaatttggcatcctatcaaactcatactttgtgtttagcatttgtttagtgggasctgggagaaactgactttgtgttaataaaaataatatgaaaacaaattggcttttgtttcatttccagtaacaagttaatgatttggagaagtccacctcctgaaaactaaaaaggttagcttaaaaggaaaggaagaacattaaaatgaacatctaaaattaccaaagatctgatgagatggtatggaactatatggccaaaatcaaagtgaaggtgggaacacaaagatataagcagaacaccaaagctg

SEQ ID NO: 259056 - DNA, 582 bp, Homo sapiens
tctttctttgtacaaatgtcctcatatacaaaaagatataaaaatactaccacagacagctgttgtgaggagcatgttgttctcagattctccttatacccaagcctaaaaggacttttaggtgctttctatttgttgataagaaaaaggagagttttaaagtttgaagctggtaggtggaaccaatattctggtgattattcactgaactgatttacttgagtgagtgaaagattaaggtccctggattataaagcagtgaccaggaaagctggtaatttggcatcctatcaaactcatactttgtgtttagcatttgtttagtgggagctgggaraaactgactttgtgttaataaaaataatatgaaaacaaattggcttttgtttcatttccagtaacaagttaatgatttggagaagtccacctcctgaaaactaaaaaggttagcttaaaaggaaaggaagaacattaaaatgaacatctaaaattaccaaagatctgatgagatggtatggaactatatggccaaaatcaaagtgaaggtgggaacacaaagatataagcagaacaccaaagctg

SEQ ID NO: 259057 - DNA, 451 bp, Homo sapiens
tttgctaactgacgtgctagaaggactaaggaaaactaggaagaagcctaataaattagtcaatgatatccactataacacagggaaaggaagaaaatcctactgcctttctggagagactaagagaggcattgaggaagcatamctcactgtcacctgactctattgaaggccaactaaggttaaaggataagtttatcactcagtcagctgcagacattagaaaaaaacttcaaattccaccttaggcctggagcaaaacttagaaaccctattgaacttggcaacctcggttttttataatagagatcaggaggagcaggcagaacgggacaaacaggataagaaaaaggccaccactttagtcatggccctcaggcaagtggactttagaggctctggaacagggaaaggctaggcaaatcaaatgcctaatagggcttgcttccag

SEQ ID NO: 259058 - DNA, 451 bp, Homo sapiens
tttgctaactgacgtgctagaaggactaaggaaaactaggaagaagcctaataaattagtcaatgatatccactataacacagggaaaggaagaaaatcctactgcctttctggagagactaagagaggcattgaggaagcatacctcactgtcacctgactctattgaaggccaactaaggttaaaggataagtttatcactcagtcagctgcagacattagaaaaaaacttcaaattccaccttaggcctggagcaaaacttagaaaccctattgaacttggcaacctcggttttttataatagagatcaggaggagcaggcrgaacgggacaaacaggataagaaaaaggccaccactttagtcatggccctcaggcaagtggactttagaggctctggaacagggaaaggctaggcaaatcaaatgcctaatagggcttgcttccag

SEQ ID NO: 259059 - DNA, 483 bp, Homo sapiens
agccaccccctcatccatgccccttatgtcaagggaatcactggaaggcccactgccccaggggacaaaggtcctctgagtcagaagccactaaccagataatccagcagcaggactgagggtgcctggggcaagcgccagcccatgccatcaccctcacagagccccaggtatgcttgaccattgagtgccagggggttaactctcttctggatactggtgtggccttgtcagtcttactctcctgtcccagacaactgtcttccagatctgtctctatctgaggggtcttaggacaggcagtcactagatacttctcccagccactaagttgtgactagggaacttcactcttttcacatgcctttctaattatgcctgaawtccccactcctttgttagggagagacatcctagctaaagcaggggccattatacacctgagcataggagagggaacacaggttattgttccctacttga

SEQ ID NO: 259060 - DNA, 582 bp, Homo sapiens
ttgtcatctagtaatgttctttgaatrctgaacactgaatgttatactgctgagtaactggacttagtgtcctcctttaacaaatattattgagcttttctctgacagacagctaatttatttgaaaagcagtttgacatttttgaggtttgtttttctgcttaggaagggcaggtctgaagtagcttctactctagggctaggttagccctgctactaccacggcttgggatatctaataagtgtaatttttttagagacagggtctcgcgctgctgcccgggctggggtgccatggcacaatcatggatcacagcagcctcaaccacctgggctcaagaaatcctctcgtctcagcctccagagtagctgagactacagatgctcatcaccacacccagctaattaaaaataataataattattactattatggagatgagatctggctagtttgcccaggctggtctcgcactcctggcctcaagtggtcctgctgcctcagccttctaaagtgctgggattcacaggcatgaaccaccacacctggcccaagtattgtttttgacagttgttcatttc

SEQ ID NO: 259061 - DNA, 605 bp, Homo sapiens
cttgctttgccacaccagtaagtgccagtcataaaactgaccatgcaagctgaaactatgcaaaatgatcttaataatcaatggggaaaaaattacaactgttctgtgacctttaaaatctttcgtcaaaaccctaaaactcacttaccattggttattaatgtataggggaacaaaaaaaaacatttatttagtacattgttacttaaaacattgggattttaaaagaattagtgttttatttcttcgcaaactgaattttatatatcacgaattaaaaatataaattccttttgaaagcttgaaacttagggtaaaaaaaatttccaaatatttccaaagcaacaaaacagtatttatatatgcttcaaattctgtcagcacaaaactctcccaatagaaagggtcaagcatgcaatttttcccatatactttcaaaatttctaaaagatgctgttttccttggacaccacattaactataaaaatggacaatgacattttccctctaaaattactaacaatataatcctcatttctagaaaaagcctttgttcaactaatgaataagccctcaytgagatgctaaatcataggatgcactgt

SEQ ID NO: 259062 - DNA, 550 bp, Homo sapiens
acacattctaaagtaggggtgccctactactataaggtatagacaaattcaggccgggcacagtggctcacgcctgtaatcccaacactytgggaggccgaggcgggcggatcacgaggtcaagagatcaagagatcgagaccatcctggccaacatggtgaaaacccccgtctctactaaaaatacaaaaattagctgggcgtgatggcacatgcctgtagtcccagctattcacaggaggcctgaggcaggagaatcacctgaacccagaaggcggaggttgcagtgagctgagatggcaccactgcactccagcctgggcgacggaggtataggcaaattcaacctctctgggcttttctataccccacaaaggaaaataaataataaatttgaaatgaaagcaataaacccaaataaattattctgcagctcttcatatacaattaaaatatattttttaatttggagattaagtatttctctataagtatagaataaaaaaattactcagacctttagctcttggataggtagtacacaaaaaag

SEQ ID NO: 259063 - DNA, 614 bp, Homo sapiens
cactaaaacaaccctcacaatgcccctcaaacaattcagaacacatcagaaggggcaaaaaacactggacactagagtaattgtgctatttaattaaaatcttgttttaaatacccaacaaccccactctcaagaaagaaaaagactgcccaaggacgttctgttttttcctagagcccaactaagttactttcattttctattccctcttctgaggcaactgttaaattaaaaaatgtgtcctctactatcacctttattcttgctgatacctcttgcctttcttctgaatctagatgcagcatttagcaactctatactattcaccaayattatcttgctttatgttttcaacctataaaattcaactcagtttctgaaaaaggtgtagcactagaattattctcagcattagagttttagaaaggaaagaaaaaaatcccaattctgtataactcttgatgtcatcacagaatatcttgccacttttcaattcagtaaatattaatgaatgtccagtgctataaaaggaggcactaaaatataaaaatataaagatgagaaaagtattatccctagccttcaaggcacttaccttctatttttaaatgata

SEQ ID NO: 259064 - DNA, 728 bp, Homo sapiens
aaaaaaattacctactgattgtattacaatcagctaaatagaatgtgggacatttcatagacaaaatcacccaacttctttaacagatcaatggtgtaaaaataaataaaaatggagaaatctattacacgttaaaagaacataagagacctgtcaaaaagcaaccatgaggggaggagttggggttaggggaaccttgggtttgaaacttgattcacagcaacaaattgtaaagagacatttgaggaaaattgaacatggcttggctgttagatgttattaagcatgctattaattttgttagatatgatcatggttattatggttaggtttaaataagaaaaaaactttatgtcatagtgatacattctgaagtatttacagggacaataatatgttaggtggggttgttttaaaatactccagaaaaaaaytgtgggagtaagtgagacaagaacagcatattgttgttgatagttgttaaagatgagtgattggtacatgggaattcattgtacatattcttttattacttttaggtgtgtttgaaattttctgttgcaaaaaaaggcttaatttttttttttcctggttagtgaagcactaacttggtttgtatttgtgtgatatgaatagaacagtcaataaagctcaatgtagcatggcctaagttgcaagttacagcttctagaagggaccctctgtcaaatcctctcactgtacagatt

SEQ ID NO: 259065 - DNA, 605 bp, Homo sapiens
cgaggtcactgtttctatcaggtactgcacacctgtaggtctctctctctctttctcttgctcgctcccccatgactccccagttttatggaggcacagtggctggtaagctgagcatctgttgggcacagttgtcctctgatcccagtctccatggagcacagcagcrctgacaaggcctggcgcggaccacaccagtcggctctggcgtctgcactcacccctctcactgctcttgggcagcaagcaggcccaggccactgagtggcactgacatatgtaccagcttttctctgggtgtgcttaggggctggaattccagaccaatgagctggctggaaatctgcaagtgttgacctttacaggtggacatgcccttgctagggcagctcctgacagcagggaaggagatgttcttgtcagacagggttggaaaaagctgagcacacaccacactctgcaaaagcaatgccagttaatggagaatctctaggcttctgtgggaaaagcaaagtttctttgatctggaatacatcagacacacctgggttgggaaagggacaggaccaaattaagaagtagtatgaagttctaaaaatcctgct

SEQ ID NO: 259066 - DNA, 561 bp, Homo sapiens
gccaagcctggctagaggagctgtaaagccaccacaggcacgtggaacacaagatcagacagaatcagtctggaaaaataactaagagacaacaaggagaatatcccaaagttcttaacagcacaggcaaacctaaataaagcaagactgtgaagactgaatgacaagaggttatggagcttgcaggcgtacagaaaccaattaagatccctcctcaaaaataaacactatcaatttttaaaaaattagaaatgacaagaaacaagaaacctactagaaggtaaataattgtcatggaggaaaagtttgagacaactattatgaacacaaagtgaaagactgaaaagatgaaaacggggcaaataaaagctgtgaaggctaaagtggctccaatgtaagaatatttttgtttaaaaatttaaaaaattttcagagatattagaggaggaactcttcctgraatagcggtagcagcgaatctgccaccttaacacagaaataattgtaaaaactaagagtgctcacagagggtgtcagcatcacctcgtttataacaagggt

SEQ ID NO: 259067 - DNA, 542 bp, Homo sapiens
caccctgggcctttttcttccctttccttcttttgatcaaggttgatggaataagaactcagaccctgagccagtcatgggaacagccggcagaggccccttgccaggacaggtgagaccacagcgtctgatgtttaaaagtaagccaggtgtttaccctggagtgtttattttctaaagcaccttttttgacatgacatatttgaaggtagaggaaggctgaggggtgaaagggttcacagatcatgaggaaatagttaatcccagccaccaacaactgctatgtttagagtgtcccggtcagctgagcagtraatccaaaacaagaaagtcacgtgtgttatggcaagttgaactcacaccaacagctgtcctgctcctgtttaaaaaatctgatttcctcattacttgtctttcatttcattatataacatcgcatacctatgttcttgcaaagaaggattaaagtgaagccttaggcacaaactgaactaaaggcatgaaagctgcaatatagccagagataaaggttaaaggaaggg

SEQ ID NO: 259068 - DNA, 564 bp, Homo sapiens
attcaacagcatgatttataaggagttaaatgttcatagaaaaaaaactgtgggtgacaaagttaggagcacatattgttcctgatggtggagaactttaaatgcaagtaaaggagtacaggaactttaaatgccggcaaagggctttgaggtgaagagagatgtaagaacctaaaaagaaactagctgaagacagatgcctgcaaccactcccctgcatcctctacctgacatctactcaaggcccagctcatctggcccccctgcagcatttccaggctgcccagtccgtggtctgtctctcygctgcatgtccacagcacactattcctgtcctgagaacaactagtgtctatgatgacaggacccaacacaaggcctctctcagcaacactcaagaaattatcactaggatgaaatcctaaagattttaatctagagagggagaaatggaaggagaaaggaatggatgggaaaggttaagaaagaagaactagggtcgtgggtttgagtgacaggggaaaaagtgattttatcactaagtgaggtccagaagaaaaactg

SEQ ID NO: 259069 - DNA, 540 bp, Homo sapiens
tcacaactctcctgtcattctatctcttctgtaattgtgacttagaaaaaatgcacagaccgtattcattttagcagtcattcccctatgaagtgacatgtgaaataatgaaatcaagaaggcactgtcttgctcwcttcacctctggtctcaactgggccatttgaatctccagaaccatctagaacaaggaagaccacctggcgaagtccctcccagcacaggactccaggcaacctggcaccagtcatccccattggacaagaccagagctcagatgcattggcagaggggacacttttcccctttagcagctactggcgtctgatcatttacagagaggttgggtagaaccctgaggaacccatgatagccactttccagaagacagcccggggcctcaagcaaaaactcaatggtgaggacagtcacccagacctggacacaaggcccaagtatgagcagaaaggggtggttacacgtccaggatgtcagctgatactgaagcatctgacacactgttctgaaacagagtctgtt

SEQ ID NO: 259070 - DNA, 540 bp, Homo sapiens
tcacaactctcctgtcattctatctcttctgtaattgtgacttagaaaaaatgcacagaccgtattcattttagcagtcattcccctatgaagtgacatgtgaaataatgaaatcaagaaggcactgtcttgctctcttcacctctggtctcaactgggccatttgaatctccagaaccatctagaacaaggaagaccacctggcgaagtccctcccagcacaggactccaggcaacctggcaccagtcatccccattggacaagaccagagctcagatgcattggcagaggrgacacttttcccctttagcagctactggcgtctgatcatttacagagaggttgggtagaaccctgaggaacccatgatagccactttccagaagacagcccggggcctcaagcaaaaactcaatggtgaggacagtcacccagacctggacacaaggcccaagtatgagcagaaaggggtggttacacgtccaggatgtcagctgatactgaagcatctgacacactgttctgaaacagagtctgtt

SEQ ID NO: 259071 - DNA, 540 bp, Homo sapiens
tcacaactctcctgtcattctatctcttctgtaattgtgacttagaaaaaatgcacagaccgtattcattttagcagtcattcccctatgaagtgacatgtgaaataatgaaatcaagaaggcactgtcttgctctcttcacctctggtctcaactgggccatttgaatctccagaaccatctagaacaaggaagaccacctggcgaagtccctcccagcacaggactccaggcaacctggcaccagtcatccccattggacaagaccagagctcagatgcattggcagaggggacacttttcccctttagcagctactggcgtctgatcatttacagagaggttgggtagaaccctgaggaacccatgatagccactttccagaagacagcccggggcctcaagcaaaaactcaatggtgaggacagtcayccagacctggacacaaggcccaagtatgagcagaaaggggtggttacacgtccaggatgtcagctgatactgaagcatctgacacactgttctgaaacagagtctgtt

SEQ ID NO: 259072 - DNA, 593 bp, Homo sapiens
ttatctcttttgtttgttggtatatccctaccgtcaaactcatcagcgcttaatacagatttgtagaatgaatggatgaatgaatgaatgcctctaggctcccagtcagtctgagcaggctggtttgcaggtccggagcttctccgagcagcatctcccgactcctggtccccattgggtcactggaatctcactccccatgcaccaggccacgtcttgatgtttgatgggctgggctccygctctggttctgccccaggactcccttctgcatcctgccccgtggtgtccttgcctatgcccctctcatcggtgccactgccctcccgaatgcagcctgggcgtctctgctgtgagctcccgtcactgggctctgccctctgtggacacactgtgccacttccccttctatgtcactgacctggacccagtctgaaggttgccctcctgttaaagaaacccaggacctgacagtaggtaaagtaggaaaagcacattttattcaggaagtattgcaaagggggaaagaggcctcagtgcatatagaacggactcagtggttaattcaaccagaacgagtggggatttatagc

SEQ ID NO: 259073 - DNA, 446 bp, Homo sapiens
tgagtttttccactactggcagcaatatcaccattactgagaatgagtgtcctaagtatattcatggtactatactgaaagtacagcttgtcsaaagtgcagcttgatccaacccatggatcaagctttttcctagaattccaatctccatatttctcatgtggcctttctgagaaaattgagaagcgaaaaactcattaaaacacacatgtgacactatgactgagcatgtacaactggtggagttgtgggcatgtgctggtaaaattgtgcatgttaattcacccctcactatcgctaccattattcacatttctggagtaagttgataacactatccttagaggggaaaaaacagctagatattcgtctgtttgctggtgatatggtcattgtcacaaaaatcacagaactctcacatgacaaatgtgattttcaaacaacaa

SEQ ID NO: 259074 - DNA, 254 bp, Homo sapiens
gtgtacacagtagtcaagtttgtaagccaaacaaataactttgacttactcatattyctttcaaaatcaaatgaaggcaccaattttaggttgagtgaaagacaggtcctcagccttagctgatgagaccattaggactagagttattgattcaaatggctgagttttttttctaaactagccctctgctgttgacagtgtgaccacaccatagctgacaacacatccaatggtgtaatctgctttgcagctct

SEQ ID NO: 259075 - DNA, 592 bp, Homo sapiens
acctgtgcatagtggcatttgaaacgagctctgtctgcagagcaggcagcccagcaaaggagaaatttgcacagtgaggacaatactaccacagaaagtggctcagaatactttttgtacacgtggtatctccaggagggttggatatctgcaaaatcgttgaggcctggttttattgcctttaatttatgtataagacctcaggaagattagtaatttattcagtatcatacatgcagaaagaatctcccagtctccaaattcacatttcytctcagaagcatatttgcatagatcaagagcttgtggcaaccaaacttatgtaattagctcccatctatacatgtttactccacttagccacattcttagagccttcttcttctgaaattctaaaatgggaaacacctgcttccttctggcccaaaatgttactttggtttcagctttgaaataagacctggagccaagagacttcagcaaaaaattacattatatccacaagtaccctgacaaaataaaaggcagccactgccattctctgcaaaagtcctgcaggaagcagatgggtgttaaggactggcccagattt

SEQ ID NO: 259076 - DNA, 555 bp, Homo sapiens
gtacattacttcacagttggcaaagcactttgatctacattttgccatttaattaccataataagtgagtgttatcagcccattttacagattcaattaaagggcaaaagacttgaatgagctaaaatcaacctatgtgttccaatttcaagccctttttcctttacactaaaaatgtaaatgaacctagaaagcacctactctcaaacactggtggaggcaggagccccggcaaacgttgacagttgtccctcagcatcagtttcttctcccttctgcactgtctgtaacttctcattaaatgcagagtatctgtgctgttgttgcttgtatgatgtgcagtctcgtggcatttctgatgatgtggaaaragcgctagatactgggtctggcatgtgtaaattccagtgccagctccacctcatgtaatatggtgaccaccggcaattctctctccacatctgaccccaagtccctcatctataaaatgaggacagtcattgccttctctttcttacacattgttatgcggatagatgacacagtgcatctgct

SEQ ID NO: 259077 - DNA, 658 bp, Homo sapiens
gagaggcagtaaagtcattttaggttggaagtaaaacactgtggccaaatcacatgttcacttacctcagaacaacaagcaaaggaccaccagctcacattggatattttcattagtggaatcaccattgttgacagttcctcctttgctctctgacacttcaccatcaaaaggcttccccctgaagggagagatgatttcttgagctamatggacagtgaaaggggcaagtccacctccaggtaggggcagctacagagggcccactgtcctggcagcatctgggcaatactaggagaggcatggccttaaaggctatggtaagaacatctgagaaccatggggacccacacactgatgtgcccctgacctggctgagcttcagtcatcttccgggatcttcaacctgatgattttgttctgaatccctttccaaaatttgaagttactttcctttttccattcactggttgagaccatttacttctgaaataaatgatggagaagaatcttaagagaaacccagcactagccatgcaagggaatagcatgcagaaagccaagggtctggggtattgtggatgggagagaaagctgggtgtgaccagatcacagggtacaatagaaggcacagaagctgactctgcagaaatgagca

SEQ ID NO: 259078 - DNA, 658 bp, Homo sapiens
gagaggcagtaaagtcattttaggttggaagtaaaacactgtggccaaatcacatgttcacttacctcagaacaacaagcaaaggaccaccagctcacattggatattttcattagtggaatcaccattgttgacagttcctcctttgctctctgacacttcaccatcaaaaggcttccccctgaagggagagatgatttcttgagctacatggacagtgaaaggggcaagtccacctccaggtaggggcagctacagagggcccactgtcctggcagcatctgggcaatactaggagaggcatggccttaaaggctatggtaagaacatctgagaaccatggggacccacacactgatgtgcccctgacctggctgagcttcagtcatcttccgggatcttcaacytgatgattttgttctgaatccctttccaaaatttgaagttactttcctttttccattcactggttgagaccatttacttctgaaataaatgatggagaagaatcttaagagaaacccagcactagccatgcaagggaatagcatgcagaaagccaagggtctggggtattgtggatgggagagaaagctgggtgtgaccagatcacagggtacaatagaaggcacagaagctgactctgcagaaatgagca

SEQ ID NO: 259079 - DNA, 658 bp, Homo sapiens
gagaggcagtaaagtcattttaggttggaagtaaaacactgtggccaaatcacatgttcacttacctcagaacaacaagcaaaggaccaccagctcacattggatattttcattagtggaatcaccattgttgacagttcctcctttgctctctgacacttcaccatcaaaaggcttccccctgaagggagagatgatttcttgagctacatggacagtgaaaggggcaagtccacctccaggtaggggcagctacagagggcccactgtcctggcagcatctgggcaatactaggagaggcatggccttaaaggctatggtaagaacatctgagaaccatggggacccacacactgatgtgcccctgacctggctgagcttcagtcatcttccgggatcttcaacctgatgattttgttctgaatccctttccaaaatttgaarttactttcctttttccattcactggttgagaccatttacttctgaaataaatgatggagaagaatcttaagagaaacccagcactagccatgcaagggaatagcatgcagaaagccaagggtctggggtattgtggatgggagagaaagctgggtgtgaccagatcacagggtacaatagaaggcacagaagctgactctgcagaaatgagca

SEQ ID NO: 259080 - DNA, 555 bp, Homo sapiens
gtacattacttcacagttggcaaagcactttgatctacattttgccatttaattaccataataagtgagtgttatcagcccattttacagattcaattaaagggcaaaagacttgaatgagctaaaatcaacctatgtgttccaatttcaagccctttttcctttacactaaaaatgtaaatgaacctagaaagcacctactctcaaacactggtggaggcaggagccccggcaaacgttgacagttgtccctcagcatcagtttcttctcccttctgcactgtctgtaacttctcattaaatgcagagtatctgtgctgttgttgcttgtatgatgtgcagtctcgtggcatttctgatgatgtggaaagagcgctagatactgggtctggcatgtgtaaattccagtgccagctccacctcatgtaatatggtgaccaccggcaattctctctccacatctgaccccaagtccctcatctataaaatgaggacagtcattgccttcyctttcttacacattgttatgcggatagatgacacagtgcatctgct

SEQ ID NO: 259081 - DNA, 606 bp, Homo sapiens
tgaaacatttgtttaagattcatgcgtgttttaaatacatttttactctctaaggcaatttcttaacagagttgatgagtttttgagagagagagattaaatagcatctttcagagataatatatgtatgattttaaaaacaaagtatggagattaagctgtttagtttatataatgaactttcaaaatcacctgtaagtggtgactgcaaagtttgcaatttaaataagctgtttcaggcactgccaagcaagcattctgcatcacaggttgcttgcaactcagagggtttggtctctgtatctgatgcacgtgtaatacagcgtgaagttgtttgtggatcacacaggagcttcttagagcttcatttccacactrtaacccttgaaaatgtatcaaatgagcagatgcacttggctcttccttaaaaggcacaagtaatttgtttgtaaatcagttacctttcaagaaaagttaaattagggggaactcttgtttctttgatgttttccctcttagaaagccaaagagcaaattaatgatcattttgaagtaataatgataatgaggaaaatataatttagtgagctacactatcccaaaata

SEQ ID NO: 259082 - DNA, 500 bp, Homo sapiens
atttcatactgacaccaccatactctgttaaatagttaaaaatcctattttggcttttgtttgctcacttagatttgtacacccaaggtgatgaagagagcacagatagaatctagagacaaatagtttctggagtcaggaatcagatccagattctaacacgaggtgatgtgggaaaaagtcagttaaaatttctgagattcaatttactcatctataaaatcatcctcataataattgctccccccttcaaaggtttgttatgaggagcaagtggaaaaatgtctattaacgggctctgctgtcagtrgattaatgcataaatccaggtattattatataatcaaactgtccttttaaatgtagaagaaaagggtttttaaggcacacatgagattctggaaacgtagacgttatagaaagtctatagggactaaaaatgcattgtcttctatatgcatttatcttgccagaggtacatgcagacctttggggggtgc

SEQ ID NO: 259083 - DNA, 579 bp, Homo sapiens
tgcatttatcttgccagaggtacatgcagacctttggggggtgctgctctggccaggacagtggtggagagctctgactcttgagtgtgagagctggaacgattgagaaaagacaggagggaaacttcgaggtcaggtgacttctttctaactacagcaggttctcagatccctaggctggcccaagatgagaraacagtcaccaaagagagtctggcacagtaagcctaagtctcagtgtcatctgattgtgaaatctgcttgtttgcatactcatacagtaccagagcttaagccctggccactgtacggatgactgtacaagagcagaatctaagaccaaggggttgtttttactaaggaagaaaaatttattagagttacttcaaggaaatctattagattatctcaccaaatacattaatagcatcaattattgtattttacataattttttttacaccagatacacagtatattaaagaatttgtggaagtcccccatgtgaaccagtattaaccatgataagagtaatcaggactggcccaagaaaggtagaaatgagaatttatacacttg

SEQ ID NO: 259084 - DNA, 599 bp, Homo sapiens
caaggctatttcaatgctctccaggcatcattattcctggagaccaattatatcaaacattaaaatacacccatatcacrtattaaacacaatcattttgctgaaaaactttggaaagaatttttgtttttaaaaccattttttgtttctgaaatacttaggcctcaagtaatacaccaaatttacaatgagctgtgatttctatgcaatcaacatgcacatttgaactgttttcaaatgtaatgacaatttttatgagcaatctttttgacaatgaatgaagctgacacaacattgcatttgtttatatttgttaatctgagttttgctagtttttgtcatttggcaaccaatataattataatcaggtgcttaaatattttcctaagtccatgaaacctataaactctggagtgcttttcttcttaatgatgacatggccccacccacatcagccccacatatcattttcaccagagacctggtccaaaagtctctggagactgagccaccaaaaacccaacccagcggtgggcactgtgaaatactgccttgtcttctctggttgaaatctggtgctggctagtcttctgtcaagt

SEQ ID NO: 259085 - DNA, 202 bp, Homo sapiens
tcaaagtaataaacaacatcttgtttggagtagcacgaagaaaatgaggcaagcacttctttagagtaaaagctctacttttaaaaatagtttggagactcattcttatgttggtaaaatcacaaaacastattcagcaaacaaaacatgatgagctcaattcaagttggtaaacatttttagctggcttcatttgtagtaa

SEQ ID NO: 259086 - DNA, 559 bp, Homo sapiens
acctggtgaacttgtcgtctctgagacccggggagttattttagtcagggtgtccctgccctcctgctggtagattaattacacattaaacgttctgttttcaaaacgaaatgataaatctggacacataaaagaggcacaaaaagaatcacagcgagggagaagagtggatgttaagaaasaaaacaagaaattgcaaaagggagatatcagatagaaaggagaacgtaggaaatgcaactgggaaagaatttcaagaaaataaggataaagggcagggagggctgaaaggagggccagagggaggaaaagcaggagggagatttttggttttcaattccctggtgaggctgctggcgtccgcgccctcaacgccccagccttccaagttgaggcgaaagccacctcctcgggcctgcgtcgcatccaacttactccaagttttctggtgactcctacagggcccctttccgtccccccccccgctccccgccccccaagccttagtgagattgacagtcgcgtggaggaggcttttccaggcacagcctttctcatg

SEQ ID NO: 259087 - DNA, 560 bp, Homo sapiens
tcagggaagactttcttcaagacaaagacttgctgggtmtgcctctgtgcacaagagagaaagagagaaaggctgaaatgtaaaaggagactgggtgaaagatggagtgggttatcaaacgagttgtaagagaataattttagatgatagccacaataatgtttattttttagcagtaagatcagaagaagaagacagaatgatgataggagagaatgtagtcaatttaagatgatccaaggaatacacactgtatgggttgcactctttgaagtcaataggaaaaagagactatcagtcagcagtaagggaataggaatacagttggaatcttgagacatggacatgtagaataattgctgtggacaatgcgtggagattcaattattaggaaggaatatcccattttgaaaacatagtctgcaacaagactatactattatttaagatttttttaagatacgtttgatactccagaaattggactggatcgtagttcagcagggtaagaatgatacaagtgtaagggacagagatggaagtgatgatttcaagttcca

SEQ ID NO: 259088 - DNA, 528 bp, Homo sapiens
tgccttctggtttacagtgatggtgttgaatttttttttgaggtggagtgttgtttttgttgccaggctggagttcaattgtgtgatctcagcttactgcaacctccacctcctgggttccagcaattctcctgcctcagccccctgagtagctgagattacaggcaggtgccaccacacctagctaattttgtatttttagtagagatggggttattccttgttggtcaggctggtctcaaactcctgacctcaggttatttgcccaccttakcctcccaaagtgtgccttggcctcccaaagtgctgggattacaggcatgagccaccactcctgtccagtgttgcaaattttcaaatcatctgattcctcatcctttgtacctgacctatttttacccctctggaaacattcaattttctctttgttttcagtgttctcaaattttacattgatatatcttgacatgagtctattttcatctgtttttctaggtgctagccttttaatctgcaaattgagcatca

SEQ ID NO: 259089 - DNA, 530 bp, Homo sapiens
gcaattaacagaatagggggatgggaatggaagcaccttctgtgtcatctgtcttcatatattttttgcagttgaagttgcaggaccccatccactcctcaccagattgtatcctcatccctatctgaccttatttctgctcacactctatgttccaggatgaaatcccaagatgatgaaggagtgccccttcaacytgaagcacttgctcagctaggaaccgaattcaaggtaaattcaagaggtcctgcagacaggactgctagtgtctcttcctgggttgaccgcaggacagtgaaacactgggagacatctgttttttggtgtgttggtgtgatgtgtttctcttctttctagaagagtgtttttttttatttttttccagaggaaggtgatttagacactgcgtattcatgatccacagaaaaatagaaaacatggagccccacagcccaagcagagccacacagacaagcaaccaaaagaaaaggtgagggactcaaataaagaaggattgaagtgtgttagcc

SEQ ID NO: 259090 - DNA, 592 bp, Homo sapiens
aacatacctctctacctcctaaatccatcaacagacagatwatgttaaaatacatgtttatttctcagacagcccctaatatcagaagaaaactacaaaagcaggccatgggatgactcagcactgtggacagcctcctggggtggatttttcagtcttttacaagaagacctggaacaaggagtcccagaaaatccaggggggtcataagagaatgaaagaggtactacggctacattacaggcctacaagttgcagaattaccaaggtgcacctgctaatttctactggtgtgacaagccaggacactttcaaagggattgcacaggcagcaagaagaatatacttaactttgtccagcctgtggtggagaccagtgaaagtaaaaatgaccccagtgacatttgtcaccaatcaaatgtgttttcccctgattgttcagcaggaataatgggtcccaggctctacagccattgtgatacagaggatccaagtaattctggaggtaaaggctaaataattttcatctagttttaatctgttatcagtaccttagagtaattaagaagtatggccctgttctctcatcaac

SEQ ID NO: 259091 - DNA, 592 bp, Homo sapiens
aacatacctctctacctcctaaatccatcaacagacagattatgttaaaatacatgtttatttctcagacagcccctratatcagaagaaaactacaaaagcaggccatgggatgactcagcactgtggacagcctcctggggtggatttttcagtcttttacaagaagacctggaacaaggagtcccagaaaatccaggggggtcataagagaatgaaagaggtactacggctacattacaggcctacaagttgcagaattaccaaggtgcacctgctaatttctactggtgtgacaagccaggacactttcaaagggattgcacaggcagcaagaagaatatacttaactttgtccagcctgtggtggagaccagtgaaagtaaaaatgaccccagtgacatttgtcaccaatcaaatgtgttttcccctgattgttcagcaggaataatgggtcccaggctctacagccattgtgatacagaggatccaagtaattctggaggtaaaggctaaataattttcatctagttttaatctgttatcagtaccttagagtaattaagaagtatggccctgttctctcatcaac

SEQ ID NO: 259092 - DNA, 592 bp, Homo sapiens
aacatacctctctacctcctaaatccatcaacagacagattatgttaaaatacatgtttatttctcagacagcccctaatatcagaagaaaactacaaaagcaggccatgggatgactcagcactgtggacagcctcctggggtggatttttcagtcttttacaagaagacctggaacraggagtcccagaaaatccaggggggtcataagagaatgaaagaggtactacggctacattacaggcctacaagttgcagaattaccaaggtgcacctgctaatttctactggtgtgacaagccaggacactttcaaagggattgcacaggcagcaagaagaatatacttaactttgtccagcctgtggtggagaccagtgaaagtaaaaatgaccccagtgacatttgtcaccaatcaaatgtgttttcccctgattgttcagcaggaataatgggtcccaggctctacagccattgtgatacagaggatccaagtaattctggaggtaaaggctaaataattttcatctagttttaatctgttatcagtaccttagagtaattaagaagtatggccctgttctctcatcaac

SEQ ID NO: 259093 - DNA, 592 bp, Homo sapiens
aacatacctctctacctcctaaatccatcaacagacagattatgttaaaatacatgtttatttctcagacagcccctaatatcagaagaaaactacaaaagcaggccatgggatgactcagcactgtggacagcctcctggggtggatttttcagtcttttacaagaagacctggaacaaggagtcccagaaaatccaggggggtcataagagaatgaaagaggtactacggctacattacaggcctacaagttgcagaattaccaaggtgcacctgctaatttctactggtgtgacaagccaggacactttcaaagggattgcacaggcagyaagaagaatatacttaactttgtccagcctgtggtggagaccagtgaaagtaaaaatgaccccagtgacatttgtcaccaatcaaatgtgttttcccctgattgttcagcaggaataatgggtcccaggctctacagccattgtgatacagaggatccaagtaattctggaggtaaaggctaaataattttcatctagttttaatctgttatcagtaccttagagtaattaagaagtatggccctgttctctcatcaac

SEQ ID NO: 259094 - DNA, 579 bp, Homo sapiens
cttgatagtgatcattaatagctgccaacatcacttccaagaaagtcaactagacagtgtgtgtttctgaagaaaatatataacccacctatgaagcaattttgccaaaagctctagaagatctacaaaakgtaaaagcaaatctacaggaatactagaaacagaacatgtgaaatgagactaggaggaagactagaaactttgcaagataaacatcttgtttctttaacaaacagttgcaaagaaaaagtaaaaagggatcaacaatagatcaataattcaaatggaacttaagagacacatcagtcgactgctatacgtttgaaacccaaatttaaataagcaaacttaaaaatacatatatccagtgaaatttaaatactatctaaatccctgctgatattaaaaaatgtattgctagtttatttatatatttgatcctgataatatggatattttaaaagaaaaatctttcttagcttctagtaattcacgctgatatgtttacagataaaataatgtgatctgaggttttcttccaaataaccaaagttggaagaagtgggtggtggtaagaat

SEQ ID NO: 259095 - DNA, 597 bp, Homo sapiens
tgtaaacaatatggctgtttctgtacctcacatccactttctgtatcactttcctttttctgtccataaatcttcttcccccatgtagctacactggagtctcagtgagcctgctctggcttgggagattgcccaattcatgaattgttctttgctaaattaaactttgttaaatttaatttgactaagcgttttttgttttgttttgttttttcctcatggtaagggcatagaaatgcagagggcaaacccaataaagagaggaatcagatatgggagaaaatagttttagatacaatgaaaaattgaaataatagttaactcttaacacttgaagttctcatagtatgacggtaggtaagaaaccatggagaggaattgttctgagggatttctcatcgtcattcatgtagccgttgaatttgtaaaaatgtattctattttcagaygctaaaactaaggatcagagctatcagggaaataaggcagccagtgaaaaactgaactaagtctgaaacagatttgtcttatgcccaagtccaaagcataacttagccctggagcaacagagtgagttatctgtgcaagcacctcacc

SEQ ID NO: 259096 - DNA, 512 bp, Homo sapiens
ggtaaagggatggagaatttcatttcacctggtaatttacagctgggattgaatctgtaatttaaattagcacctttattttataagccagaaaaataaagacaagacttcctccccaaatgtccttatgaatttatgtaaaagcctttgtattttttaaaatacgattttgcctttgatatttcgacttaaacctatacatcccagtgtccttatttaaggagctagattttttttttacttttatgaagcatggatttaatattattaattcaataaatatttattctacaccattgcagacactaaatgtatacagtgaaaaaaaaaagacataractatcaagggtctcacattgaaagagatctcatgtgtaagaaaatatctcactcaatggtagtgaaagaataaaggcataagactcatgagaaagatggtagccttcaagatgattcccagtgatgcccaccgctggatctccacagccttacttagtcccctcccacactgt

SEQ ID NO: 259097 - DNA, 550 bp, Homo sapiens
tattcttgtatcagacaaaacaaactttaaagcagcagtagttaaatgagacaaagagggacattayataatggtaaaaggctttgtccaacaggaaaatatcacaatcctaaatatatatgcacctaacactggagctcccaaatttataaaacaattactactaaacctaagaaatgagatatgcagcaacacaataatagttggggacttcaatactccactgacagcactagacaggtcatcaagacagaaagtcaacaaagaaacaatggatttaaactataccttgcaacaaatggatttaacagatatatacagaacatttcatccaacaaccacaagataaacacttcaaaagttcatggaactttctccaagatagaccctatgataggctataaaacaaacctcaataaatttaagataattgaaattatgtcaatcactctctcagaccatatagggaaaaaaactggaaataaactcaaaaggaaccttcaaaaccatgcaaatacatggacattaaataacctgctcctgaatgagc

SEQ ID NO: 259098 - DNA, 550 bp, Homo sapiens
tattcttgtatcagacaaaacaaactttaaagcagcagtagttaaatgagacaaagagggacattatataatggtaaaaggctttgtccaacaggaaaatatcacaatcctaaatatatatgcacctaacactggagctcscaaatttataaaacaattactactaaacctaagaaatgagatatgcagcaacacaataatagttggggacttcaatactccactgacagcactagacaggtcatcaagacagaaagtcaacaaagaaacaatggatttaaactataccttgcaacaaatggatttaacagatatatacagaacatttcatccaacaaccacaagataaacacttcaaaagttcatggaactttctccaagatagaccctatgataggctataaaacaaacctcaataaatttaagataattgaaattatgtcaatcactctctcagaccatatagggaaaaaaactggaaataaactcaaaaggaaccttcaaaaccatgcaaatacatggacattaaataacctgctcctgaatgagc

SEQ ID NO: 259099 - DNA, 550 bp, Homo sapiens
tattcttgtatcagacaaaacaaactttaaagcagcagtagttaaatgagacaaagagggacattatataatggtaaaaggctttgtccaacaggaaaatatcacaatcctaaatatatatgcacctaacactggagctcccaaatttataaaacaattactactaaacctaagaaatgagatatgcagcaacacaataatagytggggacttcaatactccactgacagcactagacaggtcatcaagacagaaagtcaacaaagaaacaatggatttaaactataccttgcaacaaatggatttaacagatatatacagaacatttcatccaacaaccacaagataaacacttcaaaagttcatggaactttctccaagatagaccctatgataggctataaaacaaacctcaataaatttaagataattgaaattatgtcaatcactctctcagaccatatagggaaaaaaactggaaataaactcaaaaggaaccttcaaaaccatgcaaatacatggacattaaataacctgctcctgaatgagc

SEQ ID NO: 259100 - DNA, 517 bp, Homo sapiens
actttggtgtagtggggagaggtggctcttattcatttggggtcttagtgactttctcttcctctcaggaaacagagctttaatggccagcaacagcaagcttcctgtttctgatttttgtctcaaatcattttcttgaagtaattatyacggattggtcaacctaagtaaatggggaaaatgcctacggcatgaaagaaaatattggatagaaaacaaatactgaggtttctgaaatgtaaatagctttgtaggttattcagatgtgcagccaacatggggacccaatgttctacattttctaccttattcattttataaatgccatttatctcccatcatgtttaaattcatggttcctgtagttttgcctctgacataccatatgactctgatgtccattttttcctgcttggcatttccactgctctgcattagctttatctcagcatagccaataagcaagtattaacttggttcaaaatttatattcctcttcaattcccaatctcgggaa

SEQ ID NO: 259101 - DNA, 517 bp, Homo sapiens
actttggtgtagtggggagaggtggctcttattcatttggggtcttagtgactttctcttcctctcaggaaacagagctttaatggccagcaacagcaagcttcctgtttctgatttttgtctcaaatcattttcttgaagtaattatcacgkattggtcaacctaagtaaatggggaaaatgcctacggcatgaaagaaaatattggatagaaaacaaatactgaggtttctgaaatgtaaatagctttgtaggttattcagatgtgcagccaacatggggacccaatgttctacattttctaccttattcattttataaatgccatttatctcccatcatgtttaaattcatggttcctgtagttttgcctctgacataccatatgactctgatgtccattttttcctgcttggcatttccactgctctgcattagctttatctcagcatagccaataagcaagtattaacttggttcaaaatttatattcctcttcaattcccaatctcgggaa

SEQ ID NO: 259102 - DNA, 508 bp, Homo sapiens
cagcgctctgtaaaatggaccaatcagcaggatgtgggcagggccaaataagagaataaaagctggcaagccagtaggggcacccatctcagctccacttccacgctgtggaggcattgttcttttgctctacatagtatatgttactgctgctccctttttgggtctgcactacgtttatgagctgtaacactcactgtgaaggggtgcagcttccctcctgaaatcggcagactgtgaacccactgggaggaacaagcaactccggacacaccacctttaagagttgtaacactcactgggaaggtttggggcttcactcatgaagtcagcgagacgaagaacccacggcaggaagaaaatccagaagcatgtgaacaggggaaggaacaaaatgtggacatgccatctttaagagctgtaacactcagggctagggtccgcgggtctattggtgccagaccaagaacccacsggcaggagccaattccgcacgcgtttgttttgt

SEQ ID NO: 259103 - DNA, 536 bp, Homo sapiens
tctggctttgcttaattaccatttattttgttcatcattggcataaagggaagaaatatctttgggagcatttttaggggattgaaaataatatattttattcaaattcaacagagcaggggaagtgatacctatttttttcttcaattatttaatctattaggtacacaatattcagaagtatgtgaagataaaggaacttgccattaaaagataaaggtgcttgccattatttgaaaactacacattcatacaaacataaaaagatagtactaatcttttcatatagattgtgcatgattacacactttggatagtctttggggaatttcttatctctgggtgccctctctctgcttctttcttctccacagcctcagtttatttctrccagcctctcaaggcacgcaattcagctagtatttttccgtctagttttctgctccagagaatagaaggaaacgtttttcttttcatggatgaaagtatgagttttctccaaaaacccaagagctctcttctaaaacgggcagcaa

SEQ ID NO: 259104 - DNA, 565 bp, Homo sapiens
tgaagattacagataatagggtaatgagaggaaatacactggagagttgatttaaataaagaacttgcctgatcaccaaatatgtttgttaaaaatgtgggatctagtctgttatataattttacataactattctatgtggttctccaatatttaatatattatcccgtttcttcacactgaagtatatattccttgataagataaattagatctgctgttcttttctttagtatcctagagttttcctaacttggcagctatcactctggattttaaagttccattaggacaggtcctacatctgtcttattccccatcctagccacgtgcttaacaaatattttcaaataagtgaatgaataaatggagtgaatggatcattcattccctcaaygactgtgagaaaataaaactggttaactttccatttatacagaagtgttcaatacaatattcactcctaccattaaaacaagctgggaagcatccatgcccatgggtgcttacattccccatgccccatggatgtgaacacccaacacgattctatgatgtgttattt

SEQ ID NO: 259105 - DNA, 326 bp, Homo sapiens
tcaatactcaatttgaaaacaaaaaggttggctgaaggggttggctcatgaaaaagttgtaataagaaaagctgcaaatgcagattaagtatatattgtagaggaccttgaatgcaargcttacaagtgagccaatgtgtacacagtgcggggatgctgaagtttcaggctatatttttttaggagtagagaaacaaaaggcaaaaataacaaaacaaaaacaaaaaaataaaaattccataacagtacacgtaaagactaaagaaaaagggaccagttatgagatgattagagcaatacagacaagttgcaaagaaagtctgaag

SEQ ID NO: 259106 - DNA, 326 bp, Homo sapiens
tcaatactcaatttgaaaacaaaaaggttggctgaaggggttggctcatgaaaaagttgtaataagaaaagctgcaaatgcagattaagtatatattgtagaggaccttgaatgcaaggcttacaagtgagccaatgtgtacacagtgcggggatgctgaagtttcargctatatttttttaggagtagagaaacaaaaggcaaaaataacaaaacaaaaacaaaaaaataaaaattccataacagtacacgtaaagactaaagaaaaagggaccagttatgagatgattagagcaatacagacaagttgcaaagaaagtctgaag

SEQ ID NO: 259107 - DNA, 549 bp, Homo sapiens
ttagctaaaggtggcagttgaaaggtgaggagagataagggaaagagcagcaaagtaaaggcctagggctgatctcatggcaactggcaacaagagagacctaggggtgaatgtcagctggaagaacgtaggagcccaaacagctgtgcggacgaattccaggtcttggatggataaaactataagtcacatcaacgagcaggtgtgcatctgaagctaaggatgtgtctatcagctgactcaggtaagaatggctcaggtactgtgcaagactgagtttgcagatagggggcatcagtggacctgactgtgcccagctagggaaagccaaaggcacagaaacaaaaagagggtgaagagacagcagtaaatagaataacacaaaactgtttytgaattataatatgtgtacttggtagagactacaaaacaaacccggaatatgaaaatgtggatttatccaaaagacaaaattttattgtatttttacccaaaaaagatccctaataatattaacaataaatttaaaacttcctaaagtacaaaatt

SEQ ID NO: 259108 - DNA, 359 bp, Homo sapiens
tcttatgctgaatttattgttgtagctgcaggcacaaccacttaccaaaccagaaacytgagagtcatctcctttgactcactctccctgaatttccattaagaacctattaatgaatcctgtgcactttacttcctaaatatttctcaaatatgtcccttcaacgtcatccttattcataaacttttacatagtgaaggctggactgctgcaaaaaacacctaactaatcttatttcaaagtctaccttcccaacaagtttatcccacatctagctacagaatcatgcatctagaatgcagatctggccaggtcactctcctgcataaaaccaagtcccttaagtatgtgaaatgtca

SEQ ID NO: 259109 - DNA, 563 bp, Homo sapiens
tgtatatctctaagtgagtagatggttatagctcctcttaattattactgctatagaattctaaataaatgttttaaaattcatttacatccgatgtatttctgcaacatcatatgtttaatatacctgtggcagttgagtagtttattaatttggatgatattaccataaaggaatctagctaaatagaaaaaggttaagaaatattgtggccaagataacattcataagcaaggtcttagcctagaatgttatttgaattattttcaaatggtaatttgctttatgcaacccaaactcatatagtgtaagtaagtgattatttgcatgaatgacaatcattctaacgcctgcagtttcaaaactgtattattttgttgagatgttgaaaagtatttagtaattccaaaggcaaaataaccaaggtgattaaaaaatatttttgaatgcttgtatctttctcccaatccaaatattatttggtcatgggaaaaatgaatttaactraaaacaaagcagaagatacagttaaattattagtcattgcgctatataatataatg

SEQ ID NO: 259110 - DNA, 442 bp, Homo sapiens
caaggcgggggggttaaattcccacaatgttgttttcaattaaagatagggaaggtaagattagatagccaaaaagacaygatagaagaataagtggaagatggatggatggatggatggatggatggatggatggatggatgaatatagataaggaggtcaattgattgacacataaatccaaaagactaagctatgtgcacaaaaaaatcatttaggtactttaaaagaacaaggcacccatatttcatccttttcaaacaaattgtatacaatctctttaatgacaaaattaaaacatatttattcaaacggtccaattcacatcaaaacaagaagaggcctacacagctgggccagttaacatgaatgaataacttagccagtaacatctgccaaatgaatgtagagagaactccagaggctttaaaaggagaaacca

SEQ ID NO: 259111 - DNA, 592 bp, Homo sapiens
tccatgtgctaccaagagactggttgctcttctcaagtgatagtctctgtttctggcagttgaacatgtgctgtggcagtgtagatctgctgtggaagtgggagttcttaatgttaagctcatgcataacctcatctctaccaccgtgatggctctattcaccagccttagtctttagttcttaaaaactaatgttcttagtgctgagrttgagaagccctgggtcagagtaatacacttggcctctcatttccacaactgtataatagggtcttttagtttgtacatgttgagtgctgtaagtgcaataacgtccctgtccccatgaaggctacactctttaatgggagtaataatatcatctatttcagagggttatggagcttataggagttaataaatgttaggcatttatgctgtgtactttcaaacagtatatagcatacagtaaggcacaatataatttaagttgttcttctgaagcaattatgacagcacctatcacatagtatatgctcattaaaatgcaattgatatgactattaaacatagatgagtcaatattagtcaaaagtttgctccctgagtacca

SEQ ID NO: 259112 - DNA, 592 bp, Homo sapiens
tccatgtgctaccaagagactggttgctcttctcaagtgatagtctctgtttctggcagttgaacatgtgctgtggcagtgtagatctgctgtggaagtgggagttcttaatgttaagctcatgcataacctcatctctaccaccgtgatggctctattcaccagccttagtctttagttcttaaaaactaatgttcttagtgctgagattgagaagccctgggycagagtaatacacttggcctctcatttccacaactgtataatagggtcttttagtttgtacatgttgagtgctgtaagtgcaataacgtccctgtccccatgaaggctacactctttaatgggagtaataatatcatctatttcagagggttatggagcttataggagttaataaatgttaggcatttatgctgtgtactttcaaacagtatatagcatacagtaaggcacaatataatttaagttgttcttctgaagcaattatgacagcacctatcacatagtatatgctcattaaaatgcaattgatatgactattaaacatagatgagtcaatattagtcaaaagtttgctccctgagtacca

SEQ ID NO: 259113 - DNA, 592 bp, Homo sapiens
tccatgtgctaccaagagactggttgctcttctcaagtgatagtctctgtttctggcagttgaacatgtgctgtggcagtgtagatctgctgtggaagtgggagttcttaatgttaagctcatgcataacctcatctctaccaccgtgatggctctattcaccagccttagtctttagttcttaaaaactaatgttcttagtgctgagattgagaagccctgggtcagagyaatacacttggcctctcatttccacaactgtataatagggtcttttagtttgtacatgttgagtgctgtaagtgcaataacgtccctgtccccatgaaggctacactctttaatgggagtaataatatcatctatttcagagggttatggagcttataggagttaataaatgttaggcatttatgctgtgtactttcaaacagtatatagcatacagtaaggcacaatataatttaagttgttcttctgaagcaattatgacagcacctatcacatagtatatgctcattaaaatgcaattgatatgactattaaacatagatgagtcaatattagtcaaaagtttgctccctgagtacca

SEQ ID NO: 259114 - DNA, 470 bp, Homo sapiens
tgtcatataaattcccatgcactatttgtttatagcaatacaaaaaacattacatagaacttttgatagtctacctctctttttatgagaagtgtcagaaaaataatacactgagagaaaactttgttattagtaacctagctggtggactcaagactgaatgttttagcaagtttcagcttcttttcctatttgatatcatgtaagaactaagggttttttcttttttggagaacccagaaaaattgttgtaatacgaatgatcaagaaaatttcatcacagttttcttacagctggtttattttaggtatgtttwctaagtttatttcattttaatattttattttattttaatatttaattattttacatttatttggtttatttagttatgttttctaagatacaacaaagttacatatgctatgcctgacttgaaaagagaatattatctgtgtcctcagtcctt

SEQ ID NO: 259115 - DNA, 470 bp, Homo sapiens
tgtcatataaattcccatgcactatttgtttatagcaatacaaaaaacattacatagaacttttgatagtctacctctctttttatgagaagtgtcagaaaaataatacactgagagaaaactttgttattagtaacctagctggtggactcaagactgaatgttttagcaagtttcagcttcttttcctatttgatatcatgtaagaactaagggttttttcttttttggagaacccagaaaaattgttgtaatacgaatgatcaagaaaatttcatcacagttttcttacagctggtttattttaggtatgtttactaagtttatttcattttaatattttattttattttaatatttaattattttacatttatttggtttatttagttatgttttctaagatacaacaaagttacatatgctatgcmtgacttgaaaagagaatattatctgtgtcctcagtcctt

SEQ ID NO: 259116 - DNA, 549 bp, Homo sapiens
ataatcatgtaattcacttcctttgttacttaagccaaacaaagactagagttgaaaaacttataaataagttaaatatacatttcttgtctggtaacaatgtgaataaaaacaatctcaggaaaatatttagaccagctcttgacaaccaggattcctcaaaagaattaaggcctacaaagaatgatttgagtaactgtcttctcaattctctcagggatgatacattctgtgtgcacagaagagaaattaattcattacacacaataggtgccttgggatgttagggcttagttatctggaatgctggttgagaagggctgatactgattgttattgcacaaatctaaaccataagtatgaaaaagacttaaatcagttttcagtcagatcttaggaaggatagtatcacatattgrttaggccaatccattaatgagctggtcaaatatttaatgattagtctggtatctaacagcctaggtaatctagaaagtagaggctgggacaaggatttaaggtgccaatactattttggggagatgtaag

SEQ ID NO: 259117 - DNA, 467 bp, Homo sapiens
aacccagcttcttgggaagctgaggcagaattacttgaacccagcagttggaggttgcagtgagccaagatcgtgccattgcaaggcaggcagatcacctgaggtcgggagttcaagaccaacctgaacaacatggagaaacccatctctactaaaaatacaaaattagccaggtgtggtggtgcatgcctataatcccagctactcgggaggctgaggcaggagaatcrcttgaacccgggaggcggaggttgcggtgagctgagagcacaccattgcactccagcctgggcaacaagagcgaaactccatagcaaaaaaaaaaaaaaaaaaaaaaagaaagaaagaaagaaaagaaaaagaaaaagaaatatggtttctacagctataataaaaacacaattgaaacaatatagcattgaagaggcattagaaactcttacttttaactaatgtacagttttgtt

SEQ ID NO: 259118 - DNA, 467 bp, Homo sapiens
aacccagcttcttgggaagctgaggcagaattacttgaacccagcagttggaggttgcagtgagccaagatcgtgccattgcaaggcaggcagatcacctgaggtcgggagttcaagaccaacctgaacaacatggagaaacccatctctactaaaaatacaaaattagccaggtgtggtggtgcatgcctataatcccagctactcgggaggctgaggcaggagaatcacttgaacccgggaggcggaggttgcggtgagctgagagcacaccattgcactccagcctgggcaacaagagcgaaactccatagcaaaaaaaaaaaaaaaaaaaaaaagaaagaaagaaagaaaagaaaaagaaaaagaaatatggtttctacagctataataaaaacacaatkgaaacaatatagcattgaagaggcattagaaactcttacttttaactaatgtacagttttgtt

SEQ ID NO: 259119 - DNA, 508 bp, Homo sapiens
atacaaggctggaaattgttgctgtttccacaaaccagagtggaaagacttcctgatggatggatatcagacaaaactttcagaagcctcaatagtggggctaacatccgctaaattaaggtactctaaacctatgctaaaaatttcaaaagcacggcttgaaagcatccagctgatttcatgtaatttaaatatacagcagaagaaaatccaacactatttaaagaaaagtaacaaaatttagcaaccaaaaatytaaaactcacaaggcacaggatccaatccaaaactgtcaggcatgtaaacaagttggaaaagatgacgcatgaccaaaagaaaaatcagccaataaaaccagctccagaaatgacatacatgatggaaccattaaataaggacattcaaacagttattttaaatatgttccatatgttcaagtagatgatagagaaaaacctgttgggattaagaacagattaattacaaaggaaaagatcagtgaacctga

SEQ ID NO: 259120 - DNA, 610 bp, Homo sapiens
aaagattgaaaaccactataattgctaaaaatgtgagtgggcaaatttaaaagccattttcttcatttttaacctccttaaaacataattgactgtttaaagcaaaaatagtaacaatatattgtggaatttgtaacagaagtaacaagtatgacaataatgaagcaaagaatgggaagggggaaagcatcatgttttatagattttacatgtgaagttgtatattactttaaagtagacagtgataagttaatgatgcatattgtaagcataaaagcaattacttaaaaactgaaacaaacatacaaaagcaataaagccaataccaatagtggaaatagaaagactgacaacatcaaatgtgtatgaagatgtrgagcgactagaacttacactggaaatataaaagtataagaactttggaaaacaatttgtggttttctatacaatttaaacaaacttgccataaaacctaacaatctcactcctaggtatttatccccccaaattaaaacatatattccacattaagacttgtacatgattgttcacaatagctttattcctaatagcctcaaactggaaccaaatatccatcaactggtgaatg

SEQ ID NO: 259121 - DNA, 575 bp, Homo sapiens
ggaaagaaggacaaaagaaagaacaaagggaacaaacagcaaataagtggacttatgcccaatcgtatcaataattacattaaatgtaaatagagcgaacactccaattaaagacaaagcttttcttactggatgaaaaaacataaaagcccaatacatgttgtttacaaattattccctttaaatataagatasaaactcccagttagaaagaaagagaaaacacaaattgccaatatcacacttgataaggcatgtgtacagctgctgatatttaaagtatcatatctattacgttcatatcgaaggtgtacaacctaacatgatattacaactggctaaatgttgattcaggataataacaaccataacccatgaattgtgctaaccagttcatctacatcttttttatttagtcttcccaaaaccctgttgtgtagatgctgtttttgttcgtagtttatagatgaggaaattgaggtttatagagaataactcacttgcccaaagtcacacagcttgttaatagtaaaaccgcttacttattggactcctatcctgggaatattcctaga

SEQ ID NO: 259122 - DNA, 583 bp, Homo sapiens
aatcacataaaaatccaagagcaatactagcaagtaactcaatcagtgatttatatatgaaaatatacttattgccaataaatacactaacaagtttaatcttattagtgacttatatgaattaaaatgaacccaataagcattgtatctatccaaaaagtaaacatctttaaatgataatattcaatgttatcaaaagaagcakgaaatatatgctaatgagaatgtaaatttctagagagtattttattaatattcatattaatttttattcatattcatcaagaagtccttctctaagaagtgacatcagcaagatggccaactagaagctcctagcactcttcaccaacaaaaaacccaaaacaataaataaacaaccacatttcaaccaaaataactaaaggaaagcaccggagaacatcaaaaaaagcagcagaaatcctgttgagcaaagaaacacaagattgccgcatagagatggtaagaaaacaccttgccttcaccaccccatcccctaactcgagattagctcaaaaccggaagggactggtttcccctctggggaaaaggtaaacaagac

SEQ ID NO: 259123 - DNA, 583 bp, Homo sapiens
aatcacataaaaatccaagagcaatactagcaagtaactcaatcagtgatttatatatgaaaatatacttattgccaataaatacactaacaagtttaatcttattagtgacttatatgaattaaaatgaacccaataagcattgtatctatccaaaaagtaaacatctttaaatgataatattcaatgttatcaaaagaagcagraaatatatgctaatgagaatgtaaatttctagagagtattttattaatattcatattaatttttattcatattcatcaagaagtccttctctaagaagtgacatcagcaagatggccaactagaagctcctagcactcttcaccaacaaaaaacccaaaacaataaataaacaaccacatttcaaccaaaataactaaaggaaagcaccggagaacatcaaaaaaagcagcagaaatcctgttgagcaaagaaacacaagattgccgcatagagatggtaagaaaacaccttgccttcaccaccccatcccctaactcgagattagctcaaaaccggaagggactggtttcccctctggggaaaaggtaaacaagac

SEQ ID NO: 259124 - DNA, 608 bp, Homo sapiens
aataagcattgtatctatccaaaaagtaaacatctttaaatgataatattcaatgttatcaaaagaagcaggaaatatatgctaatgagaatgtaaatttctagagagtattttattaatattcatattaatttttattcatattcatcaagaagtccttctctaagaagtgacatcagcaagatggccaactagaagctcctagcactcttcaccaacaaaaaacccaaaacaataaataaacaaccacatttcaaccaaaataactaaaggaaagcacyggagaacatcaaaaaaagcagcagaaatcctgttgagcaaagaaacacaagattgccgcatagagatggtaagaaaacaccttgccttcaccaccccatcccctaactcgagattagctcaaaaccggaagggactggtttcccctctggggaaaaggtaaacaagacaaccccagcagctcctatcaccactgtggacacatacgatcttccctactggaaatgactgcagtccacaggctcagagcccagctgaggaagcttcccagagtccacacactgagctacccccagagaagaagccaacactgagctcagtatccccca

SEQ ID NO: 259125 - DNA, 514 bp, Homo sapiens
tggagatgagaaacttgttgggaactggagcaaaggtgactctttctttgtttagcaaagatattggtggcattttgcttctgtcctagagatctgtggaagtttgaacttgagaaagttgatctagggcatctggtggaagaaatttctaagcaacaaagaattcaagaagtgacttgggtcaccacaaccgttaaaagcattcagctttatgaattcacaaagatattgtttggaattggaatttatgtttaaaagggaagtagagcataaaagtttggaaaatttgcagcgggataatgcaatagaaaagaaaaacccattttctgaggagaaattcaagccagctgcagaaatttgcataggtaacaagaagctaaatgttaatcrccaagacaatggggaaaatgtctccagggcatgtcagaggtctccacagcagcccctcacatcacaggcctggaggcccaggaagaaaaaatggttttgtatgctgggcccagggccttgctgc

SEQ ID NO: 259126 - DNA, 586 bp, Homo sapiens
ctcaaaaaatattaatttttaatttattgcttttttattgcatcaacaacatattaatttttaattactgtttttgtttattaattcttaggctaagggtaatagtctccaagctggaggctgaaaaataatctatttcttcttatcatcactgaggcctacaatcttcttttcagataactttttcatgtcattatttctgtgttaaatggggaattagatatttttctctataaatagctatccctgaaaagtagtatgtacctgctgagtgcttgtcaccagttttaaattaattcactgttttcaatggatgacyttcctagtgatgccacatatattttaatagctgatgacccttttgtgtcagaactagatacctggatatcccaaatcgatgtaatgttagcctgatgataataatagtaatagttatatagtgcttgctaggagttagaatctgcttcaaccactttaatataactcattttcattctcacaataattcatggaaggttgtattttttttttcattgtacagacgaagaggctgtaatagaggtcaagtatcagtatgttaaaacac

SEQ ID NO: 259127 - DNA, 272 bp, Homo sapiens
tatttcagaccacaatggtatggaagtagaaagcagtaacaggagaaattttggaaaattcacaaatgtgtggaaattaagtaacacgctcctagcaaccaatggctcaaagaagtcaaaaggaaaaatttaaaatgttttgagacaaatgacaytgaaaacacaacatacccaaacctaggtgatgtagcagaagcaggtctaagagaaaaatttatagcaataaatgtatataataaaagaaaataccaaataaatagtccaacattata

SEQ ID NO: 259128 - DNA, 616 bp, Homo sapiens
aaacaaactatcattccccctccctgcctgccattattgtgttttcttcrtccagcttaggatgaggcacagttaaatcttgattgttgctcaggagttttgtgctgatttatcctttatttgccccatgttcttgaaaatccattaaaaaagaggaataaaaaggctttaggaggttagtgtggttatttcagggaggaatgtcaggaaagactatcccccctccctatgacccctcagaacctcccttttctcctcatcctgccaggctccctggtacgcccctccctgagcagcgtggctctgtctccacaggtccgcttctgtcccttcttgtgctcttttcctggatccttgagctccactgaagccattccatctggtcatgggacatctgtgatttcagtctaatgacatttcgtgaggctgggatcctgtgtcccagcactctttggggagagctatttccaggaaggcgagggctgcggtcagtgaggcagacagcacagctgcaggggacggcgtggacaaaactaaaccctcccacagctgagtgcatgtcatcaatgtaaacgttgatctcctttttttaaatcctcaagggaccccgaggagc

SEQ ID NO: 259129 - DNA, 593 bp, Homo sapiens
tgcccactttttaatgagattattgaggtttttttgttgagtggtttgaattccttgtctattctggatattagtcccctgtgagatgaatagtttgcaaatattttctcccattctgcaggtcgtctgttcattctcttgattatttcttytgctggcagaagctttttaattaagtcctgtttgtctatttttgtttctgttgcctttgcttttgaggtcttagtcataaatacattgtttagaccagtgtttagaagattattccttaggtattcttctagtatttttacagtttgcagtcttatttttaagtctttaattcatcttattttttgtatacggtgagagataggggtccagtttcattcttctgcatatggcaatccaattttcccagcaccatttagtgaagagggtgtcctttccccattgtatgttcttgtcagcttccagttggttgtaaatatgtggctttatttctggattccttattctgttccattgatctatgtgtctattttttttttaccagtaccacactattttggttactatacccttgtaatataatctgaagtcagataatgtga

SEQ ID NO: 259130 - DNA, 589 bp, Homo sapiens
tctatttttgtttctgttgcctttgcttttgaggtcttagtcataaatacattgtttagaccagtgtttagaagattattccttaggtattcttctagtatttttacagtttgcagtcttatttttaagtctttaattcatcttattttttgtatacggtgagakataggggtccagtttcattcttctgcatatggcaatccaattttcccagcaccatttagtgaagagggtgtcctttccccattgtatgttcttgtcagcttccagttggttgtaaatatgtggctttatttctggattccttattctgttccattgatctatgtgtctattttttttttaccagtaccacactattttggttactatacccttgtaatataatctgaagtcagataatgtgatgccagcattgttcttttggcttaggattgctttggctatttgggctcttttctggttttatatgaatttgaggatattttttctaattctgtgaaaaatgacattgatattttgataagcaatgcactgaatatatagatgcttttggcaatgtggttattttaacaatattaattcttct

SEQ ID NO: 259131 - DNA, 589 bp, Homo sapiens
tctatttttgtttctgttgcctttgcttttgaggtcttagtcataaatacattgtttagaccagtgtttagaagattattccttaggtattcttctagtatttttacagtttgcagtcttatttttaagtctttaattcatcttattttttgtatacggtgagagataggggtccagtttcattcttctgcatatggcaatccaattttcccagcaccatttagtgaagagggtgtcctttccccattgtatgttcttgtcagcttccagttggttgtaaatatgtggctttatttctggattccttattctgttccattgatctatgtgtctattttttttttaccagtaccacactattttggttactatacccttgtaatataatytgaagtcagataatgtgatgccagcattgttcttttggcttaggattgctttggctatttgggctcttttctggttttatatgaatttgaggatattttttctaattctgtgaaaaatgacattgatattttgataagcaatgcactgaatatatagatgcttttggcaatgtggttattttaacaatattaattcttct

SEQ ID NO: 259132 - DNA, 591 bp, Homo sapiens
tttatccatttcctctaggttttctagtttgtgggtgtatagttgttttaatggtctctgatgatattttgtatttctgtaatatcagttgtaatatctcctttttcatttctaattttgttaatttggcttatctctcttcttgcttagtctagttagcagtttatccattttattttatcttttcaaaaaaccaactttttgttttgttgattccttgtttttgttttgggtttttttyctctctgtttcacttaggtctgctctgatctttgtcatttttttcttcgtctagtttgaggtttgctatgttcttgcttttctagttccttgaattatatcattggaatttaatttgtcatctttctacttttttgatgtaggcacttaatgctataaatttccctcttagcactggtgttgctatatcaaacaggttgtagtatgctgtgtttccttttttgtttgtttgtttccaaaattttaaattttctgtcttaatttcttcattgacccagtggtttttcaggagcatattgtttaatttccatgtatttgtacagttttcaaagttcttcttggtgttaagtt

SEQ ID NO: 259133 - DNA, 626 bp, Homo sapiens
ttccctccactgggggaggcttcactcaccagagcacagaaagaccagactgatgttccaagacacctagtcttgcaggctcctttattctccaagccatgtgccyttaaacctctgaggccaggttgaagttaccctgagttcatggagccaggatacctactctttgggttcagtgcccaccttccaacaggagactatcaggactagatgcagacatacctttcatccctgttctcaaatcccaaagtgtccacctcctgctcctttaatctattctgtaagcattactgtcaccctaatactcttttcttccttgtaccagctcaataacttaaccttttcctccctgtattagtctgttttcacactcctataaagatatacctgagactaggtaatttataaagagaagaggtttgactcacagttccacatggctggggggcctcaggaatcttataatcatggtggaaaaggaagcaggcatgtcttacatggcagcaggtgagagagagagaatgtgtgtgaagaaggaactgtcagacacttataaaaccataaagatctcatgagaactcactcactatcatgagaacagcatgagggacaccgccgttatgatc

SEQ ID NO: 259134 - DNA, 626 bp, Homo sapiens
ttccctccactgggggaggcttcactcaccagagcacagaaagaccagactgatgttccaagacacctagtcttgcaggctcctttattctccaagccatgtgcctttaaacctctgaggccaggttgaagttaccctgagttcayggagccaggatacctactctttgggttcagtgcccaccttccaacaggagactatcaggactagatgcagacatacctttcatccctgttctcaaatcccaaagtgtccacctcctgctcctttaatctattctgtaagcattactgtcaccctaatactcttttcttccttgtaccagctcaataacttaaccttttcctccctgtattagtctgttttcacactcctataaagatatacctgagactaggtaatttataaagagaagaggtttgactcacagttccacatggctggggggcctcaggaatcttataatcatggtggaaaaggaagcaggcatgtcttacatggcagcaggtgagagagagagaatgtgtgtgaagaaggaactgtcagacacttataaaaccataaagatctcatgagaactcactcactatcatgagaacagcatgagggacaccgccgttatgatc

SEQ ID NO: 259135 - DNA, 552 bp, Homo sapiens
tctgcataatcttccttccttctgatgaaggaggtggcccttctgcctaaggatcacacgctttagcctcctttcatagccatgtttgtcaatagttgtttacccttactgtttccttttcctcacttccttcccactcctcagcctgcccttcatggctctgtcccaccactgcaccaatagagaagtagctgaggtcaacaaagacctctagagtgctcattttagtgaatatttttcagtctttattttaattggtgtcagagctaaagatatagtttaagagtgaaaaatgggaatgaagattattcaggaagacttctgaatatcaaatcaaaaagagaaaaatgaagaargaggaagggagagaacactgagaaaagaacctcagagattgttaatacttaaagaatgatgagagacaggagacttagaggccatggttatcacataagagaaccagcatagaacaatattatggaagccaaagggaaggcaagaattctgagggacagcaaatccatgtggtacatagagttcacataagattga

SEQ ID NO: 259136 - DNA, 586 bp, Homo sapiens
gagacccacggttgtgtttttccatgagaatgaaacaaagcccaggccttctaatctaccttcctatactcagtcattcacaggaattgctatgcactgcatattggtgctccctaaaattcatgtgttgaaacctaatttccaatgtgatggtatttggaggtggggcctgtgggaagtgattaggtcaggagggcagagccctcatgaatggaattagtaccctcatgaaaaagaccccagagagctctcttgcccttctgccatgtgagaagacagtgaaaatatagccatctgtgaactgrgaagcaggccttcaccaggaactgacaccaaatttactggtgccttgattttggacttgctagcctcaagaactgtgagaaatttctgttgtttataagccacccaggctatggtattctgttatagcagcctgaatggactaagacagagatagtaactcaaaagttactctgggcttccagttcaagatcaaagacagaacatgtgtactaacttcctctcccaaaatcacactgaattattgtaaagtataagaaattcatatataaaaagtcccaag

SEQ ID NO: 259137 - DNA, 686 bp, Homo sapiens
acttcaaaatttcttatcaggattacatactgataaccagggttctcaatgaagcattctacaattctaaatggcataaaagggagtcacattccaatctttttaacttaatagaatttgtacgtaactttgaatacacattttcccattaaagcagagaagaaacaagcaaggcacatggcagggactccaatacattagtggggttkcaaggggtagggaggatggaaagagctagatttatattatttcttttatttttaaaacaatttttttactcattttaacatgaatatgtgctcattacagaaaatttgggaaatataggaaagtatactttttctaaaaacgaaagctatatacagtctcaccttctcctacattctcatttagattcagatttaatagataaaatacagttgatagccactgtcattgacatatcaccacccagacatcaataacatatttgagtatcatattgatactcaaagttatctttggttgattttctctccctagatctttcccaaaatgtggactgtttgaagatctagtttgcataataccttaacacaccagaatagatttgtctagaaaacaagcagttagtaggaatcctgaaatgtgaacataacatatggaggcctttacaacaacaaccataataaacactattatttcta

SEQ ID NO: 259138 - DNA, 537 bp, Homo sapiens
gacatcaagtcatacacctgggtcctcagaggagctcagcatgagtttttaggaagaaaagttgcaacctaagagggctactgaaatataaagtcaacctgagacatagatcaggcatggctgcaggcggacagtgtgaggaggtgcatagtcctatactggggagcaaagccagagatttgatagcctgctaagatagtaaatcaccccccaaaaatctgggcataaagagctcgagtacatatcatatgagaaaagtccagggaactggagtgttcagcccgtggggaatgaagcaagtaagtaaacaaaaactagaggggctacaagagttgattttcaatatttggaaaccagttattgtgtataaatagaaggagctccagggaggtaactaaggatcaacraattttaaagggattttaagtgcatagagggtggggtacaaatttagttaagcagaagtaagatcctgcaaacaaagtcattcaaactgggaatggtcatttgaacacggatgcttgcctcttacctgga

SEQ ID NO: 259139 - DNA, 688 bp, Homo sapiens
gttcacttttaatgtctacaacaaaaattaagacaatgcattcctgtattgaagggttataatttgcacattatcatctcccatttttgatacattgacagtgaaactaacctcatgtagaaatgtggatgcatacacttccggaatgccttccacattgggaacacatgtagttgtgctctgcctgtaagtggctacatatttctagggtttgtctgkttggcagctccattttaacactttgttgggtatatatttcctttgttcaaaatgtgccacatatttctgattatagcatggaacttaggctgcaaaacaaaacaaaacaaatcctgcaaatgttcataccatatgacctaaggccttgctgaagcatatttttattagaatgtcttttgccttcttcttttgtggttttggaattacagcttgccactaagtaattagcttagcagtcctattgtaatcagtcctccttttttgtctggtcagaggaaatgaattttacaaagtatggttctaattctaaccaactcgtatgtcagagagctattgccatgatcgtgcttcatgataaatggcaaataagagttggccagcaaaagtggtgctcaaatttggtggcaacatcggtgaccatactaagtttattgtctatgaaataaatgagtgcataaagctgtagcta

SEQ ID NO: 259140 - DNA, 527 bp, Homo sapiens
acatgtattataggaagcactaacaatggtcatcctgatggcatcttctgaactcaacaaccttcattttctccccttcttatgaaaattagacagaakaactcatttagcatagaggcaattttacacacctcaatagcctttaagggaagtcaagtcactgatattgataataattatcttgaattatcaatatatcaaaatgaattcttttttatgtattctaagtagccaaggacatacatttaataaagataaatatatataatctttaaattatacataatgtattttatatgtatatgtatctatattacatgtatatgtattatatagtatatgtacattatattatatagtagctaaaataagaaaagtcttagcacttaaaggatggtagtctttaacgatctggaaatctaccatttcccattgatgtcagattcaatgggtaaagataaactttctttttctaaatgcaaaattaaataagccactgcttttaagtcctcttattaagtactgga

SEQ ID NO: 259141 - DNA, 527 bp, Homo sapiens
acatgtattataggaagcactaacaatggtcatcctgatggcatcttctgaactcaacaaccttcattttctccccttcttatgaaaattagacagaataactcatttagcatagaggcaattttacacacctcaatagcctttaagggaagtcaagtcactgatattgataataattatcttgaattatcaatatatcaaaatgaattcttttttatgtattctaagtagccaaggacatacatttaataaagataaatatatataatctttaaattatacataatgtattttatatgtatatgtatctatattacatgtatatgtattatatagtatatgtacattatattatayagtagctaaaataagaaaagtcttagcacttaaaggatggtagtctttaacgatctggaaatctaccatttcccattgatgtcagattcaatgggtaaagataaactttctttttctaaatgcaaaattaaataagccactgcttttaagtcctcttattaagtactgga

SEQ ID NO: 259142 - DNA, 467 bp, Homo sapiens
ggctctactccaactccatttcctccctgcccctttcctccactagccctttcatgttaccctgtgaaattcctatattgatctcattccatgtttccctttgctcctccccatgactgaaacctgacccccttcagtcaaaccacttccttgggtgagcacatcatgcttcccacagctccttctccaatgactgtgcttctcccaccattggacagcctccccttctcacctttaccaccactggtcatcaattctcattgctcccayatgcttacttccaatgctctattcttaccttcctctatgacgttaccactggtagtaatgtatctccccaactcaaacttctgctaccatcatcagtatccaggaaaatgacctttataacatactgaccaacctactcaacttcctcagttccagggacatttatgaccactgcacttttgctcaaccttagccat

SEQ ID NO: 259143 - DNA, 469 bp, Homo sapiens
tgaatatgtgtcacccaatcataaacttctcaatgatccacctccatggtcaattttctgtaagagcatgttgagcacaacccattaactctcctgccccctctcactccatccctctgtcmatcccaccagcaattctttactgagtccctgatgtcatcttgcctccaagattcccaggaacatacacttactcaagtaatttcttaaagcacagttttcactcttccacttcccagtatatgggtttccagtaggatcctgacaatgttcccaacccagtaatagacaatacacatttcatcatcttaaggtcctcccatagctgcaagaaactggcagttcaccaaagcatcagttgcagctctcttgggcaagagctacttttcacttaatttgttactgcatataacacatgagatatgccaaagattataggataatgcattttctgatcttagagaataaa

SEQ ID NO: 259144 - DNA, 631 bp, Homo sapiens
cattcacacagaaatttgtagttggtaaaaacagttcttcaattcaaaactgttctgttgtgttaacctaaaaggaagaaactgagacgaaatttaacagagtttattttagtcaaggttcaggactgctgccaggctcccacttccaagctgccttggggagagtgctccagagaacaaaagaaaggctcaaatttttaaagaaaaaaggacaaatcaggaagggagagataacaaaagttgttcattctgaattctcaacattggtttacagaaataacattggttagtgattggctatacactattgaactatagggtatatgacattttatagctacytggcactagttagtctagaggccccaaagcaagtggcgtatttagctcaagggagagtgagatgagaatgctgttacattttaaatacctctctgaacctgacaatttaaaggggctcatattcctcagattaaaagtttctcttttccccccacagttgttttcaagccatgaatacaaatcataaatatagtattattaataatctaatctgtcctgtaatttttacagtgaactatttacaaactgaattgggcaactggttcatcagacgttaagaactctatgt

SEQ ID NO: 259145 - DNA, 595 bp, Homo sapiens
gagccgaatctgatgtagagccacctgttgtggcactgcttgatgctgcagatgcttgtggtctgttggcagcagctccaagaggatcattctgtgcttcaaggtgaaccacttcatttgattctcttctaaaaatatgagatctagatgatgtatcagaggtaggtatccttgaagattcatctcttccctctcgcctccttctagagaacaaaggtgtgcatctatttctaagtgaggaagataaccatggtcctgtatttctaccttcagattcttggttaaaattttctgaatctgactcagagctatgattgtggctaagagatgacaaaccccatcttcgcctaagaaatcgaaatccctgagaagcttcagatgccctattatcrggaacttcagaagctgatggtacattactacgggactgtgaagctgtcaagattcttggagaaacgtaagaattttcagaattcaatgatcttgtattcaaggaatcctgactagatcttcgtgaaaaaatagtagatgacatgctagaagctatgcgtgacagcaatctcctcgttgtccgcctaccttcattgtcagaaga

SEQ ID NO: 259146 - DNA, 518 bp, Homo sapiens
gttgtttatcatgagaatccccggttatatagttgttatcagaaacacaattcagtaaaacataaaactattcacaaatgaactaatcacktataaaattatttcctactctaaacatattcttctctgcctaacattaaaatctaccccatacacaatgtcaatgtctcaatcacttctcacaacatctacctatacattatgtaaaacgattacagaacaaaaatgtaaatcttgccaaagatggagaatttcacaaaaaaagtcaatgaaagtgatgctggagaactgccagtatcaaaatcaaaggcatccggaaagggaagatgtgaacaacacaatttcatcagaattatttttactgctaccacagttgcttgattttttattctagaattcttaattctaagaatcaaagtattgttacagttatcgtaattttattagatatgatttaaaagtaaattaaacattaagtctcaaacctctttccttcactatttaccttgaaattttga

SEQ ID NO: 259147 - DNA, 574 bp, Homo sapiens
gcctgaatgacttaaaattactttttaaaacttctctctttttccctccatatatttaatgaagagacaatccaaagagaggcgaattatctttggagaaacaaaacaagtggcagaagtcacatggctacaaggtgctacaaacaggattttttcaaatagcaaagaaaaatggccataccatgagaaatttagtatggctaaagtctaggaatagaaagaagacatgtcagctggaattttgtggcaactttaatgtgcagctttgggtggaggaatgggattcagctgtttgagattttctgggaggtttgccctatcyactcaggaaagggaacataccttgttctcactgagagataatccttggaatttagatcattccctcaattcaggagtcctgaagcttctgcttctgccaagaaatcagtgttaattcttcacttttcagcttttagtcatctcttctcagcagctgttgctactttcacagagtaagagaaagaaaaatgtaaaaaaaaaataaaaataaaaaaaataacaaaacccaaaacaaaaactccataaatcgatt

SEQ ID NO: 259148 - DNA, 574 bp, Homo sapiens
gcctgaatgacttaaaattactttttaaaacttctctctttttccctccatatatttaatgaagagacaatccaaagagaggcgaattatctttggagaaacaaaacaagtggcagaagtcacatggctacaaggtgctacaaacaggattttttcaaatagcaaagaaaaatggccataccatgagaaatttagtatggctaaagtctaggaatagaaagaagacatgtcagctggaattttgtggcaactttaatgtgcagctttgggtggaggaatgggattcagctgtttgagattttctgggaggtttgccctatccactcaggaaagggaacataccttgttctcactgagagataatccttggaatttagatcattccctcaattcaggagtcctgaagcttctgcttctgccaagaaatcagtgttaattcttcacttttcagcttttagtcatctcttctcagcagctgttgctactttyacagagtaagagaaagaaaaatgtaaaaaaaaaataaaaataaaaaaaataacaaaacccaaaacaaaaactccataaatcgatt

SEQ ID NO: 259149 - DNA, 580 bp, Homo sapiens
cccgctcccacctcctgacggtagttgtgttgcatggagagaaactctcaccactgtggggagggagaatgcagctcctgggagaattatactgaactcagtgatgccctgtcatagtggagaataaacctgtgctggactcaactggcacctatgcatggagggggcttttggactacagcatttggatcagaactagacagagggaartcactcatcgcggtggtcagcacttgagtttcttgacaagcctcaccactgtgggctgaagtgctctggggtcccaggtaaacttgaaagacagtctaggacacaaggactgcaattcctaggcaaatcctaatgctaggctgggcttagagccacggaactatggtggcatgtgacctaggaagatactagttggggtggctataggagtgcttatgccatccctctcccaatccaggcaatccagcttgtagcaatgaaagtgacctccctccttttgcttaaggagagctaagagtaataaagaggacttggtcttgcatattggaaaccagctcaatcacaataggatagggcactgggcagagtt

SEQ ID NO: 259150 - DNA, 536 bp, Homo sapiens
atagcaaatcaaatccaagattagtagaagaaaagaaataataaagctcagagaagaaataaatgaaatagaaatgaagaaaacaaaacaaaaaattagcaaaacaaaaattgttttttgaaaaaaataaaattgacaaacctttagacaaagaaaaaaaccaaataaataaaatcagagatgaaaaaggagacattacaactgatattgcagaaattcaaaggatcattagtgtctaccaggagcaactatatgccaatacattggaaaatctagaagaaatgatttatagccacactgtcttccacaatggttgaactaatttacactmccattaacagtgtaaaagcattcctttttctccacaacctcaccagcatctgttattttttgactttttaataatagccagtctgactggtgttagtatctcattgcggttttgagttgcatttgtctaattatctgtgatgttaagcttttttccacatgattgttgggccacatgtatgtcttcttttgaaaagtgtttgttc

SEQ ID NO: 259151 - DNA, 719 bp, Homo sapiens
cattagcagtcacttagtctcatcatactgaaaggattcttcacttatagctgatgggcagagggtcagtgtgacccttaagtgaatggaatcctggggagggaattgcctcctacaactccattttacagggaaggaaaactgagcttgaaactttaagtagcctgcctgaggtcagccaactagttagtgagagaattaggagcaagaatccctatcatcagttcagtgtgcttcccactccaccacacaatactttgatcaggaaggtatgggcagcaattagggtcatatgccacataacaaggttttggccaatgatggaccacatatataatggtggtccctaagattataatactgaagtttcactgtacctttttaatgtttacatatacagatacttgcttctgtattactattgcctacagtattcagtagagtaacatactgtacaggtttgtagcctcagagcaatagactgtatcatctaggtatgtataagaaccccctrtgattttcacacaaagacaaaattgcctaaggatgcatcttcagaatatattctagtcactaagtgatgcatgactgtataaggatgttaacactttaacgttaacataatagtgtatatcataaacatttctcatatatatactttagagaaacctgatatgagtgaagacattgcagataaaatcaatacattttaaaagcat

SEQ ID NO: 259152 - DNA, 621 bp, Homo sapiens
atttattcatactaggtaaaattttgtctctacatcttgcataacaacaacaacaacaaaaactggaaataaaactgataaatggaaaagaacatttctccagcatcttttaactcaaatctttggtaatatccattgtttttccaatatagtcaaataatatttctatactaccctaagaaagactgttttacttcaaatatttctcaaactaatagaacttaccataagcaaaatatcttaatgtatatgcactgctgcattccagcctgggagacagagtgatactctatctcagacaaaaaaaaaaaaaaaaaaaaaaaaaaaaagagtgtttaaaaaaaagtccttcttcaatatgaccccwtttacaattgaagcctatccacttacagaaacacttttctccatttgaatctaccttctttctctttagtgaacatgacccctgcccccacccccgcttcatctctgttgtttctgtccaccaagaatgtcatctcctttatcttcctctcttgcttgagtctttcaacatttaccttttccagaaagctctttctgagttttccagtccatgtggtgttctactctcagtatgagtttagcattctgttgttc

SEQ ID NO: 259153 - DNA, 478 bp, Homo sapiens
tagcaataggaaattcatcaataaaattttctccttctcttcctccactaatagctacgataaggagtcagactataagaaaaaaactatttgtttgtgtgcatggaataaactcattaaaagtacacctttagcaatattttattactagaatgtgagtattttgaacatttttggagagtttcagcataggagtgctaaagagaaatataagccatttataggagtaagcacatttatcacaaatttgggcagaaaagatgaaaaattatattttattaataagaaggaataataacttcagttagctgttatttcctgagaaacaaatacatatgttactcaatggtctattctagaacaacaggtttcaagccttaaaattggcctcaaattttraaaaaattaaagattacaacttagaatctctctccccttcagcttcaaatacataagctttgcatgaaaatttacccaa

SEQ ID NO: 259154 - DNA, 564 bp, Homo sapiens
caaagttcatcaattttttctagcaaatagaactgtgaataatactttatgctccttcttatgaatcaacaagaaatttgacaaatttctatgctcctttcctcattttggatatgactcactgctctcgatgtaacctcgaaagaccaagaacccctgctttaaagcaaggaaacaaaaggaaatgcatctttaattcaaactggtttacccagagaawtctagtagttattattcactgacttcttaagtatgcattataaagctgagtgccttaagtgtcctctcttcaactttccctggggaaatcaatgtagaaaagctggagaagaaagctgactgataagtcctggacttgaagtttatcagcagttctccttacccatccgttatctctagtaggctattagatgttagctttgagaggattttattttattttcaagattttggatcatcttccctccaaacccctctgactttgcaaacaaaaagtaatagatctgggctatttctcaaaagcctttctaatttaaaacctgactccttttctgctgtttgaca

SEQ ID NO: 259155 - DNA, 564 bp, Homo sapiens
caaagttcatcaattttttctagcaaatagaactgtgaataatactttatgctccttcttatgaatcaacaagaaatttgacaaatttctatgctcctttcctcattttggatatgactcactgctctcgatgtaacctcgaaagaccaagaacccctgctttaaagcaaggaaacaaaaggaaatgcatctttaattcaaactggtttacccagagaattctagtagttattattcactgacttcttaagtatgcattataaagctgagtgccttaagtgtcctctcttcaactttccctggggaaatcaatgtagaaaagctggagaagaaagctgactgataagtcctggacttgaagtttatcagcagttctmcttacccatccgttatctctagtaggctattagatgttagctttgagaggattttattttattttcaagattttggatcatcttccctccaaacccctctgactttgcaaacaaaaagtaatagatctgggctatttctcaaaagcctttctaatttaaaacctgactccttttctgctgtttgaca

SEQ ID NO: 259156 - DNA, 555 bp, Homo sapiens
acttttcagtacgacatgtactttgatgttctttaaacaattccattctgttccatcagtgtgaaacacatcatgcttctttacctggggggttatgctcattgagaatcacaagtgatgctggtgtaggtcttcttttcctgatctgtgaacgacaaaagcccagctaatatcagtgagtattagacactgctccaggttactctgcagcttgcaaagctgtctcaccctcatcttttccccacatgcaaaagcaaatttctggaggacacatggaaggtgctcactaattttattttgaaataatagaaagccacagaattgaactgtctgatagaagtatcaccctctttgaccaaaaagctacatttccacggaaaagaaataattatatacaactgaatgatacaacagaaaattaatttacartgaaggtacagggttgacctgataatgttagtggcttgcttggagcctcataacattggtggtgctttcaagattcattacccttatttttaaacaggataaggaagagcttggaaacctatttct

SEQ ID NO: 259157 - DNA, 636 bp, Homo sapiens
ggatactattaatcaagatactcaatcattgcaaattagatatcaatatagaaaggagagcctaaagttggatgttgtaccaccaaactgactgaaaaaggaatcctctccgttgctctttaaaagtaatgggttcaatcattaaagattaaaaaggcctctagaacaagcaacaactatagtctctcttcaaagtaagtgatactggagtaaagatggaaaaacattaggaaaataggccattaggccttcctrattttacactataatatctatcttgccctactttgcatgattcctcaagaccctcctacaggctgccgcagttcaccttaccaccagtctttctgtggcctcccctacctccctggaagccatcctgcctccccgctcccttttttaacccaaattatattcattctctaattccacctccttagaaagagaccttcagattctccacacaagaagaatcactcaatttgttccctctcctggtatttaattatatatagttttatgttattctataataatttcctatgtgtttcttttgcctcttctcctagactgcaaatcccatcctatcttaaacataaacataacaagcaagatgctcgtcatctagtagttact

SEQ ID NO: 259158 - DNA, 625 bp, Homo sapiens
tgcagacctaaccctccaacccaaaaaatacagctggacaacaaaacgggtgcttatgtagcaaatgaaaagagtacaggtttaatattctcagtatctacataagacagcagaagggggaaaaaagacaggaatgtgtatgaaaaatgccaaacgtatttgcattttagatgaaaaggtctggatttaagtggccataggagaacagggacaagctcttattctctgatctgatacactgatttctaaacctggctcatcagaatcctcctttaaacagcttttaagaattatttccagctgggcatggtggctcatgcttgtaatcccagcactttgggaggccaagctgggtggataatgaggtcaggagatcaagaccatcctggctaacacagtgaaactccatctctactaaaaatacacacacaaaaaaaattagccggccctggtggcgggtgcctgtagtcccagctactggggaggctgagggaggagaatggtgtgaacccgggaggcggagcttgcaktgagccgagatcacgccactgcactccagcccgggcgacagagtaagactgtctcaggaaaaaaaaaaaaaaaagaattatttccaggccttgtt

SEQ ID NO: 259159 - DNA, 625 bp, Homo sapiens
tgcagacctaaccctccaacccaaaaaatacagctggacaacaaaacgggtgcttatgtagcaaatgaaaagagtacaggtttaatattctcagtatctacataagacagcagaagggggaaaaaagacaggaatgtgtatgaaaaatgccaaacgtatttgcattttagatgaaaaggtctggatttaagtggccataggagaacagggacaagctcttattctctgatctgatacactgatttctaaacctggctcatcagaatcctcctttaaacagcttttaagaattatttccagctgggcatggtggctcatgcttgtaatcccagcactttgggaggccaagctgggtggataatgaggtcaggagatcaagaccatcctggctaacacagtgaaactccatctctactaaaaatacacacacaaaaaaaattagccggccctggtggcgggtgcctgtagtcccagctactggggaggctgagggaggagaatggtgtgaacccgggaggcggagcttgcagtgagccgagatcacgccactgcmctccagcccgggcgacagagtaagactgtctcaggaaaaaaaaaaaaaaaagaattatttccaggccttgtt

SEQ ID NO: 259160 - DNA, 541 bp, Homo sapiens
gcgggtgcctgtagtcccagctactggggaggctgagggaggagaatggtgtgaacccgggaggcggagcttgcagtgagccgagatcacgccactgcactccagccygggcgacagagtaagactgtctcaggaaaaaaaaaaaaaaaagaattatttccaggccttgttcccagagatttttatgccataggtttacagtaagcaatcaaaaaatcatagtcctcggataaagtactgatacatgctataacacagatgaaccttgaaaaccttgctaaatgaaagaagccagtcacaaaagaccacatactatatgattccatttatgtgaaatgttcagaagaggcaaacctacagagacagattagcggttgccaaggctgagaggtttgggtaaaatggggagtaactgctaataggtaaggaattcctcatggagtgatgaaaatcttctaaaactgactgtggtgacagtgataatactctatgaacatagtaaaagccactgaactgtacactttaaatgggtgaagcgtat

SEQ ID NO: 259161 - DNA, 541 bp, Homo sapiens
gcgggtgcctgtagtcccagctactggggaggctgagggaggagaatggtgtgaacccgggaggcggagcttgcagtgagccgagatcacgccactgcactccagcccgggcgacagagtaagactgtctcaggaaaaaaaaaaaaaaaagaattatttccaggccttgttcccagagatttttatgccataggtttacagtaagcaatcaaaaaatcatagtcctcggataaagtactgatacatgctataacacagatgaaccttgaaaaccttgctaaatsaaagaagccagtcacaaaagaccacatactatatgattccatttatgtgaaatgttcagaagaggcaaacctacagagacagattagcggttgccaaggctgagaggtttgggtaaaatggggagtaactgctaataggtaaggaattcctcatggagtgatgaaaatcttctaaaactgactgtggtgacagtgataatactctatgaacatagtaaaagccactgaactgtacactttaaatgggtgaagcgtat

SEQ ID NO: 259162 - DNA, 567 bp, Homo sapiens
tcttttggttacaatttgtatgaaatgtcttccatcatttttgatttattggtgtctttgtatctaaattgaatctgttgtaaatagcatactgtcagctcatgtttaaatttaccaatctctttattttatatggtttaatctatttatatttaaactaaccagtaatatagaatacttacctttgccattttgctatttgtttcccatttgtttaagtcttgtctattcctcattttttccattcttcycttcattttgtttatttttttcttatttccctttatgtacctatttttagttttcttcttagtagctacactgggaattacaattaacattctaaatttctaattatctagctcaggggtgtccgagggagagaacagtcgtgggatcttagtttctatttctggttgggccagtaaagccccttcctcatttctcttatctgcttatcactagagacagaaagtaaaaatcacggctttaggctgttaaaaggctaaaacaaaacaacaacaaaataagacagatcgaacaagtttgatctagttcaaattgata

SEQ ID NO: 259163 - DNA, 541 bp, Homo sapiens
gcgggtgcctgtagtcccagctactggggaggctgagggaggagaatggtgtgaacccgggaggcggagcttgcagtgagccgagatcacgccactgcactccagcccgggcgacagagtaagactgtctcaggaaaaaaaaaaaaaaaagaattatttccaggccttgttcccagagatttttatgccataggtttacagtaagcaatcaaaaaatcatagtcctcggataaagtactgatacatgctataacacagatgaaccttgaaaaccttgctaaatgaaagaagccagtcacaaaagaccacatactatatgattccatttatgtgaaatgttcagaagaggcaaacctacagagacagattagcggttgccaaggctgagaggtttgggtaaaatggggagtaactgctaataggtaaggaattcctcayggagtgatgaaaatcttctaaaactgactgtggtgacagtgataatactctatgaacatagtaaaagccactgaactgtacactttaaatgggtgaagcgtat

SEQ ID NO: 259164 - DNA, 541 bp, Homo sapiens
gcgggtgcctgtagtcccagctactggggaggctgagggaggagaatggtgtgaacccgggaggcggagcttgcagtgagccgagatcacgccactgcactccagcccgggcgacagagtaagactgtctcaggaaaaaaaaaaaaaaaagaattatttccaggccttgttcccagagatttttatgccataggtttacagtaagcaatcaaaaaatcatagtcctcggataaagtactgatacatgctataacacagatgaaccttgaaaaccttgctaaatgaaagaagccagtcacaaaagaccacatactatatgattccatttatgtgaaatgttcagaagaggcaaacctacagagacagattagcggttgccaaggctgagaggtttgggtaaaatggggagtaactgctaataggtaaggaattcctcatggagtgatgaaaatcttctaaaactgactgtggtgacagtgrtaatactctatgaacatagtaaaagccactgaactgtacactttaaatgggtgaagcgtat

SEQ ID NO: 259165 - DNA, 610 bp, Homo sapiens
aatctaagggaaggactgaaaaacaggataaagtttatctctcatgtgaggaacaaggtgaaataaaactgaaatgtgttttggtcagatcagaaatgttaaaaaggcatgatctgggtagctaaagaataggtgaccctgacttaaagatgcaggaagtgcactaaaatgtgtaatttcaatgtcctagaagtttctttgtatttttttgttgagaatagatgagatattaggcatgggtaacctgatcaacacagaaatgtatgcttcataggaaaatagaagccaaatcacacatttcccctctctttgctccattattaacatcaatactatatactcaattgctttttgtataaaggatgactgttagtaaactatatttaaaaagaaataatacattaattacataggattatgcatcatacagaccttttgttttcaaatcattttaacactatttgaggtttagtttgagtcatgaaaatagctattatattttgttttgacattttgcatttctatcaaatttcttacagaattttatgtggtaaggagacttttctgygagcttattttcaagcaacaaattaaaatttactcccagttt

SEQ ID NO: 259166 - DNA, 586 bp, Homo sapiens
gttgtggcatgcggggatggggtagggatagcattaggagatataccttatgctaaatgatgagttaatgggtgcagcacaccagcatggcacatgtatacatatgtaacaaacttgcacattgtgacatgtaccctaaaacttaaagtataataataataaaaaaaataattaaaaaattaaaaaaaattaaaaaaaattgatccatgttatctagcttatcaaatgtatsgtcatatagttatttatagcattccttcctgatcatattatgtccatgggatctgtagtgatgcccactctttcatttctgatatttgtaatttgtgtcctttcccatttttgttagttaacctgcttaaaggcttattaattttatcgaccttttataggagccagctctaattttgttgattttttctattgattttctatttttgattttattgttttttgctctaaccttcattatttcttttcttctacttactttttggattaaaattgttaactttttccatttcctaaggtgaatgcttaaataattaattgtattttttaaaattttctaatatatgtgttcaat

SEQ ID NO: 259167 - DNA, 586 bp, Homo sapiens
gttgtggcatgcggggatggggtagggatagcattaggagatataccttatgctaaatgatgagttaatgggtgcagcacaccagcatggcacatgtatacatatgtaacaaacttgcacattgtgacatgtaccctaaaacttaaagtataataataataaaaaaaataattaaaaaattaaaaaaaattaaaaaaaattgatccatgttatctagcttatcaaatgtatcgtcatatagttatttatagcattccttcctgatcatattatgtccatgggatctgtagtgatgcccactctttcatttctgatatttgtaatttgtgtcctttcccatttttgttagttaacctgcttaaaggcttattaattttatcgaccttttataggagccagctctaattttgttgattttttctattgattttctatttttgattttattgttttttgctctaaccttcattatttcttttcttctacttactttttggattaaaattgttaactttttccatttcctaaggtgaatgcttaaataattaattktattttttaaaattttctaatatatgtgttcaat

SEQ ID NO: 259168 - DNA, 557 bp, Homo sapiens
tggtcatgggtttgggggaagagaaatggcttaccacagaggtaaaatgccattcttatcacatcatagtaagggcacatgccatcatatgataaattatatgacttatcactgttaatgttgacattgaccacctggctgaagtggtatttttcaggcttttctagcataaaattattttctccacacttctttccacactgtgctctttggaaggaagtcactatttgcagccaacattagggggtgaaggattatgttctaccttcttgggaagggttatttatataaattacttgaaattcttttgtatagatactttgtctattctttcttattgtttatgtgttcattcatttactcayattggttttatctcatggatatttattttatactctgagttacaatccaatactacattatttattttgttaactaagtattccagcttaggaattaagagattttacagtggctatttgtgtccctttcaccattgttgcgggggtgtttttgtttaattttagcattttcttacctcctaccagcacaat

SEQ ID NO: 259169 - DNA, 669 bp, Homo sapiens
cataatgtagttattgaaaatgacaaattccccctactactatcttccattggattcctatacacttcatgactctgttctgaaactcgttcactacttcttctcaccagaagaaagaccctggtgagcctcaacaaaaatcttcctaaatgaatagcctgttgactaattgtagaagttttcatttattggagaggccccaaaggctggcaatgaagctgctattcttcatatagactctaatcattggcatccctcctctaatgactgctataatcttatgtggatcaaatacgatccaggcttatgtgaggtgatagaatatttttgtttgtttagtaaggactattagtggcataaggccattgaaattaagctattgaggaagctgaaaagccttctcagcatcatttcactatctgtccaatagacctctgtgaaaatgggtagaagcrttttttttactgatgagaatagatttctatataagaaactctgtcaacgttagagacagttacagtcaatacaaaacttttcgtttatattttttccaaaaggctacacagtagattgaaagatgtatcagcatgtttcaagatacttgatattgcttagaaaagaggaatttcctttgtttctgtaacttaaataaataaataaaataaaatg

SEQ ID NO: 259170 - DNA, 595 bp, Homo sapiens
tgtggttcattctacacatttaattgaaaatgctgagttatgattccacacagatgagcaactgatgactttatttacccaaattgcaaacagcagttaggagtagaatgcacccttcttacatcactcacattagggctcatacacctcttccaggacctttaactgaagggaatctaatggctgattgcctagttgctactgcaatatctaatgctagacactttcacaatttaacccatattaatgcctctggtctcaaacgcagatacagcattacctggaaagcagctaaagctattatctagcgatgacctacttgccaaatggtgcattcctcatcttttacaagagaggttaatcctcaaggattggaacctaattctctttggcaaatggatgtcacacatgttccctcgtttgggagactagcttatgtatatgtatgtgtggacaccttttctcactttggggtacatgccaatcaggagagtcttctkcctgtgttaaacgtcaccttttgcagtgttttgtggtgaggggcattccagcttctattaaaacggacaatgccccaggctatactagccaagcg

SEQ ID NO: 259171 - DNA, 554 bp, Homo sapiens
ttattcaatatttaacaacattcttctttttatgactcccttcatgtgtatgtgtaactaacatttatataaagctttacatttgtaagacagtttcaaaatgcattatctcatttcatctttagcatagctttgaggtaggaatcactagccacattttacagatgaggaagcagggacttggagagattaaatttccttgctargcttacacagggtagaaagtggcagagtgggacacgaatcacaaattcaggtccaggttttgagtctggtgcacttcggcccctgcaaatgccattgccttttgaagctttctcatctcaaggatgatatgcagatttacaggtagcccatgtattcttactttttcctcacttctatatctaaaattacctatttgttattggggcaaaatgtaaaatgagtacaaaatttccattttaaaattttaccaaactagttccacactcagcccacattctgctcttattgagatggctttgcatctgcttgtctcctctgctggcatgtgaattcctagaatgcagatg

SEQ ID NO: 259172 - DNA, 572 bp, Homo sapiens
cgcgcctgtaatcccagcactttgggagaccaaggcaggtagatcacgaggtcaagagattgcgaccatcctggccaacatggtgaaaccccatctctattaaaaatacaaaaaattagctgggcttggtagcaygggcctgtagtcccagctactcgggaggctgaggcaggagaatcacttgcacccaggaggtggaggctgcagtgagccgagatcacgccactgcactccagcctggcaacagagagagacttggtctcaaaaaaaataaaaaaataaaaaataagaaaaggttttatgttttcaaagattaatagatatactgttacatatacacaatacagtcataaatgttatatacatgtgtttcaattaacatgttaaactgcaatcatattcttctatcataggctataaagccattgccctacatctacttattaggattttgtccaagtaacacatctttttgaatcaagtttacccatcatacgagattacatctttatcatgttcccaaaaatggcagagtaaaaagatcaaactcttcaaatttgtctacaaacaaa

SEQ ID NO: 259173 - DNA, 572 bp, Homo sapiens
cgcgcctgtaatcccagcactttgggagaccaaggcaggtagatcacgaggtcaagagattgcgaccatcctggccaacatggtgaaaccccatctctattaaaaatacaaaaaattagctgggcttggtagcacgggcctgtagtcccagctactcgggaggctgaggcaggagaatcactygcacccaggaggtggaggctgcagtgagccgagatcacgccactgcactccagcctggcaacagagagagacttggtctcaaaaaaaataaaaaaataaaaaataagaaaaggttttatgttttcaaagattaatagatatactgttacatatacacaatacagtcataaatgttatatacatgtgtttcaattaacatgttaaactgcaatcatattcttctatcataggctataaagccattgccctacatctacttattaggattttgtccaagtaacacatctttttgaatcaagtttacccatcatacgagattacatctttatcatgttcccaaaaatggcagagtaaaaagatcaaactcttcaaatttgtctacaaacaaa

SEQ ID NO: 259174 - DNA, 572 bp, Homo sapiens
cgcgcctgtaatcccagcactttgggagaccaaggcaggtagatcacgaggtcaagagattgcgaccatcctggccaacatggtgaaaccccatctctattaaaaatacaaaaaattagctgggcttggtagcacgggcctgtagtcccagctactcgggaggctgaggcaggagaatcacttgcacccaggaggtggaggctgcagtgagccgagatcacgccactgcactccagcctggcaacagagagagacttggtctcaaaaaaaataaaaaaataaaaaataagaaaaggttttatgttttcaaagattaatagatatactgttacatatacacaatacagtcataaatgttatatacatgtgtttcaattaacatgttaaaytgcaatcatattcttctatcataggctataaagccattgccctacatctacttattaggattttgtccaagtaacacatctttttgaatcaagtttacccatcatacgagattacatctttatcatgttcccaaaaatggcagagtaaaaagatcaaactcttcaaatttgtctacaaacaaa

SEQ ID NO: 259175 - DNA, 572 bp, Homo sapiens
cgcgcctgtaatcccagcactttgggagaccaaggcaggtagatcacgaggtcaagagattgcgaccatcctggccaacatggtgaaaccccatctctattaaaaatacaaaaaattagctgggcttggtagcacgggcctgtagtcccagctactcgggaggctgaggcaggagaatcacttgcacccaggaggtggaggctgcagtgagccgagatcacgccactgcactccagcctggcaacagagagagacttggtctcaaaaaaaataaaaaaataaaaaataagaaaaggttttatgttttcaaagattaatagatatactgttacatatacacaatacagtcataaatgttatatacatgtgtttcaattaacatgttaaactgcaatcatattcttctatcataggctataaagccattgccctacrtctacttattaggattttgtccaagtaacacatctttttgaatcaagtttacccatcatacgagattacatctttatcatgttcccaaaaatggcagagtaaaaagatcaaactcttcaaatttgtctacaaacaaa

SEQ ID NO: 259176 - DNA, 531 bp, Homo sapiens
attgttctagactaccacagttccatattttgtgaaaagttatattgcacttttttttttttgagagtgtgcccaggctggagtgcaatggcatgatctcagctcactccagcctccacccccccaggttcaagggattctcctgcctcagcctccctagtagctgggattacaggtgggcaccaccacgtctggctaattgttgtatttttagtagagatggggtttcrtcatgttggccaggctggtctcgaactcctgatctcaggtgctccacccgcctcagcctcccaaagtgttaggattacaggtgtgatccaccacgcccagccttatatttcactctttgggaattgcatcttactgtaatcttaaactacactaaaataaataatgtaaaccttttgtcaaattgctcagagtaggtttctactttggttataaggaataaaattcatgcttttgtgtacacactagacatctaaagcaaccaaccatagttaacatgcagtgctcttaccaaaaggtaac

SEQ ID NO: 259177 - DNA, 531 bp, Homo sapiens
attgttctagactaccacagttccatattttgtgaaaagttatattgcacttttttttttttgagagtgtgcccaggctggagtgcaatggcatgatctcagctcactccagcctccacccccccaggttcaagggattctcctgcctcagcctccctagtagctgggattacaggtgggcaccaccacgtctggctaattgttgtatttttagtagagatggggtttcatcatgttggccaggctggtctcgaactcctgatctcaggtgctccacccgcctcagcctcccaaagtgttaggattacaggygtgatccaccacgcccagccttatatttcactctttgggaattgcatcttactgtaatcttaaactacactaaaataaataatgtaaaccttttgtcaaattgctcagagtaggtttctactttggttataaggaataaaattcatgcttttgtgtacacactagacatctaaagcaaccaaccatagttaacatgcagtgctcttaccaaaaggtaac

SEQ ID NO: 259178 - DNA, 531 bp, Homo sapiens
attgttctagactaccacagttccatattttgtgaaaagttatattgcacttttttttttttgagagtgtgcccaggctggagtgcaatggcatgatctcagctcactccagcctccacccccccaggttcaagggattctcctgcctcagcctccctagtagctgggattacaggtgggcaccaccacgtctggctaattgttgtatttttagtagagatggggtttcatcatgttggccaggctggtctcgaactcctgatctcaggtgctccacccgcctcagcctcccaaagtgttaggattacaggtgtgatccaccacgcccagccttatatttcactctttgggaattgcatcttactgtaatcttaaactacactaaaataaataatgtaaaccttttgtcaaattgctcagagtaggtttctactttggttataaggaataaaattcatgcttttgtstacacactagacatctaaagcaaccaaccatagttaacatgcagtgctcttaccaaaaggtaac

SEQ ID NO: 259179 - DNA, 531 bp, Homo sapiens
attgttctagactaccacagttccatattttgtgaaaagttatattgcacttttttttttttgagagtgtgcccaggctggagtgcaatggcatgatctcagctcactccagcctccacccccccaggttcaagggattctcctgcctcagcctccctagtagctgggattacaggtgggcaccaccacgtctggctaattgttgtatttttagtagagatggggtttcatcatgttggccaggctggtctcgaactcctgatctcaggtgctccacccgcctcagcctcccaaagtgttaggattacaggtgtgatccaccacgcccagccttatatttcactctttgggaattgcatcttactgtaatcttaaactacactaaaataaataatgtaaaccttttgtcaaattgctcagagtaggtttctactttggttataaggaataaaattcatgcttttgtgtacacactagacatctaaagcaaccaaccatagttaacawgcagtgctcttaccaaaaggtaac

SEQ ID NO: 259180 - DNA, 552 bp, Homo sapiens
gataactcaaaagtattcatagaaagaaatgggtaatacttaaaaacacatacatagagttgaccacatactcattttaccattaaatgtcacatttaccaaatttttctccagtgttatccacacataagaaatgaacatataaattgctttttcttcctgatcacattttaataaagcactaacagttttgcaaataaattagaagtgattatagtaaacatttttaaagttatcataatgcaaaatactaaacagcaacaatttcccaaacaacaaagggaaatacacttaccctttaagcaagaaagtaatttctaacagtactatatatccagctaaaatcgaacagaagaaaaattactaattacagtaccaaatacaggaaatttccatttctcaaatcaagtaacaactaaaataagtaaatatcctctaggttccttgacagtattaccatcagagaaatgaggccagacctaaactaagggattaaagtctcacrgtaaaaaggtacaagagttaacagtcacagtgctgctagttacataa

SEQ ID NO: 259181 - DNA, 588 bp, Homo sapiens
ctaaactctaaacccaaaccaggtgactacctgctaaaatataaaataaaaataaaacccagagactgcaaacatactattcaagttatccagaatatcatttaaaaaaaatcagtcataccaaaagccaggaaaatcacaacttgaacgagaaaaggtaaatcaacaaaggccaataggctgaygagtaagatgtagaaattatatgacaagggttttaaagcagtcatcctaaaatggctcccacaagcaaacccaaatgttctggaaacaaatgaaaagcatgagaacatgaaatgcctgcaaagaaataaaaggtactaaaacgaccaaatgggcaacatagaactaaaattaaaataatcaaaacaaaaactcactggttgagctcaatagcagaatgaatatgacagaaaaaagaatcagcaaacttgaagataaaacaatagaaattactgaaactgcataacagagaaaaatggacagaaaaaggattaaacagagtatcagagacacatttgatgataacaacagatctggcacttatatcactggagcatagatggagagaagaaaaagagtgagttg

SEQ ID NO: 259182 - DNA, 574 bp, Homo sapiens
tttcctcttctaagtctacccccaggaagaggtccactgggaccctgaaggaggtcacttaaagctatgaccatttagactcctaagtaattcttgcctagtccctctttccaagtgtcctccagttcacattggagcataccagtcaaggatacacaccaccttgagtcagcttactcaaatattaaacagttcctactattcaacatagttcctgcatattgactttattgaataaaatctgcatttcccataaactttaaataaaaattttatttacatacaaagtgcaaattatatcttccttttccataattctggttaaaaaaaaaaaagttccagcaattgcatttttactatttacccaaagagacaattatattccactccacatattcctttcaaattatctgaccaggatttctttgcaaacctgtcttgcctayttttccttaggttgaaaggattctgtaatctcaagtctgcctcaaccctgtatcttcatccagtaccccggatcagtaggatgaaagtggtaagcctacaaaaaagtccacttccatttgtgtcaaaa

SEQ ID NO: 259183 - DNA, 616 bp, Homo sapiens
gtacagaatccagtcccttgactctcaggtccccagaacactcacttcacgattttgttgacctcttctgtcaacttaaacctggcactctcttggctggctttctctgctctttctgggcactccaaagcttctgtacttacatgctacaaytccagtcacaggaagatgctgagttctttagtcccagatccatattcctgagaaaacctaattgcctaggctcaggtcataactctgtatctgtttcagttgattatggctggcctactgcccctctgtatggtggtggggcaaaagttcccagagagaggcaggggtgacaggttgtctcaaatgctaggcagacatctggagtggtaaccactacatctgttcacagtgagcacatccttgcagggaaactgggttaatcatctatattattgaaactcagaggtatagtgtttcttcataggaattttctttctttatttgagatgggggtctcactttgttgcccaggctggagtgcagtggtgtgtgatcttggctcactgcagcctcccctcccgagttcaagcgattctcctacctcagcctgctgagtagctgggactacaggcatgggccaaca

SEQ ID NO: 259184 - DNA, 616 bp, Homo sapiens
gtacagaatccagtcccttgactctcaggtccccagaacactcacttcacgattttgttgacctcttctgtcaacttaaacctggcactctcttggctggctttctctgctctttctgggcactccaaagcttctgtacttacatgctacaattccagtcacaggaagatgctgagttctttagtcccagatccatattcctgagaaaacctaattgcctaggctcaggtcataactctgtrtctgtttcagttgattatggctggcctactgcccctctgtatggtggtggggcaaaagttcccagagagaggcaggggtgacaggttgtctcaaatgctaggcagacatctggagtggtaaccactacatctgttcacagtgagcacatccttgcagggaaactgggttaatcatctatattattgaaactcagaggtatagtgtttcttcataggaattttctttctttatttgagatgggggtctcactttgttgcccaggctggagtgcagtggtgtgtgatcttggctcactgcagcctcccctcccgagttcaagcgattctcctacctcagcctgctgagtagctgggactacaggcatgggccaaca

SEQ ID NO: 259185 - DNA, 616 bp, Homo sapiens
gtacagaatccagtcccttgactctcaggtccccagaacactcacttcacgattttgttgacctcttctgtcaacttaaacctggcactctcttggctggctttctctgctctttctgggcactccaaagcttctgtacttacatgctacaattccagtcacaggaagatgctgagttctttagtcccagatccatattcctgagaaaacctaattgcctaggctcaggtcataactctgtatctgtttcagttgattatggctggcctactgcccctctgtatggtggtggggcaaaagttcccagagagaggcaggggtgacaggttgtctcaaatgctaggcagacatctggagtggtaaccactacatctgttcacagtgagcacatccttgcagggaaactgggttaatcatctmtattattgaaactcagaggtatagtgtttcttcataggaattttctttctttatttgagatgggggtctcactttgttgcccaggctggagtgcagtggtgtgtgatcttggctcactgcagcctcccctcccgagttcaagcgattctcctacctcagcctgctgagtagctgggactacaggcatgggccaaca

SEQ ID NO: 259186 - DNA, 616 bp, Homo sapiens
gtacagaatccagtcccttgactctcaggtccccagaacactcacttcacgattttgttgacctcttctgtcaacttaaacctggcactctcttggctggctttctctgctctttctgggcactccaaagcttctgtacttacatgctacaattccagtcacaggaagatgctgagttctttagtcccagatccatattcctgagaaaacctaattgcctaggctcaggtcataactctgtatctgtttcagttgattatggctggcctactgcccctctgtatggtggtggggcaaaagttcccagagagaggcaggggtgacaggttgtctcaaatgctaggcagacatctggagtggtaaccactacatctgttcacagtgagcacatccttgcagggaaactgggttaatcatctatattattgaaactcagaggtatagtgtttcttcataggaattttctttcyttatttgagatgggggtctcactttgttgcccaggctggagtgcagtggtgtgtgatcttggctcactgcagcctcccctcccgagttcaagcgattctcctacctcagcctgctgagtagctgggactacaggcatgggccaaca

SEQ ID NO: 259187 - DNA, 588 bp, Homo sapiens
tgggtaattttttgtttttttgtagagatgcaggtctcactgttttccaggctggtctcaaattcctgggctcaagtgatcctcccacttcagcctyacagtgttgggattacagtcacgagccactgtacccaaccatatgtcattctttagacacactgcttactaaatttctctttttaaaggatatactgaatttccggttgagccaacttaacagctaattttctattttagctttaaaacattgataagcaacatgaagcaatctagaacttaacctttaaatggctttattaaagcaatccagctatgaaaattatgcagaaatgattatctacaatcttaccagcacataagaaattcttcctctattctgaaataccatcttctcacaatatactttgatgttatgaatcaatgtctgttcttgaacattatttattgtctttctctattaaacaattccaaaataaaatttccagcacaactaaatattgttgatgataagaggattttaaaaaaaattcttttaaaacagaagcttatatacaacttagaatctaaaaccaatagatttatggtaaa

SEQ ID NO: 259188 - DNA, 475 bp, Homo sapiens
tacaaaaaataaaaataaattagccaggcggttgagaggtcgcttgagcctgggaggtggaggctgcagggacctctgattacattactatgctgcagcctgggcaatggagtgagatcttgtctttttgaaaaaaaaagagaacaacatacttcacacacacacacacacacacacaaaatcagatataagaatttatgaatcctttargttactaaaggcagaagttttaagctatttttgatgttttgcctactttctccactggaataacttaaaattaatgtagttcaaattaatgtgacatttattgggcaacaaatgagcctgccactgagatggctttgagtgataaaatggtacagaagtagacaagatgtagtctactctttcagagtttgtagactagcaggcatgtataaataagcaattatagtatagtgtaacaaatattctgatgagagaaatggcagtg

SEQ ID NO: 259189 - DNA, 345 bp, Homo sapiens
atgttatctgttgtaacttttcagctctgctcttgtagcatgaaagcagacatagacaaaacataaacgaatgattaaggatgtgttccaacaaaactttagttacaaaaccagttkgtgggctaggtttggcctgtgggccatagtttgctgatccctaaacatttgcatgacatggggtagactaatgtttaaaagtgttggctctgaagtaagatgtgagtttgaattcttgttccagtgttagctagctagacattcttggataaattccttatcaagaattttgtcaggtacctcacctgaagaaatgggactactgtaggattgatcacataagcttat

SEQ ID NO: 259190 - DNA, 515 bp, Homo sapiens
agccaatattaatttttttatcattgaagtatactcatcaaacttcagcactttcacaaaataaactgctatggtttggacatgttttgtttccaacaaatctcatgttgaaattttatccccartttggtggtgtcgggaggtggggcctaagtaggaggtgtttgggccatgggggtggatccttcatggatgtcgtggtgccattctcacggtgatgtgttagttctaactctattagttcctgcatgggctagttcttaaaaagagcctggtacctccccactctttctcgtttcatctcctgccgtgtgatctgtgcataagctggctctctgtcaccctatgccaagagtgacagcagcctgaggtcctcgccagatgcagatgtacaatcttgaactttccaaccatccagaattgtgagaaaaatacatctttttttcttcataaattacccaccctcaggtattgctttatagcaacacaaacccataaggtttggaatttgaggc

SEQ ID NO: 259191 - DNA, 495 bp, Homo sapiens
ttctacactaaaaaaattcctaagactgaataagtttctattatcatatttcagttgcgtcataggccacaagcagaaactgttgtgaacaagaggaatagatcaaatgtctgggtttggcactcactatatgtaatttgagatgctggcaaggggaagctgaagagctgcaaggggcgataacttgcatcagtttccattagatgggagaaaggatatagggatgggacgaagggaacaggggtataaactggcattataaaaacgctttgataaagttgttaaaaattactccatgaacacaaataacttgaattcaggggtggcaaccagatagatataactacaatggataaatggaatgaaaagtacatgtttaaggggaaggattgggcggccaattcagccaaggtgaaaattratgaacatataaggctgtgagacataaatccaaaaaaggaagcttagtatccagaaatgggttcaaacaatgac

SEQ ID NO: 259192 - DNA, 459 bp, Homo sapiens
cacagttttgggaatctactggcttcagcattagcagcattcaggtcaaagccatgtaaccactatgggcatggccttctttctagtgaaacattktttcatttttctccagcattttgctgctcaaaataaacacagtggaagggaaattattcattttgcaattcatcataatgttggtttgtgactttcagaaggccaattcaagtaaagaatttattacagctcaaaccggatagaagatacatttatagaacttaattagaagaaaaatatgatgagaggtaaaaaatgtcagattaaaatgaattctgtattcaaatacacacaagaaggcaaactgaatccttgaagctactgagtatgatgtatgttggctcacagctttcctggcagacacatgcacccttgaccagatgataaattaccctctttaagtgaagataactaaaatcattg

SEQ ID NO: 259193 - DNA, 641 bp, Homo sapiens
gttataatgctttcctattttgtcaaccctaacaaggtttacatgatgcacacctgtttcacaagactgtggaaatgaacataaatgcttagttacaaatttaaaaatcatttagtaggaagatttcaacccctagatatatcctatctcatttttgccgttaaaatattctgcttcttacaattaagggaaatgtagatcctaaagaatgtagagattcagaaaaaaaaattcttatacatataacttagattttagttatattaatatttgtgccactaggtgtaagccccaaaacattgatatacagtatttattatgggttttgaaggtctaataatgcatgtataatttgatactataaacacagctataattggtctacaagaaagacttccctgtacttacaaatatgtccttaattatcaaaggtgctaattgtactacattaacctaacaatataaatctatcttaaaccagaaaaataatgaaacctttaaaatacatcaacaagtaagtcaaaattataagcatgaaaagaacaatgctaamgctatgtaaattattgttacagttaagtgactttcaatttttaactctatttcccttaaagtgattcttttactcattctactaagtt

SEQ ID NO: 259194 - DNA, 331 bp, Homo sapiens
acacatatatatatatatatatatatctgtaaatgacttttgtggrtaattctacacacatttcagcaaggcatacaatgttctttagctgaatagaaatattttcagcatatatagaaaggaatttaatgctttgataatatattaataaatacctggttttgaattattatggaataagtgcatcagcaaatactgggacatagcgataaagacccccagggaggagttccaaatctcagttcaaatcactcctgtgggagggaagcagtttaagggctatggaccagaaatatttcccacgtacagaaattgtgttattctcaactcc

SEQ ID NO: 259195 - DNA, 331 bp, Homo sapiens
acacatatatatatatatatatatatctgtaaatgacttttgtgggtaattctacacacatttcagcaaggcatamaatgttctttagctgaatagaaatattttcagcatatatagaaaggaatttaatgctttgataatatattaataaatacctggttttgaattattatggaataagtgcatcagcaaatactgggacatagcgataaagacccccagggaggagttccaaatctcagttcaaatcactcctgtgggagggaagcagtttaagggctatggaccagaaatatttcccacgtacagaaattgtgttattctcaactcc

SEQ ID NO: 259196 - DNA, 541 bp, Homo sapiens
gcaaaagcctgcccacttttcctcagagctaagttatttatttccaattatcatcactgcggggttctagctccagatttagagacactgttttcttctaggtagtctgtacaaaactgtgatggcttttctccttttgacagaatgctagatccttcattttaacttatcaagctctttataaaggactaagtataatggaggtaaatgtatacagacagtaacatatagccstatcccaggtctcccaaagagcctgatgccagactgcctcttacctttctttacatctgtcccaaaacaggaaatggatgctcatttccacataacaagtccaagaagaaaatattcttttcttactataatattatatatatgtatatatgtgtttatatatatgttatatatgtgttatatatgttatatgttacatatatgttatatatgttatacatgttacatgtatgttatatatgtaacatatatgttatatatatgttatatatatatgactcaccttaccttctctttttaaacaatc

SEQ ID NO: 259197 - DNA, 331 bp, Homo sapiens
acacatatatatatatatatatatatctgtaaatgacttttgtgggtaattctacacacatttcagcaaggcatacaatgttctttagctgaatagaaatattttcagcatatatagaaaggaatttaatgctttgataatatattaataaatacctggttttgaattattatggaataagtgcatcagcaaatactgggacatagcgataaagacccccagggaggagttccaaatctcagttcaaatcactcctgtgggagggaagcagtttaagggcyatggaccagaaatatttcccacgtacagaaattgtgttattctcaactcc

SEQ ID NO: 259198 - DNA, 595 bp, Homo sapiens
gacagcctggcactagaatcagacatttctagattccaatcttggttcagcattaggacttgcagcaagttatgtaaaatctctaagctttgtgtctgtgtgttgataaaatttctttggacttgggtttcstaaatttcccactaaaatgtctatcaaagtaaagaaaaagaaactcccccaaatattctattgtaaatctaacagtaacctacaaccagagatcaggaaactgggatagagttcaaatatattttgcaacctaaaatgttacccaataaaagaacctaggaccgaaagaatctgggaagatattttaatctgcccaaccccacaagaatagaaacagatgacaaaagctatcagtccttcttcctctgaaagggtactatttctgaaggcaaacagaatatgattcctttgttatttaaataacaattttttctgcattacttcagattctgtaaatgtcaggactcagaaaatgataccccaaagtacggtacatgatattgagagggcctaagaagcaaggtttctctgacctctttccacttcattttctcccaaaagatatgtcatagaccccagaatt

SEQ ID NO: 259199 - DNA, 621 bp, Homo sapiens
actgtgcactgggtaaattttctagaacttctgaaatcacattacgtggacaactttgtatttgcagtttggtcatgaagaagactgctcttgaatgtgttcattgaagagctttttccttctgtgattgtcttttggagcatgaaagtcaaaataccaaagaatgataaaacttaatcaaaatttaaattactgtttaagatctccaaaatccttttggaaaataatttcatagtacattttataactagagcaaaaagagctaatagaggcaygttttctatagcaataactacctcctctgtgttttcacctcttcagaggctaataacactgtcaaattgatggaaaccttcctgcttactgaattatagcacctccatttacattagcataatatatgccaaaaatgaaatactatctcatttcaaagtctgtgggtttattttattacttgtagttgatatttcttgtactctaaactgtaatagtcttcagttttttttttttaaataataaaaaaaggaaggaaagaaagagggatggaaagatgaagggaaggaagaaactgttttttagtgttcttcctcccatggtagataattaataaaaacattgata

SEQ ID NO: 259200 - DNA, 621 bp, Homo sapiens
actgtgcactgggtaaattttctagaacttctgaaatcacattacgtggacaactttgtatttgcagtttggtcatgaagaagactgctcttgaatgtgttcattgaagagctttttccttctgtgattgtcttttggagcatgaaagtcaaaataccaaagaatgataaaacttaatcaaaatttaaattactgtttaagatctccaaaatccttttggaaaataatttcatagtacattttataactagagcaaaaagagctaatagaggcacgttttctatagcaataactacctcctctgtgttttcacctcttcagaggctaataacactgtcaaattgatggaaaccttcctgcttactgaattatagcacctccatttacattagcataatatatgccaaaaatgaaatactatctcatttcaaagtctgtgggtttattttattacttgtagttgatatttcttgtactctaaactgtaatagtcttyagttttttttttttaaataataaaaaaaggaaggaaagaaagagggatggaaagatgaagggaaggaagaaactgttttttagtgttcttcctcccatggtagataattaataaaaacattgata

SEQ ID NO: 259201 - DNA, 619 bp, Homo sapiens
atgtctcatatccaagtcgagtactagtagttaaatagcgttaggaaaaatagctaatgtatgctgggcttaatactgaggtgatgggttgataggtgcagcaaatcaccatgacacacgtttacctatgtaacaaatctgcacatcctgcacacgtaccctggaacttaaaataataataaagaaaatttaaaaaatacaagacttcatacttttctgaggataaagaagtagaagttgatgagtgataatggtattgatgytttctatttgcttttgaaactataagatataaataaatagaccaagagctactaagctactatttactgaatttttaccttattctaagtaattttcatatattagcttctttcatgacttgggtttagatgtgtgtgagaaactgaatgaaatataatatagctacaataccaaattcaagagaaatttggtgaggtgagcttggagataggaaggctgtagattttggatagccatgtaagtcatgtgccctttattttatgggcagtgggaaagcattgtgggttataagtatcaaattacattataggataaaatataattaaatgatttttaaattatatgaacaattcag

SEQ ID NO: 259202 - DNA, 417 bp, Homo sapiens
ataatttgtgttttttaatgtctgaattatttcattgagcataacgtcttcaaagttcattcacgttgtaacatttatcagtacttcatttctttttatgactgaataatattccattctatggatatacagtcatgtgccacctaatactttggtaaaggacagactgtatgtaggatgatgatcccataatattataatagagctgaaaattttccattgcttagtgatgtcatagctgtccttaagttgtagcacaatgcattacttatgtgttagtggtgatgctggtgtcaacaaacctgcygcacttctaatcataaaaaagtatagcacataaaattatgtacaatacataatacttgataataaataaagttactggtttatatatttactgtattatttattattatt

SEQ ID NO: 259203 - DNA, 407 bp, Homo sapiens
tcacagtcctacaactcaatgaaaaccacattttctttgtaaaaccaaccttgcaagtattaattttagctttatacacatttacaaatgcccttataataatgtccgtaygtatagtagttacctgcttaatatttaatcaactaatgttaaggagggaaatttggaatggagaggatctttagacatatctgtattggggaaggcctggtttgaatgttgatggcagttaccttttaaacagcaactaccatatgtcaagtattgcaattgtacgtagcaattataatgctatgtatatttatgatgctgctttctcttcctcagtttatagaaatactacatcctctgtgtcgtttgtattcatagttaaattgaggccatataactgatctctggccagcgaa

SEQ ID NO: 259204 - DNA, 236 bp, Homo sapiens
gacgttcaaaaatatattccttcataaaagcagagagaatatggggggagaggagggaatgttaaaatccacttttttggaacacaggarcttaaccaaaggcttacatcaactcaaggagcacttattcaagaaaaattgctgaaacttactaagaagagtgaactcttttatgttttaactttctccagtcctaaatagaaaagctggagagtgaaatgtccaaaggggatttg

SEQ ID NO: 259205 - DNA, 236 bp, Homo sapiens
gacgttcaaaaatatattccttcataaaagcagagagaatatggggggagaggagggaatgttaaaatccacttttttggaacacaggaacttaaccaaaggcttacatcaacycaaggagcacttattcaagaaaaattgctgaaacttactaagaagagtgaactcttttatgttttaactttctccagtcctaaatagaaaagctggagagtgaaatgtccaaaggggatttg

SEQ ID NO: 259206 - DNA, 513 bp, Homo sapiens
aagagtgaactcttttatgttttaactttctccagtcctaaatagaaaagctggagagtgaaatgtccaaaggggatttgaagcacactgacatatttctaagamtatggaaggacacatacatgcaagcggagggctgtgcacatgcataggaaagacttgagaagggtctaatctcttgcatctggttgacctcaaggacttgcacaagcaggaggtaaaggctaaggctaagttgtaaacttccagaatgttaaagatgtgtcctaacatgcacacagagacacttgccaaagattgggtgacttactggttcaaagcatttaatgaccagttgaccaatcattatttggctattaagctaatctagaagaaacttctgtgaccacaccaaacatggaatacagactttactgaattacctcaggaaattcacacacacacacacacacacacacacacacacacacacacagagagagagagagagagagcaaacagcagtaaaaacaa

SEQ ID NO: 259207 - DNA, 491 bp, Homo sapiens
cattataagtattctacgacgtaagtctggaaaagagaaatyaataagaaagtattggattgattaaaatgtttacttttcccctccatccttccccttctcaagcttaatggctctttctcataccaatctgatctttgttatggttattggctggccttgtttcttgttataactccacatctagaactcatttctgcatcatatacttttctgtctctccataatttcagtattagggtcctcgctcagatgcatgtcctttgtcactgaacttgacgacaggctttaaagagattttacaagtcccatttacacaaattatttattttggtcttcaacaatgttaaaatgcatgatgtaatttttatagaagagaaaacatgcttagcaagataattctgccaaagatttctctgcttaactatatagttaagtcttttcaactattttgctcatcaaagatcttgtacatcatagaagattctaga

SEQ ID NO: 259208 - DNA, 597 bp, Homo sapiens
ctagtttggtttttgttgcttgtgcttctgaggtcttagtcataaattctttgcctaaaccaccatccagaagagttttctctgttttcatcattttaatagtttcgagtgttacatttaaattcttaatccatcttaagttgatttttgtatatggtgggagataggggtccagctttattcttctgcatatagcaatccagttttcccagcaccatttttgaaaagggtgccctttccccagtgcatgtttttgacaacaactttgtcaaagatcaggtggatgtggatgtgtgatttaatttctgkgttctctattctgttctgtcaatctgttgtctattttgataccagtacaatgctgttttggttgctgtagctttgtagtataatttgaggtcaggtaatgtgatgcctccaaatttgttctttttgcttaggattgctttgtctatttgagctctttttttgattccatatgaattttaggatttttttttctaattctgtgaaaaatgacattggtattttgatagagattgcacttaaactgtagattgctttggatagtatagtcattgatattcattcttccaa

SEQ ID NO: 259209 - DNA, 597 bp, Homo sapiens
ctagtttggtttttgttgcttgtgcttctgaggtcttagtcataaattctttgcctaaaccaccatccagaagagttttctctgttttcatcattttaatagtttcgagtgttacatttaaattcttaatccatcttaagttgatttttgtatatggtgggagataggggtccagctttattcttctgcatatagcaatccagttttcccagcaccatttttgaaaagggtgccctttccccagtgcatgtttttgacaacaactttgtcaaagatcaggtggatgtggatgtgtgatttaatttctgggttctctattctgttctgtcaatctgttgtctattttgataccagtacaatgctgttttggttgctgtagctttgtagtataatttgaggtcaggtaatgtgatgcctccaaatttgttctttttgcttaggattgctttgtctatttgagctctttttttgattccatatgaattttaggatttttttttctaattctgtgaaaaatgacattggtattttgatagagattgcayttaaactgtagattgctttggatagtatagtcattgatattcattcttccaa

SEQ ID NO: 259210 - DNA, 594 bp, Homo sapiens
caagtctgcttgttggattgcaccctttatcattatgtaatgccttccattgcccttttaaatttttattggcttaaagtctattttatcaggtatgagaatagtgactcctgtacttttatgctttctgtttttatagyagatctttctctgtccatttactttgagcctgagtccttacatgtgtgatatatctcttgaagacagcagatggttgggtcttctctttttatccagcccaccactctctgccttttaagtggggtgtttagcccatttacattcgggattagtatggatatgtgagatttttattctgtcatcatgttgttagctggttgtcatgtagatttttattgtgtgattgtttcctagtgcctatgggctatgtgcctaagtgtgtttttgtggtagcaggtgtcattcttttgattccacatttagctttcccttaagaacctcttacaaggctgatgtagttgaaatgaatccctcagagtttgcttgtctgagaaagattttatttctccttcccttatgaagattagtttggtggaatataaaattcttggttggaatgtctttcctttaagg

SEQ ID NO: 259211 - DNA, 594 bp, Homo sapiens
caagtctgcttgttggattgcaccctttatcattatgtaatgccttccattgcccttttaaatttttattggcttaaagtctattttatcaggtatgagaatagtgactcctgtacttttatgctttctgtttttatagtagatctttctctgtccatttactttgagcctgagtccttacatgtgtgatatrtctcttgaagacagcagatggttgggtcttctctttttatccagcccaccactctctgccttttaagtggggtgtttagcccatttacattcgggattagtatggatatgtgagatttttattctgtcatcatgttgttagctggttgtcatgtagatttttattgtgtgattgtttcctagtgcctatgggctatgtgcctaagtgtgtttttgtggtagcaggtgtcattcttttgattccacatttagctttcccttaagaacctcttacaaggctgatgtagttgaaatgaatccctcagagtttgcttgtctgagaaagattttatttctccttcccttatgaagattagtttggtggaatataaaattcttggttggaatgtctttcctttaagg

SEQ ID NO: 259212 - DNA, 569 bp, Homo sapiens
tatatctacatctatttccagctgccaacatgtaaagaaacaattctaagatccattttaggaaatattgattatagatattaacggatggtagagtttgttatgtattattaaattgtactttatctttyccactttttctatttaggttgttgcaaaggtaattgcgacagttacttttgcaccaacctaatatgtacttttctgttctgatttattttaatttgcttttagaaagatagagttattgtttaaacaaaaattcaatgtttttgagcatatattatttattttgcatttttatttagtttgtatttctttcagaaacacaattctggaaagatacaacagtgtttaccttgaaggagcaagaactgtggatgctttgaatagacttatgttttcttatttgtgatgtgaacttttctacaagggaattatattacctttcaaataagctacatatgttactgtttcataatttctttatttttccatggaaattatttaacattttattttctgacaaagctcctgtttataagttatattttctgacaaagctcctg

SEQ ID NO: 259213 - DNA, 622 bp, Homo sapiens
catcattccaacttaacacttgattaatattcaatcacttttttaatgttattttaaaatcatgttttctttgaagactttctgaactttgaaatacaatttttaatttagaaatcattggtatttttctttttgttttaatttttacactttattaaacatcattttataaacacagaatatacattaaaaagcataataacaattttactatgsttatttctgtcattaatgggtcgctattaagagtttcaggtagtgctaatataattacaattcttaagtcaattgatggacactttgaatagagatttaaatgaagaagtttatcattggcatgcatgctgtatagtcccaaatatctcaatcctattatattaaggatgagtattatattggagtaatattttatggctttcaaaatatgttttaaattgttacttttagagataccaaccataatacctaatacctaagtaggcagagctgtagatacaatcattctgaggtgatctgaccctacactgacaataacagttgtcagtagagatcattgaaattcatatttttctactttagatgaaatgtattttgaatgtcttagctggtattcaaagaaaaa

SEQ ID NO: 259214 - DNA, 622 bp, Homo sapiens
catcattccaacttaacacttgattaatattcaatcacttttttaatgttattttaaaatcatgttttctttgaagactttctgaactttgaaatacaatttttaatttagaaatcattggtatttttctttttgttttaatttttacactttattaaacatcattttataaacacagaatatacattaaaaagcataataacaattttactatggttatttctgtcattaatgggtcgctattaagagtttcaggtagtgctaatataattacaattcttaagtcaattgatggacactttgaatagagatttaaatgaagaagtttatcattggcatgcatgctgtatagtcccaaatatctcaatcctattatattaaggatgagtattatattggartaatattttatggctttcaaaatatgttttaaattgttacttttagagataccaaccataatacctaatacctaagtaggcagagctgtagatacaatcattctgaggtgatctgaccctacactgacaataacagttgtcagtagagatcattgaaattcatatttttctactttagatgaaatgtattttgaatgtcttagctggtattcaaagaaaaa

SEQ ID NO: 259215 - DNA, 622 bp, Homo sapiens
catcattccaacttaacacttgattaatattcaatcacttttttaatgttattttaaaatcatgttttctttgaagactttctgaactttgaaatacaatttttaatttagaaatcattggtatttttctttttgttttaatttttacactttattaaacatcattttataaacacagaatatacattaaaaagcataataacaattttactatggttatttctgtcattaatgggtcgctattaagagtttcaggtagtgctaatataattacaattcttaagtcaattgatggacactttgaatagagatttaaatgaagaagtttatcattggcatgcatgctgtatagtcccaaatatctcaatcctattatattaaggatgagtattatattggagtaatattttatggctttcaaaatatgttttaaattgttacttttagagataccaaccataatacctaatacctaagtagrcagagctgtagatacaatcattctgaggtgatctgaccctacactgacaataacagttgtcagtagagatcattgaaattcatatttttctactttagatgaaatgtattttgaatgtcttagctggtattcaaagaaaaa

SEQ ID NO: 259216 - DNA, 504 bp, Homo sapiens
cagcagcctttctatgcaccaataatgaaccagctggaaaagaaatcacgaaagcaatcgcatatacaatagaaacaaaataataaataaatggataagatacctaagaataaccaatgaggtaaaaaatttttacaatagaaacctcaaaacactgatgaaagaaattgaacaggacacaaaaaatggaaagacatctcatgctcatggatgggaagaattaatattgttaaaatggccgtaatacccaaagtgacctacagatttaatgcagtctctatcaaaataccaattacattattcacagaaatagaaaaaataatcctaaaattgcagagaacacaaaagagcctaaatagccaaaataattctgaccaaaaagaacaaagctgaaggcatcatactacctgacwgcaaaatatactacaaagctatagtaacaatgacagcttgatattggtataaaaccagacacattagaaaaatgaaacagcttagagagcc

SEQ ID NO: 259217 - DNA, 504 bp, Homo sapiens
cagcagcctttctatgcaccaataatgaaccagctggaaaagaaatcacgaaagcaatcgcatatacaatagaaacaaaataataaataaatggataagatacctaagaataaccaatgaggtaaaaaatttttacaatagaaacctcaaaacactgatgaaagaaattgaacaggacacaaaaaatggaaagacatctcatgctcatggatgggaagaattaatattgttaaaatggccgtaatacccaaagtgacctacagatttaatgcagtctctatcaaaataccaattacattattcacagaaatagaaaaaataatcctaaaattgcagagaacacaaaagagcctaaatagccaaaataattctgaccaaaaagaacaaagctgaaggcatcatactacctgactgcaaaatatactacaaagctatagtaacaatgacagcttgatattggtataaaaccagrcacattagaaaaatgaaacagcttagagagcc

SEQ ID NO: 259218 - DNA, 526 bp, Homo sapiens
tgcactaaccagtcaatggaatagaaataaacccacatatatatagtagtactcttttcgcaagagtactacagcaattcaatgaggaagaacctaaacataaaagctaaaattaaaaaacttctaggcaaaaacacaggaaaaatagttttgaccttatgttagaagattatttgctacataggatacaaaatgttcaaatcactgaagaaaaaaagtaaaaaatatctgcttccatccaagtactaaccaggcccaatcctgcttagcttctgagatagtcaagatcyggcatgttgagggtggtctcagggtacaaaatcaatgtgcaaaaatcataagctttcctctacaccaacaatagacaagcagagagccaaatcatgaattaactcccattcacaattgctacaaagagaataaaatacctaggaatacagataacaaggaaagtgaaggacctcttcaatgagaactacaaaccactgctcaaggaaataagaggacacaaatggaaaaacattcc

SEQ ID NO: 259219 - DNA, 534 bp, Homo sapiens
aaaatctgctcagctaatacataagataatttgaagatatagaggacaattcagaagagtttgagggaaggaagtcaatacagcaggaggaacaagcagcaaagtgtatcaaaagaatgagagctctggggaaagactggtctttagtttcgtggtgcggaagtactagggtggggagcagaactaactacctagctcaaatattktgatattggtctaagttatttggttgcagaactggctgagggtctcaggtaatatctggctgtgttaaaatgtgtaatagataatatttcaaagttgtggcaattgtctgttttgcagaaagaccattccgatttggaacagtgaataggctcctggtgaagccaggactactgtgaggattgtggtgtagctgtttgatccttcttctgggttgtgtggaatgtggaaaacaagggtgtagtagtgatgaagggagggtctcctggaaaatttgttttcatattgacttttattaaattttaaaaggaagcaatagttaatatatac

SEQ ID NO: 259220 - DNA, 583 bp, Homo sapiens
tgaattgcttttgcaaatgaaaccagagtgtggcagaggaagctatttgtctctgacctgatgcaggtctaagttagyagttggaggctaagagactcagctttaggttaatcggcaaagataaggacaggaaatctaataggttattacaaccaaaatatctttttaaaaagtgattagaattgagtttgaaataaaggtgattggatgattacctggtagcagatgtatgtttatttgtgggaggagggtgcagggcagtgcattagttcatgagagaagagactgcaacttacagtgttttggttccagaacatgctaggattttttttctctcctggtatctggaacatttggtatccaaataattttaattctgtttaacttaatagctaactttgggtttattcattcatacaacaaatatttagcattttttgttttattacatgtaactaggcaagtcctatcatctctaggaaactgggacgagtacttaaaactaaacatgttttgtttctttgctttgatgcattgtttcatatgttatcttttttttttgagtttcagataacctgaaaga

SEQ ID NO: 259221 - DNA, 583 bp, Homo sapiens
tgaattgcttttgcaaatgaaaccagagtgtggcagaggaagctatttgtctctgacctgatgcaggtctaagttagtagttggaggctaagagactcagctttaggttaatcggcaaagataaggacaggaaatctaataggttattacaaccaaaatatctttttaaaaagtgattagaattgagtttgaaataaaggtgattggatgattacctggtagcagatgtatgtttatttgtgggaggagggtgcagggcagtgcattagttcatgagagaagagactgcaacttacagtgttttggttccagaacatgctaggattttttttctctcctggtatctggaacatttggtatccaaataattttaattctgtttaacttaatagctaactttgggtttattcattcatacaacaaatatttagcattttttkttttattacatgtaactaggcaagtcctatcatctctaggaaactgggacgagtacttaaaactaaacatgttttgtttctttgctttgatgcattgtttcatatgttatcttttttttttgagtttcagataacctgaaaga

SEQ ID NO: 259222 - DNA, 498 bp, Homo sapiens
atagtaaaccctagtatgccaatcatttagtaacttcaagattactaattaccataatgttgaagtgctaagattatcagggtataatgcattcattatgttaatgattctttatcttatccaagaatcacacattttccctgggagcaaaaagaatcaaaagaaccaactggaagcttttaataaaagtttatgcatttaagcgtgtgattaaccgacaatcatattacaagtgctttattttaaaggaaataataaaaagaaaaaactgtttataacgggtaagattttctttctaaacataattgacatttcactaactgaaattggaattaccaaagaagtgtaagacatgtcttgtgccctcaagggggaagaaatattacatacaaataatgaaactaattatagtctaaactcatagaaaaacaactacttataaagaattaaaaatgggagaaatraggttagataggagtagtcacagaagtgatgaaa

SEQ ID NO: 259223 - DNA, 622 bp, Homo sapiens
tgcttagtttttgccaggaggagcctgaatgtcagccatcaaggagtcttatcaggtagcattatcttgacagtgacccaatggccctcagtcctttgcctctggaattgatcaaactatatttacagagcctaactacatctgtcagcttataaacaacattgaaataagaatttctaccgattaatgtaaagttgtctagggacaactgtgctgatgttccctatttattataacttattttcaaaatgaggatatttgggaatggcaagcaaagacatttgtttagtaaacaccaaagatcagagagcaaaaacatcagatttttgtggaaggtattctctttaggccttggtgagaacrgactaacatcagtcctcagctaggcagtgaccaagtcctctatatttaatgtctagatgaactctctatcactggactgagaggatgctccttttgtaaattaaacaaaatgagcaactctttacgtgcagacactcttgctccaaattagagagaggaccagtgatttgattttcatttataaaatcatggtctgtttccacttatggttccttgcaattacctcaggtctctcagaaatatccagtggcctaaatca

SEQ ID NO: 259224 - DNA, 622 bp, Homo sapiens
tgcttagtttttgccaggaggagcctgaatgtcagccatcaaggagtcttatcaggtagcattatcttgacagtgacccaatggccctcagtcctttgcctctggaattgatcaaactatatttacagagcctaactacatctgtcagcttataaacaacattgaaataagaatttctaccgattaatgtaaagttgtctagggacaactgtgctgatgttccctatttattataacttattttcaaaatgaggatatttgggaatggcaagcaaagacatttgtttagtaaacaccaaagatcagagagcaaaaacatcagatttttgtggaaggtattctctttaggccttggtgagaacagactaacatcagtcctcagctaggcagtgaccaagtcctctatatttaatgtctagatgaactctctatcactggactgagaggatgctccttttgtaaaktaaacaaaatgagcaactctttacgtgcagacactcttgctccaaattagagagaggaccagtgatttgattttcatttataaaatcatggtctgtttccacttatggttccttgcaattacctcaggtctctcagaaatatccagtggcctaaatca

SEQ ID NO: 259225 - DNA, 597 bp, Homo sapiens
ctttatttatatgtgaagtgggctagcctaaattaaattattttgagtcggactttcccctctaatggaaatcagggtgactatcttctaatttcttccatcccatggtatatgttaaatgctrtggtgtctgaatttatttcctagcaacagtcaacaaaaatggctatttctgggaagcactcctcttttcacataaagaaacccaagtgaatgaacatgagaaatatgggaaccattgcctgccttccagtcgaagcttgggtccacctaacagttcccaaacagggttttgagagtcaatcctattagtatatgaggattgaaggagtaatttaaaataatcaaaataccttcccactcttctccaactccactctctcaccctaaagaaacaatgatgttgaatcctggatttcaagcaaaatgttacagaaattcaactgtccagattttcaactgtctggaataatcagtatgtgaataagccgagggttgagacattaaatctgatcacaaggaaaagtataaggctcagcagaacagagacccctcaaccacagactctccagggatcctcagtccaacatcatagat

SEQ ID NO: 259226 - DNA, 597 bp, Homo sapiens
ctttatttatatgtgaagtgggctagcctaaattaaattattttgagtcggactttcccctctaatggaaatcagggtgactatcttctaatttcttccatcccatggtatatgttaaatgctgtggtgtctgaatttatttcctagcaacagtcaacaaaaatggctatttctgggaagcactcctcttttcacataaagaaacccaagtgaatgaacatgagaaatatgggaaccattgcctgccttccagtcgaagcttgggtccacctaacagttcccaaacagggttttgagagtcaatcctattagtatatgaggatygaaggagtaatttaaaataatcaaaataccttcccactcttctccaactccactctctcaccctaaagaaacaatgatgttgaatcctggatttcaagcaaaatgttacagaaattcaactgtccagattttcaactgtctggaataatcagtatgtgaataagccgagggttgagacattaaatctgatcacaaggaaaagtataaggctcagcagaacagagacccctcaaccacagactctccagggatcctcagtccaacatcatagat

SEQ ID NO: 259227 - DNA, 572 bp, Homo sapiens
tggaagaatcttctccctcttctccaagacctgcttcacctccaggcttgtctgctctccaagaccaatgttctcccaactccccactcttcccctgacacaagagacacttctgtaatgcccttcatgctccaagttcttgtcatacmtgagaagctctggccaacagctgttgcttcaatgaatgcgttcatgggaatgaggactagatccctgagttctgggacccagaccctatcctttcactcctgctacatccttttagtttatttgcagctctactactcacggttttggctaagacctgagagttgtacaattatcatcatcaccactcaagaaagaatgtgcctataccaaacttcacctagcattctgagtaagagaagcgttttttgttagtcagtaaagtttcagagccctacttcaatcttatcagactctatattttactcagacactgcaactccagcaggtaaaatctgcttacctaaccaccaattgtggtatggcccatcttgagctctgagcctgcccctgcttaggatgggctcctcgtccaggtgaaaatg

SEQ ID NO: 259228 - DNA, 572 bp, Homo sapiens
tggaagaatcttctccctcttctccaagacctgcttcacctccaggcttgtctgctctccaagaccaatgttctcccaactccccactcttcccctgacacaagagacacttctgtaatgcccttcatgctccaagttcttgtcatacctgagaagctctggccaacagctgttgcttcaatgaatgcgttcatgggaatgaggactagatccctgagttctgggacccagaccctatcctttcactcctgctamatccttttagtttatttgcagctctactactcacggttttggctaagacctgagagttgtacaattatcatcatcaccactcaagaaagaatgtgcctataccaaacttcacctagcattctgagtaagagaagcgttttttgttagtcagtaaagtttcagagccctacttcaatcttatcagactctatattttactcagacactgcaactccagcaggtaaaatctgcttacctaaccaccaattgtggtatggcccatcttgagctctgagcctgcccctgcttaggatgggctcctcgtccaggtgaaaatg

SEQ ID NO: 259229 - DNA, 572 bp, Homo sapiens
tggaagaatcttctccctcttctccaagacctgcttcacctccaggcttgtctgctctccaagaccaatgttctcccaactccccactcttcccctgacacaagagacacttctgtaatgcccttcatgctccaagttcttgtcatacctgagaagctctggccaacagctgttgcttcaatgaatgcgttcatgggaatgaggactagatccctgagttctgggacccagaccctatcctttcactcctgctacatccttttagtttatttgcagctctactactcacggttttggctaagacctgagagttgtacaattatcatcatcaccactcaagaaagaatgtgcctataccaaacttcacctagcattctgagtaagagaagcgttttttgttagtcagtaaagtttcagagccctacttcaatcttatcagactctatattttactcagacactgcaactccagcaggtaaaatctgsttacctaaccaccaattgtggtatggcccatcttgagctctgagcctgcccctgcttaggatgggctcctcgtccaggtgaaaatg

SEQ ID NO: 259230 - DNA, 565 bp, Homo sapiens
gtgtgtctgtgagggtgatgccaaaggagattagcatttgagttactgaactgggagtcgcagacccatcctcaatctgggaaccatagctgccagcacgactaggataaaagcagrcagaggaacgtgagaggactagactggctaagtcttctggcctccatctttctcgcgtgctgagtgcttcctttcctctaacattggactccaagttcttcagctttttgactcttggacctacaccagtggtttgccaggggctctcgggcctttggccacagactgaaggctacactgtctgcttccctactttcaaggttttaggacttggactggcttccttgctcctcagcttgcagacagcctattgtgggacttctccttgtgattgtatgagtcaacactccttaataaaccccccttcctatatacatctgtcctattaatcctgtccctctagaggaccttgaataatccagctctctagtgtcagaaaacattactgtgtgagagtctagcttcaaaaccttagtgctaggtctgaggaggcagtgccagatcactt

SEQ ID NO: 259231 - DNA, 565 bp, Homo sapiens
gtgtgtctgtgagggtgatgccaaaggagattagcatttgagttactgaactgggagtcgcagacccatcctcaatctgggaaccatagctgccagcacgactaggataaaagcaggcagaggaacgtgagaggactagactggctaagtcttctggcctccatctttctcgcgtgctgagtgcttcctttcctctaacattggactccaagttcttcagctttttgactcttggacctacaccagtggtttgccaggggctctcgggcctttggccacagactgaaggctacactgtctgcttccctactttcaaggttttaggacttggactggcttccttgctcctcagcttgcagacagcctattgtgggacttctccttgtgattgtatgagtcaacactccttaataaaccccccttcctatatacatctgtcctattaatcctgtccctctagaggaccttgaataatccagctctctagtgycagaaaacattactgtgtgagagtctagcttcaaaaccttagtgctaggtctgaggaggcagtgccagatcactt

SEQ ID NO: 259232 - DNA, 628 bp, Homo sapiens
tttttccttgcaggcaaggagccagttgtactacagctggtgtctcttgagtgtgagctagattgagtgtggaaggctggcccttgtaacgtgaacatacagctaagactcatccaagaaagaagtggtatattaatttcctattactactgttaaaaataacacaaatttagtgctttaaaaagaacacaaatttattagagttctggaggacagaagtacacaaagtcagtttcatcaggctaatgtttcttttatagacttccggggagaatcaattttcttgccttttccagtttctggtggtggccagaattctttggcttgtggcccctttttccatcttcagagtgtatcacgccagcctctgcttccatgttcacatggtcttctctctgaccctgaccctatggctcatctttttataaggacttgtgattacatttagggactacttggataatccaagatcatcctcctacctcaagatcctcatcttagtcacatctgcaaagtccattttaccatgtcaagataacataacagtttccagagattargatgtgggtaggtttggggtgagggagggtatcatttagcctaccacaggcggattcaggacttctcg

SEQ ID NO: 259233 - DNA, 560 bp, Homo sapiens
ctttctaaagagtgatctagccacaactggagatttctttcattgcaatgttgtctacatccctctccatttgattttcaacaccttagctgaaagaataattttttcaacatgcaaatctgatcatactttaaaacttgttattgtcttccctgtgctcttaggctaaagaccataatccttaccaaggcccctgccagcttcctccatcaaatcttaaactgcgtatccctgttacatgtgctttggccacaccagtcttgtctcaattctttggctcctccctatttcatcccttcataatgctttgcatatgttatgtgctttgtttgggaacctttctacagcttcttcaacttggtgaacyttctctcactcttcagatcctggctcaagtaacacttctgtagagaaacctctctaaccaacatatgaacaaacacttcatcgttaaatcgtctcgtagcaccatatgtctgcttcatagccttaactgcattcgttactttatatttatatgggtatttgtttgattaatgtccaacccttccatttaggtg

SEQ ID NO: 259234 - DNA, 607 bp, Homo sapiens
aggaacttcccaggttacttttcaactgttgaaactgttacagactcaagggtcaggcatctatggtaggagcaacagcttgtgcacttactatgtacaggtttctcctataagtactttgcatgtatcatctcatttaagacccatgacaaccctccgagttaggcagtatcattatcctcattttataggtgtagtaactaacgtattgagaaattaagtaacttgcyaaagttgataggcagtgtgttaaataatatagctctttatttctttctcacataaatgaagcctaccaggaggtaggatggcattgatgttgtagcccctcagtgacttcagagactctgttctaaatttctgcacaccatcctagcacaccatttctagtatcctggtcacctcatggctcaaaatggctgctggaactccagccgtcacatccacattgcaatttagaagcagaacaaaagggagaaggacaaaaaataagccatctatcttatttatatctcactggacaaaatttagtcctatgccacaacctactcctatggcctcacctagccactagggtggataggaaatagtcttttattctacatgg

SEQ ID NO: 259235 - DNA, 634 bp, Homo sapiens
acagaagatttgctgctgatactctattagaattaatccagtaaaatgctcctaaagtctctttagttttctgggattgttcatttgtcaattaattttctttcaaggaaactttaraaaaggtttttaaatttggggattgagggtggagagtctaactaaaggtatcacttgtcctatatatattaaaaaaagatagtctaagcccacattcctggaatcagaatgaggcagaaaattggactgagttcaaagaattgtaagacaaatgattaggagcttggcagaagtgaatattaagtaaagagtaaaattaccgactgtgtatagttagattaggccagagtatgaagtgggggaggagggtaaaatagatggagctctttgagatttgtgatcctcaagtaccgctcccagggatcgaacggcaaatattctgtcaggtgactgtggatttaataatcaaaagtcattcttgcctgtgagctacatgaaagcaagggcggcactgcttcatcaaaatggcatttccttggaaaacacactgtaaataaaaagtggtagtaaaacaggctatacttataaatatcataacgtgtgagttttgtgctggaacaaaatgcagaaagtttgt

SEQ ID NO: 259236 - DNA, 634 bp, Homo sapiens
acagaagatttgctgctgatactctattagaattaatccagtaaaatgctcctaaagtctctttagttttctgggattgttcatttgtcaattaattttctttcaaggaaactttaaaaaaggtttttaaatttggggattgagggtggagagkctaactaaaggtatcacttgtcctatatatattaaaaaaagatagtctaagcccacattcctggaatcagaatgaggcagaaaattggactgagttcaaagaattgtaagacaaatgattaggagcttggcagaagtgaatattaagtaaagagtaaaattaccgactgtgtatagttagattaggccagagtatgaagtgggggaggagggtaaaatagatggagctctttgagatttgtgatcctcaagtaccgctcccagggatcgaacggcaaatattctgtcaggtgactgtggatttaataatcaaaagtcattcttgcctgtgagctacatgaaagcaagggcggcactgcttcatcaaaatggcatttccttggaaaacacactgtaaataaaaagtggtagtaaaacaggctatacttataaatatcataacgtgtgagttttgtgctggaacaaaatgcagaaagtttgt

SEQ ID NO: 259237 - DNA, 649 bp, Homo sapiens
ctgaagttttgttgattttatatatctcttcaaaaaactaactcttaattttgttgctcttttctattggtttcctattcrttattattttatttatttatgctctaatatttattatttccattcttccactaactttgggcttagtttgttctttttctaggtttttgaggtttaagtttggttgtttatttgagatctttctttttttcttaatgtaggcatttattgctataatcttccctcttacaataacttttgccacaccccacagttttggtatgttgtattttcattttcatatgtctcaagatattttttgtttcccttttgatttcttctttgacccatgggatgttcaggaatatgtagtttaatttccatgtatttgtaaattttcaaattttcttccttattgatttctggtttcataccatagtgcttagaaatgacactagatatgatttcagtcactttgggtttaagaacacagataggttgaaagtataggcatggacaaagtctctactcttattgtattgctgtttatttctcctctcagttctgttaatattcactttatatattaggtgctccaaagttaaatgcataaatatttacaattgttatattttcttgatgaattaac

SEQ ID NO: 259238 - DNA, 409 bp, Homo sapiens
caaaagatacattagcacaaggatatattaagggaaataaagagaagcataaacaatggaaatttaggacaacttggaatagaaacaagtttttgaaaagtagaagttgggcataaaattagtaggacatcatagaataattgcatcagttagagataagtctagtattttgatgagtgggtacytgttaggctttgtattaagttatctatctatctatctatctatctatctatctatctatctatctatcatcttctaatctggaccttccagggttagagcttgtctttggatgataatgcaactaaaattcaaatttgactcctactgctttggaaaaatgtctcttattttgcaaacattttgaaaacgttgcaaaggggaaattttataacacaatgaaaag

SEQ ID NO: 259239 - DNA, 409 bp, Homo sapiens
caaaagatacattagcacaaggatatattaagggaaataaagagaagcataaacaatggaaatttaggacaacttggaatagaaacaagtttttgaaaagtagaagttgggcataaaattagtaggacatcatagaataattgcatcagttagagataagtctagtattttgatgagtgggtacctgttaggctttgtattaagttatctatctrtctatctatctatctatctatctatctatctatctatcatcttctaatctggaccttccagggttagagcttgtctttggatgataatgcaactaaaattcaaatttgactcctactgctttggaaaaatgtctcttattttgcaaacattttgaaaacgttgcaaaggggaaattttataacacaatgaaaag

SEQ ID NO: 259240 - DNA, 409 bp, Homo sapiens
caaaagatacattagcacaaggatatattaagggaaataaagagaagcataaacaatggaaatttaggacaacttggaatagaaacaagtttttgaaaagtagaagttgggcataaaattagtaggacatcatagaataattgcatcagttagagataagtctagtattttgatgagtgggtacctgttaggctttgtattaagttatctatctatctatctatctatctatctatctatctatctatctatcatcttctaatctggaccttccagggttasagcttgtctttggatgataatgcaactaaaattcaaatttgactcctactgctttggaaaaatgtctcttattttgcaaacattttgaaaacgttgcaaaggggaaattttataacacaatgaaaag

SEQ ID NO: 259241 - DNA, 409 bp, Homo sapiens
caaaagatacattagcacaaggatatattaagggaaataaagagaagcataaacaatggaaatttaggacaacttggaatagaaacaagtttttgaaaagtagaagttgggcataaaattagtaggacatcatagaataattgcatcagttagagataagtctagtattttgatgagtgggtacctgttaggctttgtattaagttatctatctatctatctatctatctatctatctatctatctatctatcatcttctaatctggaccttccagggttagagcttgtctttggatgataatgcaactaaaattcaaatttgactcctactgcttyggaaaaatgtctcttattttgcaaacattttgaaaacgttgcaaaggggaaattttataacacaatgaaaag

SEQ ID NO: 259242 - DNA, 609 bp, Homo sapiens
aatcactttctcccgctgaaaattgagtttacaaaaaaggtgtgaatttagaaactaaaatagcctccttcctaagcaccyactggtgtcgatgaaaattctttgccaattcacaaagtcctatcatggttgcaaattactctgtcacaataattgttccctgttaacttttcaggcaagagtgagaggtttgttgaatggcaagaagagcatctggcatttctggtttcatatctggaatttcagcaaatgtcaaatacacatttattataagaaaaaaggaaaaaatcaatggggaaagaaaacttaaagagagcaaaaccattggaaaataatagtacctatgtactctcaggagtatgtcagaacttttcttaaattcatcgttagcatttaaaaatgaactttaatcatactctgagacaggtatttcttctaaggaattggtgcaaactgccatgagtagtagaaacaggaagaaatacaaatctctgaaaacaaatgagaaataaaacacatagattcaatcacctagataatttagatactatggtgaaacacatggagagaaacacaagccaagacatactgcgacacacaagtaagtca

SEQ ID NO: 259243 - DNA, 578 bp, Homo sapiens
tatgtcaaagtaacatgtcttatatttttattttctaaatctggcacccatatcatttttgagattattattcaccaaaacattttttttcacttaaagagaaacaacacacttttgaaaggatacttttagaagtatttggtaggaaactgaaatggcctggaatttccactaagtgagacagggaatagtattgtttgctgttattgtggagctgagccacttcatccagcttcccccattagaaaatgcttggccaacattaatttacatgtataaattaaatatgtttacatactttcgtctagaagtttagaatctgcctaccttagtacttagtatwcaatagatggtacaaaatagatctttttgagtgtaattaaaagatgcctgtgttatctaaaaaaaaaagtaccccaaacacatatggatacaatcagttccatgttaaattttatgagactgtgagttttgtcttaatataataccgatgtatttattctaaagatgttgcgccaaacatattggagtcctctcaagccgcttccagacctctttatgggccacacacaagaatc

SEQ ID NO: 259244 - DNA, 554 bp, Homo sapiens
aaatatgtccatttattatgtatcaataaaataagaggaacacaggagaggagtctcagtacccagaaggcttgctgacattggatctgagggaatctcgctcccctattcagctgtccagtggccggtcactgatctacccaccccagggcccccttcaccccagatgaagccaccgatcctcttgactagccaggttggtgccttcccagagaaaccttcctgtgcagccagccataccccccattccaactgccccacaacactccttcggctacacatgtctgacatcccagcaccttttcagaaatccagagaagtasctgtgacaaaggtcctttttctttgtcaaccttaggacctgagtcccgtgaactcagccagcattctcatgatatctctgtgacactttccagcccacaaaaacattctcactcacattctccttgcagtatccttaaaagagccctgggagggatgtattacaaaccccactttatagaaattctatttggctggtgaacgttgaattcaagctagaaattctccatgtt

SEQ ID NO: 259245 - DNA, 583 bp, Homo sapiens
agggatgtattccatgggactctggttgtaagcaacagaaatccatgaaagctcatttaaacaaataggcaacccaaaagatgaactcacaaaatccaaaggtaggtctgtagctggcacataaacatccccatctcttgcccctgcccctctcttggtgactgtgacattcctccctctctctgtctctctccaccctggttttctgtgctttgccagtgcagatgacagaaaacatggtttgtgcattaaagatacaaccacctagaaagaaactgcatgactcactcatcagtttcaaactctcagggaagagtrtctcattcttccaccccgagtcagatgcttaccccatcaactgtgaccaaaagggcagtatgtcaatgaacaaacatggtgctgctgctgtaaccagatggatggagcaagaggaggggccattaccaagagaagaaaactgggcatatgaccagggtggggggtgggtccgttaatagagagaaataatcaccgagtcatgatgccatactactgtagagcatgaaggtgagaaaatctagagaaaatgtcccatcaaacagca

SEQ ID NO: 259246 - DNA, 581 bp, Homo sapiens
gtagttttgctcaggtttgccactttgtggccatataatcttaacagttatatgacctcccaggtctcagttgcctcacctgtcaaacagaggacaaggtgttatctattttacagtgttagtataagtactgatctatgcaaagacctagcagaatgcctggcactaagcaattgctcagtaaatgttaactgatgccaagtcttatcataattataagcagtgttatctttgtatccccagttcatagtacagtactaagcacagagagagggtgggaaggaagcacgagaggatggatggacggactattacttctagcctgtatcttgtctgacttgcaggctggtacctagagacaarcagattccagtggtgtctctggatagaagggcactgaccagttctatggatcatgataccctctatggagggtcagagtgaatgaaaggcatgagatggtgactgatgattaagatggcagggagatttgggagtcatataaagaacacaggattgggaagaaattccgatgcctcagcttggggatcagatctgcccttagttaaatgcttgactct

SEQ ID NO: 259247 - DNA, 440 bp, Homo sapiens
cttttcagaaatccagagaagtagctgtgacaaaggtcctttttctttgtcaaccttaggacctgagtcccgtgaactcagccagcattctcatgatatctctgtgacactttccagcccacaaaaacattctcactcacattctccttgcagtatccttaaaagagccctgggagggatgtattacaaaccccactttatagaaaytctatttggctggtgaacgttgaattcaagctagaaattctccatgttttttattcttctgagcgtctggtgaaagcattgggttcgtttatcccagatgaagcacataaatgtatctacaaagttcaaagagttttaactgttaaatactttataattgttagattgaaccacgtgaaattgctgatatttggctatttgtatctacgacataatctaatacagtggttctc

SEQ ID NO: 259248 - DNA, 440 bp, Homo sapiens
cttttcagaaatccagagaagtagctgtgacaaaggtcctttttctttgtcaaccttaggacctgagtcccgtgaactcagccagcattctcatgatatctctgtgacactttccagcccacaaaaacattctcactcacattctccttgcagtatccttaaaagagccctgggagggatgtattacaaaccccactttatagaaattctatttggctggtgaacgttgaattcaagctagaaattctccatgttttttattcttctgagcgtctggtgaaagcattgggttcgtttatcccagatgaagcacataaatgtatctacaaagttcaaagakttttaactgttaaatactttataattgttagattgaaccacgtgaaattgctgatatttggctatttgtatctacgacataatctaatacagtggttctc

SEQ ID NO: 259249 - DNA, 605 bp, Homo sapiens
atcacatggcattctcttcccctgtgtgtgtctgtttcmgaatttccctcttctcctaaagacatcagtcattgggttagggttcactctcctccagtgtgacctcatcttaacttgattatatttgcaaaggccctattttccaaataaggtcacagtcacaggtaccagtgcttaggacctcgacatatcttcctgggggcaacagttcaacccataacatgtggggttcccagggtgaccaggaggaagaggatagagcaaggacagagattcaggaaggaagagaccggaataaagataccaggattgtgaggctgaaacgagacaaggaagcttccttcctccagcaactcgtgtctgtgttttattaacctcctagcactttacaaagagggccctcggattcaacagagagccgggctgtctgtaaaccccaccgggccccttctccaccggtgtgcatctggcagctgccatgggggccccacaggcctccctcctgcatcctgttgtctgctcctcaccagattcttggttggctgccacctaatttctttttggcctgggctaatttcttgcagtcctcgggctggcgggaagca

SEQ ID NO: 259250 - DNA, 560 bp, Homo sapiens
gatgacctgagttccaatgcggctctcctgcttctgagctttgtgattcggaaagttcataatttccctgggctgcagtgttcccatctataaaatggggagatggtccagatctttacccaggtctgtttgtgagcactcatcaggatcctgtctytagagggacctagcaaatagcctggcatgggcttggccatcaaatccctactcttgctgctttccagaggttgctacttgaaaaaaaaaaaaaaaaaaaaaaccaagatgtgttggttgatttgagatctgcaggaacaagagccggagccatgaggctacacagacctggccctgctgcctctctgcagcgtatctttttgaacaagtgacttagtcttcctgagcctcagggtgctcgtttgtgaaatgggagttgatgacaaccctcacctcctagggcagttgtcctcaccatggataatacatacattcagtagagtgcgtggtaccttgcagaatctcggttgattcactttgatatatttttttctggttgcaaatgaaatagatgttcaatgcag

SEQ ID NO: 259251 - DNA, 560 bp, Homo sapiens
gatgacctgagttccaatgcggctctcctgcttctgagctttgtgattcggaaagttcataatttccctgggctgcagtgttcccatctataaaatggggagatggtccagatctttacccaggtctgtttgtgagcactcatcaggatcctgtctctagagggacctagcaaatagcctggcatgggsttggccatcaaatccctactcttgctgctttccagaggttgctacttgaaaaaaaaaaaaaaaaaaaaaaccaagatgtgttggttgatttgagatctgcaggaacaagagccggagccatgaggctacacagacctggccctgctgcctctctgcagcgtatctttttgaacaagtgacttagtcttcctgagcctcagggtgctcgtttgtgaaatgggagttgatgacaaccctcacctcctagggcagttgtcctcaccatggataatacatacattcagtagagtgcgtggtaccttgcagaatctcggttgattcactttgatatatttttttctggttgcaaatgaaatagatgttcaatgcag

SEQ ID NO: 259252 - DNA, 560 bp, Homo sapiens
gatgacctgagttccaatgcggctctcctgcttctgagctttgtgattcggaaagttcataatttccctgggctgcagtgttcccatctataaaatggggagatggtccagatctttacccaggtctgtttgtgagcactcatcaggatcctgtctctagagggacctagcaaatagcctggcatgggctyggccatcaaatccctactcttgctgctttccagaggttgctacttgaaaaaaaaaaaaaaaaaaaaaaccaagatgtgttggttgatttgagatctgcaggaacaagagccggagccatgaggctacacagacctggccctgctgcctctctgcagcgtatctttttgaacaagtgacttagtcttcctgagcctcagggtgctcgtttgtgaaatgggagttgatgacaaccctcacctcctagggcagttgtcctcaccatggataatacatacattcagtagagtgcgtggtaccttgcagaatctcggttgattcactttgatatatttttttctggttgcaaatgaaatagatgttcaatgcag

SEQ ID NO: 259253 - DNA, 567 bp, Homo sapiens
tcctagttactctgttttcagtgtccaggctcttagtattgagtgacctccaagtcaggttggccactcctttaaccactgggcatccacatgggaccacaaattccagttgattcctttatcttgttcggaatctgatttgctcttctctgcttatatccaccagcagctctccttcaccttctgggtgaattctaagctttctggtcaggcctttaaggctggtggtctgtgatggatcatgcttccacctcgtctctcatcatcacctgcaactgacgccacagcatggcagctgcagagggtctccagcatacattagtctcaatgcacacccggagggccctttctccttctcttatgtcgtctgctccaggggatcatcctgactccctactctgtcccccttccaggtcccttcaccccctatgcttccctccagcaagatattagtrtcacagccatgcacctgcagcctgtcttccttcaggccttgcccccatattcagcttgttgctccaataataaagcatagcgacagagctcacctttgagctccggagacag

SEQ ID NO: 259254 - DNA, 484 bp, Homo sapiens
atggggatgtggttctgctaatttatcgactccgcagggaaacttcaggtgcctcacactcagccttcacccaagttcctccttgtgtgagagaggctgaccacaccagggagtgcgaatggccagatgcctcacagagaagacactgatgtccacttgtgggagggaacttgtgtaggttggtcaggggccccaccatgcgagaccttgaggttaaaataaggacaatcccaaaacatcaagtctgggctcatcccttcaaaaccagtgacatgctggcatcagcttctgctcacactgcctcacaaagaaggccaagcctcccattctccccctgccaaatggcrtgaccacaatgggaaaggtacacggtaatgaaattgatcccaaggaaacccgatgccggtactctcttcccactctgcggttctgccaagcaccttgcctgggcacttgtgtgtgtgcaagactctacagtgtgttg

SEQ ID NO: 259255 - DNA, 595 bp, Homo sapiens
caagtgagcagtaacaaggaatcaggaagatgggtgtgagttggccatgccaaagatattttctggagctgggatggcaacatgggtattccaggcaagactggccaatacctccaaggtctgaagatagaggaagccatttgaaataccttctccattcaatctctgcaatcttgtgaaaaattcattggttttttattagcctatttttcagatgggaaaattgaggcccaggttgtaccttgcttatgatcaccttgctaataaatggtagagctgttcactccaaagcattcacaccagcttytgagaatagaggcttttataaaacaagcaaatgcaaggaggatgggactcgtgggcaggttcatgggcctaggttctaactgaagatgtggtaccgtcactgaccatgggaaaattactggaactttctgagctccattttccacatctgttggcaaatagagaagatctgaatatgtctcaagtcagagtttgcaaaacagtatgctgcattaagcataacccctggagacaaaaaaaaaaaaaaaagttggtggtcctggatgtattttactgaggaggacactga

SEQ ID NO: 259256 - DNA, 519 bp, Homo sapiens
tctactgggtaaatcctttctgccagacattgtagtgggaaatttcataagatctttygttcaatcctgattccaattccctgatgtaaagagagttataccctctttatagatgagaaaattgaggctcagaaagaggaagtggtttcacttcttggtctgttaccttatctagatcatgtggatgctaatactgcccttgtaagacagttaagagcagtaaataagtgaaatgtacatggcacatagtaggtgtgcaataaatgggagctgttttcattggaacagcccttccatggttagcccatttcatttttggtgatgataatgatgatgatattaataatatttgtctagtgcaaactatgtccaagacagtatcaagagtttcacatttgtcatcttgactaatcccttcagttcaagagattagtatcattatgattcctgttttatagaagaggaggccagaaacaaagttacttacttgcatacagtcgcaatagccataaacagcag

SEQ ID NO: 259257 - DNA, 447 bp, Homo sapiens
caatacaagaactctgtttagaaattggtatctgcccagcacctagccaagcaagggtagacttgctcaggaattcagtcctttggaaaacagtagatggaaaaacacagatgacctcctaagatatgaagcacttaatttgtgtaagaagcatttaaatacaaaaaattaaccaagtgtggtggtgcgygcctgtagtcccagctactcaggagtctgaggcaggaggatggcttaagcctggaggtgaaggtggcagtgaactgagatcatgccactgtactccagcctgggcaacagagtgacaccccatctcaaaaacaacaaaaagaagcagcagcatttgatctgtgggccctatacttccacatatataaatgtcatcataagatcatttcaaaaaaagatagtatttaagaaaaagtttagatcacatcctagaataaa

SEQ ID NO: 259258 - DNA, 616 bp, Homo sapiens
tctggccattcatgtatattgcgtttctgagaccatactctgggaaacacatggtcctctggtggtggtgaaggtccctgtgagctagggaccatctgtcaacactcttatcactactagtgtctatccctatcaggcactagaagcacttaataaaatcttgcgaatgaatgaatgaatgatatacaaaaatatttgatactggctttagttggaacaagaaaatgaactttgtgtaccacatagacatctgtgactagagtggccgtcaccagaaaggctgctccttccagctgctatgctctaaatacaataacctgaatcttakcacgactggacttcgcctggacttcgccttggccccggctgcccaaagtttctctcaaagcttcagcttaacccctgatgtgctcaccagcaccaaggcgccctcctgagtgctttgctgggggtgggatggcgtttgtgggaaaggccggctacttctggcatttcaacggcgcctccaatccctgacctttagttgtgccccattctctccactctttcccccttctctgtcctcacgattgagtctgggctggcgaagcctactgagggaggggagtgtacacac

SEQ ID NO: 259259 - DNA, 489 bp, Homo sapiens
aagactggcgtgcatgtttgatatatatatgcaagtccaacacacacaaacataaacacacatatgacagggtctcattctgtcatccaggctggagtgcagtggcacaatcatagcttgctgtagccttaacttcctgagctcaagtgaccatcccaccctcagcttcctgagtagctgggrccacaggttcagaccacctcacctggctaatttttgtatttttttgtagagacagggtcttgccatgttgcccaagctagtctcgaacacctggcctcaaccaatcctcctgcctcagcctcccaaagtgctgggattacaggtgtgagccaccatgtcaaaccaggaatatttaaaagagtctacaaacctcattaaggaaagaaggggaaaaaagcagaaccagctgagatgggtaaattgtagtctggaggaaatctggcccacacaattttggcagcaaattggtggaaaattattccagaa

SEQ ID NO: 259260 - DNA, 513 bp, Homo sapiens
accagcggagattgccctcttcccctccagggagggggcctacaatgaaaagcacagttccctgggatccacgggccgctcccactctacgtgtgcagggcagggaaccctggagtagtcacttactgtaaagacagaaacagccccatactgaggaacaagagcctcaatacagagggaagtcacaccaaaagagtcctcacccacaaagaagggaacatctggcaaacagtgctatccaacagaactttgcaatgctggaaacactctatttgcgcatatctgttggccactgaacatctgaaatgtggcaagtgtaatggaggaactgaatttttcatttttaactagttactaatcaccacatgtgactagcagcaaccatatgggacggatatgctttagaacaagaagcccayaaaggacagggctggtaccttacccccagggagaattttcccaacaccgcagggacccattctgggtgataataggtaggggtgctaccttaca

SEQ ID NO: 259261 - DNA, 516 bp, Homo sapiens
ccagagtacccctcctgggcaacaaaaggcaagcaaaaatcccactgctactaccgcagctggtgctctctcacaagtgtcacctcctgaccggaggccaaccaacacagtccattacagcatstcccggtataataacactgcatacctcggaaggagaaaatggctgcatgacctcagctatcaccactgtctgcaccactctgactaaccaggaggtcatgagtctgtccacgtgatcagttcattactgctataagcagcactcaagaaagccaacatgctaaggctaccaataaccaaggaatttcacagaatctatgtcactcccatgccacccccatttagaggtggtactgctaacccactgctaggaaacttgaggacaggtcacatcactggatcccttgcagacattccccaacaccagtgtggaatgtggcaacttcactgggcagctagacccagaggaacaacaacacttacagtagtctggctcccagggacgcccattcc

SEQ ID NO: 259262 - DNA, 575 bp, Homo sapiens
ccaccaccataggcggaggtgaaagaagagaaagagaaagaaagaggagaggagaaaaagagaagcagaaagtccttcggaaatacaaggaggcaatgagcaacaaggtgtgcaagtattttgatgaaggatgtgggagctgcccatttggagagaactgtttttacaagcatgtgtaccctgatggccgtagagagaagccacagagacaaaaagtgggaacatcaagcagatactgggcccaacgaagcaaccatttctgagaactcaatgaagagagaacagcaaccccactgacaatgatgaagaagaggttgtcacctttgagctgggcragatgttgcttatgcttttggctgcaggtggggatgatgaactgatagactctgaagatgagtaggacttgtttcatgatgagctggaagatttttatgacttcaatctatagcaaccttgtgtggcacgtgaactggtctgctcacccagacagcagctgtcccctgtggtggtgtggcagtgcctgtgttctctcctaggcaggcctatcaactgtagctgctgtcataagaattttt

SEQ ID NO: 259263 - DNA, 642 bp, Homo sapiens
tgaaatttttatcctctaatttcctaatgtaatcatacatgtctacttttatggtttttcacttccatgtcttgcttaaagggcctcttcaatctggatttcactaattttcatctaagatttttatttttaaaaaaattttaagtatttgatgcagctataatttatgtttattatataaaataaggtgtctcatagacactgtcagcacttcccttcccctatatccttcagaatattccatgtgcccttgtagatttctagctgccagtgtctgaatccctgggcctgaaagctttataacaaacctatgaaaggccattagcaccatgcctcacaggtwcatagtaccagggaattagcaacatcaccatcaccaccaagcaaccctccaaaatgagtctccagaattggaataaaaatatccagtttccttgactggagccagctaaataatttgcagggcccagtgcataatgaaaatctgaggcctgccctgggaatatggaagtcagtacctctttcccatatacccactgccccaactggtggtggatgggctacactcaagggattgcaacctctacgtcaagaggcactcaacctagatcaagggtgggtgaaaggctctcactaaattgc

SEQ ID NO: 259264 - DNA, 586 bp, Homo sapiens
tcaacttaggaactaccttttctttttttcttaaaaaacccacttgtaagtaatactaatcagagcatatattcmaggcaacttgactctgtgtctctcaagatgtgctagattctaataacaaaacaaaaaaaaatctgtgtctcccaggtcgcagtcctcaaatttggcctaaataaactgtctgctttatcagttttgcctcagtttctttctttacgtcaacaactttatgtcctttgtgttcaacagtttaacagggggagagagagggagagatcatgagcataggagtaaagaataagcatgcccaagtttgagaagataaaatctaacaagttttaatttataagatttatctgttttacaagaaacttacacttttctaatgtaaaggtagaaaccatgtaactgtattcaatttaagttaggaaacccaaatgcaaaactcctacacatgtccagaagttcgattagagtagagaaagtggcttttctcctggtgctgctcacaggaatgtgtttagctcctttattctacctaccaatgcttcatcacattgcatgttagaagctgctattgtag

SEQ ID NO: 259265 - DNA, 587 bp, Homo sapiens
tcttaattgccacttaaaacaatagaagaaatatagctaatacattagctataaatagggcaaatataaaaaagtatcaagattacaggtttaaacctagctacattgataagtataatatatgcaaatggctaaacactgccttaaaagacagattgtcaggcaggattttgtaaagcagtatccaattatacattatctataataaacttactttaatataaagacataggttcaacataaaaagaccataaaacagataccattttctcctaatcataagagaattaaagtgatcatatgaacgttagaaaattaggctccaaacacaaaatgttaccagaaataaagagggctgtttcataatgataaaagggttaatttgtcaaaaagacataataatcctaaatttctttgcacataattacagaacttcaaaacacgtggagcaaaactcacataactgaaaggaagagcaaactaatctataattatagctgaaaaatctcaacactcctctcycataagtgataaaacaagtaggcagaaaatcagccaagaatacagaaagcttgagcaagactatc

SEQ ID NO: 259266 - DNA, 575 bp, Homo sapiens
tgggattctgggaacttagctggtgttacaggttggtttttcccacgcaatgctgagatgggatttggtgtgcaggatacttatcaaggattaacaactgtggaagaaaagaggtaggaagcaggattgggcggataaagaagttgaaatgtgacacaggcgccactagctatagtcaacaccagggggagctcctgagtacattctgttgatcagartaaattgtgatgcccctgtgtcaataacgtctcaatcagcaactggttgttggctgtctttacagggtgtgttctcagtaaggtgactctgcagctgaggaaaaccctgaatgctgacagctggggcaacaggtcacccctagaagggagtctgggtgacacatctcaacatctagcacaactagtaagtgacagagctgaaattgagcttgggttctactcattccaaggctgacaatattccttcttttcttcagttagcaaatatttttgaagactttcttagtgctaggcattgttttaggtgttaacgattcagtattgagtggaaaagaaaaacgggaaaaaaatcactat

SEQ ID NO: 259267 - DNA, 575 bp, Homo sapiens
tgggattctgggaacttagctggtgttacaggttggtttttcccacgcaatgctgagatgggatttggtgtgcaggatacttatcaaggattaacaactgtggaagaaaagaggtaggaagcaggattgggcggataaagaagttgaaatgtgacacaggcgccactagctatagtcaacaccagggggagctcctgagtacattctgttgatcagaataaattgtgatgcccctgtgtcaataacgtctcaatcagcaactggttgttggctgtctttacagggtgtgttctcagtaaggtgactctgcagctgaggaaaaccctgaatgctgacagctggggcaacaggtcacccctagaagggagtctgggtgacacatctcaacatctagcacaactagtaagtgacagagctgaaattgagcttgggttctactcattccaaggctgacaatattccttcttttcttcagttagcaaatatttttgaagactttcttagtgctaggcattgttttaggtgttaacgattcagtrttgagtggaaaagaaaaacgggaaaaaaatcactat

SEQ ID NO: 259268 - DNA, 573 bp, Homo sapiens
tacagattatttcatcacccaggtattaagcctagcacccattagatacttttcctgatcctctccctcttcccaacttccatgctctgataggccccagtgtgtgttgttcccctctatgtgtccatgtgatctcatcgtttagctcccacttacaaatgagagcatgtcatatttggttttctgtttctgcattagtttgctgaggataatggcctcccactccatccatgtccctgcaaaggaggtgatactgttccttttaatggctgcatagtattccattatrtatatatatcacattttctttatccagtctctcattgatgggcgtttaagttgattccatgtctctgctattgtgaatagtgtttacagcagttgttgtttgacttcctggactggttaatagagatagtggtctgacttcctgcaagtctgatttatagatagtagtttaacctcttgggcttgttcctgtagataatgagttggcttctgggctggttgctgcaatttgtgggtcagagttgtatttttatatatgtctatttgtatattcagtttttcaat

SEQ ID NO: 259269 - DNA, 449 bp, Homo sapiens
tattctttcttaattttaaagatagcaaaggcaagcttggtgccaatcattcctgtccaagcaagatctaattacaaagagtcattgattgtgcttagtttcaagggaatctttttagtctctttcatcattctttgttcatattcatgaaaataaaaaaaatagtgtttataaagcaattaygtcacatagcttgtcttaacttcagtgcttttttcctccttgaaaagctgtttggacttgcaaaatgggcttctgcaacccaattctctgaggcaaaagggcttttgtctccaaacacattttcctgagcaggtgccacactcttctatgttctcttcagagcagtggcagcattgcagagtgaataacaatgggacaggcatgggacttagagtcagagacactgagctccaagtctttccttatgagctctggtaccatgggca

SEQ ID NO: 259270 - DNA, 546 bp, Homo sapiens
tctgctatgttgtgtcacacagcaagactaatccctttgccctgtgacattccttcaagtgttaaaagatggaagtcccatcgtcctgacctttttcaggtcaaatatccctagaatcttcacagattccttctatatagagttccattgatgattctggttggtttttcttctacctctactattgagacactaatagatactagcagatacttaatacaaacttaaagttcacctattctgtgaggctttatcatgatccccaattaattagaggcccagtccctgatctcttggggctgatttgtaastctattatttcagccagcctggttgtatattgttagccttctccactagattgtttatgatgagcagggattgtgtctcgaccatttattttattttaccttccacaatgcttagggcaatgtgtatgagtattaatagtattgtagcagtgtgttgcatatagaaggaacacgaaaagtaacctattgaagatcctgaactgatgctctgccaccaattcttgtatccttccac

SEQ ID NO: 259271 - DNA, 551 bp, Homo sapiens
aactttgtagagctacagcagatgcagaggcagccgatgtccaaacttgagatgctgttgcagatcttagagagccttctggtccaggacatgatgtttawccctggcctgatgtgccacagatcatggccaacacccagatgcagcagctgatggggaagaaccccaagatgagctactatactccccaactcaagttcacgaggcaggtgatagagcttgtttggaatccagcgtgatgcaggagataatgcagaaccagaccagggcctgagcaacttagagagcacccccagaggctgcaatgctctctactgcatgtatacagacatacaggggcccatgtttagtgctgaccaggaacaatcccttcccttccttgtatagggacctagctcatcctcccaactgagaattgagagcccctccctaacctgtggaatccctcaccccatatctcccaggttcctgggtctggtggggagggcactggaggattgggggccagccagatgcactcgacagtgtcaaacttctttgcaattaatgca

SEQ ID NO: 259272 - DNA, 512 bp, Homo sapiens
ctgcaactggagcagctcaacaacatgagctcaatggtggggccaacctgtaggccctgattgccaaaggagaagacagcaactcagctattgagagactcctgagctccctgctctcttattcccttcgcctgtgcctcctgcctctccctcacttgatgctagcattcggttcctctgtcacatcttatcctctgcagttttctgtcccttctctcttctctctcgtcctctccaaacagctgaagtgactttagaggcatgagycccaaccctgtaggtctgagcattttggttttactgtgtgcctctaacagaatcttctctcctagtcctccctgagcagagctatttaaaaatttttcacaattttgattggtcctgcttccttgtcccacaccaccttttacaatcttcaaatctctcagtggcaggcacaatcaaagaaggaaccaactatctagctttctgaaacagggtcttccatctgtaccactaggtagggttttgtt

SEQ ID NO: 259273 - DNA, 512 bp, Homo sapiens
ctgcaactggagcagctcaacaacatgagctcaatggtggggccaacctgtaggccctgattgccaaaggagaagacagcaactcagctattgagagactcctgagctccctgctctcttattcccttcgcctgtgcctcctgcctctccctcacttgatgctagcattcggttcctctgtcacatcttatcctctgcagttttctgtcccttctctcttctctctcgtcctctccaaacagctgaagtgactttagaggcatgagccccaaccctgtaggtctgagcattttggttttactgtgtgcctctaacagaatcttctctcctmgtcctccctgagcagagctatttaaaaatttttcacaattttgattggtcctgcttccttgtcccacaccaccttttacaatcttcaaatctctcagtggcaggcacaatcaaagaaggaaccaactatctagctttctgaaacagggtcttccatctgtaccactaggtagggttttgtt

SEQ ID NO: 259274 - DNA, 590 bp, Homo sapiens
ctggcctctactggattttagtgtttatttgggctatgaaattgtaacagtgtacaagatagactctggagttggagtagagggttcarggtcttctgtttactagttctatgatcactgacaagttacttaacttctctaagctccagcttctttatatctaaagtggagtttatactagtgtctgactcattagaatgttaggattaaatgagatgacatgcacagcacttaccacttatcagagcaaagcctgatacatcttaggagctcaataactattccctaacatcaccatcaaacaataatactaatagaatactgctactaataataaatatctatttattagcttatatttatgcagttaatctggtgaaaatttctccatgcgcaactgccagtgtgtttaaatgaccagtacttcctatcctttttttatccctgagtctgctaacagtgtttatcctccatgcagaattgagccaatttatataatggttttagaagtgaggtaaataggatgagattcattagtgttggactgatttgtgcctagaagccccatgggacatttcttgacagctaag

SEQ ID NO: 259275 - DNA, 590 bp, Homo sapiens
ctggcctctactggattttagtgtttatttgggctatgaaattgtaacagtgtacaagatagactctggagttggagtagagggttcaaggtcttctgtttactagttctatgatcactgacaagttacttaacttctctaagctccagcttctttatatctaaagtggagtttatactagtgtctgactcattagaatgttaggattaaatgagatgacatgcacagcacttaccacttatcagagcaaagcctgatacatcttaggagctcaataactattccctaacatcaccatcaaacaataatactaatagaatactgctactaataataaatatctatttattagcttatatttatgcagttaatctggtgaaaatttctccatgygcaactgccagtgtgtttaaatgaccagtacttcctatcctttttttatccctgagtctgctaacagtgtttatcctccatgcagaattgagccaatttatataatggttttagaagtgaggtaaataggatgagattcattagtgttggactgatttgtgcctagaagccccatgggacatttcttgacagctaag

SEQ ID NO: 259276 - DNA, 540 bp, Homo sapiens
tgatgcatgcttgcccaatagattttaattgtttttgcatgattgttcgtatcttaacattaatacactatttttaaagcggttttagtttcacagcaatattgaacagaaacaaagtattcccttaaaccttcttcctttccccacaaactcccccactaacatccctcaccacagtggtacatttattacaactgatgaaccttatatgacgcaatgttaccacctagagtccataatttacatcagggttcactcatggtttttcacattctatggatttggataaatgaatgatgacatgtgttcatcattgtaatatcrtgaagaataatttcactgatctaaatatcccccgtgctctgcctattcatttctccctctatgctaactcctggcagacaccaatatttttactatcttcatagttttgtcatttccagaatgtataataattggattatacagtgtgtagcatttttttcaggttggcttctttcacttagcaatatgcatttaagttttcttcatggctttcca

SEQ ID NO: 259277 - DNA, 540 bp, Homo sapiens
tgatgcatgcttgcccaatagattttaattgtttttgcatgattgttcgtatcttaacattaatacactatttttaaagcggttttagtttcacagcaatattgaacagaaacaaagtattcccttaaaccttcttcctttccccacaaactcccccactaacatccctcaccacagtggtacatttattacaactgatgaaccttatatgacgcaatgttaccacctagagtccataatttacatcagggttcactcatggtttttcacattctatggatttggataaatgaatgatgacatgtgttcatcattgtaatatcgtgaagaataatttcactgatctaaatatcccccgtgctctgcctattcatttctccctctatgctaactcctggcagacaccaatatttttactatcttcatagttttgtcatttccagaatgtataataattggattatacagtrtgtagcatttttttcaggttggcttctttcacttagcaatatgcatttaagttttcttcatggctttcca

SEQ ID NO: 259278 - DNA, 606 bp, Homo sapiens
gcaggtttttgtgtgagcataatttttaaatttatttgggtaaatgttaaggacttcarttgctggattgaatggaaagattgtgtttagttttataagaatctgccaaactgtcttccaaaatggttatagcattttgcattctcaccagcagtgaatgagagtttgctctatatccttatcagcatttggtgttgtcaatgttttgaattgtgttccttctaataggtgtgtgctagcattttattgttattttaaattgccattttttttttggatggagtttcactcttatttcccagggtggagtacagtgcacaatctcagcttactgcaacctccacctcccgggttcaagggattctcctgcctcagcctcttgagtagttgggattataggcatgtgccaccacattcagctaatttttttctacttttactagagatggggtttcaccgtattggccaggctggtctcaaactcctgacctcaagtgatccactcatcttgccctcccttaaattgcaatttcttatcaacatatacatattttcatacacttaatcctcatctgtatatcttctttggtaaggtttctgtttagg

SEQ ID NO: 259279 - DNA, 532 bp, Homo sapiens
taggatgtgttttatgacttagaatgttatctgtattggtgaatgttccaaatgagtttgagaagagtgtgaattctgctgttattaggtgtaatctwtagatgtccattatatacagttaattgatagtgttgttgaattcaactgtgtccttactgatattctgcctactggatcgatccatttctaatagaggaatattgaagtctccaactataatagtggattactctatttctccttaaagttctaaccatttttgtctcatgtatttggatgcttttttgttaggcaaatacatgataatgattactacatcttcttggaaaattgacccctttattattatgtaatgtatctcttgattcctgataatttatttgctttgaagtcttctctgtctcaaattaatatagcaatcccagtttattttgatttttgttcacatgatatatcgcactctgtttatttacctttgatgtatatgtgtctttatagtaaatttcttgtagacaacatataattgggcctc

SEQ ID NO: 259280 - DNA, 485 bp, Homo sapiens
aatcctaattccttcttcctgtcccttgcattattgctgtcactcattttacttatacatgtagatttgaataagttgttgayactattttgaacaaaatgttatctgtcagatcaattgagaataagaaatataaaagtttctattttacctttacttttccttctctgatgctcttcccttcttttcatagacctgaatttctgaccaacattattttacttttctctaaataacttctcttaacatttctcacaaggcatgtccacaggcaataaagtccgtcaatatttgtttgcctgaaaaagactatttcttctttatttttgaaggataatttttcgggcacagaattcaaagttgttgttagttttttttctcaacatttaagtcacttaaatatttcactccactctcttcttgcttgcatggtttctgaggagaagttggatgtaattcttacctttgcccttctatagatgagg

SEQ ID NO: 259281 - DNA, 492 bp, Homo sapiens
gtcttggctcactgcaacctctacctcccaggctcaagcaatcctcctgtatcagcctcttgagtagctgggaccacatgcaccaccatgcgtggctagttttatgtatttttgatagagacagggtttcaccatgttgctcaggctggccttgaacttgtgagctcaagtgatccatccaccacctcggccttccaaagtgctgggattgcaggcatgagccactgtgcccagctgctttctagttgttttatamattctttgtttctttatatttctcttactgtttgtcactgtggtttggtggaattctgtagtggtaccatttgattcatttctcttcctccttagtgtgattgctttaccagtgagttttttttcttttatgtgttttcatgatggtagatattattcttttgattccagatgtaggacttctttaagcatttcttgtagggcctgtctagtggtaatgaattccctgtttttgct

SEQ ID NO: 259282 - DNA, 590 bp, Homo sapiens
gtgtggtttttagtacaggttgtggtgacattttactggggcctgggatgacagatgggccagtctttggatgccagtaagtagcagtgttaggccgagtgtgcctgtccttgggccccagggctgtgtgtgctggcacaccagagttagcgggtcctgggaggccaattcttggttctctagatggcttgtttgggtgctaggaatagcagcagtggaccaggggaataggtggattctcaagcccctgggcagcaggtgtgctgtgggtgatggcagtagcagtggtgggacaaccttctgggtcccaagtgttccatgttggcattggtggtagttgsgatgggttgtgtggaccagtccccaggccaataactggtacgtgtgagtgagtgtcagccatggtagtagtggcaggttgggtgtttctgacctcaggcccacaggggatgtcctcatgtgccagtggtgatggactagtctgcatgatctccaggcctcagtcagtgtatgtgggtaataagtggactaggaggacctatcatcaggcaccctggaggtgcatgcaggcactggctgtggtatggtta

SEQ ID NO: 259283 - DNA, 588 bp, Homo sapiens
actattaaattttaatattcaggaacatgatgtatctttttaaaaatttaggtctacttttctgcccttcattaaagttttatagtttgctttatgtaggtcttacatatttattttagtttactcgcaggcatttaggagttcattatcattatgatgaatggaataaatgtttctattacattttctgattagagattgttgataaataaactttttttgtgtgtgttaagcttgtatcacctggcttacttttcaccttggtttttaatagcctttcatttgattcttttggagattctaggagaaaattgtagaatttacaaataccaacagttttctgtatagccagagtcttactggcgaaattagaaactactttgagtatttaccacaaagggaayttaaaacaggaaagtggttaaagaggtgaaaaggcccttgaaaaaccacaccagtaacaaatagataacccaggggttaataatagcagactgaatagcagcttctagactgaagcagtaaaggaaggaggcagtgttagtggagccaaaagccaggcacacaaaagaagccagaagcatggta

SEQ ID NO: 259284 - DNA, 603 bp, Homo sapiens
gccaggcacacaaaagaagccagaagcatggtagacctgtcctttgggagaaagcaggagtcataaaggagacttagcttctgccacagaaggtgtcagaggcaaaaaggaagtgggagaaataccctagattcttccttctgcctctctgaatcctccaccggtgctttctacctgtatgagtcagtgatgccaactgaaaagaaagcatggtaaatgcggtctgtaggagctggccaactcacaatagagagcaaaggatgggtggttcaggaatggatctgagggcaggtagacctagaattggcccactttttaatatttaatcctcttaattatttttctcattttattgcattggtgaggacaatattgtagtgtgctggagataggaagtctgtgcttgttcatgactttagtaataatatttctaatgtttcagtcttaaataggatgtttgctattgcttgtaattactttttatcagatttttaaaaataaaataatttttagcacttagatgcttttayacacgcgcgcgcgcgcgctatattaatgtagcgaattatactaatagatttgttaatgctgaatcagccttcc

SEQ ID NO: 259285 - DNA, 613 bp, Homo sapiens
tcaaatgcatgcataggccagaaatattgtacaggcatttcccctcttacattaacagtgtatataagtatttagggaactcaagcgcctrtgctatttggaatagacttctaggcttaggattccaaggaaattgtgagactgttttcagtttcccaatggaatattttttttcctgattctgaccagaaggataactgaacatcattgtgtctgattcaagagatcctttcaagcacggatgagcatagagctagaattttattaagcctacaggttgtaagactgttttaagcctgcgagttgtaagactgcctgccttctacaatacttgctagtaggggaggcaaatttatcatagtacgctacatgattgcaaggatgaggggaaggagctatatagtccttacctacctctaacttcagagggctatagatatcttccaaaaagttctgaattggcttagactagtatatgaaacatcattttcaggccattccctaccatggagaagaagggatgcttgatgtttgtcctctatgatttgagggtatgtttgaacttaaagacaggtgtccagctgggtcctggagatttctgaaaaagggaggc

SEQ ID NO: 259286 - DNA, 613 bp, Homo sapiens
tcaaatgcatgcataggccagaaatattgtacaggcatttcccctcttacattaacagtgtatataagtatttagggaactcaagcgcctatgctatttggaatagacttctaggcttaggattccaaggaaattgtgagactgttttcagtttcccaatggaatattttttttcctgattctgaccagaaggataactgaacatcattgtgtctgattcaagagatcctttcaagcacggatgagcatagagctagaattttattaagcctacaggttgtaagactgttttaagcctgcgagttgtaagrctgcctgccttctacaatacttgctagtaggggaggcaaatttatcatagtacgctacatgattgcaaggatgaggggaaggagctatatagtccttacctacctctaacttcagagggctatagatatcttccaaaaagttctgaattggcttagactagtatatgaaacatcattttcaggccattccctaccatggagaagaagggatgcttgatgtttgtcctctatgatttgagggtatgtttgaacttaaagacaggtgtccagctgggtcctggagatttctgaaaaagggaggc

SEQ ID NO: 259287 - DNA, 602 bp, Homo sapiens
caagacagcagggaagagatgagcaaaggaggaacttccaaatacttataaaaccatcagatcttgtgagaactcactcacaatcatgagaaaagcatggaggaaactgcccctgatccagtcacctccctcctttgacacgtggggattacaggtccctcccttgagacatacggattacatttcaagatgaaatttgggtggggacacagagccaaaccatatcattccactcctggtccctcccaaatctcatgtcttttatacatttcaaaaccaatcacgccttcccaacagtcccctaaaatcttaactcattccagcattaacttaaaagtccaagtccaaagtttcagctgagacaagtcaaatgtgttctgcctatgagcttgtaaaaccaaaagcaagttagttacttcctagatgcaacgggggtaaaggcattgcctaaatgttcccagttaagatgggagaaattggccaaaacaaaggggctacagrccccatgcaagtccaaaattgaacagggcagtcattaaatcttacagctccaaaatgatctcctttgactccatgtcacacatccagttcacattgatgca

SEQ ID NO: 259288 - DNA, 401 bp, Homo sapiens
aagtactttgatcagaacagggcctcagtgcaggggctcatgcctgtgatcccagcactttgggagtctgaggcaggaaggttgtttgaccccaggaatttgagattagcttgggcaatgtagcaggaatctgtctctacaaaaaatttaaaaattaggtgggcataggggcacacacttgtattaccaactacttgagagactgacataggatgaccacttgagcccagaagtttgaggttacagtcaggtatgattgtgccactgcactccagactccagcctgggtgacacagtgagwccctgtctttaaaaataaaataataaactaaaacacaatttttcaaaaagaattcagggcccacaaacttggatagggaaaaaattaatctttatttgca

SEQ ID NO: 259289 - DNA, 401 bp, Homo sapiens
aagtactttgatcagaacagggcctcagtgcaggggctcatgcctgtgatcccagcactttgggagtctgaggcaggaaggttgtttgaccccaggaatttgagattagcttgggcaatgtagcaggaatctgtctctacaaaaaatttaaaaattaggtgggcataggggcacacacttgtattaccaactacttgagagactgacataggatgaccacttgagcccagaagtttgaggttacagtcaggtatgattgtgccactgcactccagactccagcctgggtgacacagtgagaccctgtctttaaaaataaaataataaactaaaacacaatttttsaaaaagaattcagggcccacaaacttggatagggaaaaaattaatctttatttgca

SEQ ID NO: 259290 - DNA, 401 bp, Homo sapiens
aagtactttgatcagaacagggcctcagtgcaggggctcatgcctgtgatcccagcactttgggagtctgaggcaggaaggttgtttgaccccaggaatttgagattagcttgggcaatgtagcaggaatctgtctctacaaaaaatttaaaaattaggtgggcataggggcacacacttgtattaccaactacttgagagactgacataggatgaccacttgagcccagaagtttgaggttacagtcaggtatgattgtgccactgcactccagactccagcctgggtgacacagtgagaccctgtctttaaaaataaaataataaactaaaacacaatttttcaaaaagaattsagggcccacaaacttggatagggaaaaaattaatctttatttgca

SEQ ID NO: 259291 - DNA, 606 bp, Homo sapiens
aatccaactccaattttctattccagtcttagttccccgtacccatcaaggaaaatattctgcccaagtaaaaatcccttccgttctcatttccttcctggcttttcttcttcttctcttacctcctggaatcctgctcatacttcaaggcctcaatgaaggtctacctagtcaccttagcaagaagaatcaatctcatccttctccaacctcatagaacactcatcccatgcaccactccctgactcatatctaggccttacattgctggttaaccctctatgcctctaattaatttcatgtgttcccaatgagtttcttcaatacagggactctttctcctacttgcttctattatatttgaaagtaccagcacagcatgtgacatgatattcatatattctaggaattcaacaaatagcatataaatgactgatttaccttcctaaaagggaagttatttttccaaatatcatttctgttcaaaatggtaattttaaccttcttagcacccacaaacakttcccttctgatatctacttgaactttcagataaaaaaaaaaaagcaagttgcagtaacatgttatgctacacaaagattagca

SEQ ID NO: 259292 - DNA, 598 bp, Homo sapiens
ggaatcctggcccattttcccttcttacataaaattcaccaaaaatttattgaatgcctactatgggcaaggagccttgccaggacacctcagctgtagggcaataagatgtcagcacttacaggtctatttctggatgctttagaataggtaaaagggcatattgaatcttcaaggagaatgtaatatttcttgatctgtctttgccccttgcccaccatgtacctctatccacacacacacacacacacacacacacacacacacacacacaaatgttacctggaagatcaaaaggtggatgctaaaaggtggcatccacctcagattttagaaaacagtcacataattgcattgcttattggaaagattcaatacactagaccaaggaacctataagaaggtatacatgtttattttcaataaaaataaatggaagtcgttgattggtytacattcttggaggagacaggtgacgaggcattcttgaggtaccagaaccctgatgattgctgctgcaggtaacttgtgaattttatgttcaacttttgctctgatgatgagtgagaagttggcttgccaccaagacattccaact

SEQ ID NO: 259293 - DNA, 602 bp, Homo sapiens
catttccctagcagtggggaagggagtagaaatgcatctcagacttgcacgaggcatgaagtgggttagctggttttcctgttttctgtagaaacagggcggatgcatccttccatgtcctctgctcctgccatgagttctctcttagacctgccttgattgtcctgcttctgatgggatagacaaaagaaatcaggaacagtaaggagcctacttcttgggaaaaactgctcagccaactggaaagtacttagaatctaaactgcccacttgggaagggggactaagtcaacctgcagtccatttattgagtacccatcrgcatcctgcaccatgctgggcactttcaggcagggtagcatcttccattttatcttattgggatttctgtgacctaatgagggtggcaatgaacccaactccctctgtaactccagagaagacagtatgtccacggtacaatccatgtttggatggacagtgtccttcaaacagctgcttgtcagtcaggcgttaggccttggtaagcaagtagatgcctcttgcctcagctgaggcttattggccgtgtcaggagccaaagatatcctccagttccttaa

SEQ ID NO: 259294 - DNA, 602 bp, Homo sapiens
catttccctagcagtggggaagggagtagaaatgcatctcagacttgcacgaggcatgaagtgggttagctggttttcctgttttctgtagaaacagggcggatgcatccttccatgtcctctgctcctgccatgagttctctcttagacctgccttgattgtcctgcttctgatgggatagacaaaagaaatcaggaacagtaaggagcctacttcttgggaaaaactgctcagccaactggaaagtacttagaatctaaactgcccacttgggaagggggactaagtcaacctgcagtccatttattgagtacccatcagcatcctgcaccatgctgggcactttcaggcagggtagcatcttccattttatcttattgggatttctgtgacctaatgagggtggcaatgaacccaactccctctgtaactccagagaagacagtatgtccacrgtacaatccatgtttggatggacagtgtccttcaaacagctgcttgtcagtcaggcgttaggccttggtaagcaagtagatgcctcttgcctcagctgaggcttattggccgtgtcaggagccaaagatatcctccagttccttaa

SEQ ID NO: 259295 - DNA, 632 bp, Homo sapiens
cctactctattttgggaaccctcttttcgtaaagaaccaggtctctgagacacagctgtggatctgatatccccctcatgcctttgacatctgagcaagagatattggagctcmaccacaatgaagatccacttcaaaaaggcttcgtggtttgggaatgctgtgcttccttccacaacaaccaccttctgtctggctgagaccatggtggcttaagggatatcacgacttccaaaggtgttctgtcagcacctcctaggatctatccctagcagactaagcagagattttttttaaagataagcaaataagcattaagagcagccaaatgatgatgcctcaaccaaggagctcatcatttctattctgaaaactgtctctgtggacaggtgggcagagcatggccatatctttttgtgacaggggagtcattgagtaattccaaaataagacaatttccttaactatgcaaatgaattcatattaataattccatgaaatgtgtctatagtaacacacggacaagagatgggccttgtaagagtggccactacgttctttgaggtctttgtcagttttacctgccacagactgtgtagactagctgcagtcaaaattcccattccctcatc

SEQ ID NO: 259296 - DNA, 539 bp, Homo sapiens
taactggttgcagttaagctggtacggtgagaatagtgggctttacaaaatgctgatatagaattcactttgcatgtgtagctagcagtcccaggcaaagggcctgagtactctggaatgaatgggaacgttattcttcatacttcatcagtggtacacacacttaaaacttgtttttcaaatggtagggatgagtatacattgatgtttcctcacatatttggcccagtccttcttgtaaataacaacaccaatgatttagaaagaggttagtaacaggaacacaatctttgtaaagataagagacctgtaacaggggataagtccacgtattttaaccttctgaactgacctctaactgattacctgccactaattcattccaaatggaacaagacaaagaaatctttacttctcctgtttgcagtattatctttctcagatcatcagcataagcaaatattttcccccagcctrcagtgtgcaagaggctctaggcacgtggggaactataaataggtacaagatcaaacccctgt

SEQ ID NO: 259297 - DNA, 566 bp, Homo sapiens
tggcgtttgcttgagtttcagcacaggtgcctctgtgcctcgtggtgrgggtcaggaagaagcagctgggacgtgctcacgtggctggtagtgttatgaagacaaggctttgggacctttctttggccatttgagccctggctattagagaaagatgatttgcctgagaggagattgaccacactctcagaaagaaggggacaaagaacacgtcaagggttaagcagccttccctttaagggaggactggggcacaagatggaagatgaaagggagcagagtggcaattgcagagctggaaaggggaattttgttcttctagatagcaaaagccaggactgtcgctgtgtgacttgaaagctaggtcactggtgggcttcgtgcagcccgtcacaggggagccatggtgggcctcgtctctgccgtatctgctgcctggaagctgagactggcctaaccacatcacaccattcccagacccaggcccaggcccaggcccgggtccctctggttttacaaaatgtccgctctctctcgcttcacacagaggctattattagcaagtg

SEQ ID NO: 259298 - DNA, 566 bp, Homo sapiens
tggcgtttgcttgagtttcagcacaggtgcctctgtgcctcgtggtgagggtcaggaagaagcagctgggacgtgctcacgtggctggtagtgttatgaagacaaggctttgggacctttctttggccatttgagccctggctattagagaaagatgatttgcctgagaggagattgaccacactctcagaaagaaggggacaaagaacacgtcaagggttaagcagccttcccyttaagggaggactggggcacaagatggaagatgaaagggagcagagtggcaattgcagagctggaaaggggaattttgttcttctagatagcaaaagccaggactgtcgctgtgtgacttgaaagctaggtcactggtgggcttcgtgcagcccgtcacaggggagccatggtgggcctcgtctctgccgtatctgctgcctggaagctgagactggcctaaccacatcacaccattcccagacccaggcccaggcccaggcccgggtccctctggttttacaaaatgtccgctctctctcgcttcacacagaggctattattagcaagtg

SEQ ID NO: 259299 - DNA, 559 bp, Homo sapiens
gtcattttttttttattctgagaaatggaatgcctataatattctaaacatgtttgcacttggtggcatctatgatataaaaatcagaatggtcaagcaaacaccacatttcagagcaaggctgagaagtcctttctttagacttgaaatacttcgcctaatgttgtcaaagtggactaattttctgaatgagctccaaaatgcttcattatgagactatttctgcacacataatcaccagcggatggtataacaaggtagacatgtctttctttcctgtttgcttttttttttaactttgtactaaaatactccagcatctactttaccagcttctatcattttttaagcttccaaaggggaaaagagagttggtaagtctctgcttgtgaaatcttatgcttgctctaycaaaaaaaaaaaaaaaatcacaaaatacaaaacatccaggatgctgccagttaataaaactgaagcagaaaatgtacaagtcttaaacagttaatcagtctgaccttctttagcaagctgccaattttacatttaatgaacttaaagc

SEQ ID NO: 259300 - DNA, 581 bp, Homo sapiens
ttctatgctcttaacgtaaattattgctaattaacaagaattatatyctaatgtatgaaatacgtttaacatcggtctccttgcaaaacatttggctagtggtgttcagagaaataccaaaacgtgtttttatcattgctggtatattattaaaaatcagacaaagtgggacacaaagaaaatatgaaaatacaattctcatggtgtagtctactgatttgcattgacatcttttctcagtggcaatcaacatttcctttctgggcatctgataatttctctgcattttaatgcaaattcccctttccctaaaaaccttcctaaccctcagccatttaccccctccctcaattcaactccatcctccttcgccccaacaataccaacatttctaagctccggcctaaactccggctacaaagcagggagtcctcgattgaagtggaagggagtgggcaaataatcataataattagccgcgaattctctctacgaggggaggaagaaatagaaaataaaatgcttctacgttcaaacagcaagacagcctggaacgtctcaatgtctcagtgacagactga

SEQ ID NO: 259301 - DNA, 591 bp, Homo sapiens
tttttcttactcaaaatgatgagcgtactttatcttgggatcctcaggcacacaagtgctcttattctttctaggctttctaaaacttttgcatccataagtacttatgttcatacattcccattttccattcaatcctgctaataaaacacatctttactggtatggctttagtggttcctattttttctttctctcattagaatgaaaggcttttagagatatgtctgatatttcaggggtctggctttggtaagcatcttctttatagtgtcttgggttgattggaagctgcatattaagcttatttgtgacctcaaaaagaaaaagaaaaataaggctcaggattgccttaaaatatccatttagaacaatagtcctggcaattgtggctctacacctgttcaggaagtgctgaaawctagagagatcatcccacacttgaaagtgcctttgcaaaattataactgaggaaattatgacagtgaaagaaatcagatctaaccaactctatcttgcttctaacccttaagctgtctttgtccattcctgggcataggctgaactaactctgggaaggaacgcagctca

SEQ ID NO: 259302 - DNA, 495 bp, Homo sapiens
actaactctgggaaggaacgcagctcatgttttgactctgaaacaaaactgataatagacctttcccgaaaagacccccttcttgcctggggtccagtttgcgtttgtcagactaacaaattagctaccaamttagaaattacaatttcagggtcatgcagcctctggctccaagagtctggacctccccaaattgttcctggggataacatcactatcgtaaaacttattatcagtgcttgagacattttgcaaaccctgcagctgacaccagtaatctggctcaactaattcttccatcctacccaggaaacagatgacagcaagaaaacctcattgcaacccccgatgattccatctcaaacctgaccaatcagtactcctcagttcctacgccactatctgccaaattatctttaaaaactttaattccagaatgcttggggagctgatttgattaataataaaactccagtctcccacacagttggctct

SEQ ID NO: 259303 - DNA, 560 bp, Homo sapiens
tctagctagaagtctaacatatgtaagtccaatacaccgggaatagaattatgacatagagctatatgaattatctaacaattattttaagaaaaaatggagctcatttttggcctgggaatgtttattagaggagacaagacataaactccctagattgagagagaaaaaaataaaagtcagctctgtgcctccttgtccaaactctctaggagcaagagttggggcattttttttttttttttttttgkaaaaaggtttttcaggccatatggtctctgttgcaactgcttaagtctgtcactgtagcatgaaatcagcaatgaataatatgtaaatgaatacgcatggctgtatctcaacaaaacgtttatttacgaaaacaggccttgcccacttttggctcacaggctgtagtttgctgactccctactttaaaggagggctggagtgcctcagttggaatttcagctaagcagttttcaaaaggaggtttagtcttgtgtgtctgagttgcttaaagagaagggtgaacacaaactacagccacagacagttca

SEQ ID NO: 259304 - DNA, 560 bp, Homo sapiens
tctagctagaagtctaacatatgtaagtccaatacaccgggaatagaattatgacatagagctatatgaattatctaacaattattttaagaaaaaatggagctcatttttggcctgggaatgtttattagaggagacaagacataaactccctagattgagagagaaaaaaataaaagtcagctctgtgcctccttgtccaaactctctaggagcaagagttggggcattttttttttttttttttttgtaaaaaggtttttcaggccatatggtctctgttgcaactgcttaagtctgtcactgtagcatgaaatcagcaatgaataatatgtaaatgaatacgcatggctgtatctcaacaaaacgtttatttaygaaaacaggccttgcccacttttggctcacaggctgtagtttgctgactccctactttaaaggagggctggagtgcctcagttggaatttcagctaagcagttttcaaaaggaggtttagtcttgtgtgtctgagttgcttaaagagaagggtgaacacaaactacagccacagacagttca

SEQ ID NO: 259305 - DNA, 628 bp, Homo sapiens
atgtaacttaatatttcaaagcccttaggtctctgattagaccattactctgcacataatctcttactaaactaaattgattctttttcaatataaaagtagtacaaagcctttgaattttgaactagggaagttctgtgagctctttgaattgcaagccagwaaatagcaaatcttacttaattaataaaataatgagatagggacgaaaaacatgatgttaagacacagtaagaattgactagagctgcatttttagctgtaaatttggtgagtagactttgcttgtgagacaggcaacattaattactctgttaccatagcagattctgtattaaaaaaaaaattaaactgcaaagaagtaggaaagcatctgtgggtgcattcctttacaccaataaaataattttattgaactctattcatgtgcctacttagaatttaaattcaggagatcttataggcctgtattcattaaatattatgcaccattttatatgggaatgctcataaaaggggaatgtggaacacaattagaagaaataaattcagcatggctttggcactctataaaatctccttgtcactgtgcgtctgtaactgactccttataaccaggcacaaccaa

SEQ ID NO: 259306 - DNA, 616 bp, Homo sapiens
tgctttgttttctgttactagagatttatttgcattttctagagttttacataattggcattataaactatgtaattttttgtgtctggtttctttcactcattataactattttgagagattaatccatattattgcatgcgtcaatagttcatgcctttttatcagtcagtagtatctcattgtatagatataccacagtttgtgtagccattcagacattgttggatattgcagttgtttccaggtattggctattacaaataattcagatatcaacatttgcttacgaatccttttataaatatatgctttattttctcttggacaaatacctaggagtggaatggctatttcaattggtgagtgtacacttaactttttaagacattgccaagctattttccagagtggttatactattttacttaaacaccagtatttacgagacttttagttattccttaygctcactggcatttggtatgatgattctatttaattttaaactttcaataggtgtgtggcatattccatcccattgtaggttgaatgtgcacttctctaatgttgcatgatgtttataatttttgtgtgtgtgtttgttagccatctg

SEQ ID NO: 259307 - DNA, 647 bp, Homo sapiens
ctatctatatatattttaaaaggaatgtgggtacataagaagagtttagtaggaacatacctgcattaatattacatttcatcttcttatcatgaatgagtttgatccagatatctactattcttcctgcagaaatmtaagatgactctgattttcaatatgttagccttccatttgacctgtctgtcatgagtcatcactctaatccagatgattagactcaaaaggaaaaatataatttttcaagtttccctcaagaattatctttcaataaagagaatgaagattccctttgaaataaaactgcttttacaaatgtcaacattggcaatgtatgggaacattcccatagctgctgctatgcctacttcactggaaattccttaggcttcaatattgacccaatctttggttaaatctatcaataaaaaatcagcacctattaatctttctactatagctaattattataggtacgttgagaaaattaaaagtataaagatgatatttctttcatatcctgaatgaatgactttacaaggtaatagtaggaataagatatacaatatgaaagtgaaattaaaacaaaattacaattaaaatttcagtgaaatataacatctaaatacatgctaaaatgggaaaca

SEQ ID NO: 259308 - DNA, 654 bp, Homo sapiens
ccttgggtcaactgcagctcgttggaggtgtggataggacaattagggtctttgctccttcattagtccaagtatagcggggttagtaccaccgcagaagcagtggcagaggggcttttggttgyccctgggggctccacctctgagaaatgtggagctgttagttactgagagtttagccagtgaggtgaggcacctgtactgcttggggtttacttgttggggacaagagggatgagtactcactgggaggaaagactagtctcctctccatatggtgactgtggtgtgctacagcctcaggtgtagccctcaggctctttgtttctttccccatatcaatggtaggagggatagaaccactgctgtggcaggggcagaggtgctgttggatacctctgggattctctccccagggaaattctgggtcactacaactgggtatgtttagccatggggtgggggtaactgttctgttgtcatgagccaagggccctgcctggtgaatagtgggaggtaggggttcccagggaagagaggctggactcctctctgtataatgtctgcagtgtgccagcagtgccagcatagtgactaggctctttgttccctccccagcccaacggctatttgggtgataccctacaactgcag

SEQ ID NO: 259309 - DNA, 484 bp, Homo sapiens
tcacactcatacaaggggtgggctccctaagtcttggacacctccacccctgtggccttgcaggattcagcccctgaggcttcactcacaggttgttgagtgcctgtggcttttccagatgcagggtgcaagctgccagttgatccaccagtcttctgcctagaggagggtagctcccttctctcagctccattaggcagtgacccgatgasaactctgtaaggccttttcttcattgtcttgaatattagcatggaacatccttttagttaggcagctatctctagcaagtggttgattcacagcctgcttgaattcttctcctgaaaaagctttttctttctctgccacatggccagtctgcaaagtttcccaactttaatgctctccttccattttaaatataagtttccacttttagttatttttttttttttactccctcatctaggcataggctgttagaaggagccaggccacatct

SEQ ID NO: 259310 - DNA, 579 bp, Homo sapiens
gactgactttaaaaaagggtaaaacatagccaactaaaaatatgataagaaaatgtgaaaatcagagagtcatgcaaaacaatgcttcatatacagcactgaaaattttcaggtatatacaatgtagtaaaaattgaactaaactggtttgagaaaaggttcaagaattcagtccaggttccactagtgactcaaaacatgacttatgaatattccttgcaacgtttgttcacctacctaaaaagaataaatgttcttggaagcatggaataaaccacataacagtcattgggtatattaagtgcatttgggaggcctttagggttcaagggtttttaaattctcaatgtaatacaaaatccaaaaaataattttttttctgctagtctagttgagtaatctaagtattcatctcacagtaaatacccagattatttttctacagttatctaaagttcattatatgaagacactttctcattttcctgataaaattcatttttatcaactatcacaaagtatgaatttctatatcctctgcartctcaacaccaaagcaatgttatttccaactagtca

SEQ ID NO: 259311 - DNA, 582 bp, Homo sapiens
gaagttgcaagagtgggcatccttgacttgtcccttatcttagatgaaaagctttcaggcatttccctttgatactgatgttacctgtggtattttcatatatggcctttattatgttgaagtaatttccttctatttctaatttgttgagtttttttgaaatggggttgaattttttcaaatgctttttctgcatctatttaggtgatcataaattttatactctgttatgttaaagtggtatatcacattgattgcttcaggtatgttgaaccatctttgcatcccagagacarattccacttggttatggtgtagcactttttatgtgctgttgaattcggtttgctagtatactcagctctctgtttctgtgagttcagcatctgtggactcaagcaatcatggatcaaaaataattttttaaatatggataatttcatctgaactaaacatgtacagattttctggttgttatttcctaaacaatagaatataacaactatatacattgcatttacattgtattagatagtttaagtaatctggagataatttaaagtatatgggagaatgtgtgta

SEQ ID NO: 259312 - DNA, 582 bp, Homo sapiens
gaagttgcaagagtgggcatccttgacttgtcccttatcttagatgaaaagctttcaggcatttccctttgatactgatgttacctgtggtattttcatatatggcctttattatgttgaagtaatttccttctatttctaatttgttgagtttttttgaaatggggttgaattttttcaaatgctttttctgcatctatttaggtgatcataaattttatactctgttatgttaaagtggtatatcacattgattgcttcaggtatgttgaaccatctttgcatcccagagacagattccacttggttatggtgtagcactttttatgtgctgttgaattcggtttgctagtatastcagctctctgtttctgtgagttcagcatctgtggactcaagcaatcatggatcaaaaataattttttaaatatggataatttcatctgaactaaacatgtacagattttctggttgttatttcctaaacaatagaatataacaactatatacattgcatttacattgtattagatagtttaagtaatctggagataatttaaagtatatgggagaatgtgtgta

SEQ ID NO: 259313 - DNA, 582 bp, Homo sapiens
gaagttgcaagagtgggcatccttgacttgtcccttatcttagatgaaaagctttcaggcatttccctttgatactgatgttacctgtggtattttcatatatggcctttattatgttgaagtaatttccttctatttctaatttgttgagtttttttgaaatggggttgaattttttcaaatgctttttctgcatctatttaggtgatcataaattttatactctgttatgttaaagtggtatatcacattgattgcttcaggtatgttgaaccatctttgcatcccagagacagattccacttggttatggtgtagcactttttatgtgctgttgaattcggtttgctagtatactcagctctctgtttctgtgagttcagcatctgtggactcaagcaatcatggatcaaaaataattttttaaatatggataatttcatctgwactaaacatgtacagattttctggttgttatttcctaaacaatagaatataacaactatatacattgcatttacattgtattagatagtttaagtaatctggagataatttaaagtatatgggagaatgtgtgta

SEQ ID NO: 259314 - DNA, 582 bp, Homo sapiens
gaagttgcaagagtgggcatccttgacttgtcccttatcttagatgaaaagctttcaggcatttccctttgatactgatgttacctgtggtattttcatatatggcctttattatgttgaagtaatttccttctatttctaatttgttgagtttttttgaaatggggttgaattttttcaaatgctttttctgcatctatttaggtgatcataaattttatactctgttatgttaaagtggtatatcacattgattgcttcaggtatgttgaaccatctttgcatcccagagacagattccacttggttatggtgtagcactttttatgtgctgttgaattcggtttgctagtatactcagctctctgtttctgtgagttcagcatctgtggactcaagcaatcatggatcaaaaataattttttaaatatggataatttcatctgaactaaacatgtacagattttctggttgttatttcctaaacaatagaatataacaactatrtacattgcatttacattgtattagatagtttaagtaatctggagataatttaaagtatatgggagaatgtgtgta

SEQ ID NO: 259315 - DNA, 554 bp, Homo sapiens
gatggtagctgtttggatctatcaaaaattatggttcttcagtgatctttctgctgtgtctctttgtttaatcctaaaaaatacacagtgaaggagctcccaacaccactttgataaacaaytatttgatagtctgcattgttagactatgttagactttaaactacttcttatcaagtgggaaattaaatgtgttgagctcttactaggtgactggctctgtgctcaagtttgacaggtgctatcacattcaactctcacaatgaccatgaggaaactgaagcttaaagagattttgttattttctaaggttacaaagctgaaaaaaggcagacctaggagttgaagcaggtctgttttcctgagcccatgccttccaacacagtgtgatagttctctagttttaggtgttgtattagttatctaatgcagagtaacaaatgacaacacatttagcagattaaaacaatacatatttattattttacagtttctgtaggtcagtaattcaggcagtttcattgcactctctgatttagggtctcagcagcttg

SEQ ID NO: 259316 - DNA, 643 bp, Homo sapiens
atcccatacaagagaagtgtgtgcttgggtgtgtataactgtactacagaaaggttaatcaccaaaatgtttgttaaggttcctctctgggttacagatatgtgatttttattttcttctttatgtgtaactgttttactagacattccataaagagcatgtggcattttgataatcaaaagctcattttattcagaaaaaaatgattctctcttcaaaacccacctaatctcttaattatttgctaaaatgaagcaagaattctttcacttagtaaaggatttactgctttgtgaagaagaggagtctatgaaactcgacagtgtgtawggcattagaaattacatgatttggcattatatgaaaaagatacctgcttacgtatgtttatcacagcacaattcacaatcgcaaagatatggagccaacctaagtgcccatgaactgatgagtggataaagaaaatgtggtgtatatgcaccatggatactactcagccatcaaaaacaacgaaataatgtcttttgcagcaacttggatggagctggaggccattatcctaagtgaagtaactcaggaatggaaaaccaaataccgcatgttctcacttataagtgggagctatgctatgggtatgcaaagg

SEQ ID NO: 259317 - DNA, 554 bp, Homo sapiens
gatggtagctgtttggatctatcaaaaattatggttcttcagtgatctttctgctgtgtctctttgtttaatcctaaaaaatacacagtgaaggagctcccaacaccactttgataaacaattatttgayagtctgcattgttagactatgttagactttaaactacttcttatcaagtgggaaattaaatgtgttgagctcttactaggtgactggctctgtgctcaagtttgacaggtgctatcacattcaactctcacaatgaccatgaggaaactgaagcttaaagagattttgttattttctaaggttacaaagctgaaaaaaggcagacctaggagttgaagcaggtctgttttcctgagcccatgccttccaacacagtgtgatagttctctagttttaggtgttgtattagttatctaatgcagagtaacaaatgacaacacatttagcagattaaaacaatacatatttattattttacagtttctgtaggtcagtaattcaggcagtttcattgcactctctgatttagggtctcagcagcttg

SEQ ID NO: 259318 - DNA, 557 bp, Homo sapiens
gtcaccaccaccacttcaaattgaaattccattgtgtttatgatatcttacttttgatacttctcatcagtggctgtaagatccacaaagtgctatcagctcgtggttaactctaaatattattcatgackagttcaaggtagctgctgctttttcttggttcaaatttgtgaagcttgcgtcatcatctgttaatattgcatgcccatccccactgggtaccagacactgcattactctaaaaatatacttccttttccaccaggctttttgagtagtctgaaaactggtttaactgcatgcttttatttttggtgttggtggcaatggaaaatggggtatgataatagtttcactgacatcaagaaagcttgggtttgtttttcctgcacagaatagaattatctctgtaaaacatacatctgactttgtttctcttccatgcttaaaatccttcagcagctcccccttaagcacatgataaagtccaaacttcacgtccacatgacttacaaaactttgctttttctcccagcatgcctctcccttatatactc

SEQ ID NO: 259319 - DNA, 653 bp, Homo sapiens
ctctttctgtttatgttggttgacaagcccttaacatctgccaggtgctgtattgggcactatttacttctaacaaccttttgaggtaagtgtgatcatccccacaatatggctaaagaaaccacagctcacagagcttaaatgactttgcccatgccacccagctagtaagtggaagagccagcattgaagtccagggctgtctgattctaaagccacatattttaataacaatatcacccgaggattctgagaccactcaacaaaccaatgtcacttaaggattttttagagactactttaaaagcaatgtgaataaaatgcttaatgaagaaccaaagctatatgaactgagttctcagtccctgccagtactgtgctagaaactgtccatgtatgctctcattcaagtatctccatagcctccatagatcttgttagttctattttgcaggtgaggaatctgaggctcagaaagaggaaggtaacttgcccaaggtcacacacagtggaggcaatatttaagtccagatctgcttgattttaaagccctatattttactaacaacatcacccagagcgttcctagggaaaatgytcattttcagaaaaaaatccagaaaatgcttaccaaatagcaacccctaagttag

SEQ ID NO: 259320 - DNA, 458 bp, Homo sapiens
tttatcacgtggctttctttgttaatgaagcacagatcatgtttgcaatgtgataattctgctccttggaaagcctattattctgaaggcctaacatcctcagaaaacattcactgaaagcccactagaataacagaatgtagggctattgatccagcagtcctacttctaggactgaatacagaagaaaatatgagagcagaaataaatgttatattttatattatataatcatataagttgtttaaaaaktttcactgttatagataactgtaagagaaacatcattatatataatatgtatattattatcgtgctatattgtacattaaacatataatttataaattaaatctaatgacatatttatatcttatgcagaatgatgtctataccattgtttatttataacattgaaatttttaaagtccattgaatggaattggttaaataaatta

SEQ ID NO: 259321 - DNA, 667 bp, Homo sapiens
tgctgcgacatatcagcttgtcctcggattggaacaacgaggaagaactttccttcgctctgtaatgaaaacgttattggagaaattgttcttgtgcgttccttttctagaactaagtctggacttttacaatagtattcatcagttgaatggctctttcccctttatccaagtagccacttctaatctacagcagcaattgaaagattcggttaattttaaaaggcacaaagttacaaaatagcgtcgttgctctctgcttttaatttctcagttgactgggagttcaaatgagatttgtcctagcatttcaggagtgaagatgtacaagtgaactgtacaagtgtccaccccttcccgagcttcccggaactcacttagggaagagaattttaaaactctccgttgtggctcatttgtacttctagtycttccctctgattagctccagtaggacgtgttccttcttttcaaaagtgttttgaggcatcagggaggcagtatagagttacagtggcatttaaaggtataagactcagagttgaaatccccagtccttctaagaagagctgtgcaatcctgagcatgtcacttggttcctagaagcctccatttcttcatccataaaagaagagattggcaaaccagttttagaagatgttgcaag

SEQ ID NO: 259322 - DNA, 573 bp, Homo sapiens
ctactaaaaattataaataaataaataaacaggaaaaaagagacatatcactgaaataccttatgtggactttatttggaccctgattaaaacaaaccaattgtaaaaattcattctggggaaaactgggagagtttgaacgtgggctggaattgaatgacattttaaaagtattgttaatttgtattaggtatgataagtatattatgcttatctcatttttatactctttctgttagaaatacatataaagtatgtatgggtgagatgatatgatgtcttggagctgtcataaaatatcccatctcctctccttctatctccagaaaggcatgggaaaagaaatatgaaaygtaaatggtaaaatgttgaagccaggtgacaggttatgggaattcactatactattctatctactttagtgtaagcttgaaaattttcatgatcaaacattttttaaaaaataaagtaagaaagaaaagagagaggaaactatcataacaatttcttaaatgggttatgatttctgatgaaattagattaaaaaccatgtcattcaaaaagagaaaatgg

SEQ ID NO: 259323 - DNA, 528 bp, Homo sapiens
aaagaaatatgaaacgtaaatggtaaaatgttgaagccaggtgacaggttatgggaattcactatactattctatctactttagtgtaagcttgaaaattttcatgatcaaacattttttaaaaaataaagtaagaaagaaaagagagaggaaactatcataacaatttcttaaatgggttatgatttctgatgaaattagattaaaarccatgtcattcaaaaagagaaaatggacatgatgaagatacggaagcaggattgtgtctgatatgtttggaaaaaaagagccagcagaaactaactagggtgtatttcagcagaaaggaatcttcaaaagtctactgagtagctcaccaaacctaaggaaaggcagcagaccctaacatataagccatgcaactgggaacaactccaaaatctatgccatagaactggtctagtgaaggcacacccacaccactacacctcccaccactattgtatcactaaacatcgtagcttgcacctccagtactgcacacaggac

SEQ ID NO: 259324 - DNA, 528 bp, Homo sapiens
aaagaaatatgaaacgtaaatggtaaaatgttgaagccaggtgacaggttatgggaattcactatactattctatctactttagtgtaagcttgaaaattttcatgatcaaacattttttaaaaaataaagtaagaaagaaaagagagaggaaactatcataacaatttcttaaatgggttatgatttctgatgaaattagattaaaaaccatgtcattcaaaaagagaaaatggacatgatgaagatacggaagcaggattgtgtctgatatgtttggaaaaaaagagccagcagaaactaactagggtgtatttcagcagaaaggaatcttcaaaagtctactgagtagctcaccaaacctaaggaaaggcagcagaccctaayatataagccatgcaactgggaacaactccaaaatctatgccatagaactggtctagtgaaggcacacccacaccactacacctcccaccactattgtatcactaaacatcgtagcttgcacctccagtactgcacacaggac

SEQ ID NO: 259325 - DNA, 554 bp, Homo sapiens
gatggtagctgtttggatctatcaaaaattatggttcttcagtgatctttctgctgtgtctctttgtttaatcctaaaaaatacacagtgaaggagctcccaacaccactttgataaacaattatttgatagtctgcattgttagactatgttagactttaaactacttcttatcaagtgggaaattaaatgtgttgagctcttactaggtgactggctctgtgctcaagtttgacaggtgctatcacattcaactctcacaatgaccatgaggaaactgaagcttaaagagattttgttattttctaaggttacaaagctgaaaaaaggcagacctaggagttgaagcaggtctgttttcctgagcccatgccttccaacacagtgtgatagttctctagttttaggtgttgtattagttatctaatgcagagtaacaaatgacaacacatttagcagattaaaacaatacayatttattattttacagtttctgtaggtcagtaattcaggcagtttcattgcactctctgatttagggtctcagcagcttg

SEQ ID NO: 259326 - DNA, 566 bp, Homo sapiens
gttagcatctcggtgatcaacgtctttagcatttgtcatttggggagctcttatttttcagtgtcttcccaccatgtttagctggtcttgatgccaccttttgaaagagaatttttctctacaaatgaataaagtgatagattaactatttgaatatgattacccaggtgaaagaaagagctaaaagattcccattttgtgtcatttttgttttcttctttttaattttaakttttaaaaatatagagtgcttcatggtccagttttagtatatgttctgccaaagtgagcactgaaagatttcttaagtcctttctttatttagcttgcattcaaaaggtaagtttggaaaaagcatgtggtgtcatttaataaccaatggcagagtcgtttggactttgctttggaaattctatgacaaagatgactcttctgccaagtactctgattgatcactagaatgtacttgctgaagacctctgctggcaatgtgatgttgaactagttgaaacatatgatctgacacaaaagcacagattaagccaagtattcatgttctgatatgg

SEQ ID NO: 259327 - DNA, 566 bp, Homo sapiens
gttagcatctcggtgatcaacgtctttagcatttgtcatttggggagctcttatttttcagtgtcttcccaccatgtttagctggtcttgatgccaccttttgaaagagaatttttctctacaaatgaataaagtgatagattaactatttgaatatgattacccaggtgaaagaaagagctaaaagattcccattttgtgtcatttttgttttcttctttttaattttaagttttaaaaatatagagtgcttcatggtccagttttagtatatgttctgccaaagtgagcactgaaagatttcttaagtcctttctttatttmgcttgcattcaaaaggtaagtttggaaaaagcatgtggtgtcatttaataaccaatggcagagtcgtttggactttgctttggaaattctatgacaaagatgactcttctgccaagtactctgattgatcactagaatgtacttgctgaagacctctgctggcaatgtgatgttgaactagttgaaacatatgatctgacacaaaagcacagattaagccaagtattcatgttctgatatgg

SEQ ID NO: 259328 - DNA, 537 bp, Homo sapiens
agcagggcacagcagcagcagaagtactgcttcttgcagagcagggctagcccataggcagcgtgcccacagtagcagcttagatgcagttcttcagtcatatttacatccacttttaattatatgcaaattaagatatggattatacagaattttctagaaatagggtggtaacttccaagtcatcaggccattgccatggaaaggggcaccaacttctgggtgttgccatgacaatggtaaattgacatggcacagtgatgggtgtgtcttatgaaaagctgctttcaccccatccatgttttagctagtcctcagcttggtccagtgtccaagccctgcctttggagtcaagtcccaccycctacctcaatttcaggtacctggctccattggcctgcctgaagccttctcaactctcttgatttcccaaggtgggattcagcagccatgagaatgtgagccacagacctccaactgcaggaagtataattgactaagactcctagcttctatgctgtgaagcgcatcactgtt

SEQ ID NO: 259329 - DNA, 530 bp, Homo sapiens
tgcatttctcaaggctgatttcaggaattcttccatagaaccactgtcagacattaacagtttcacaagggaaagtgcaaacaactcaagagattcctcttctggttcattttgacaattaggactccccatccctcctgccattttatattcttggttctctttcttcagcatgtaatggtttaaataataacaacacacactcacacacaacacacacaccacacacacctccaaaactaagcaataacacatagacatcataggaatcaaccttcagagatgaaggctgtcactgagtgaaatagtctatgttctcccgcagagcaattcaactcttcaaatcayggttcctctagaaaagggttttctatcacatttgtataaccaacttttttccccaaactaagagatacatagccccaaagtaacactaagtatttatcaatcttcttcaaacagaaaattgcgccgtttgggagaattgtaattaccagatttgttttcctgggtactaaagcttaatgttt

SEQ ID NO: 259330 - DNA, 532 bp, Homo sapiens
tctgccactctgcactgttcaaaagatgagtgataatgagatgcttcctaattaccagggtttcagccttgtcagattacaaatctcttcatgagatgtagctaattggcactgtcaaggagagaaatttagaaagacctggataataagcagatattggattcagttaggatgactattttctattgtttctkttcttagccctcttacataataaatcttccatctcttgaaaggatggagattgtgtcctttctccttcaacttcaatggtgtgttggtaagaaaagaacttagtgtaatattatctttactactcactggagggtttctagaacctaaacctgaaattacatagatgacatctcagtagatttgtttttaaggctcaataacatgtcttgtgaaatgaacttgggtttttaaaatgaaagacaaagtttcaaatcagtcctgctacttatcatacatgggaatgtgagtagcttatgtcactactcagagactccatttcttcatttgtaaaacaaag

SEQ ID NO: 259331 - DNA, 594 bp, Homo sapiens
cctgcttctgcctctggaagtgctgggattacaagcatgagccactacacctgtcctagagaggattttgaagctttgcagactgtacagtccrtctcaccctcccaactctgaccttatagcataaaagcagtcatagaccatatataagtgaatggacatagctgtattccaatagaactttatttatggataccaaaatgtgaatttcatataatttgtatgtgtcatgaaaaactatcttttccatttctttctttcttttttgtttgtttgtttgtttgtttgttttgggacagaatctcactctattgcccaggctagagtgcaatggtgcggtctctgctcactgcaacctccacctcccaggttgaagcgattatcctgactcagcctcctgagtagctgagattacaggtgggtgccaccacgcccgactaatttttgtatttttagtagagacggggtttcaccatgttggtcaggtggtctccaactcctgacctcattatccacctgccttggccccccaaagtgctgggattacaggcgtgagccactgtgcctggccttccatttcctttctaccattct

SEQ ID NO: 259332 - DNA, 652 bp, Homo sapiens
gtataactgatgattctgtttttagagctgatggttttattggatgtttttgcartgtttcaaacaactgtcttttcagttgtttatgtttatctctccagagagaaatgacttcagataattagatccctaaggtttgatttctcccaggagacctaaggcagatagtgctctcctttctcataccacttctttattttacataaattccttcctttcaatgattctcctagaagctgtaggtccaaccacagaaagtttaaatttgctctttcttatcaactatcaggcacccagctgacattttataacgacctcaaatgctgccttatccactgtccttaattaggatatattcgatcatccatgatggcctaatctttttcttcaaaaattttcctgctgacagtcctggaccaatggctgagatgccataaacacacaaaacaatgacccaaaaactataatctctaagcatagcaatgttgacttgggtctttctttaaaattgctgccctttttggtctagtaaaatgtaccctatcttggttcttttcctgtcattccatttggtctgggtcttcctctctcatgctttctctcttcctttttatctctcttggaatcattttctttcttgtattccctatgc

SEQ ID NO: 259333 - DNA, 591 bp, Homo sapiens
catatgcttatttaaatttaaatcattaattaaataaaatttagtttctcaaccacactagccacatttctagttcccagtagccacaasgagctagcagctgccatactggatagcaaagagatggagcattctcctcatctcagaaaattctgctaaacatttagatctatgccatttatttggcagttcatcattgtttctgactttgaactggcttttcaacaaccaattctcaattcccttatttcttagttgcctcttatgatagagcctgaaaaacccagacttctttttctagacttctttgaagctagtcctgttcttgtgactcagcactgaccaatgcaacctaaaggtatgctttttgggagggtttctggacaaaacctcttgcatatgataaaagagagaagtgtgtgtgcaaggagagctctctcaccagatattccctaatctaatgtgaggatgtcttgtctaaatctacgcaactgtattgtggccatgagggaaatgccaagaccttctcagagacctactcagagccctgaaatcaaccctaggactgcctacttctaaacatcttagtat

SEQ ID NO: 259334 - DNA, 591 bp, Homo sapiens
catatgcttatttaaatttaaatcattaattaaataaaatttagtttctcaaccacactagccacatttctagttcccagtagccacaacsagctagcagctgccatactggatagcaaagagatggagcattctcctcatctcagaaaattctgctaaacatttagatctatgccatttatttggcagttcatcattgtttctgactttgaactggcttttcaacaaccaattctcaattcccttatttcttagttgcctcttatgatagagcctgaaaaacccagacttctttttctagacttctttgaagctagtcctgttcttgtgactcagcactgaccaatgcaacctaaaggtatgctttttgggagggtttctggacaaaacctcttgcatatgataaaagagagaagtgtgtgtgcaaggagagctctctcaccagatattccctaatctaatgtgaggatgtcttgtctaaatctacgcaactgtattgtggccatgagggaaatgccaagaccttctcagagacctactcagagccctgaaatcaaccctaggactgcctacttctaaacatcttagtat

SEQ ID NO: 259335 - DNA, 624 bp, Homo sapiens
gacaaaacctcttgcatatgataaaagagagaagtgtgtgtgcaaggagagctctctcaccagatattccctaatctaatgtgaggatgtcttgtctaaatctacgcaactgtattgtggccatgagggaaaygccaagaccttctcagagacctactcagagccctgaaatcaaccctaggactgcctacttctaaacatcttagtatgtggttaattatattattttattatttaatcgtctgttagttagttttttgctatttgcaacccttgaacattcctgctaataaaatcacattgttaacacagggaccaggtattggactcactgcatagcccctttctgagtacagccccatttccctgacctttgtggttacagggacagggtttctttaatgatgattgtataatttcaccttggcctcctggccacagttggttagatcacgactgggcatctgactcaagctagactaataagccctaagatttggaattgagactcagaaatcccagcacttatttgtctttttttctgaactggggaaatacaaactttggagctgtggatggtcttgttaggccatgtggactgggaagcagagaaaactggaatat

SEQ ID NO: 259336 - DNA, 557 bp, Homo sapiens
tcatttgccttttgttttccaaatcatgccaaaattctcggtcttgaaccgataggaattctcatttcattcatttatttaacatccatcattgagtacccagtagacaccaaagatccaaacataaagaagccataaactctgtttcattaacatttttatagtgctacaatttagaaaagatctcctttaacccattgcccaatcctaagctgtgagccttgttgacgcccccatgtgacagggggtaactctaaggctggaagtgacttgcccacaagtgcacaatgaagactggcagaggaagtcccagaactgagaactcagctctctaaatcttgggtttttccttttttgtcttgctgggaggcataacggcataaatttacraaacactggctctgtcatcagagtcagattcccaggtccgcaatgtacaagatgtatgacaaaggcgaatttcatgatttctctaagcctctgtccctttagctataaaatggggataaaaacagtacctatcaccaggcatggtggctcatacctgtagtcccagc

SEQ ID NO: 259337 - DNA, 544 bp, Homo sapiens
aatgtggcaaagaaaaaatagtaacccatatttgacagttgcgatctgactagccaacctaattgtgctggaagggaataactggtgacattgttcatgatgaagtctttacttcccaagtcatggttgttatatggcatgcattatctcaccttggagtggtcttgcagaacctcattgcaaaatcctaaaaatgcacaataaaagatttccagaatgttctccattgagccagctgtgtttaactttgtagcactgctcagctatcacagggacaggtatataagtaagcakcaggaaagataacaatccattggaataacaaagaacttgactcttgaattgtattttctgctaaaacttccccagtggtctttgtgtctgggatgctatgtgcttagaggaaagatcatgggctttgcaattaagcagatgtggattcaaatcctggttcctcatttactatgtgctctcaggcaggattattaacctgcataaggctagtccctcatctataaaattgtgatactgatgcttacctctt

SEQ ID NO: 259338 - DNA, 593 bp, Homo sapiens
tttagtaatagttttgacctctgctctgataccctcatctaaactaatatttacaggtatcaggcacactgcctgtgattttttacccactttaaattatcctcacaacaacccctgtgaattctatgccattagtatcatcatttaatagcagaatcacagaaagtctgaactttttgggagcatggagagaagttataggccactttagaaatctgatgaaagcttarggatgccttaggaacaaaaatgtgtataaccacatgatacaaactcatacacaacccatatactttcaagggggtgttcatgaacttcctaagtccacacatgaggttatatatgaacttgaagttaaatcttgagtacaaaactcagggtcaccaccatcagtagcttgcatggggtcacctaactgataaggagctaggtatgttggaactcacatctgtttaagtagactccatcgaacaccctatggcatcccaagcggtgacagtcaattgaaacccacacacacttaaattaaaatagaaagcaagctcttgtaaagactgcaggatgctaactttaaggaagatcatcacagctgt

SEQ ID NO: 259339 - DNA, 593 bp, Homo sapiens
tttagtaatagttttgacctctgctctgataccctcatctaaactaatatttacaggtatcaggcacactgcctgtgattttttacccactttaaattatcctcacaacaacccctgtgaattctatgccattagtatcatcatttaatagcagaatcacagaaagtctgaactttttgggagcatggagagaagttataggccactttagaaatctgatgaaagcttagggatgccttaggaacaaaaatgtgtataaccacatgatacaaactcatacacaacccatatactttcaagggggtgttcatgaacttcctaagtccacacatgaggttatatatgaacttgaarttaaatcttgagtacaaaactcagggtcaccaccatcagtagcttgcatggggtcacctaactgataaggagctaggtatgttggaactcacatctgtttaagtagactccatcgaacaccctatggcatcccaagcggtgacagtcaattgaaacccacacacacttaaattaaaatagaaagcaagctcttgtaaagactgcaggatgctaactttaaggaagatcatcacagctgt

SEQ ID NO: 259340 - DNA, 593 bp, Homo sapiens
tttagtaatagttttgacctctgctctgataccctcatctaaactaatatttacaggtatcaggcacactgcctgtgattttttacccactttaaattatcctcacaacaacccctgtgaattctatgccattagtatcatcatttaatagcagaatcacagaaagtctgaactttttgggagcatggagagaagttataggccactttagaaatctgatgaaagcttagggatgccttaggaacaaaaatgtgtataaccacatgatacaaactcatacacaacccatatactttcaagggggtgttcatgaacttcctaagtccacacatgaggttatatatgaacttgaagttaaatcttgagtacaaaactcagggtcaccaccatcagtagcttgcatggggtcacctaactgataaggagctaggtatgttggaactcacatctgtttaagtagactycatcgaacaccctatggcatcccaagcggtgacagtcaattgaaacccacacacacttaaattaaaatagaaagcaagctcttgtaaagactgcaggatgctaactttaaggaagatcatcacagctgt

SEQ ID NO: 259341 - DNA, 561 bp, Homo sapiens
taattttgtttttcaagtgctcattgggcttcagaaaatgtgtattattactgctataggcaagcagccctgtgtagtagaaagagtgaagactttaaagccagwaagattatgattcaaattgtggttcttggccatttactttgttgcttgttgccttggcaaatccttccacctctcagatcctatttcttaagattctatttcttcatctacaaaatggggacaacagtactcaagtgatttacatcatttgcatatcttatccagggtcctttcctttgagtatcaactccacacacttttcataaaacttgggaagagttaaccccatgattggtcagaagattacctgatcttgaccagagtcctcatcttcctggccacggacattagttcaggaatagacatatgatctaggccaggccaatgagagtctgtcaagtgacttttctgcaaaatgcatgggtaaaatgcctgctgttctgatatggcaagtaggatgatgaactcattcacatctgcctggggttttcttggttttagcattgactgtccccc

SEQ ID NO: 259342 - DNA, 561 bp, Homo sapiens
taattttgtttttcaagtgctcattgggcttcagaaaatgtgtattattactgctataggcaagcagccctgtgtagtagaaagagtgaagactttaaagccagaaagattatgattcaaattgtggttcttggccatttactttgttgcttgttgccttggcaaatccttccacctctcagatyctatttcttaagattctatttcttcatctacaaaatggggacaacagtactcaagtgatttacatcatttgcatatcttatccagggtcctttcctttgagtatcaactccacacacttttcataaaacttgggaagagttaaccccatgattggtcagaagattacctgatcttgaccagagtcctcatcttcctggccacggacattagttcaggaatagacatatgatctaggccaggccaatgagagtctgtcaagtgacttttctgcaaaatgcatgggtaaaatgcctgctgttctgatatggcaagtaggatgatgaactcattcacatctgcctggggttttcttggttttagcattgactgtccccc

SEQ ID NO: 259343 - DNA, 544 bp, Homo sapiens
actcattgcttccaaatgatgctcacctctgatagacaagtggctcataaattgatctttttacatggaaattatgtggcacttaatttttcccaggacaagagctrtaaatagaaaacagatcattgtatcatgacaatacatcattattatttacgcatattgaacatgagatagtgacttgcctttataaattatcttttcttcatgattcattgaattcctcccgacccacgaataatgtgtcctctaatctcctacaaagaattggagaaataaagacaaagcaagggtgggaggagcttggaggaaaattattgaattaagaatttacattttaacatagcaggtttatgaagaatgttcggtggcagtctacactaaatcaatcctgcataaatttgaaaatagcagcctgatgcctcttattccccctgcacaagtgtacaggctgttatctcaccaatggtactgtgtactttttgagacctccttcttacataaaaaagagcctcctttaaaaacctcatatgttaatagcatg

SEQ ID NO: 259344 - DNA, 515 bp, Homo sapiens
tctaactctacaagtgatcctgaatccctcttctctctatcttcactgctacctgcaagccatccttgcctctcactgggtcaactgccagtttcctcastgattaatgaattcaataaaatctttaacaagtgctttctttaaatatttgtatgagcatcaggattttacccttttttgaaaattatatgttaataatacaatttagtcattgattaaatccatcccccacagcagtttgatcttcacccagcagccaaagtggaccttgtccaatgggtgaagaagagggtgcctctctttggctttaaagtcctcctatggtttcctggaaacttcaaacaaaattgaaagttcttaagggggtctggagcccatgtaggatctgggccctaactacatctatctcatctcctattattatccttctcaatcagattggagggaataatttgtgcttccatgagcactatacaatatctagactctagaagacattcatagaatctgaatca

SEQ ID NO: 259345 - DNA, 547 bp, Homo sapiens
attgattgcttgttttgatctaattactacgtttaataaacctttcctcctctctttgttttccttctactatcctagtttcaaaaaagcctttagtacctcttgcctagatgatttctaattggtctgtctgctctggccttaaatgccacaaactgacttcccatgcaagtttcagagtaaactatataaaatacatatatgaccatttactcccctaattaaaattccttagtgatttccctatattttcatcaggaattcatcaggagaactgccactacaaggtaaagggctctggggccctaaataaacttgaaagacaatataaaccacaaagactgcaactcctaggtgagtcctagtgctgaactgagcccagagacagtggactgacaggggatggtgacagatgaactactgagacacaggccaggatggctaagggaatgctggcatctcctttcccctaaccctaggctacacagcttgtggctccaaaagagaccwcttcccactgcttgaggagaggagagggaagaatgga

SEQ ID NO: 259346 - DNA, 598 bp, Homo sapiens
cttcctaaagcagatacagcttagatcacagcactcgagttctttcaaatatctgggaagtcttcccaagaagaacaagtacaaagaccagactgagaagactgcaatggatacctaactcttcaatgcccagacacccagacaccgaagaacatctactagcatcaacaccatccagagaaacataacctcaccaaataaactaaataaggcaccagggactaatcctggagaaacagagatatgtgatctttcagacagagaattcaaaatagctgtgttgagtacacttaaagaaattcaagaaaacacagagaaataattaagaattctatcagataaatttaacaagaaaattgaaataataaagagactcaagcagaaattctggagctgaaaatgcaagtggaatactgaagaaatgcatcagagtattttaataggagtatttatcaagcagaataaataggtgagctttaagacagactatttgaaaacacatagtcagaagtacaaaggaaaaraagaataaaaagcaatgaacatgtctacaggatctaaaaaatagcctcaaaaagggaaatctaagaacaattgg

SEQ ID NO: 259347 - DNA, 601 bp, Homo sapiens
ttgctacatagcccattttaactatgccctatttcaacccttccttactccaatcatgttttcatcatttcagtaaaaaagaaagtcacatttctgtgcccagaaattccaaggaaacaaatatccttttctaacccatactagtaattgttgaacacctaccacttaccagcaaattaacacaatacaygcaacttcgaaataaaacccagactgtgaaaggaattaatgagaccacatgtcaaagacaaatatagttgacatataccacacctgctttgcaactgttgcttcagcctcagagcccagatcaatgaggtcatctctagaaatgtttctcatctgactctagtaacaacctgtatccccattccccctaccgagctgggttgctttctgggttctttccctggtaggaaaagaaaaaccctaccctaccctcatttctataactactatagagcacggtgcttactaacgtggtgttcaacagatgaatgaatataatcttatactgatgttgtattaaggcagaactctaaaatgccaaaagaggcattattaaaataacacatgcattatctccagaatcagaacaaca

SEQ ID NO: 259348 - DNA, 548 bp, Homo sapiens
tgatgtgtccctttgcagagattctcctacctgcccaggactgacccattcaccacatccaggcttttagtagagagataagaaatcatgggctcattttccacccccagcctgcaggtgtttcaggaggctgccaacctttttctggacctgttggggaaactgctggcccaaccagatgactctgagcagactttgcggagggacagccttatggtaatctgctcccrcttccagatttctgtgtctcctatcattctccgtgtttctcccatcccctttcttatgactatgtagggtcagatcaagttaatatgacaaacatttgttaaattcccaccatgccatatgccatgtgagtaagaaaaagtgcctgccttcaagggactagggataatttaataggggagaggtaaagggattaaggacaacagtgaaaagtacattagaactttgcatataatacaagagcactgctgtattttatgaagaagatgcagttaaccactgcagaagatgcacttaacactatttggagtatcatagaa

SEQ ID NO: 259349 - DNA, 548 bp, Homo sapiens
tgatgtgtccctttgcagagattctcctacctgcccaggactgacccattcaccacatccaggcttttagtagagagataagaaatcatgggctcattttccacccccagcctgcaggtgtttcaggaggctgccaacctttttctggacctgttggggaaactgctggcccaaccagatgactctgagcagactttgcggagggacagccttatggtaatctgctcccacttccagatttctgtgtctcctatcattctccgtgtttctcccatcccctttcttatgactatgtagggtcagatcaagttaatatgacaaacatttgttaaattcccaccatgccatatgccatgtgagtaagaaaaagtgcctgccttcaagggactagggataatttaataggggagaggtaaagggattaaggacaacagtgaaaagtacattagaactttgcatataatacaagagcactgctgtattttatgaagaagatgcagttaaccactgmagaagatgcacttaacactatttggagtatcatagaa

SEQ ID NO: 259350 - DNA, 532 bp, Homo sapiens
gatccctgctccctgccactgctcccaattctgttgtttcaataacatcatttttatccaccccacagagagactgtgtcttaggaaggggaggcgaggggcagggctagggcatgggggaggggtggtaatggagagaggctgggtctggaggcagcagggactagatttggggcgctccctcctcaggcagaggcagggcggtctcagagcccaggtcccctgatgacaaagacaaatacattaaaattcttgcctcggagaagaatgcaggatagggagagcatttcataatctgcaataacagtagcagggtgggagcagggctgggcagggggttcggaacccagacagtggctcccaggaggctggccactggccacctgyagcctccagggacccccagagccctctagctgcctatttggtaccacatggctggagtgtgcacccaaactgggtatgtctttgaatgtgtagtgtccagagttggcattgacctttaggaactgtccagattggcattgccccg

SEQ ID NO: 259351 - DNA, 559 bp, Homo sapiens
aagggaagaaatctcataccctctatcctgggtcaccatagtaacataagttctaacattattaatctacttccaaattccatttccaaggtgagcaaaatcaatgtgggagaagaaatgttaggccagtaaaggccagtgaaatatttaagttttaatgccatgccagtgtttccaactttaagagaaagagtatggaggtttgtgttgatctctgttttatttcactcagaaatggtttagatttctaaagggaagaatagagaatcacctggagagtaacaggcagttaatctggaataaatgaagaagactatctgatacartggctgtagggatgtggagatttttttctatacgtagactgtaagagtacttggctgtttcaccagtcttgcctctctacctgcattaactctcatccttctttcttaactcattgaactgtccagccagatttttccttctggccttttataagctcttcagagtggtatgactgacaggtcacagagggtcattttgaagattctacctttggtgtcagatcgatcatgat

SEQ ID NO: 259352 - DNA, 369 bp, Homo sapiens
atgtgggcccagtcaatctattacttaaattcattcagaacctggaacttaaggcaatgtattcctatttgatgtttccgtttttaaaacatattctcaaccatattatactagccccatgaaataggtaggaaaggtgatgttatcctcatgaacagaaaagaaaggtgctttatctgtatattgctgataaggaagctgaagcccatgtatcttctcaagatgtcacaaggattgcaagaaccataactacaatctgggccttctgactgctcagtttaagaaataatgtgctttggatctagagagatctgagtgtcgactstgtaactgattgcttctgtaatcacctacgcctcagttttgtta

SEQ ID NO: 259353 - DNA, 558 bp, Homo sapiens
gaaactgccctaaaggttaataggaaaagaaattgttatcttgattcttttaccgatttaaaacatttcaattcaaacctaaattggatattggattaactttaatgatagatgataatttattgaaaaacacaatgtggtcatctctgaattatccttatttacaaagtgaactaaagaaacaaaaactctaaaacagtagatgcctcgaagtattttcttgtcataaatgtcagaatatgggtaaatgtagtatgatttgaggaaacacaaackatttcttcatgaacatacacatttttcaggatggtaaacagagtagagtatcaatttagtacaaattttttcatcagtttacctggttgtcacctccactctaaacaagacattgaaagaatgggacaggggaataataggttttaatgcagcaacgctgatttcataaaaatgctcatttcttagtgtttttggacagcatgaaagtatgaggtgagggaaaagagtctaccaatagcaagctttctctataatgttttgcctgaatataacattgtatta

SEQ ID NO: 259354 - DNA, 579 bp, Homo sapiens
ttgtggtgttctctgtatttcctgaatgtgaatgttggcttgccttgcttggttgaggaagttctcctggataataccctgaagagtgttttccaacttggttccattctccccatcactttcaggtacaccagtcaaatgtagatttggtcttttcacatagtcccatatttcttggaggctttgttcatttcttttcactcttttttctctcaycttgtcttctcactttatttcattgagttgatcttcaatcactgatatcctttcttctgcatgattgatttggctattgaagcttgtgtatgcttcatgaagttctcatgctctgtttttcaactccatcaggtcatttatgttcttctctgcactggttgttctagttagcaattcgtctaaccttttttcttcatttttaaaatctgaatttaaaaatctacaatgagcatatataggatgcattgtttctattaaacatttaaagttagttcagaaaaagttgtctgttaacatatcctgtccaaaatgtagaatggtccaattgttaaaatgtctaaacaatgcacgtttgatagcaaa

SEQ ID NO: 259355 - DNA, 627 bp, Homo sapiens
tacattggtcttctaagacatctcccaaacctaattatttcttgccttcttctctcctataagtagctacaccatcttcaggagcactgaggacagatgagactctaaaatttatattctcagaagcttgtaacccttgttatggtacttcctggaataactgatttctcactgtactgggcatttgacagccacacttttccccctgcatgtctttcatcatatagaaagaaaaccactcaggataatggaataaagtaccacattaggatctataagcatatgtgtatttattcataacaatcctgaaaataatttaaggcatttaaatcaattgcacatgtattcaccatataatttaattagcaattatggaaggcaccataagagctcctrttacactgtttgtttctattagaaataattacaaatgaaaaaatacttgcagcattaggaatggtattctctttgtgactgtaagagggcaatttgtttaaaagcttcactgatgtcatatatgcaatagctatttgtcatttcagcaaaatgcagtaggtatatctctgttaaaggaaacactgtcactgtagcacttcacattatttaaatatacataatgaagccaac

SEQ ID NO: 259356 - DNA, 565 bp, Homo sapiens
ctcataatgccttatctaatattgccaatatccattgtattcaactattgtttgagttaatttaatctaaaagaattcaggagaagcagcaagactactttaagtccacattataacaaaatatgaattatcctttatctgtagctctgaatgcagtgcacaacatacaggtttatttgtatcagtagataatggtgatgctaataacacttcatatttgacataagtgaatcctaaatggaataacacttcatatttgacmtaagtgaatcctaaatggagtcttagagaaaaagtggaaatatctatattttttacttgagtttaagagtatttacacaaaatttattcattacttaactcataaatatgaaagtaggaacaagaggaagcttatgccagatgtttgcctaggattggcatatatttattggaagattatgagagttattgagagcaagtctagctattatctgtttaattttttaaaagtatatttatcagagaagtttacttgacttagaagttttaaaaatgtcattatttgcacagtacatgcaagcaa

SEQ ID NO: 259357 - DNA, 534 bp, Homo sapiens
tttattaaacaaatattaatagctacctctgtagtatatctctgtcctcaaatgtttttgtctgtttgatatttggtttagatcaggaatcacaaattaaatccctacagagaatgagtagacagcacaaatgatgaaattggcccagcataggctaacaggagtgttgagatatatggtgaaccagaaatgagaaagccctggcccttctaaagggagaagtgctgctgatctctacttgcttggagccatgtggaaattctggtagtactaggttttctggtttttayagtgaagttgggaatacagattttaattgaatacttataatttaaaatttttgaactatttcaaataaaatactgtgttggcccttagtctatattccctcataaagattgtgtcttgcatctactagagatgctgtttccgagcccatggtcaatatagaaattctcattgagaataggaaatactagaatagggtgttcatttgtagaagatagagacatttctattttctaggattcacct

SEQ ID NO: 259358 - DNA, 534 bp, Homo sapiens
tttattaaacaaatattaatagctacctctgtagtatatctctgtcctcaaatgtttttgtctgtttgatatttggtttagatcaggaatcacaaattaaatccctacagagaatgagtagacagcacaaatgatgaaattggcccagcataggctaacaggagtgttgagatatatggtgaaccagaaatgagaaagccctggcccttctaaagggagaagtgctgctgatctctacttgcttggagccatgtggaaattctggtagtactaggttttctggtttttatagtgaagttgggaatacagattttaattgaatacttataatttaaaatttttgaactatttcaaataaaatactgtgttggcccttagtctatattccctcataaakattgtgtcttgcatctactagagatgctgtttccgagcccatggtcaatatagaaattctcattgagaataggaaatactagaatagggtgttcatttgtagaagatagagacatttctattttctaggattcacct

SEQ ID NO: 259359 - DNA, 532 bp, Homo sapiens
cagtgtactctttccccagttttaattcctatattagttttcattaaaaatgttaaattaaaagaaattgtcattaagtatcagagaaagctgtcactgaacctagcaggtggtatctgttaacaaagctaaaatcacttacgaagatgcttccaatggaatcatgtcttgataactactgttaagcaacaagaatcccattggccccaacacacacatcctatgatatcctatactaaaagctacagcacatatccaagccagaaaattggaaagtcttaaaaaataaaaaaacataatgaaataaacatcagttaacaattatatgacaataaaattggcaacctttaaaaaagacaaatgtgccctaagacccaggattacccagcttaaaattttaaatgctgtttggtagtatcttccatattcttggttttctctctttcccagaaggtctttcccatctgagaaaaagtwaggaaaaaagtcaaggccattaataacattgaacccctggtctgaagcataaaat

SEQ ID NO: 259360 - DNA, 587 bp, Homo sapiens
aactctccaattgtcccagctgcttagccagtcatctggctcctgcttccaggaacagactcctgcaaggttctgattcttggcatcattaccccttgggtcaaagtctagtgttgatgtaactgattggtgaaatgtagattgctgactgtgcttgagctaaaggcaagatggaaaggagagtatctaacatttttggcttctgtaatgggagattggacctgcttcccaccaaacttcacagtgaggtgattccccaaacacaggaaaaaattcaattagacaaaaggaataagaaatttccattacactgagataytgcagtcagtgatctggaaagtgacagagattattacaaaaattactgagagaaaggaaaagttattttctatgttgttctaaaacagtagggagtttgtattgagttatgtaactagaagagagttccaccattcgacacatttgttcttcttactttgaatttacaatgaaattattagtactgaagttattcttaatgttccaattatcaagtggctccttctagcctatattttggtgacttttctgcagtatttcacaccact

SEQ ID NO: 259361 - DNA, 590 bp, Homo sapiens
actcccttaggggtgatattgttcccaatgtgtttactgtgtttaagagatagattggacgaatgatgtggtgtaagagaaattttatatctcataaaggatatgcagtagtcaggactgatgaactatttgaatggaaaacatcagagccaaagtccattgttttggagttatataaaaaaggacacttcttttaggagaaactactagatgctatattggcaatgtgaggtctggtcaggtttgaattcatctgttgtccatggatgtgtctttcccattacaaccacatgagattcattcattcattccgctaatacttattcatcagtttctacgttgtatgttaaagtggtatctatcacctgtccgtagaaaagtaaatacttgctgtaaaatcagaattatgtcatgcactaatcaaataatcctacttattaggctactgctggtatcttttcatawgatccaggttaattattgcagagattgtttcagtagcctcatatatcaattataaattcctatacttggattctttccaagtataggaaagtttccttaaagagaattcattaaagagcaagagg

SEQ ID NO: 259362 - DNA, 570 bp, Homo sapiens
aatgatcgattacctcaaactaggaagtttcccaactaataggtaaataggaatgatattaaaatatttaaaggatagaaatttgtcaaataatcaattaaaagttagataaattgtacgtaaaataagtagaaattctctgattaggctcaaagactgagactcgggaaacgtgagatatagtcctggctttgccagtaaagttattttacataaccccaggcaagtcacttaatctttttgtggtccgttgatctatccataaaatgagaaaaataatactgtaataatgttttaaccttataggactactatgagactgaattaaaaacaaatttgaagaggaaaaacttgctatataaacgctctgcctaggatacaattcttttcgaaaaatamacaactcaccataagtccacatttccattgtgaagttattatttttgtatctggtaaagattctaagaccctgcaagatattgaaaaacattgtaatttagcaaaaatagaataaagtaattttaagagagatttaaagttaagttgattgtattataatatttaacagaa

SEQ ID NO: 259363 - DNA, 575 bp, Homo sapiens
atttatggatatgagtaaagataaagaatctctgggatggagaaatgaacaagggtcttgagaagtaatgaattaattaattaaagggatgataatcagaaaaaattatatttgtagaaagtggccagagaacacagggagcccatggagaagactggtcaggwttggagaaatgagagatcagcaagtgatacttcatgctgcatgttcccaataaaggttatttacctctttcaagggctacatttctcagctgctaattaggtcaaactactgggattcttggtctccctttagaaaattgtgttttatccagcttttgtacactttttggctaagaggcaacctctctagtactacatcacgtagccagaatggattgatgtgatactggggagttaacaaaaactgacatacgtgacatcagttcaaagatttaaaaaggaaataaaatattttagccatcttaatacaactcattttcttcacaataatctttacagatcttccattttttctgtctgatacaaaatatttagattatcctctctgtctctctctaaaacactgtcaaa

SEQ ID NO: 259364 - DNA, 481 bp, Homo sapiens
gtatttaatgtactatccctaaatgggatcattcagaaagtgagtatggagagaatagagatgtcagaagactaagccatggggcttgcaggtcagagaaatgaaaagaatgtgcaaggagattaagaagaaacaaccagtgaagtagtaagataaccaagagagaagactgtaactgaagaaagtattttcaggaggaattcttcaactatgtcaaatgtcactgacgaacgaatctagttagttgagggctgagaaccaaccatttgtcttagccacatggggttcaytggaaatcttgatggctgcagtttgggtaaagtgatgtagatggaggcttaattggagtgggtgcgttagagagagtgagtggtaaaattgactagatggcttacacattcaaacacattcagaacttcaaaaagtaaggcaggtttctattggcacatgaatagaaagtcaggccaatataacaaaatag

SEQ ID NO: 259365 - DNA, 572 bp, Homo sapiens
aaaggacacattttgatgacataaattggaagtacaagttaatcattaagtgaaattattatgcaagtgaaatggctaaatctccatgcatgaaatttgtttcagaaacttaaagccggaatacccccaaaacagtggccgtagttgtgatgttttacctartgcttgatcatgtgcctctctatgaaatactgcattcattttagaggtgctgatgccaagtagcaaaaacatgagccaagaaatgttattggaacatgctgtgatgagattagagcaggcaggattgaggggtgttgcagaaccaaattaaaatagcactagtggaggcaggtctgtgctggaaaatcaaagcagaaaattttctctcacaatgcaagaaattgctgagggaagagcaggagagagggctattccaaagtctcaatcatgagaacattttcccagtaccataaacataaatgccaactcaagctaattcaatgtgacaaaggttcctttgtcagccaaactagtcagactccagaaccttctcccaagcccatctgtgcacttccttataaagttcagtt

SEQ ID NO: 259366 - DNA, 242 bp, Homo sapiens
ccgtagctggttcctcctcagtttactgctaaagtaggagaaaataacagcaaggatttagggaatatcaatgtaactgtcactacctctaaagtctctcccaaactggattsccagaaaattgaaatgcttatagtggattaggctccctttttgtgcctcttaattgcagtcttccttggtaggaggctctcattccatactgagccatttttatcctataatattcttttcttccaatt

SEQ ID NO: 259367 - DNA, 614 bp, Homo sapiens
gccttgtccatgtgacacataaaagttcacgtctggtagcaccagaacagaaaaacacygaactaagtatatttttacaaaatcatggtctcagggccagctcatgacaaatctgcttctccactcagcaaatacttattgcacatgtactctgtgctggtcactgttctaggctctggtgatacagtggaaaacaaaactcataaaatcgctcttctcacagaattgcactgtatgagtagaaattgaaaatacacaaataagtgataaggaaaatacatagcaaggcagaaggagatcagtgtcgtagaaaataacaaaacaaatattgaggatagagcgctggggtggttgtaatgggaaagggtgcctttggcagcaggaatgataagcacaaagtacacacctgctctgctggaggaacagggagggggacgctggctggagcagactgaacgaggagaagcatggtagagatgaggagagacaggtaacatgaaactgaaatatggacagatcatgcatggccatgcaggctgctttggcttctactctgcagagtggaataacaagttgattgaaatttgcttgactgcccaatatctccttgtagc

SEQ ID NO: 259368 - DNA, 614 bp, Homo sapiens
gccttgtccatgtgacacataaaagttcacgtctggtagcaccagaacagaaaaacaccgaactaagtatatttttacaaaatcatggtctcagggccagctcatgacaaatctgcttctccactcagcaaatacttattgcacatgtactctgtgctggtcactgttctaggctctggtgatacagtggaaaacaaaactcataaaatcgctcttctcacagaattrcactgtatgagtagaaattgaaaatacacaaataagtgataaggaaaatacatagcaaggcagaaggagatcagtgtcgtagaaaataacaaaacaaatattgaggatagagcgctggggtggttgtaatgggaaagggtgcctttggcagcaggaatgataagcacaaagtacacacctgctctgctggaggaacagggagggggacgctggctggagcagactgaacgaggagaagcatggtagagatgaggagagacaggtaacatgaaactgaaatatggacagatcatgcatggccatgcaggctgctttggcttctactctgcagagtggaataacaagttgattgaaatttgcttgactgcccaatatctccttgtagc

SEQ ID NO: 259369 - DNA, 614 bp, Homo sapiens
gccttgtccatgtgacacataaaagttcacgtctggtagcaccagaacagaaaaacaccgaactaagtatatttttacaaaatcatggtctcagggccagctcatgacaaatctgcttctccactcagcaaatacttattgcacatgtactctgtgctggtcactgttctaggctctggtgatacagtggaaaacaaaactcataaaatcgctcttctcacagaattgcactgtatgagtagaaattgaaaatacacaaataagtgataaggaaaatacatagcaaggcagaaggagatcagtgtcgtagaaaataacaaaacaaatattgaggatagagcgctggggtggttgtaatgggaaagggtgcctttggcagcaggaaygataagcacaaagtacacacctgctctgctggaggaacagggagggggacgctggctggagcagactgaacgaggagaagcatggtagagatgaggagagacaggtaacatgaaactgaaatatggacagatcatgcatggccatgcaggctgctttggcttctactctgcagagtggaataacaagttgattgaaatttgcttgactgcccaatatctccttgtagc

SEQ ID NO: 259370 - DNA, 614 bp, Homo sapiens
gccttgtccatgtgacacataaaagttcacgtctggtagcaccagaacagaaaaacaccgaactaagtatatttttacaaaatcatggtctcagggccagctcatgacaaatctgcttctccactcagcaaatacttattgcacatgtactctgtgctggtcactgttctaggctctggtgatacagtggaaaacaaaactcataaaatcgctcttctcacagaattgcactgtatgagtagaaattgaaaatacacaaataagtgataaggaaaatacatagcaaggcagaaggagatcagtgtcgtagaaaataacaaaacaaatattgaggatagagcgctggggtggttgtaatgggaaagggtgcctttggcagcaggaatrataagcacaaagtacacacctgctctgctggaggaacagggagggggacgctggctggagcagactgaacgaggagaagcatggtagagatgaggagagacaggtaacatgaaactgaaatatggacagatcatgcatggccatgcaggctgctttggcttctactctgcagagtggaataacaagttgattgaaatttgcttgactgcccaatatctccttgtagc

SEQ ID NO: 259371 - DNA, 602 bp, Homo sapiens
ttagcagttctcggcctcattgtgaggttaaacaaacattttgaggccccatcccaggcttatgcagaatcctcaggggtggagccgaggaacatgtattattaagatcattaggtgactctgatgctgagaattgaaaaccaaagcttcacatttgttgatattaaccatgtttaagagctatggaaatcatgcatctgaaaataccaaatgttaatacttacatgtgctgggcatactgaatacaaagaggagtgtgatgtggccaggctcgggagtagagacagccatcaaccatgatagaaggagtrccctttctcgaagtttgcctcggcaccctcaaggaactccctacttttgcttctgcagctcttctggacttccttggctgatgaaccttcaagagatttgacacagaagccctatgattttggtgactaattaggaaagagaagatgagcagaagggaggagtcaaggtaggctaagagtttgtagattacaggatagctgtgatcccatttattgagattggaaatcaagtcaaataagcaagttttgtgggggaatggaagaatgtatagtttggggatctaaacttaa

SEQ ID NO: 259372 - DNA, 602 bp, Homo sapiens
ttagcagttctcggcctcattgtgaggttaaacaaacattttgaggccccatcccaggcttatgcagaatcctcaggggtggagccgaggaacatgtattattaagatcattaggtgactctgatgctgagaattgaaaaccaaagcttcacatttgttgatattaaccatgtttaagagctatggaaatcatgcatctgaaaataccaaatgttaatacttacatgtgctgggcatactgaatacaaagaggagtgtgatgtggccaggctcgggagtagagacagccatcaaccatgatagaaggagtaccctttctcgaagtttgcctcggcaccctcaaggaactccctacttttgcttctgcagctcttctggacttccttggctgatgaaccttcargagatttgacacagaagccctatgattttggtgactaattaggaaagagaagatgagcagaagggaggagtcaaggtaggctaagagtttgtagattacaggatagctgtgatcccatttattgagattggaaatcaagtcaaataagcaagttttgtgggggaatggaagaatgtatagtttggggatctaaacttaa

SEQ ID NO: 259373 - DNA, 566 bp, Homo sapiens
gttaatctaaacatgaaaaataaccacaggggaattagtcgctttgttcacactgcggtactttaacattataattcccctttaggcatatttataattgaaaaaaaaggtgttgggggcttttatattattagattgacatttggggaaatgaatttttactttatctgcaacaaatgaatcccaattagttaagtggctctgggctaaaggaagtatagtgactttctcattttctttctactttttgaaatgcccttccttcccattcctatgaacttctctcatcctgctgagccaagtcacatttcgctttgcttgaagcctctaacccttctctgatgtcctgaacgattcttcagggagactctatggcaaacgtctttctttcctgtgacagccccacattkgattaggtgttcactttccctcctgtgtcctcaggaatgtgatcatatctctagcttcggagtttaagtttgaattagtctaagcctaagccagtgttctcaaactctagcatgcatgagattcacttggggaatgtattaaaacacaggctgctg

SEQ ID NO: 259374 - DNA, 579 bp, Homo sapiens
tccaaaagcgagccctgggccctgaacaaaatctggaggcattattaaacctggcaacctcagtgttctataatagggaccaagaggaacaggccaaaaaggaaaagtgaggtcagagaaaggccacaaccttagttatggccctcagacaaacaaaccttggtggttcagaaaggacagaaagtggagcaggccaattgcccagtagggcttgttaccagtgtggtttgcaaggccgccttaaaaaaagattgtccaacgagaaacaagctgccccctcacccatgtccactttgccaaggcaatcactggaaggcacactgccccagaggacaaagtttctctgggccagaagcccccaaccagatgatccaacaacaggactgagggtgcctggggcaagcgccagctcatgtcatcaccctcastgagccccaggtatgtttaaccattgagggccaggaaattgacttcctcttggacactggcgtggctttctcagtgttaatctcctgtcctggacagctgtcctcaaggtccattaccatccaaggaatcctgggacagcctgtaaccagg

SEQ ID NO: 259375 - DNA, 390 bp, Homo sapiens
gccctaatcatagactgtggggtcatcagttgtaacaaatgtaccattctagtgcaggatgttgatagagaggctgtgcrtttgtggtagcaagggaatatatatgggaaatttgtctactttctactcaatttgactgtgaacctaaacctgctccaaaaaataaagtctattttgtaaaataaacaaatttaagttttttaaaactttccactgctgattgaatacattgatttatccgttccctctgcctttttgtttcgttttgttttgcaagatgaaggggggacaatgtgagatttaattgattctctatactgaaataaaagtgaaatatgcctttcacattattgttccagtttgtacagtatattataatggattttgttt

SEQ ID NO: 259376 - DNA, 390 bp, Homo sapiens
gccctaatcatagactgtggggtcatcagttgtaacaaatgtaccattctagtgcaggatgttgatagagaggctgtgcatttgtggtagcaagggaatatatatgggaaatttgtctactttctactcaatttgactgtgaacctaaacctgctccaaaaaataaagtstattttgtaaaataaacaaatttaagttttttaaaactttccactgctgattgaatacattgatttatccgttccctctgcctttttgtttcgttttgttttgcaagatgaaggggggacaatgtgagatttaattgattctctatactgaaataaaagtgaaatatgcctttcacattattgttccagtttgtacagtatattataatggattttgttt

SEQ ID NO: 259377 - DNA, 514 bp, Homo sapiens
cagggccagttgcaatccccaagatccagcaagactgcctcgcctttccacccgacacctgttttgaagcatgaaatcgtgaagcataccgtgaagaaggttctcccgtagtttcccagaagtttttaatacgttctcaagaaatgytactagctgttccttactcagctctttgtcttgcaagatttcgcgtagagtttctgcagaaactaacctgaaggcactgtccccgggtagcaaagggcctggtttgtggtggagggcgtccaccgggaatacctgctccctgaacaccaccaccgaggtccaccattctgcggccaggttcttccgcaactctacgcccaagggtccgaagccggggtggcacccactcagaagagaatcccggctaagctgctgcttgcttccacttaggaaatgccttctctgacagatctctaacagcgcctcgcttccctctccagacccgggggcttctgggtgctcgccgttcccctcgagctccgcgtgc

SEQ ID NO: 259378 - DNA, 453 bp, Homo sapiens
gtttaatgagtaaaattaaacaaaattggaattgataaaatgtatttttttattttacaaaaatatagaacgtagtttttaaatgaatgatatatcttgagttcatggttataatacaaaatgacttatttttatcgaccatccggtttgtaaaaaatkaattgcaccacagttttatagcgagagcaatacgcttctttctcttgaagaaaaatgagcggtgacacacttttgtgatccaagcctgccccctggtgaccaactggtcaccacgaggctgcagactatgaggcaggcagcgccctctttaaagctgttcagaagtaacctcgaaaagaaaacgtggcattactggaggtacatttccctgtaatgccccaggcatctccatcagtgtctcaacatcatcaagtgcgggaaagatagcattaaaaagttataaaataaaaaagt

SEQ ID NO: 259379 - DNA, 568 bp, Homo sapiens
gtttacatttagaaatgtggccaggagactttaagcaatgagaatacctaatgcaaatgtgtgatgaaaacaaaatcatgacaatgttgtcttagagattcatcaaagmacaaacgaacattgtctccttgatagatgatgtacattgggtcaatgctagcctcttgattttcacctcacatatttatccatcgtaaaacatgaagggagttaagctttcactgcttgatgtagagatagtccaggaacaacctgggattaagctagcagatgaagacacctaagatgtggtaatttggaaggcataaattttcatcttgactggataatctgaaaccagtcacccatcttctaaggtcctagtacttttattgttaaaatgtgaagtttggattaaaacatctataaagccacatacctatcactaaatttgtgatttaaaaaaaattaaattgtagttaaaaacatgtattttcttcattttaatcattttaagagtgcaattcagtagttttaagtatattcaaattgttgtaatacatatatctagaactttttcacctcagtc

SEQ ID NO: 259380 - DNA, 536 bp, Homo sapiens
aacaaatcttggctctcctacttaaggaacttgtaaaccttttctgtgccactattcctagatctgcaaaatgcaagagtgagataaatgtaagattatgtgggagagtcaccagcttatactcagctctcaacactttttttttgttgtctgtgttattacgaaagtaattataaaatatatgtgatacaagtgaagatatcttgtgtttcttctaaaatattaatacataaaatatttactccatctaaatgcactttatttcactatagtaaaatactgaataaggatgtattttggcactagagaaatcaagcttattttaaatcagataaaatttagagrtaaacgatcatataaataatttcctaaaatgaaagaaaaaaagacaagatttggggaggaccctaatgccaagcactttatagctataatttgcaaatagattcccacgtttagaaatttattttaaaatctcagaaagtaagaatttatttcacagggctaaattcttgctattcaaagcttggccccag

SEQ ID NO: 259381 - DNA, 536 bp, Homo sapiens
aacaaatcttggctctcctacttaaggaacttgtaaaccttttctgtgccactattcctagatctgcaaaatgcaagagtgagataaatgtaagattatgtgggagagtcaccagcttatactcagctctcaacactttttttttgttgtctgtgttattacgaaagtaattataaaatatatgtgatacaagtgaagatatcttgtgtttcttctaaaatattaatacataaaatatttactccatctaaatgcactttatttcactatagtaaaatactgaataaggatgtattttggcactagagaaatcaagcttattttaaatcagataaaatttagagataaacgatcatayaaataatttcctaaaatgaaagaaaaaaagacaagatttggggaggaccctaatgccaagcactttatagctataatttgcaaatagattcccacgtttagaaatttattttaaaatctcagaaagtaagaatttatttcacagggctaaattcttgctattcaaagcttggccccag

SEQ ID NO: 259382 - DNA, 402 bp, Homo sapiens
tagtctacacaagaacacctaaaacaatttcctttaagcacacaccccattataccttagtgtgacaaatttaacatgttcattcacatggtcacaaacttgaaccatcayatagcatagaagaattagaagcaaaagtaaataagattaaaattattcttagtaatcaatgttacactgctcagactagttagaaattatttagttgcccagtaattgtgcttaataaaacagactctttgggcacagactttcataatgatatggcttagaaaactttcaggctgccatggtaggctgcattacaaattctaagactctcaagtctggaagcaaatgtacttgatgagagcagacggcagacccaagattctttggaataagcaagactgaatgaaataa

SEQ ID NO: 259383 - DNA, 575 bp, Homo sapiens
ggggtactccactctgtatcacattcatatttatcttacaacctattttataataactactttagtctatttgggttgctataacaaaatgccatagactgggtrgcttataacaacaaaaatctatttctcatagttctgaaagcttggaagtctaagaccaaggtgtaagcagattcggtgtctggggagggccctctttctggtgcatagatagtgccttctccccatgtctttaaatagtgaaaaagaaaaggcggtgcctgggttctctttgataaggaccatagtctcattaatggggactttctctacataaccccatcaccttccaaaggtgctgctccttagcaccatcacattggtgattaggttttaacatagaaattttgaagggatacaaacattcagaccacagcaataactttatactcctggtgagctgcggccagctaactaaaaccttgttctactaagtattcaaattatattttacatgtcaactaatgaatgtttccagctaggtccttcataatcatcacttcatattcccatataagaaacaagattgcata

SEQ ID NO: 259384 - DNA, 575 bp, Homo sapiens
ggggtactccactctgtatcacattcatatttatcttacaacctattttataataactactttagtctatttgggttgctataacaaaatgccatagactgggtggcttataacaacaaaaatctatttctcatagttctgaaagcttggaagtctaagaccaaggtgtaagcagattcggtgtctggggagggccctctttctggtgcatagatagtgccttctccccatgtctttaaatagtgaaaaagaaaaggcrgtgcctgggttctctttgataaggaccatagtctcattaatggggactttctctacataaccccatcaccttccaaaggtgctgctccttagcaccatcacattggtgattaggttttaacatagaaattttgaagggatacaaacattcagaccacagcaataactttatactcctggtgagctgcggccagctaactaaaaccttgttctactaagtattcaaattatattttacatgtcaactaatgaatgtttccagctaggtccttcataatcatcacttcatattcccatataagaaacaagattgcata

SEQ ID NO: 259385 - DNA, 575 bp, Homo sapiens
ggggtactccactctgtatcacattcatatttatcttacaacctattttataataactactttagtctatttgggttgctataacaaaatgccatagactgggtggcttataacaacaaaaatctatttctcatagttctgaaagcttggaagtctaagaccaaggtgtaagcagattcggtgtctggggagggccctctttctggtgcatagatagtgccttctccccatgtctttaaatagtgaaaaagaaaaggcggtgcctgggttctctttgataaggaccatagtctcattaatggggactttctctacataaccccatcaccttccaaaggtgctgctccttagcaccatcacattggtgattaggttttaacatagaaattttgaagggatacaaacattcagaccacagcaataactttatactcctggtgagckgcggccagctaactaaaaccttgttctactaagtattcaaattatattttacatgtcaactaatgaatgtttccagctaggtccttcataatcatcacttcatattcccatataagaaacaagattgcata

SEQ ID NO: 259386 - DNA, 560 bp, Homo sapiens
aaacttatttaacaaatgagttgctgaaaaattctcaagtcttgggagaaaatggacatgcagatttatgaagcttaatgatctccaaacaggttcaacccaaagagggccccaccaagtcatattacaataaaaatgtcagaaatcaaagacacagagagaatttaaaaagcagcaagagaaaaatgtcaaatgacatatcaggaaatctccattagactgtcagcagatttatcagcagaaaccttgcaagccagaagagaagggagaaatatacttaaaagtgctgaaagaaaaaaaacctgtcagccaagaatattacacttagtagtgctgactttcaaaaataaaggagaaataaagtctttgccagagaagcaaaagctaagaaaatttatcactactagacctgccttataagaaatatttaggggaattgtttaaccagaaacaaaaggatgatgattactatcatgaraacatatgacaatataaaactcgccagtagaggtacatttattgtcaaattcagaatatgtaattactgtagtggtggcgtg

SEQ ID NO: 259387 - DNA, 499 bp, Homo sapiens
aaactcgccagtagaggtacatttattgtcaaattcagaatatgtaattactgtagtggtggcgtgtaaatctttcaactctctagtatgaaggttaaacatcaaaatggtcaaaaataactgtggctacattaagttgctaagaaatatgygatataaaaatatgtaaattgtgacaacaaaaacataaattgtggatgacaggggagaggttaaaagtctagagtatttttatgtgatcaaagttaagtagttatcatcttataataatcaattataactataagatgttttatgtaagccccatggtacacaaagcaaaaaactataacaaatacacaaataaggaagaaaagggaatcaaagcttagcactacagaaaatcaacaaatcacaaaggcagacaacaaaagaggaagaaaggaaaaagaatctacaaaacaaccgaaaacaattaacaaaatggcaagagttaagtcaatacctatcaatagtaact

SEQ ID NO: 259388 - DNA, 588 bp, Homo sapiens
gaggctgaggcaggagaatcgtttgaactcaggaggcggagattgcagtgggccgggatcgcaccactgcactccagcctgggcgacactcatctcaaaataaatgaataaaataaaataaataaataaatagtctcagatcaaatcaagtagcagtcaaaagaaattatcaaaatgtgattcctacagtcattcaaactttgtaaaagaagaatgaacaytaaataaatcctttttattttattagcagaaagaagcaaaataagtaaagctgaatttttttaaaaaaatctttgggcattcaaattatgatgctttaaaaacgttatcacttgattgttttaggaatgaagattagccggtattgctgcttttttgcatgttttcttgaaagctcaatccagacaatttgagaatcataatattttgcatttcattacaacttctttctgtctcttattcttggatgtagtttgtaaagtataaatggtccctgtaaaaccaatgctgagcatatgttgaaatggtgagaagcataaatagaacaataatcctctaacagagcctggaaatcctctaacctcagag

SEQ ID NO: 259389 - DNA, 588 bp, Homo sapiens
gaggctgaggcaggagaatcgtttgaactcaggaggcggagattgcagtgggccgggatcgcaccactgcactccagcctgggcgacactcatctcaaaataaatgaataaaataaaataaataaataaatagtctcagatcaaatcaagtagcagtcaaaagaaattatcaaaatgtgattcctacagtcattcaaactttgtaaaagaagaatgaacactaaataaatcmtttttattttattagcagaaagaagcaaaataagtaaagctgaatttttttaaaaaaatctttgggcattcaaattatgatgctttaaaaacgttatcacttgattgttttaggaatgaagattagccggtattgctgcttttttgcatgttttcttgaaagctcaatccagacaatttgagaatcataatattttgcatttcattacaacttctttctgtctcttattcttggatgtagtttgtaaagtataaatggtccctgtaaaaccaatgctgagcatatgttgaaatggtgagaagcataaatagaacaataatcctctaacagagcctggaaatcctctaacctcagag

SEQ ID NO: 259390 - DNA, 470 bp, Homo sapiens
ttttgcatctacattcatcagtgatattagcctgtaggttttttatttttgttgtgtcctgtctgcttttggtgtcagggtaatgctggccttatataatgagtcagggagcattccctcctcttcaattttggaagagtttgaagaaaactrgtgttagtttttctttaaatatttgttagaattcagctgtgcagctatcgattcctggctgtttctttgttgggagactttttattattaccttgatcttattacttgttattggtctgttcaagttttctatttcttcctgactcaatcgtggtaggttgtatgtgtccgggaatttattcatttcccccagtctttccagttttttagtgtgtagtcattcataataatctatgatgctcttttgtatttctgtgatatcggttataatgtctcctttttcatttttgattatgtttatttgggcattctttctt

SEQ ID NO: 259391 - DNA, 470 bp, Homo sapiens
ttttgcatctacattcatcagtgatattagcctgtaggttttttatttttgttgtgtcctgtctgcttttggtgtcagggtaatgctggccttatataatgagtcagggagcattccctcctcttcaattttggaagagtttgaagaaaactagtgttagtttttctttaaatatttgttagaattcagctgtgcagckatcgattcctggctgtttctttgttgggagactttttattattaccttgatcttattacttgttattggtctgttcaagttttctatttcttcctgactcaatcgtggtaggttgtatgtgtccgggaatttattcatttcccccagtctttccagttttttagtgtgtagtcattcataataatctatgatgctcttttgtatttctgtgatatcggttataatgtctcctttttcatttttgattatgtttatttgggcattctttctt

SEQ ID NO: 259392 - DNA, 470 bp, Homo sapiens
ttttgcatctacattcatcagtgatattagcctgtaggttttttatttttgttgtgtcctgtctgcttttggtgtcagggtaatgctggccttatataatgagtcagggagcattccctcctcttcaattttggaagagtttgaagaaaactagtgttagtttttctttaaatatttgttagaattcagctgtgcagctatcgattcctggctgtttctttgttgggagactttttattattaccttgatcttattacttgttattggtctgttcaagttttctatttcttcctgactcaatcgtggtaggttgyatgtgtccgggaatttattcatttcccccagtctttccagttttttagtgtgtagtcattcataataatctatgatgctcttttgtatttctgtgatatcggttataatgtctcctttttcatttttgattatgtttatttgggcattctttctt

SEQ ID NO: 259393 - DNA, 628 bp, Homo sapiens
ggtaatactggctttgtagaatgagtttgaaagtattcccttctcctctattttttggaatagtttgagtagaattggtattagttcttctttaaatgtttggtagaattcacagtgacaccatcgggtcactgatggcattctttgctggaagactttttattatggcttctatcttgttacctgttattggtctattcaggttttggatttccttatggttcaatcttggtaggttgtatgtgtctaggaatgtattcatgtcctctagattttccaatttattggcatataattgcttatagtagmcaataatgatcctttgagtttttgtggtatcagttgtaatgtttcctttttatctctgattttatttattggatcttctcccattttttcttagtctgagtaaaggtttgttgattttattaatattttcaagaaagcaacttttccttttattgatcttttgtattgttttcttcatttcaatgtcatttatttctgctctgatctttattaattcttctcctaattttagatttggtttgctctttattttctagttatttaagatgcaacattaggttgtatatttgaagtttttcttctgttttgatgtaggtgc

SEQ ID NO: 259394 - DNA, 539 bp, Homo sapiens
tatatgaatgaatggagtagcatttcaacacagcctagtatacactggaaagaaaatggacagatttgagacaaattcagaagaaaatctttacaggtctagaacagagaaaattcrcttaactccatagctataacagagtataataagcatagataatttcagcaacatttttaaagcaaattcatattcagcagcttttcctatctgtctagtggcactggggacaaaagatgtatgtgagcaaaaagttttgaaaatgaaattaggaatgcaggttacaaaatttctagtgttctttgtttaaatcatttgaagtctaacctgatttatttgtttaaacactagggactttttcatggttactgcatcaaaaagtacagatttaacatctcacaaaatgacagcagaacatgaggttagtacctcaaggatttgaaatctccagcctcattcttcagtaccctatttcacttctattgcactttatccctgtgaatatcttagtggttccttagtataccaattaagaaaactca

SEQ ID NO: 259395 - DNA, 538 bp, Homo sapiens
taagcgctgatggacagcttcaggagcaactttcggtgttaatgaagtaagaaaactgtctttgttgccaacaggtcttttcaggggcgctatgccagtcttgctggccagcaccaaccccttaagttgaagttcccactaagctgtgggacttggccaggcaccctctggcccaggctacagagccctgcagggacatcaatgtcctctcatggtcagctagatgactcccaaagagtttaaccatgtttgctatatttcaagattcttacagaaaaatgcctcaaccggtctcggtggaggggttacagagcaggcactgtgaggcctcagcctgtgaatagcacagctagatgccttctttctacagctgcacaagtgagcaggtccagcctggctatagagacagtgttaaacttcaactgcatacagsggcagagccaaagatcataatttcataaagcaaatattagattattaaataaatacatgatggaaatgtctttaccatagttccactaatcccttttttgtttgt

SEQ ID NO: 259396 - DNA, 485 bp, Homo sapiens
aaggcagaaaagccaaggcagacctatgtcaaaaggatcagaaactcgaagcattcaccaagtgcaagccacatttcagattggaaatgaaaaatgggacacagccgactcgtcttggtgtccagtttcatctctcaacttttgcgaggcatgcagaattttgccaggcccttttgaaggtgaygataagattcatgcacagcttttctaaatgaggatctgaagcttataaaactaagtccaccttcagtgctagatatctgcttgcctatttttactttgaaagactagaaccatataaagcttctcaatatgtgctaaaggggcaacttctctttatactttagggcagttggagtgaagagggacagaggaagcaggtttccatgtggttgctaagagagaaaatgtttccttatgttcccagatctcctctctgaagtcacctacttttccacagcccataattagagccttcaaaccat

SEQ ID NO: 259397 - DNA, 586 bp, Homo sapiens
tttggcttcatttattctcattgttgctattttgaggctttcccaactgctgcatgacattcaactctggatgcattcttgggatttttcttttcaattaaatgcttccagaaacaaaatttcggaaaatgggttcaccctagctgactcaaatctgaaagcctttccaaggagattttacagggaaaatattactggcttaaaaaccccaagcactgaattctgggctgcaatttgaatttggctttcatttttcatatctccaatgtaaacatcctagcaaagtaatggtcttttytaagatgggtacaggtttctggaatgtgcttgttcttcttattcaaaagaattcaaaagaatttcaaggtacagtgtaaatttgctttctttgtttcttttttctttctttttttttctttttttttttttttttttttgccctgaccaactgaaagcagcaaaggcctatttacattctggtttaaaaggttttcctttaatggaaatttttactcatcttccatagacagcggtatgaagatgagtgagcccagtggagtattgtgaaactttgcatatacaaaat

SEQ ID NO: 259398 - DNA, 376 bp, Homo sapiens
ataaatgcatccagttttcaacaaaaacaatagcaacaacaaaaaatgagatatgcaaaaaaacasggaagtttatttgacgacacataaagtaagcaatataaactgtctttgtgaaagccctgaggttggacttattacagaaagactttaaaccagctattataaatgttcaaagaactaaaaaaagaaagtctaaagaaaaataaaagtataacaatcacttctaattaaagaataccaataaaaaagcatcaaaaagaaggaactagaatactagaattgagaaatacaataactgtaatgaaaaattcctgcaggagttcaacagcagatcgaactggcagaagaaagaataaatgaatttgaggacaaa

SEQ ID NO: 259399 - DNA, 608 bp, Homo sapiens
cacattgatctaatttgctcaataatggctcaattctccaatttattgcccagatgtagccaaatttctccccgtggacagggaagatataatgacagcttatgactaaaatgcatcaaattgcacatattattgcaagtaaggcagagggcatgagagagggttcaggcatcgaagttcccaagtccccatgtcaaaggagaaacagcacagttgggcaccacgtgaccacagaaatgatgaggcatctctttccttcctattgcagagaactgcaatctgagctggagatgctggagcaggaggaggtcagtcatgtctcctgtatttttcagagcaaggtcaactctgaggatagtggattctcctcttttaaaagctctgccacagtgagtggccctgattgttggtgactgcttcctgccaccacagcttcctgccaccagaacttgtggggatctctgaggcttaggaacacttttcaaacaagacattctcagggaagtcattcacattccataccaaacaatttatcataagctctrcagcagctgaaatgaatctctttttctttctgagctcatccacaatgacgtgcatctctctat

SEQ ID NO: 259400 - DNA, 583 bp, Homo sapiens
cattcacattccataccaaacaatttatcataagctctacagcagctgaaatgaatctctttttctttctgagctcatccacaatgacgtgcatctctctattctctgccgaattggtaaagactaaatgtttggtgtgggtggggaaagtagcagagagagaagagaagcagtgggggaagagaaggaaaataaaaaccagcatccatttgttcatgaattcagcagattattatgtatacccattatgagccaagcacagaagatacagtcaccattttatcctaatggatggagttaaataaaaccatcacaaacaaaaatawctaattacaaatcattttagatgtttggagcgtaaagtatggggtgctataaaagagtttcccaacaggaagtgatctggtcttgggaatcagaacaagcttccctaaagaaggaatgtctgggctttgcagtgctggatgagtgggcggagactgtctaggtataggagcgatgggaaggaggagaaatgggaagaaaaggaaaaagctgcctaggtaaaagccatgagatataagaccagtgcttctcaaacttt

SEQ ID NO: 259401 - DNA, 648 bp, Homo sapiens
ctgggtttaattgcattgagaggtatattatgggagcaggaggaacaactcaatgaaataatataaatatattcaagtgttgacgtttagaatagaagcmaacttacagatattatagttatctccttctttttacagatgagaaaatttgcacaaaaaggctaaagggcttactccaaattagaagaaattagatatgaaactaacactagaatccaggtgccatgtgaaaattacatttttacatccaggtctaaattgctagtattattttagcattttctaattcagcataatatcctttgctttgaggacttcatggcccaggaataaaaccagcatttgtccatataaaattaaatcatagcagatctagtaattaaataaaagagtaagtgactggaataattagatgactggtcaggtaaatatgcagcaaccagtaaagcagcttttttttttctttaaatatttaaaagaaactccctacaagggatttataaacattcattagttttcttctagtgacaaaaagcatttgagattttataagcttcaataaaaccatcagtactgcagcgggaggtgtggtaatgttctgataaaatcactacgatatctttaaaccagcagttctcaagtgagggt

SEQ ID NO: 259402 - DNA, 676 bp, Homo sapiens
aattaattgaatccacagttaagcaataaaactcatttttcctattagttctgacctttttcagtggccacattatcccaagggagaaagaataccacacattttcatcattctgttgttaaaatagctgttaaaaatcatcaggaccataaaaaatggcattggccttctaatgagccttggctgtgcctagtttctcctatttagtcttaatcctctcatttttcacattaacatcagtcaaatggcaaagaactggatcttaccrttatgaataacttacccctggtacccaaagccttcacaacatgcccccaacctacctttccagttctttcccttcatccctagaactccatgtcattgcctggggttaccttcacaatgaactcacaagcttctgaatgcatgttcaagttcctcaactaaggcaatctggcttctgaccccaccatccctccactaaaactttactctcttgcgctacagctgccttctaagggcccaagcaaaagacactcagtcgttattgtctggagcctctttgtggagggctgaccgggctttccttcttcagtgccctcccacaccttctagatgctttctcccagttacctctccaacctctctactccagcctcagctaagctgctggttatttctcgcctgcctggac

SEQ ID NO: 259403 - DNA, 613 bp, Homo sapiens
aagaatgagcatagtagtaaagaccaatttacaatatatataaacttctgtaattatttaaaggaatcaaatgacattccacataattataaataaactatgcacattaattatagaagtagctcacgtagataagtacacatagaataaacgataaayagaaactcaactatagaatatgaggaattttaaataactcaaatttcttaagagactaaccaagaaaaaaatgagatgataacatgccttcttctctcttactttccttgtattagaagtttcaaaacaaacaaaaaaattaataatttctgagctatttcaaaggtttctaacgcagaatatgttttatgattatgataacaataatatttcccattgagaaaatcattcttaggctgggcactgtggctcatgcctgtaatcccagcactttgggaggccaacgcaggtggatcacttgaggccaggagttggaaatgagcctggccaacacagcgaaacctcatctctactaaaaatacaaaaaaattgccgggcattgtggcacacacctgtaatcccagctacttgggaggctgaggcatgagaatcacttggatgcaggaggcggagg

SEQ ID NO: 259404 - DNA, 559 bp, Homo sapiens
acccaggtttacatagctagccagggcagagattcaaacccaggactctgatatcaaagcctatgatttcatcactatgctwtatagcttcatttagaggctaagtgagccacctttcccttgcagctaagaatttaaatgtttgcctttgttgagcaccccattttcagacctttataaaccttggtgctttatggtttcattctgaacacagaagtaaaaataatgccttttaggaaagacagattaaatctctgacttaaaaactcaaaacaagtcccagtctctgagtgcctggtcatttgcaaggctgaccaaaacctggacccgaacctgccaagtcctctcatttcttctttgatttgagcagaagagtgtactctcttgggaggcttgcagcatcccacggccataattttgtagacttaatgttaaaatgtcttgcaagaacatcatgcaattcattgcactccatctgggagtgttattctttttccctcctgtctaggctcaacgagtctttaccccagagacccaggccctggcaaacacgcctcct

SEQ ID NO: 259405 - DNA, 535 bp, Homo sapiens
cataaccttataaaatctagcacagtcaaggactaacaggttgctctgactaatcgaatattccaaacaagagttaatatctctggcttgcataagttaatcaattttcaaagaactttaaagcaataaaagacatctaacttcaaaactatctcaaccataatttaatccccttctgttcatgtaaaaagcattgctcctgtcttgcagtgcctcaggatattattaacataaatgctcaataaatgtgtgctgagtttaatgaccatcaatcaatcatttgcytactccagtcctgcaatgccattcccacatttcctgcagagctcctaccatgtgctccccacctaacctgagcactgcttctcccctccctccaccactgtcccaccaccctcagaggggtcttgaggatatacagaagatcccattaattcagagttggaggttcacagattgagaggcattttactatgacaccacattttggctttagtttatgaacccagtgcaaattcactctgaatttaaatac

SEQ ID NO: 259406 - DNA, 583 bp, Homo sapiens
tccccccacccaaataaagccatggccaggcagcttctcggaaaccagtgtgtttatgtatttactaatcataaagataatatgcaaaaagagaaaaatctctaaatccagccttacttcccagggactcattaaaaaataaataaaattaaaattaaaaattaaataaatagaaacctttattgctgcagataagtacaatcagttggaaccactatctcctctatctaaaaagattgtccctggatgaggcttttagataaagttgtttatcataatttaattatggaaagctgaagaataaggaagctgggagaccttttgttgccttagccataaatttggataaatgcatgctatgaaattgcaagacatttgaagggtgtgcctgagttactttgatatgccttccctccctgacaccagccaaacatcctcagaatttgcatgacaaatttctttatgatagaatctagctgtgtgtggcatttccataaygtgcagcatggtgctttggaatgcactggaactctccctgtaggtgcaaacccaaaaaccaccttaaaaacattttcatctgtct

SEQ ID NO: 259407 - DNA, 454 bp, Homo sapiens
ggtcctctggctccctgatcatgatgtttaccattataaatgttttgccttcttagattatgagtcataagaatttgaggaaaggaccactgaatattttagatatgatgcaaattaaaattrcagagatggtgaaataagtactcaaatatttatcgaactaaactggtaccaagaaaacaagttgtaacaccataaaaagcagaccacaacttagctcactggttaaactgaatttattctgaagtcactcggctaaaaccttgaagaactgcacttctcttctaggctttgctacaggttcgcttagtttcagagagaggtggacaccattgaggctggtgagaagtcctctagattctgcctgaggctttaatgccattccaaaaaataagagactcagaaatgacattttttggaggagataggagggagtagggacaatgataaaagc

SEQ ID NO: 259408 - DNA, 454 bp, Homo sapiens
ggtcctctggctccctgatcatgatgtttaccattataaatgttttgccttcttagattatgagtcataagaatttgaggaaaggaccactgaatattttagatatgatgcaaattaaaattacagagwtggtgaaataagtactcaaatatttatcgaactaaactggtaccaagaaaacaagttgtaacaccataaaaagcagaccacaacttagctcactggttaaactgaatttattctgaagtcactcggctaaaaccttgaagaactgcacttctcttctaggctttgctacaggttcgcttagtttcagagagaggtggacaccattgaggctggtgagaagtcctctagattctgcctgaggctttaatgccattccaaaaaataagagactcagaaatgacattttttggaggagataggagggagtagggacaatgataaaagc

SEQ ID NO: 259409 - DNA, 620 bp, Homo sapiens
ccttattattcctgcatcctttgacttcagctggatttttactcacggcatttattactagcatgttctcaagctagaaaagggcagcacagtggcaatgttgtcaaacaaaaccgttgatgatgcagtgattgtacaggagttatttgcattaagataaaatattagcagggccaggtgccctggctcatgcctgtaatcccagcacttcaagaggccaaggcgggcagactgcttgaggttaggagtttgagatcagcctgggctacatggctaaaacctgtctctattaaaaatacaaaaaaatagccaggtgtggttgtacatgcctgtagtcccagctactcaggaggctgaggcaggagaatcacctgagcccgggaagtcaaggttgcaatgagctgtgatcgtgccactgcactccagcctgggcaatggaagtgagacactgtctccccccaccaaaaaaaagataaaaaaagataaaatattagcaaacagctaagtgagttatttctatgttctgtggtcaattccaccttaaacttgyggctctattatatgctaggtactgttttaggtactggaaacacaacaatgagcaaaagagataacaatcc

SEQ ID NO: 259410 - DNA, 605 bp, Homo sapiens
aggtctgaaagacctgcaagatgtccaaacatcttaacaatacagaaaatacaaaacatgattaacacagtgctgccatcagctgagccacctccattctcttctgagtggcctctcattatccagtccacttcactgggtgtcctgttatggcagctgagatccaagagggagggcagaagctggcaagacctctagaggccaaggctcagaaatgacarcagtgtcacttccactgaattctataggtcaaagcaagacacagggacagcccaggcccagggaggtgagagagaatcctctttttcataagaggagccacaaagaattggtgaccatagttaatctacccatagaaacttatcaaatcactcaccaaattttactggaattgcttgttgatatggccaactcacacactcacacactaaataagattcttatgggacgagactgtgccttatttatctttgtactcaagggcctgaaatacattaaacactatttgtccaaagctaatggatggaaagatcattcagatggatggaattaaatgagcaaagataaggaagcaagaaaatacaagaactgttcaatttcccgaa

SEQ ID NO: 259411 - DNA, 580 bp, Homo sapiens
ttgtactccaatagtctggaaacaactgtttgtatacgctcaaatactttacccatttttattcaaagattgattacctaagactattcagagaagtaatgtttgtttgtttctttgttttgtttttgagcatctgccctgtacaactcatagaatctttagggacaatggcacatgtctgaatggctaacttgtgtcatctttatatgtccttttctttacaccatatagaagatatggaaatcaattatttcrttaatacttaaaagcactatttggagatgtatttttaattttcattgtttcctaatattatttctttctattgtatgacaaggaaacaggaattgatttggttcctgccctctttgtcatgaacatatgaccaatgagaaaaaatgcctttttaactatgatattaataataaatatgtgtcaattattgatgtattaagtgtatcattcagtacttatagaaattatttgaagtagccacaattattattcttttacaaatgaagaaattgaggcttaaagagttaagtaactgctcaaggtttcacagcaaatgtaaagccat

SEQ ID NO: 259412 - DNA, 580 bp, Homo sapiens
ttgtactccaatagtctggaaacaactgtttgtatacgctcaaatactttacccatttttattcaaagattgattacctaagactattcagagaagtaatgtttgtttgtttctttgttttgtttttgagcatctgccctgtacaactcatagaatctttagggacaatggcacatgtctgaatggctaacttgtgtcatctttatatgtccttttctttacaccatatagaagatatggaaatcaattatttcattaatacttamaagcactatttggagatgtatttttaattttcattgtttcctaatattatttctttctattgtatgacaaggaaacaggaattgatttggttcctgccctctttgtcatgaacatatgaccaatgagaaaaaatgcctttttaactatgatattaataataaatatgtgtcaattattgatgtattaagtgtatcattcagtacttatagaaattatttgaagtagccacaattattattcttttacaaatgaagaaattgaggcttaaagagttaagtaactgctcaaggtttcacagcaaatgtaaagccat

SEQ ID NO: 259413 - DNA, 593 bp, Homo sapiens
aaattaaacattatctacacagcaaatatttatgtagggctttgcaaatgctaactcatttaataatcacaacagctatgcaacagatagttttactatcattcacctttttttacagatgaggcagattttgagagattaacaaaatcacagagctgggacatgatagagctgagattcaacttcagtttagcttcagcgtcctggttcctaacttcctcactttgctttamatggtcatttaaatatatatatcttccctcccattataaaaagcattaataagatttaaaataaagttgatacttttaatatagctgtctttttttgttttgggggatttttgttttattttacaattcataacacataggaaacttaaaaaatattaaaactctgggagatcaaaatgttggaagacagaatgaaattggaaaacaaattttttgtgtgattactgcaaattttaccaagtcattaatctttaaggggaaaaatattgaagcaacatggaaaaatgttaactatcttacaacgataaataaaaattatataagtaaatcaggcaatgatgtattaaagtcagtattaca

SEQ ID NO: 259414 - DNA, 584 bp, Homo sapiens
tttgtggagcagcctagaaactgatattttaaaccagcaattcaagagatcctaatgatgagggaattttgagaaacagttgctagttactgcatgatccgtctttcaactccaaaatttgctacctacttctctcttaaaattaaaagcaagaatctatgactgtcaaccctttatctatttcaaaactcaatacttatcatctactttgtaaaaacagagggcactgagatacagattaaaaacatactgccggccaggtgcagtggctcgtgcctgttatcccagcacttggggaggccgaggtgggtggatcatctgaggtcaggagtttgagaaccccatctctactaaaaatacaaaaaattagccgggcgtggtggcatacaccttgtagtccagctactcgggagcctgaagcaggagaatcacttraatctgggaggcagaggttacagtgagccgagattgcattccagcttgggcaacagactgagactctgtctaaaaaataaaataaaataacgtaagataaaataaaataaataagaacatgttgcagtttatcaacttggtctaagatc

SEQ ID NO: 259415 - DNA, 584 bp, Homo sapiens
tttgtggagcagcctagaaactgatattttaaaccagcaattcaagagatcctaatgatgagggaattttgagaaacagttgctagttactgcatgatccgtctttcaactccaaaatttgctacctacttctctcttaaaattaaaagcaagaatctatgactgtcaaccctttatctatttcaaaactcaatacttatcatctactttgtaaaaacagagggcactgagatacagattaaaaacatactgccggccaggtgcagtggctcgtgcctgttatcccagcacttggggaggccgaggtgggtggatcatctgaggtcaggagtttgagaaccccatctctactaaaaatacaaaaaattagccgggcgtggtggcatacaccttgtagtccagctactcgggagcctgaagcaggagaatcacttaaatctgggaggcagaggttacagtgagccgagattgcattccagcttgggcaacagastgagactctgtctaaaaaataaaataaaataacgtaagataaaataaaataaataagaacatgttgcagtttatcaacttggtctaagatc

SEQ ID NO: 259416 - DNA, 621 bp, Homo sapiens
taactatattcacagttaccacctgtctttcaagatgtatgattcttctctctcattcagtagatccacttcactctttgcttgcacataacgcaaatattcagcttgtttaatagaaatagaaattgaattcaatataagtggacagacagcatttacaaatgaaagactgtttcatgtgatttgtaatataaaatagtgataaaataagtaatttattgggtgtttgcaatgtgtctattcagtgatttataccattayatcagtaaaatttatcagccactccgaaagtaggcacaactataattctaatttttagatgagggaattgaggcagagaggtaattagccttcttaataaaaagtgaaaaagtaagcatttaaaacatttttcttgtaatataaaaattactatgagtcagaaactccatttcctgtcaagatggcataatgaaccagatttactatcccacctgaaataattaaaaatggacaaaatatttgaagcaaacattttaagacactggacatgaggcaacaaaggagagtaatccctgtgagatgtgaaattttcaaggtgagaccaaatattgttccagtttaatgccttgaaagattttc

SEQ ID NO: 259417 - DNA, 598 bp, Homo sapiens
gatgaaaccttggaacatggcaatgagcaatcaaaaaggaaccatgagatgggatctctgggtcaccgtcctacctgctgaagaagccacaagattaggacctaagattgttggtggcataaagatcagtatttttatctctctgcagctattgctaaattgttttaatttttctcctgtgccctgcattacatgtatttcttccaakttccattttttcacttcttcctattttcaaggttttatttatctccttagggttggaaaatcttctgaaagatggtgggcaggtgggaagtaagttgacaattctcactttcaatatgaagactttctcttaatcccttttcaatccctcactcccagcttcccatatttcaggtgtctgaaagtctcaaaatctatggattaatttcttctaataatcaacttctaaaaccctgccggacaaaaagaaaagttgtctcctaagtgtgcagggtagtgagccaaagaggggagagaagtgatctggtgatttgttatttacacacatttttaacctaccattatgtactcagcccttaacctcatccccgcctgtaatctctggacccat

SEQ ID NO: 259418 - DNA, 360 bp, Homo sapiens
catttagttttgaacctatgtctctgaaaagaatcttcacaatctaaatcttcatttggcaagcagaaaagattgataagtataactagaacatctgcaaaataatataatcagaaaatttttattttcccaaagcatcaaggtatgagaggtgggtatcataccttcccattattctcacacayggaacacacacacacacacacacacatacacacaagccttagaatgcagcaataaaatagacccaaagtaccttagaagtaaaatatacactattcccaaagcaaaactagtaagaatgttgtggctagctaaacggtagttaaacatttcttcagtacttctgggggccaggca

SEQ ID NO: 259419 - DNA, 623 bp, Homo sapiens
ctaccctgccacagctttctgtccatcactattcttgttctatttatgtgtagattttcagccaatataatatgttggtacccagtgaggagttttgcatataaaaagggctcaattaaatgctggattcataatcctgcccatttaaaaaaagtcccacattttattctcttttgctattatagaatctgagtacaattaaagctttctccaaattgcctgtgttgtatttctcagtcagaagcttgcaaagaatattttaaacagttgtcgtgtgggcttttcccgaaatgccatgtcactccaaaagtgatactctgctattttgactactcatagaaaatgaggaaggaggtaggctgaacagagagaaattccaactgaagtagtactcctagccaagccagtggtatagcaccattgctcatctttagaattttagaaataactaaggcagtatgtacttttaaaaaycttttatttcagtggcaaaataaatgattaaataataatatcagttggtatagggataagcgaataaaacatctcatttcttgatattttttatatgaattccaatagtgtgatgtggttatagtctttgttggggactgtgtttgtga

SEQ ID NO: 259420 - DNA, 637 bp, Homo sapiens
atttcagtcataattttacatttaaatatggttaaactaagtttagccaattctgatgcatttttaaaaagaatgtgctgttgagctaagactctatatgctgtattttagccccaagcagatttttatgacaaagtaataaacccctggaaacatgtttataatggaaaatgcaacttgaccttaactagaggaacccaaatgcaccttacaaaaaggctcattttttttttgaaacataygaaatccctttctcccagaggtggtgtcacaggagaaaggtgtataataatagttgtatttaccataaatacctaacatattttatgatgatttgattgtattaaaaaatttcaccttatagattttaataaagctgcctatgggcaaagttattgcagttggatttcttttcctttgcccactgctctgtgtggaaagaagcaagcaacccttataaaaggctttagtttttagtacctggttaataaaaaataatttcctctcctttggacttgttcatgaagctgaaaaatgactctgcaggtcagtggtgtgtggcaaagctaatttctataagctttttatcaggtggtactgagtaaaacaatatgggaaactgaaaaacccacccttc

SEQ ID NO: 259421 - DNA, 504 bp, Homo sapiens
acattagtaattttcataaagtaactttcttcttattaaaaaagtgcattttattgttttaagaacaaatggctagataagatacacaaccaagataatatgatctgcttctgagcatgcatrgggaagctgtaaaactttagtaaacctaatggaaaaagtgtagaatctgcatctctccactagagtaaaaagagaaccacacacacctacaacacacgtccaggccccatcatattcagcaagagatttaacaagttcattaactgataacccattccaatggtaagatatgcattcccctcaaattgcaagcttcccctgggtatcacaaatcttgcttatcttttaagtgactaagaaaactgtgacagttttttactattttactgtgttgttatatcattgccaagccaaccaacacaaaaaaattcaattaaatagttttcaaaaataatcatataaaaaaaccccagagactgacaggttgaccataaagatata

SEQ ID NO: 259422 - DNA, 523 bp, Homo sapiens
tgggcatgcttaagactgtagaaaggcagccagaagagtggagagatgaccaagcagctagttagtagagggagcaccatcccctggaagagaggttggctgtgtccagaagaggggctcctccttgtgatggggtgtcttttagtcatctgaaaccccaaagcccaagcctgcttttcctccagtctccttactccagcaagtggcattaccattccccctattcctttatmcaggcagtcattctgctgattctgtctcattaatggtcctcaaatcaattcattgctttccaccctcaatgccatgatccacagtcatttttcccatggtcttcagcagcagctctaactgacctcttcgcatcttctcttgttgcccatcaatcttccagagagctgtttccaatatacaaatcgaatcctgtcactccttgttttgaaaaccattcaccacttccaaatctgtcgacatggctaactaggccttcaggatctatgacacacaccctcttcctgcccct

SEQ ID NO: 259423 - DNA, 523 bp, Homo sapiens
tgggcatgcttaagactgtagaaaggcagccagaagagtggagagatgaccaagcagctagttagtagagggagcaccatcccctggaagagaggttggctgtgtccagaagaggggctcctccttgtgatggggtgtcttttagtcatctgaaaccccaaagcccaagcctgcttttcctccagtctccttactccagcaagtggcattaccattccccctattcctttatccaggcagtcatyctgctgattctgtctcattaatggtcctcaaatcaattcattgctttccaccctcaatgccatgatccacagtcatttttcccatggtcttcagcagcagctctaactgacctcttcgcatcttctcttgttgcccatcaatcttccagagagctgtttccaatatacaaatcgaatcctgtcactccttgttttgaaaaccattcaccacttccaaatctgtcgacatggctaactaggccttcaggatctatgacacacaccctcttcctgcccct

SEQ ID NO: 259424 - DNA, 457 bp, Homo sapiens
ttaggtgaagggatgatgcaggcttggggttcagcagtggcctgttctggggctccagagaagtttccctgaggcatcatacccagccacacgagggactccaaacatcagtgtcacctctgcctccagcttccaatgagctgcccatcccttagctttcctcctctccctccatcatgtcttcattccctgggctgcctttgttaaggtccttggtcccctggtctcgctatactctttctcctttaatcgtcttatttgctccatggtttctggattgcatgcatttgtccaaaatagtcacagcagaaaagaaactcagaatacataaggttggagtgagacaaattaatttttttgaacgtttgcatttaacacactgaacagtggaagtttagcatcccatcatttcattgtttacccaytttggctggagtgggcttcaaagatagccaag

SEQ ID NO: 259425 - DNA, 511 bp, Homo sapiens
aatgtacagtgaatactttgaaggtctagacttacaccaatctgtttcctaatcattaggaatctgtattagagttctgtcagtcaagatttgattcacttatttattcaacaaatgtactatgcatgtagtgtgtgcagctactgccctaggcactggggatgcagtattgccttcaaggaatttacatctaatctattacttaatatattcaaaatgggagaatctttgcttgarcctattaatagtaatgaggtcaagtacaattatacatattttccagagttaacctttcagctggtctcatatttgtcctgtcatgctctaaacattgtattacaggtgtgccatacctcatccttcctgttaaatcagcagcctcccagcccctaggatttcttcccgtccacattcttgctgtcatctcagccatccacaccacccacgtcacaaatttactccctcataacatatctacttgcacaatgttcctcaaatcctgtttaaaatc

SEQ ID NO: 259426 - DNA, 522 bp, Homo sapiens
gtggaaatgtaagagtttgagagcttgactaaattaatgctatcactgaaaaatggcaacttgaaatgcctctgtgtttactcacctagaaaaccactgctagtctgaatgtgtatttctaaattatcaaaatgagtaaaggccatatatttcagggagctgcactaaagtaaacagaaaaatcttcctctaagctgccagattttccttttccttcaaactgagataacagcacataaagagtctgatakaagaggagcactccttatgaaaaatgcatgggccaaaaccttaggaaacagaactagaaatcacatcttacctctttttccataaagtcaaactccgctgcacaggtatacaataaagtatcaaaatccttataactaaagaattttgatgttagtaagttgccaatatgagcctggtaagaaataaagttaccattatattaagccatacactgcaataatatattttaatttcaatagtatctgaaaatagttttcattacattataga

SEQ ID NO: 259427 - DNA, 522 bp, Homo sapiens
gtggaaatgtaagagtttgagagcttgactaaattaatgctatcactgaaaaatggcaacttgaaatgcctctgtgtttactcacctagaaaaccactgctagtctgaatgtgtatttctaaattatcaaaatgagtaaaggccatatatttcagggagctgcactaaagtaaacagaaaaatcttcctctaagctgccagattttccttttccttcaaactgagataacagcacataaagagtctgatagaagaggagcactccttatgaaaaatgyatgggccaaaaccttaggaaacagaactagaaatcacatcttacctctttttccataaagtcaaactccgctgcacaggtatacaataaagtatcaaaatccttataactaaagaattttgatgttagtaagttgccaatatgagcctggtaagaaataaagttaccattatattaagccatacactgcaataatatattttaatttcaatagtatctgaaaatagttttcattacattataga

SEQ ID NO: 259428 - DNA, 621 bp, Homo sapiens
ttactatccttcagaaaaaagacaagatgtctgccaaaatttcaagaaaggaggtttagcaggttttccctcctaaaaagactgcagtgtccaagaaagcaaaatgaaagcccacacttccaagcaaccagtcatagatagccacagcaggcaagcagggagccatgacaactaaggggcataaccaggaaagccatcgcaatcagaagtcataagctgccaatgaagatggcgaggaagatcaagatgggatggatctgaaccaggagtggtgaaagcagcagctgatgcagcttcagatggcctggaatatgagaacagaaatgccaactrgaatataaacagagacaatgaagaaggctctaaagaaaggaaagttctctaaaacttctcagcaaaaagtaaagacaggtattaagacgtgggtaaggctgaaaaagacaatgataagagactaaagaaaacataaaaagcttgtcacagaagcacctggagccaaaaacagagaagaacccaacagaaggcagctcttgaaggcaggaaacagcaactgaagaggccccatcctggtaggcagaataatggcctccaaagatacctgtgtcctaatccctggaacct

SEQ ID NO: 259429 - DNA, 604 bp, Homo sapiens
gattcattcattcattcattcattcattcattcattcwttctttctttctctgtagaccacacacgtttgaaaactgggaagctaatatagtaaatatgccacctatgaggaaatctattttgtgcttgttgaactgaattgaacctactgcattcatccaattgatggtattctgtaggcagatcagacgagaggtgagagctgaagctgtgaaatacgaaggcaaggggagtatagagattgaatgaaaacaacttgggttcagacacagaatggggccttcagcatttcacaatgacatttataagctttcacttaattattactatttatttatttcataatacacttccttgttgctattgaaaagcagagttgagtgtacctgaataattgcatggaagaaacaaatgccaaatattatttgtctccatttttttccaagtatattttcttcaaaaaacgaaggtgtcatttcagtaaatgctcgtctgatatttgcacgtaagccttttggaggctcattggtcacctggatttagatagaatatatgtggcagagagagtgattttatagatttgcattatttctgaataacacac

SEQ ID NO: 259430 - DNA, 527 bp, Homo sapiens
tgtcccctgatgtcccatgacgtgggacagggagggaagaagcaactcttgttcctcatatgcagaggcttgccacagatcataaacttccagcattgaaatccagcagccatactagtatggcttgtaggccttcctgtctctcaaatactgaaacattcccttaacactagaaggggttctcttcttatcactctgtacccttaacattttcttgtgagggtgacrgctgggagagctgaatgacccataggactagaatatgcaaggatggggttgggaaatcgtttctctgcttgttataggtgaaaagatactgacttcacctccccatgctggccacacagacctccacatgcttctgtgcaggctctgatctcctgggaggcactaggtgaatattctgaaaccaaccatttcacattgttccaaccatatgcatacattaccttgacagaattttgaagaactgtaacaggaaatgtattactaggcatggagcttaaaaaaagtcgaaaagtgtcctt

SEQ ID NO: 259431 - DNA, 620 bp, Homo sapiens
cttggttgctgaaacctttggttattttccagagttttgataaagttgattaggacagtttttgccagactgttatttttgtgttgtcacgccaagtgtcaggttccagcccatgctgaggtctgaggggagtgggtggacggatggcagatagctgaaagaacactcagggggccataggcacrtaaaatatggcttttattctctggctgctctgtctttatcttggttgcccgctctggctgcagcccttctcagcggctggatccgcagctcctgccatccccatggctctcccttacagggtcagcagctccactctctctttctgggtgtgaaccatatgtacagcatcagcagggcaattgtaccttttacagacaatagtggctgggagccaagtatgagtttacatgaacaggttatataacaagtagagttttgcacctgtgctccaaactcactgagtcacactggcccagatatctgactcaactcaccatagcacatagattttccttacacgtgtagagatagatttttggaatttctactctgccattgctgatataacacctggcttggttattcttggtccttgcatttatatataagtttta

SEQ ID NO: 259432 - DNA, 620 bp, Homo sapiens
cttggttgctgaaacctttggttattttccagagttttgataaagttgattaggacagtttttgccagactgttatttttgtgttgtcacgccaagtgtcaggttccagcccatgctgaggtctgaggggagtgggtggacggatggcagatagctgaaagaacactcagggggccataggcacgtaaaatatggcttttattctctggctgctctgtctttatcttggttgcccgctctggctgcagcccttctcagcggctggatccgcagctcctgccrtccccatggctctcccttacagggtcagcagctccactctctctttctgggtgtgaaccatatgtacagcatcagcagggcaattgtaccttttacagacaatagtggctgggagccaagtatgagtttacatgaacaggttatataacaagtagagttttgcacctgtgctccaaactcactgagtcacactggcccagatatctgactcaactcaccatagcacatagattttccttacacgtgtagagatagatttttggaatttctactctgccattgctgatataacacctggcttggttattcttggtccttgcatttatatataagtttta

SEQ ID NO: 259433 - DNA, 603 bp, Homo sapiens
tgaattttatcaatgcttttctgagtctattgagatgatcatatgatttttgtccttaaatctgtttatgtgatgtatcacatttattgatttgcatacgttaaatcatccttgcatccctggataaaacccacttgatattgtctttttgatattatctttatattatattatctttttgatgtaccattgaattagtttgctagcattttgttggggatttttgagtctatatttatcagggatattggtctatatttttctttttttgttgtgtccttatctggttttggwatcaggataatactggcctcatagaatgtattagagagaattccctccttctctatttttggaacaacttcttttatagtttttatttcaaaaggccttgattatataaaccatttgctttttactttgctgaaaagtgttccaagagtttacaatgaattacaatatacaaaacacaaataacttatttcttggggttgctatttaaataccaaaatggtaacacactcatgaaatgcttttgaacttaaaaagttggagaaatatttttctcgcaaacaggacaaactgtcattaatattacatagt

SEQ ID NO: 259434 - DNA, 532 bp, Homo sapiens
aaaaccaataaacaagttaggcaagattacaggatacaaaaatcaactgtatttctatacagtagtaatgagaagggagaaaatggttttagtctgttttgtgctgctataatagaatacttgagactgggtaatttataaagaaaataaattatttggcttatggttctggaggctgaagtccaagagcatgatacggtatctgacaagggcctctatattgtctcattccatggtgcagggcagaaaggcaagagagggcaagagagcaagwcagcaagagaggcccaaacttgcttttataagaagcccattcttgtgataactaaatcactcatatgacaatgacattaacccattcatgagctcagagtcctcatgatctaatcactgcttaacactgctgtactggggataagtttctaataaaggaactttggggaacacatttaaatcatagcaaaaattaagaaagcaattcaatttacaatagtatcagaaagaatagattgcttaaaaataagtttaacaa

SEQ ID NO: 259435 - DNA, 584 bp, Homo sapiens
tcagttttgaaatggaatttggattcttcactcttgagccccaatttcttcagcaagttgttctttggcatcaatagcagggtaaggattgttcctaaatgctttgatgaggactctaattggtaggaggtgtagctgggacaacactgtcatacttgaatcttttcttcaggtgatactgtccttggtcttggctgatccaggttcctgtgttctctggaatgggtgtctagctcttaatttctgaaacctaatctgggttctgattagtattgatttgtgaatatatgctaccaaytgtttggtatcataacctgggtaaggtttttggttgaaggcattgataagaattttcaatgaaacctctgtgaatttggtatgacagtgtctactgtttgtagctttggtcacatgtggacagctatgttatacatgttgcaagagagtttaggtgttcaaggatgtgactaagagtcaaaatatttttttactatggaaaatttcaagtaaatataaaatgagagaatagtgaacttgatgcttcacccaccttcaacattttttagtacaaggccaatcttatt

SEQ ID NO: 259436 - DNA, 283 bp, Homo sapiens
gaacttgccttgggtcttagatgagactttggactttgaaactttgagttagcactgggatgagttaagacttttgaggactgttgggaatgcatgattgtattttgtaatatgagaaggacatgagattttgggggccaggagtggaataatatagtttggatgtttgtcccctccaaatctcatgtcgaaatgtgatccccaatattgaaagtagggmttagtgggaggtgtttgagtcatggagatggatccctcataaattgcttggtgccctctccat

SEQ ID NO: 259437 - DNA, 283 bp, Homo sapiens
gaacttgccttgggtcttagatgagactttggactttgaaactttgagttagcactgggatgagttaagacttttgaggactgttgggaatgcatgattgtattttgtaatatgagaaggacatgagattttgggggccaggagtggaataatatagtttggatgtttgtcccctccaaatctcatgtcgaaatgtgatccccaatattgaaagtagggaytagtgggaggtgtttgagtcatggagatggatccctcataaattgcttggtgccctctccat

SEQ ID NO: 259438 - DNA, 606 bp, Homo sapiens
tgcttttcactacaaactttattgttttagacagcatcattaggcttaaacttttccatactgtgttggaaatgaagtcagttactctgtgaggagataaggaactatctgttttataggttgcttctcccactcaggaaaaacctccaagccaggggcatgacaatgttgcacttttcgcaggggcatattccagytctaggagctgagtacgccatggatgggaagagagtagcttcaggtctcctcagcttgcctctgccattgaggaattactatcttaggagctgggacaacagtgatgctgcaccaaacgtggagcctcagtctcctcagtggaggctgggtggaagaaggcagccccaccttttggctacactcaactgggacttatcttcagcagtaggtagctgtgggcaggatgagaaatgctgctgtcttgtcctttccaggaatatggccctttaactggcagtggggagtaggcaggagccctgtgctcttagctgcatcagtcttgagtgcagttcctatctcactaagctgggagcaggaagggagggagtgggtctaggttcaaagaccacaagatttgctgtccttact

SEQ ID NO: 259439 - DNA, 536 bp, Homo sapiens
agtgctttccaatggaaatataatgtgagccacataaataatcatacattttctaaatttattaaagataaaaagaaattttaatagtatatttttaatctacccaaaatattatatcaacatataatccacataaaagttactgagatattttgtttctttggatttagcccttgaaatctgttgtgtaktttacactaccaatacatcttaattcaggctagccatatttgaagtgctcaacagccacctatggctagtggctacctaccataataaagagtataagtctagactatttaccccagcccaccaggaaagggaggggaaggattcagtgcagaagctgtttccaggaatcagagatcaaactctccctgtaataaccccttagggagctgaaggggaaataaagggcagagttgagtaggaaacccctatgttaatatgggactcaactaaagctttcaaatccaagtagaaaaaaaaagttgatatgggatcagttggtggatcatgtaggcccactaacaaat

SEQ ID NO: 259440 - DNA, 536 bp, Homo sapiens
agtgctttccaatggaaatataatgtgagccacataaataatcatacattttctaaatttattaaagataaaaagaaattttaatagtatatttttaatctacccaaaatattatatcaacatataatccacataaaagttactgagatattttgtttctttggatttagcccttgaaatctgttgtgtattttacactaccaayacatcttaattcaggctagccatatttgaagtgctcaacagccacctatggctagtggctacctaccataataaagagtataagtctagactatttaccccagcccaccaggaaagggaggggaaggattcagtgcagaagctgtttccaggaatcagagatcaaactctccctgtaataaccccttagggagctgaaggggaaataaagggcagagttgagtaggaaacccctatgttaatatgggactcaactaaagctttcaaatccaagtagaaaaaaaaagttgatatgggatcagttggtggatcatgtaggcccactaacaaat

SEQ ID NO: 259441 - DNA, 558 bp, Homo sapiens
ttagttacttatgatacagtgtgtctttgcttgaaagaagctattattgataaacaaataaagttttatatgttttgtctaataacattttaatgagaaattattactataatatattctgacatcactcgataagtcaatagcaaaaaccagtaagtataacaagagtgtgtgaatgaacatatggcatcgtacttcaaggattttgtaatatggtaaattacatattgtaattttgtaatatttaccatattacaaaatcyttgaagtaggattgatctctttttagagatgattgacgtgaggttcctggaaatgggataatttgccccctgttacagagctaggcttgggtcttgtgggcaatacaccctctcaaaagttaaataagtgagaaatcaaagagtgaaagttggcacgttggtcacacttcttttttggaggtggtatccatcacctcaagcatttatcatgtctttgagtaaaaaacattctgattatgctgttttagttatttttaaatgtacaatacattattgttgactgtagtcgccctgt

SEQ ID NO: 259442 - DNA, 592 bp, Homo sapiens
attacgtgtattgactgcttactatgtgtgaagcacattatctgcctgacctaatgtgatccatgagaaaattgtaacaaaaagagaaaagctttcaggggttaagaaatttggctgaatttacatagccagtgtgtgggagaacaagaattcaaagctagatctcactggtaacagagccacatctttcaaccaaatacctatcctttaaactggtttcacctaacctcacccacactgagttcaggctaaacgtattttccctagcactcatatttggtccactggttcttttaaagtcaacctatgatatctccacaaataaactgaaaacttcttatggacaaagactttataaattatttctytttaatttttacatgactacctatgtgtttgataccaagtagatacacaatgtttgctgaatttaaatgtgttctcatccatggctacataattgttagccccatcttctccactcagctctgacaataacagaaaggcaggtggggttcctgaaaacaggactagacttgcaaaagacctgagttttgcatccagctttgccttactttggttgtgtgctatt

SEQ ID NO: 259443 - DNA, 600 bp, Homo sapiens
tatcatgctgggcaatggagtaggtaaaacatttccatggcaaactttcaaggatccatcgtttatggccgcactccctgtcctctcttgtcttcttttaaaatgccagtcgtgtatggatgaggcacatgtttcttctgccagtgcctgctcaagcagacagtttactaatttgtagctcagtaaacctttcactgcactgagcaccttgaggttagcaaatctctaatcattatttgataacagaaatctgcaagcatcacatccctggtaacaagaacattgtatcttagcaaccagccgtgatattcaaacaatttcattaaagcgtagcacctcttagcaggtgggtgagygcgggtgttgataaacatttataacatgatcagccattgtgtttgccaacactataatcagcatgacaaatttatgaatttgtttacaagctcctagatagccaatctatgtaggtaaactacatttcagactggttaggagatccaaatatcagctccttattttaaatggagagtttctttagaaacctatcaatttaaaagactgccaacctgctctcagtacagagacatcatatttcca

SEQ ID NO: 259444 - DNA, 572 bp, Homo sapiens
tccatcacggtcatttgaaataattagctggtagggggattggccatagaataatatacttaaggcaaatttaaggatatgacactcagaaaaaaggtagtagagctgatggattttttctctttatctttgcaatgctagtttgtttgcttgtttgtttttccagaagggaatcattctgaaatcttaatttccacatggattttctctatagtcaytgatcattagagaggcaggatcagaccaaaaaatgctgttgtttcacaagttttatttggtttgcttttccaaattaagttgtccctatattagcaaccagtacagtcaagctggggctacagagaatcaagtgaaagacaaagtgcaatgcaagaaaagatgctaaatcagagtgataagttcctactgatatctaaggatatgtgcaacatagtaagaaaaacggatgaaaatcttgtaaagggaaaaggcttgtgcataatattcacaaccgagtacctgaaataaacagtacaggcaacactggttggcaggtcacagcttgtgccaggatgaataacagtgcaatcaat

SEQ ID NO: 259445 - DNA, 649 bp, Homo sapiens
gtggttagatttcttgatttgggtttgcaaagttactatctactcctgaactgtaatgcaaaatttgctttctagttaagcctagaatacttaaagttatctctcaaattgttttagcataatgttttaacaaatctgacccttggaaagacatccaagtgtcactaaatatctcacctagctaaattgaggccataatatgaatgtcaactttgaattctaaatgcgtttattcattgtctatcaatttgccaacctttccaaagtgtaagtttataaaaatcatagaaattgatattttcttggggctgcctaaagcctcaaattatatttgtcaatgactcattctagaggagaactttagtaatgttctattattgcctcatattcctgtgcycgtgttagaaacacctcagtatctttgcctttctgccaccacctcctacctacttcctcccgagttatgagactcaaggccatgttataatgacctcggctgtcatttcactaagatttttccaatatcaccactaagtcctcctaaaaacacacctcccttaaatcgtccatctaaacttctcaggggaagcctgcccaaaaataaaaagaaaacaaacagaaatccataataatgtaaaggaagccagca

SEQ ID NO: 259446 - DNA, 549 bp, Homo sapiens
cattttgacatcagggacatttacaatgatcagcaaggacacagacattctccatggtaactgtaagtttacttgtttatttagaaaagtccagagtcaatggcatgcaaactcaaacagggccttagagagcactaagttcagttccctcacttcccaggggtggtaagttaggctccaaaaggtaaggggcttgcccaaaacacatacaaaaaggaagtgcctgacccgggcactctaaaatcacaaacacagctttcctctccaatctctatactcaagaacagaggaggactcagaactataattgtrtgactcacatcagtcagtgtctctgaaatatacaatcctaagcaatgtagttaagcctcctaagtccacctcctctcccctacctggggagatcagcattaatgatgagctgaggtaaaagagcttagaggcttgaaggggccacaaagggatttgcagtgcagggagggccacattcctgaactttctcctctcctggaaggtgcctggtgtgcttcgaacctacaatgtccatcg

SEQ ID NO: 259447 - DNA, 534 bp, Homo sapiens
agtgggaaactggtaaacaatataaactttaatattatcttcagggagtttaaaattataatctttaataagtgatcttttcatatcattctaacttagaactatgtctaggtatcttttctttaacatttaggtacatgagcttatttatcttcttgctaaagttcaaaatctaatttctaacacaggttacttgcygtaataaactctacaagctttaaaatgacaggttgaaagatacgattttttagagttatgaattaatagctatatatgtcaaagactttgaaagggccaactttttcatatttatagatatattattgaaatgataaaaagtgaactgtggaaagaggaaagaactgagaaccacatataatgaatcaaacatacttaacaagacatgtacagacactttggtgtgcatctcttttattacgttacattaatcaaatactgttaaagacatccatctgagcaaagtgtcatgatgatattctataaaaacattcttttgaaaagagtctgtcctga

SEQ ID NO: 259448 - DNA, 534 bp, Homo sapiens
agtgggaaactggtaaacaatataaactttaatattatcttcagggagtttaaaattataatctttaataagtgatcttttcatatcattctaacttagaactatgtctaggtatcttttctttaacatttaggtacatgagcttatttatcttcttgctaaagttcaaaatctaatttctaacacaggttacttgctgtaataaactctacaagctttaaaatgacasgttgaaagatacgattttttagagttatgaattaatagctatatatgtcaaagactttgaaagggccaactttttcatatttatagatatattattgaaatgataaaaagtgaactgtggaaagaggaaagaactgagaaccacatataatgaatcaaacatacttaacaagacatgtacagacactttggtgtgcatctcttttattacgttacattaatcaaatactgttaaagacatccatctgagcaaagtgtcatgatgatattctataaaaacattcttttgaaaagagtctgtcctga

SEQ ID NO: 259449 - DNA, 564 bp, Homo sapiens
ttgcattatccaagcaggcacaggagcaaatgcccattagccatctacagaaatagggcactatccagagtcatttaggaggattgaaaacaacccaaaaaaagtggtaaataacctttaaagggyatatgttaataaaaatgtcaaattatatctgacctgagctaagcagtatgtttattgagccttttaggtagtacttgcaaatattaaaactctttaaatagttgctctgacaactttgaatggtaaagagctaatttttactttgacagagatgtatttattgtgtttacattaaaacaggtcacatggtcctaaatggcttctgaggtaggaattagtttcctatttacagttatgcaaattccctagctgatccacagatactgatgagatccagcagggtcttaggaaggaaagtaagcctcagggagccttagtaaaggaaggagggaaagtatgagacagagattaaggagaaagctgtgatgatgaagaatgggcagtccacagggttaaggaaccctgagagttaactaacaggaaggatctgcttggctg

SEQ ID NO: 259450 - DNA, 500 bp, Homo sapiens
aaaaaaaaccagcacaaaaaggctaaatattccaaaacccagaacgtgtcttctcctccaaaggtcacaactcctcgccagcaagagaacagcactggacggagaatgagtttgacatattgacagaagtaggcttcggaaggtggttaataacaaactcctctgagctaaaggagcatgttctaacccaatgcgaggaagctaagaacattgataaaaggttacaggacttactaactagaataaccagtttagagaagaacataaatgacctgatggagctgaaaaacacagcatgagaacttcatgaagcatacccaagtaccaataactgaatcaatcaaaygaaagaaaggatatcagagattgaagatcaacttaatgaaataagtgtgaagacaagattagagaaaaaagaatgaaaagaaacaaacaaagcccccaagaaatatgggactatgtgaacagaccaaaccaacatttgattggtgtacctgaaa

SEQ ID NO: 259451 - DNA, 561 bp, Homo sapiens
catgaaaaagtttgaaatggtgtgagagttaccaaaatgtgacagagacacaaactgagcatgtgctattgggaaaatggcaccaatagacttgcgtgacacagggttgccacaaaccttcaacttgttttttcttttttttgaaaaagcattatctgtgaggcacaataaatcagagtacaataaaatgagttatgcctgttccatcatgggtttgcatcactcaggaaagctagtggccttgggaatacttagtctaggcattgaataatgtccaaaaggtgactctgacctccccaagttggatattagccagcattccagatatgctgagatgctttgactgatctaaatttatccaggaaacaggactcartgtatttgcttcactgagcttccttttaccttctgtatcattctcacttgttccctcaaatttagttaataccattctagtgagaccactggttcctggtgtccaaggaaagaactaacacctgagttataaaataggcatgtagcacacacacacacacacacacacacacagcacccattgag

SEQ ID NO: 259452 - DNA, 620 bp, Homo sapiens
agttgatttcctaataatgaagagaaatttagaactgtggcaaaggcaaacaggcaaaacaaaacaaaacaaaacctgacagcttcatagactccgcctctgaatggaatgttggggactgtcttgccaattctgccaaacatccaggtagaacactgagtacactgactactttaactaaaacaatctggttttacacaaacccaattcacgtgcaaccacgtgtgaagcttactgaacttctaggccaagggacagtttttgcctaaggaagaagctaagttaattaactgagctgaacataggtaagtttataayctaagatacttagtttcatgttacctagaagaaacatctagatgaaaagagttcctaggaagaattccaaagtatgcaaaatgaagagagggagagctatacaaatcatctgtaatgtgaaacaaaacaaaattaagagttttagctcaatttgtaggaagaaataatttctagaaaaaaattacataaaagcaaggtggatttgtaagtgtagatcttcaagttaacactgccactttagatggtaactattttaataatccctcaattttaagctactgtaaaaagatgagctgaagagt

SEQ ID NO: 259453 - DNA, 593 bp, Homo sapiens
tatacatccagttgtaaataatgcatattctgctgttattaggtacaatgttcaaaaatgactattaagccaaattggttgatagtgttcctaatgtcttctctttattgataccctatttttctatcaattattggggaaagagtattgacatctccaaatgaattgagtatttttttatttctcctttcaagtctatcagtttttccttcatatgtttagaagctctactattaggtaaatgtatatagagaatggtgatgtcttcttaatgaattgatccctttaccattatacaatgtttcttttaatccctgataatattccctgccttgaaaaatactttatcaagagtttttagcatgaagtgttgttgaattttgtcaaaggccttttctgcatctattgaggtaaycatgtggtttttgtctttggttctgtttatatgctggattacatttattgatttgcatatattgaaccagccttgcatcccagggatgaagcccactttatcatggtggataagctttttgatgtgctgctggattcggtttgacagtattttattgaggatttttgcatcaatgttc

SEQ ID NO: 259454 - DNA, 616 bp, Homo sapiens
aggtgaaactaatgccatagatgtttgattcattaggagcttattgttaacggggatgtctgattgtaaaggctcagtcaagcaaaagagtgcagagtaatcagtcggatttatagtttgcagggctcagaaaaaaaatcaacataaacctttggatatagcagaaacagaaaaatcccctttgggcagccctaacctggaaccagccaaataaggtcatgctacatgarggtttcctgttaggtgatgggagatagggacggattagagccatatggcatggcctatcttaccttctgacttaagataacaaagccaagctttgtgcttagctgtttttgactgacatcatcaattttattttatgttggtcacctccggtaacaggaaaaaatggcctagggttgataacacatgctttttttttcttttagtattaagatgcctagaagctagttttgtgctgttaaaaatttcaaagaattagtagcttcctcttctatcacccatcctccagcaactgtcagcccccctcccccttgttttcagtttgtaccttgcaaatgagaggcagccttattcagaaccagatgtaaggctcctagagaatgagcat

SEQ ID NO: 259455 - DNA, 595 bp, Homo sapiens
tcttttgccaacatcctgtattcacaaaagcgatgcagaaagaattctttctagttttagtgtctgccctaaacatgggctgtcaaagctccatttaaaagaaaggtatttgaaatggattcttgtgtggtattgattagtgactgtgaaactaatacattgaaaccactcccaaacaagtcaaattctgacttgaggtacatacatatggcttcggtgagatatgaatgttttcttttcactctattgagtatatgatacccatatcctttgaagcaaaagggatgtgtgtgagtatgagwgtggggtgtgtgtgtgtgtgtgcgaatgtgtatgtaggtagaggggatgagatagggaaagagaaatggaatgaagaagaggggatgggaatgtggaaagtttttggtcgaggttccataagcatcagaaaataaaagcattgtgggtagagatgagagtaacaggacagtcccggggcttacaccttggaacaagtagggtaatgctgccctttgatctctgtcacctctcaccaatttcatgcaccctttctgtctcaggagggtatgcagcaaagctgagagaaagagag

SEQ ID NO: 259456 - DNA, 557 bp, Homo sapiens
tattattgtaatgttactttggtatcaaataatgtctttattctcagtgacctctctccctcattactctccaaattgcagcttttggtagataaaaaggcaaacaaatgcaatggccaagaccaattttgatgaattaaaaataaatgtcttcaattttaatatacttttttttaggaggaggaaaaagaaacaagggtagtaagagtggatatattyttataactatgttgaagagcaaataccagatgcaaaattgggagagatcctttagtttcaaatagagctaaacagttttttttttttttttttttttgaggttatgggctttgccacttagctaatttgaacagtaatggagaaataaatatcagtagctaagcagataatctatccataaggcagaaagacaaaaaccaaaaatttatttaattcaaacatgtaattcctataggctctactagacatgaggtcactaaaggtataaagaagtatgcagaaattaagaaacagaacagacaatggttatctcagtggttttatcaccaacttgtttc

SEQ ID NO: 259457 - DNA, 602 bp, Homo sapiens
aaggccatttttcatgagttcaaggacttctgagggattaggtggaataagtgaatttctaatcccaggaggcttctattcctcctagtcatctccatctcagytaatggcccaccatcctctcaatgtccagctcaaaaacatgacggtttttttttatccctttttccatctcattctaaaagatagcctgaatcttccctgcttcaattcttcattagatccccagcaagcagacactttgctatttgaaagcctcagtcagatcaagttgcttaatattcccccaaaggctgcccattgcatttggaataaattccaacctgcaagtccctcaaattcccagcctaacctcatttggcattttcattatgcatcagccttcccgcctcctttcttttccgtggactcaccaagctcattgtcacctaagagcatttttactaattttttttggtccctctcttccaataaaaaatcagctgaaatatcccagctttagagagcccttccctggactagcagcctaaagcgttgtgcccatgagtattttctcctctcatttgtgaagaagcaggtcactgtctttatatttatttttc

SEQ ID NO: 259458 - DNA, 441 bp, Homo sapiens
tttatatttatatttcaaattaaaacaagtataattttcttctgaaatttttttggaattttgtttttcgtgatctgtaaggtaattggagataccccaggctgtcacaaaaccagagctgggaatcactgctttagtgattagcactttgtaagctttcaaaaaatattaaaaccaggataggttgtctaatttctaatgggtggattcactttagtataatgtaatgtgttaacaaatgctcagagaggaggttgtggatccagaaagatggcttttgcagaaggsttttatccaaattaattcaaaaaataacaggaacagttgtgtattgaggcagaaggaataaggtgactcaattaaatgacagagaaatctccaggaaaaaaaactgtcttaagtcaacccaaccctaacagtacaattttcatcactggagtc

SEQ ID NO: 259459 - DNA, 651 bp, Homo sapiens
actttagtgttgtggaagttggacagagtttttattgaatctggtcctttgtgttttatgacagtctgaatgggtattaagattccacgaataaatcccctgccatttctgagatttctgatataaacatgagctccgtcaatttgttctctgtacaaatgtctttcagaatgttaacaaacatggtgcattgatgaatgggctggcctatggagtgcagtctgctttacttggtagggcatgttgctatgatttttcttttgtttctcaatgctatggccacccagaaatgggggctgttgaggggtggtgaacttcaagacttgaggacagkggagagttagctcaaggctggttggagaagtggtgttaatggccttcaattgaaagtctggccagacaccacatcaaggggattgtggattggccctcaggaaatgtattaagtcttttcttaagtgcctcaggtgaattacttagaggaacacaggtagcaaagaagagaatatatttttaagatataatctttctatattctgcataagtttgtattttttcagtgtactttaaactcaaatgtcaaattgataataccctaaaattagtttccaactaaatactataatttaaagcaagcaagccaaaaaaatt

SEQ ID NO: 259460 - DNA, 651 bp, Homo sapiens
actttagtgttgtggaagttggacagagtttttattgaatctggtcctttgtgttttatgacagtctgaatgggtattaagattccacgaataaatcccctgccatttctgagatttctgatataaacatgagctccgtcaatttgttctctgtacaaatgtctttcagaatgttaacaaacatggtgcattgatgaatgggctggcctatggagtgcagtctgctttacttggtagggcatgttgctatgatttttcttttgtttctcaatgctatggccacccagaaatgggggctgttgaggggtggtgaacttcaagacttgaggacaggggagagttagctcaaggctggttggagaagtggtgttaatggccttcaattgaaagtctggccagacaccacatcaaggggattgtggattggccctcaggaaatgtattaagtcttttcttaagtgcctcaggtgaattacttagaggaacacaggtagcaaagaagagaatatatttttaagatataatctttctatattctgcataagtttgtattttttcagtgtactttaaactcaaatgwcaaattgataataccctaaaattagtttccaactaaatactataatttaaagcaagcaagccaaaaaaatt

SEQ ID NO: 259461 - DNA, 388 bp, Homo sapiens
catttattataatccatgaacctrcattgacacaccattatcagccaaattccagagtttacattagggctcactcttggagtagtacattctatgggcttggcaaatgtataatgatatgtattcacctttgtagtatcatacagaatagtttcactgcctaaaatattctctgtgctcctcctattcatcccaccttcccccttaacttctggcaacaactgatctttctactatctccaaatattggcatttgccttttccagaatgtcatgtaactggaatcatacagtacatagccttttcatattggtttctttcacttagtattatgtatttaaatttcctccatggcttttcatggcttgctagcttatttctttttagt

SEQ ID NO: 259462 - DNA, 609 bp, Homo sapiens
atgcttgctaaaattatataatattatttgccctcctatttcagtttcctagaaaactgaactcaacttattttatcccgtgttaaacaacaatcaaaacaatataatcaggatactgtgtagaaatttttttcctaatttatggcacccaaataaacacaaaagcacatcaacccatttcacattgctccagaaatacggattttctttgtatttgaaagcaatgtgtcacaagagcacaagacatggaatgtgataatctgaatattagaccctaatttgccacttactgcctgtcatcttgagccagtgactagacctccatgaacctcagttttctcatcytaaatttgaaaaccatttacaaccttgcacaagtattgtgaggagcggctaaaagtcaaaaaaaaaaaaaaactcaagtagagtgcctggcacttaatgaaaacctaaaacatggtgacttctatgatagttgttaccattgcacaccaatgtgcttcactgaagcatgagttcctgcaggacaagtgccatgtttcaatcatgtcatcttgctgaatataactaaaattcaaaattggaaataaaaagttgaagattttaaat

SEQ ID NO: 259463 - DNA, 513 bp, Homo sapiens
attaaaatggaactgccatttgatccagcaatcccattactggatatgtattcaaaagaaagcaaatcattctaccaaaaagacacatgcacttgcacggtcactgcagcactactcacaatagcaaagacatggaatcaatctaggtgcccatcaatggtggattggataaagaaaatgtagtacattacatatacatcatggaatactacacagccatgaataagagtgaaatcacattctttgcagcaacgtggatgctgctggaggtaattatcctaggtaaattaatacaggaacagaaaaccaaataccacatgttctgacttataagtgagagctaaatactgggtactcatggacataaagatggtgatgacagacactgggaactactagaggcaagagggagggaaggcagcaagggctgaaaaactacctattgggtactatgcccactacttgggtgatggaatcaatcatacmccaaagctcagcaccacacaatatact

SEQ ID NO: 259464 - DNA, 579 bp, Homo sapiens
tataagtagaaaaactgcaggtcaaaatcacacaacaaaataagacataaattacttgaaacctgatacytgacatgcatttcatccccactcttttaatagagccttcctcatcaactgaactcagagtgaaaaactgcctccaccaacaccacaaaacttcatattttctgtgaaacacacaaaaactcagcaggtgcaacctgaaatttcttaggcatagataaatttaatgccatgtaattaatactatgtaactaatcttgtgtccactttgttggactactctatttattctggagtagttcttaatcctgtaaatatagatagtaccaccaagtatgatcgtgtatgtcaacattttccaacctcactgcaagcactagcaagtcaatattcttctgctctcccacattcctatctcgtcacactgatgttacagctcagttttttattctttcccccacataattccttttcttggactcctaggatttccagcagaaaatataaatgttttctggccatccatttaatctggattgtgatttatgcctcaaaaacaggatcttaatttta

SEQ ID NO: 259465 - DNA, 563 bp, Homo sapiens
cacaagcaaaggggaaaagctgagaagtatcctggctttgttacaacccactctctctggaactaatccattcccatgaggactcacccagtcttcccagagcaagaactctgacttgttgcaggagaacagcaccaagccattcatgaggttttggtgagaacaaaccacagcaatacattaacttgaatacactaattattcaccccattccatttaaaatgacactgtcattgcccccttgctgcagatgaggaaatcaaggcttggaggagggctaagttgcctaggatcccctaccctgaaagtggcagatccggaattgaacccagccagtttgactccrgagtcagaactcttaaccacagtaccacactggactgtcccagatagcatattccctaaccaaggtgtatactgagcatggagcattgcttggtgctaaagaaagtctgacttagccccagataatttagcaagtcatgtttccctgagtgataattgtcaggaacattctgtcatgttggacatgctgacattttgggggtggaaaaataagtgga

SEQ ID NO: 259466 - DNA, 600 bp, Homo sapiens
atttgggaagctatgactgctggtggtgacatgcacacagagggtagaccccatcttcggccagagggaggtaggagcaccagtccctgccacattctcaatccacagacacccacagccagcctttactttggccctactagatggcagtggggcaagaacaggtggtcccagtggctaagcagccagcacttctggccttcccacctagactatctctgtacccttctctaattgaaaggacagtctcactttgggccagaaaccaccattacatgagggatggacactatacattttgaatgtggacacttggttatgacastgcaactataaagatagccaattttcttccttgtcttctcctgaagataatcctccctcttactgactgaagctctggttccagctctgctcacgggcaatgcctggctttatacagttataaggccatgctatggactagctgctggctcgacagctggcccttcctcctgagaggaggatgtggtgggacatggcttgctgggcctggcctaccattcccacagggagcccgaggtggagtgagcctgtgaaaattagcttgccaccttggca

SEQ ID NO: 259467 - DNA, 595 bp, Homo sapiens
gttgggaacttaccaggagtcaggcttccagcacatctgggtagaggaggaactttgacatctttggctgtgcacaaagacagaatgttatcaagtactgtggatggcttgatgactcaatggggttgcttttatgcttttattttggtttctttataaattcttgaatataagccaatcagactagtggatctctagcctcagcacaaacatgaaatgttaacaacgcagagaaacttttacctatagaacataggcagtttcaccatcagcgacttcagtaaaaattccccaagaagctttctggataagtcatatagaaaatttgcattactatacacaacagccagattaggaaaagggaagaacaagactaayaagcccctcacaatcccaacagaaaaaaacaagtacaagggcatgaaaaagacaatcattgaagaagaaatgtaacagagcaataaatactggaagaggtctaccaatctcaaagaaatgctaattaaaaacaatgaagtgcaagttttaacctataaaagtgacaaagattactaaaacccacaaataccccctagtaataggaattgtgcaagca

SEQ ID NO: 259468 - DNA, 580 bp, Homo sapiens
gggggacgttctggggccggtgatttcccgggcgtccctggggccgcgggtctggagcctcctgcgaccgctccgggctggcccgtgctgtctgcgctacattcacagagggccagcgtcgtgcttctgtcggaaggaggtgggagggacggaggggagagaacacacaaagatgctattattttgtcggttggtggcagtaaattaaactcctgagttcccaaaatgttttgttattctccagcagagcaaaaaccaggatagggactagggattcgggtgtcctgggttctccaagatcctcccaggaatcccaggcagccaaattggcctaagggactctgctcacttaatacccgaagctctctaagacagccttcgttgatctagttgacsaaggaaggatcaactagaactgccgctgccttgtgtggccagcgggaattgtgcacgggtcaccccattggtgtgtctggagcagagaatagagaagttgctgtaaaccgatttattggtaacccctaaccttgctgtggcaaacccgccttaaaatacgattgtgttttaaacaagtttcctc

SEQ ID NO: 259469 - DNA, 363 bp, Homo sapiens
tagacatggaaataatgataggtatttcagaggactcaccactagcatgtattttaggttattagagcatttgaaattcagcttagaaaacagaaactccttttctattgcaacacctcttgggtccaataaaaatgagaaaaccaagagatttggcctaaacatggttctatacattataytgctattttacaactggacttattctgtttttttttttttaaaggaaaatggaaggaggtcccttgtgtacaggcttttatggccttatactggctcctgttaattttagacaccagaaagtcatgcccaagggattccctcctagtggttccccctagaagacctacaccctctgtagcc

SEQ ID NO: 259470 - DNA, 363 bp, Homo sapiens
tagacatggaaataatgataggtatttcagaggactcaccactagcatgtattttaggttattagagcatttgaaattcagcttagaaaacagaaactccttttctattgcaacacctcttgggtccaataaaaatgagaaaaccaagagatttggcctaaacatggttctatacattatactgctattttacaactggacttattctgtttttttttttttaaaggaaaatggaaggaggtcccttgtgtacaggcttttatggccttatactggctcctgttaattttagacaccagaaagtcatgcccaagggattccytcctagtggttccccctagaagacctacaccctctgtagcc

SEQ ID NO: 259471 - DNA, 363 bp, Homo sapiens
tagacatggaaataatgataggtatttcagaggactcaccactagcatgtattttaggttattagagcatttgaaattcagcttagaaaacagaaactccttttctattgcaacacctcttgggtccaataaaaatgagaaaaccaagagatttggcctaaacatggttctatacattatactgctattttacaactggacttattctgtttttttttttttaaaggaaaatggaaggaggtcccttgtgtacaggcttttatggccttatactggctcctgttaattttagacaccagaaagtcatgcccaagggattccctcctagtggytccccctagaagacctacaccctctgtagcc

SEQ ID NO: 259472 - DNA, 467 bp, Homo sapiens
gaccaacactctcaagaatggcaagctctactatgtatacattttattactcaatctgtccctgacattaggagaaagctacaaaaagcagcagttggacctcaaccccttgtgagacaactcttaaaygtagcctttaaagttacaaccatagaggcaggaaaaagagagacagccaagaagcgcatttgttgatagtttctttagcccctttccaccacagaattacccatcttgagaaagaaaatgtcatgagatcagcatctaggatgcccagagaagagcccccaacatcccagcccctgggccaaaatcagtgtgcatactataagcaaaagggccactggaaattagaatttcctaaacaaccccagtgagcgcaaaaagcttcccatcaatactagagctaacttccttccactagccccaacgagctgccttgctcaagtaagtttactaggagactt

SEQ ID NO: 259473 - DNA, 467 bp, Homo sapiens
gaccaacactctcaagaatggcaagctctactatgtatacattttattactcaatctgtccctgacattaggagaaagctacaaaaagcagcagttggacctcaaccccttgtgagacaactcttaaatgtagcctttaaagttacaaccatagaggcaggaaaaagagagacarccaagaagcgcatttgttgatagtttctttagcccctttccaccacagaattacccatcttgagaaagaaaatgtcatgagatcagcatctaggatgcccagagaagagcccccaacatcccagcccctgggccaaaatcagtgtgcatactataagcaaaagggccactggaaattagaatttcctaaacaaccccagtgagcgcaaaaagcttcccatcaatactagagctaacttccttccactagccccaacgagctgccttgctcaagtaagtttactaggagactt

SEQ ID NO: 259474 - DNA, 467 bp, Homo sapiens
gaccaacactctcaagaatggcaagctctactatgtatacattttattactcaatctgtccctgacattaggagaaagctacaaaaagcagcagttggacctcaaccccttgtgagacaactcttaaatgtagcctttaaagttacaaccatagaggcaggaaaaagagagacagccaagaagcgcatttgttgatagtttctttagcccctttccaccacagaattacccatcttgagaaagaaaatgtcatgagatcagcatctaggatgcccagagaagagcccccaacatcccagcccctgggccaaaatcagtgtgcatactataagcaaaagggccactggaaattagaatttcctaamcaaccccagtgagcgcaaaaagcttcccatcaatactagagctaacttccttccactagccccaacgagctgccttgctcaagtaagtttactaggagactt

SEQ ID NO: 259475 - DNA, 455 bp, Homo sapiens
aaaaagggggtcagacatgcctcactatgtcccatttacaatgtaggctaggttcacaaagaccttcaagaatatagaaatacagtattgtcycctcctcaaaaatttagtcttactaaaaacttaaaaagaagaattccctgagaatcaattacaagcaaaatgggagggccatactatcaggtattgttaagtatcctctctgctattaaatttcatggaatcactagctgggtacacctgtccaagattaaactggtttcttataagtcctcataggcataagagtaaggtaccgtggcttacacttataaactccaaaaagacttaaagttattatttcatgaacacatagataaataacatgatgctgtgggtgggcttaggaatattaatttttctcttcctcatatgctgtgggtgggcctaggaacattaatttttctcttcctcgt

SEQ ID NO: 259476 - DNA, 455 bp, Homo sapiens
aaaaagggggtcagacatgcctcactatgtcccatttacaatgtaggctaggttcacaaagaccttcaagaatatagaaatacagtattgtctcctcctcaaaaatttagtcttactaaaaacttaaaaagaagaattccctgagaatcaattacaagcaaaatgggagggccatactatcaggtattgttaagtatcctctctgctattaaatttcatggaatcactagctgggtacacctgtccaagattaaactggtttcttataagtccycataggcataagagtaaggtaccgtggcttacacttataaactccaaaaagacttaaagttattatttcatgaacacatagataaataacatgatgctgtgggtgggcttaggaatattaatttttctcttcctcatatgctgtgggtgggcctaggaacattaatttttctcttcctcgt

SEQ ID NO: 259477 - DNA, 455 bp, Homo sapiens
aaaaagggggtcagacatgcctcactatgtcccatttacaatgtaggctaggttcacaaagaccttcaagaatatagaaatacagtattgtctcctcctcaaaaatttagtcttactaaaaacttaaaaagaagaattccctgagaatcaattacaagcaaaatgggagggccatactatcaggtattgttaagtatcctctctgctattaaatttcatggaatcactagctgggtacacctgtccaagattaaactggtttcttataagtcctcataggcataagagtaagrtaccgtggcttacacttataaactccaaaaagacttaaagttattatttcatgaacacatagataaataacatgatgctgtgggtgggcttaggaatattaatttttctcttcctcatatgctgtgggtgggcctaggaacattaatttttctcttcctcgt

SEQ ID NO: 259478 - DNA, 455 bp, Homo sapiens
aaaaagggggtcagacatgcctcactatgtcccatttacaatgtaggctaggttcacaaagaccttcaagaatatagaaatacagtattgtctcctcctcaaaaatttagtcttactaaaaacttaaaaagaagaattccctgagaatcaattacaagcaaaatgggagggccatactatcaggtattgttaagtatcctctctgctattaaatttcatggaatcactagctgggtacacctgtccaagattaaactggtttcttataagtcctcataggcataagagtaaggtaccgtggcttacacttataaactccaaaaagacttaaagttattatttcatgaacacatagataaataacatgatgctgtgggtgggcttaggaatattaatttttctcttcctcrtatgctgtgggtgggcctaggaacattaatttttctcttcctcgt

SEQ ID NO: 259479 - DNA, 459 bp, Homo sapiens
attgttttgcatgtggatattcagctttcccaatataatttgttaaatactatttcaccaaggaatggcactggcacccttgatgaaaattatttgaccacatgtgagaccacatttgggggcccctattttattcaattcaacaatttgycactcttcatcccagtatcaaggtattttgatttccgtaaccttttagtaaaatttgacataagaaagtgtgagtactacgacgttggtttcctctatcagatagatttttttttctgcctttttgtgtcccttgtgattccatatgaatttgagtataaacttttctacttatgcaaaaaaattttggaatgttgatagcaattgcgttaaatctgtagatcgctttgggcagtataagcatcttaataatactaggtatagcaattcacgaatactggataactttccatgtactactgtcttatt

SEQ ID NO: 259480 - DNA, 459 bp, Homo sapiens
attgttttgcatgtggatattcagctttcccaatataatttgttaaatactatttcaccaaggaatggcactggcacccttgatgaaaattatttgaccacatgtgagaccacatttgggggcccctattttattcaattcaacaatttgtcactcttcatcccagtatcaaggtattttgatttccgtaaccttttagtaaaatttgacataagaaagtgtgagtactacgacgttggtttcctctatcagatagatttttttttctgcctttttgtgtcccttgtgattccatatgaatttgagtataaacttttctacttawgcaaaaaaattttggaatgttgatagcaattgcgttaaatctgtagatcgctttgggcagtataagcatcttaataatactaggtatagcaattcacgaatactggataactttccatgtactactgtcttatt

SEQ ID NO: 259481 - DNA, 186 bp, Homo sapiens
ctattctctattcttcaggggtcgagytgtttccttgagtagttccaatgtaagcatctggatgtttcagctgaaggtaccgtatttgctcaccccttccatttctctccatgaaagccacacaccctagctgcttctagtcagccatcttgggaataccctgattgatttttatagggtgaattt

SEQ ID NO: 259482 - DNA, 571 bp, Homo sapiens
gttactactttgtaacttttatttttatgtaactttattttaactttattttattgtaactttattttaaaaacaaagtatttgctattgtatttgttcaaaaaagcttacaaatcaaaatgagagaactattctgtttgtcaaccctgagaaactacttaatgttttctgactcctttcgatgtatagtcagcattcgactwtccatatctgaacctcctacacacactgtctctttgatgtaaaaactgcaggcaaaaattccatattgcatgcatttttgccttaaacctttttaactgaaatgatatagatgaaaagaaaccatacagtggcggggggagtataaaaaaactagacaaaagtgaatgaaagaatttctattcaattattactccccacaaactcagtttcatgtttaaaattttcttattaaaactatttaaatcaattgcaggttaaaactgtaatatttttctcatatattttgtcttacttaaacatttagtttgaattaagtaataaaatattattcttttatgcataaaatttgccatttgctattctagaa

SEQ ID NO: 259483 - DNA, 571 bp, Homo sapiens
gttactactttgtaacttttatttttatgtaactttattttaactttattttattgtaactttattttaaaaacaaagtatttgctattgtatttgttcaaaaaagcttacaaatcaaaatgagagaactattctgtttgtcaaccctgagaaactacttaatgttttctgactcctttcgatgtatagtcagcattcgactatccatatctgaacctcctacacacactgtctctttgatgtaaaaactgcaggcaaaaattccatattgcatgcatttttgccttaaacctttttaactgaaatgatatagatgaaaagaaaccatacagtggcggggggagtataaaaaaactagacaaaagtgaatraaagaatttctattcaattattactccccacaaactcagtttcatgtttaaaattttcttattaaaactatttaaatcaattgcaggttaaaactgtaatatttttctcatatattttgtcttacttaaacatttagtttgaattaagtaataaaatattattcttttatgcataaaatttgccatttgctattctagaa

SEQ ID NO: 259484 - DNA, 646 bp, Homo sapiens
attgcacttcagttgctttctaatctagatttggtgttagtatcataagtatgttttttcttattattattattttttttggagccagagtcttgcagtgtcacccaggctggagtgcagtggcagatctcagctcactgcaaactccacctcccaggttcaagtgattcttgtgcctcagcctcctgagtaactgggactacaagcacatgccaccacacctggctactttttttgtttttagtagagacgaggtttcgccatgttgggtaggctggtcttgaactcctggcctcaagtgatcaacccacctcagcctyccaaagtgctaaaattagaggtgtgagccacgatgcccagccagtcataagtttctttctgattaggtaaaacttatgctctcttgttacaagtagtctcttgaatttcaagattttagaatattttcccacttatataacaactatttaatatatctacttataatcactctaccttaatggtcacatttcttatatcaatacaacatgtattatagaaagtcatattctaaaaatacatatttcccttgtgctttgtatttctttttgcagtttgtatttgaaaataactatgaattaatcagaagttgcaagaataatacaga

SEQ ID NO: 259485 - DNA, 646 bp, Homo sapiens
attgcacttcagttgctttctaatctagatttggtgttagtatcataagtatgttttttcttattattattattttttttggagccagagtcttgcagtgtcacccaggctggagtgcagtggcagatctcagctcactgcaaactccacctcccaggttcaagtgattcttgtgcctcagcctcctgagtaactgggactacaagcacatgccaccacacctggctactttttttgtttttagtagagacgaggtttcgccatgttgggtaggctggtcttgaactcctggcctcaagtgatcaacccacctcagccttccaaagtgctaaaattagaggtgtgagccacgatgcccagccagtcataagtttctttctgattaggtaaarcttatgctctcttgttacaagtagtctcttgaatttcaagattttagaatattttcccacttatataacaactatttaatatatctacttataatcactctaccttaatggtcacatttcttatatcaatacaacatgtattatagaaagtcatattctaaaaatacatatttcccttgtgctttgtatttctttttgcagtttgtatttgaaaataactatgaattaatcagaagttgcaagaataatacaga

SEQ ID NO: 259486 - DNA, 646 bp, Homo sapiens
attgcacttcagttgctttctaatctagatttggtgttagtatcataagtatgttttttcttattattattattttttttggagccagagtcttgcagtgtcacccaggctggagtgcagtggcagatctcagctcactgcaaactccacctcccaggttcaagtgattcttgtgcctcagcctcctgagtaactgggactacaagcacatgccaccacacctggctactttttttgtttttagtagagacgaggtttcgccatgttgggtaggctggtcttgaactcctggcctcaagtgatcaacccacctcagccttccaaagtgctaaaattagaggtgtgagccacgatgcccagccagtcataagtttctttctgattaggtaaaacttatgctctcttgttacaagtagtctcttgaatttcaakattttagaatattttcccacttatataacaactatttaatatatctacttataatcactctaccttaatggtcacatttcttatatcaatacaacatgtattatagaaagtcatattctaaaaatacatatttcccttgtgctttgtatttctttttgcagtttgtatttgaaaataactatgaattaatcagaagttgcaagaataatacaga

SEQ ID NO: 259487 - DNA, 646 bp, Homo sapiens
attgcacttcagttgctttctaatctagatttggtgttagtatcataagtatgttttttcttattattattattttttttggagccagagtcttgcagtgtcacccaggctggagtgcagtggcagatctcagctcactgcaaactccacctcccaggttcaagtgattcttgtgcctcagcctcctgagtaactgggactacaagcacatgccaccacacctggctactttttttgtttttagtagagacgaggtttcgccatgttgggtaggctggtcttgaactcctggcctcaagtgatcaacccacctcagccttccaaagtgctaaaattagaggtgtgagccacgatgcccagccagtcataagtttctttctgattaggtaaaacttatgctctcttgttacaagtagtctcttgaatttcaagattttagaatattttcccacttatataacaactatttaatatatctacttataatcactctaccttaatggtcacatttcttatatcaatacaacatgtattatagaaagtcatattctaaaaatayatatttcccttgtgctttgtatttctttttgcagtttgtatttgaaaataactatgaattaatcagaagttgcaagaataatacaga

SEQ ID NO: 259488 - DNA, 588 bp, Homo sapiens
tatactttctgggagacaacatgattttctatgatactattgatgaagcatgaagtatggcacaagaaagaccagctacaccactatgtaaccctagaaaaatgatttaacctgtacatgaatttgctccttgatctataagttggtaatgttaaataattaatgcttaaaactrttgccatgtattaaatgaaataatgtatattaagcaaatagaggatataagcctcaacaaagatgaatcttatttgttttatgtagttcttacttataatgagactattatttagttatattttaaatttataccaatatataattttcaaagcacatttattactacagttgattccctcaaattaattctatgcagttggcagagttataatgacccctgattttcctaccaaacaatgttacagaaaaaatacagaaaaagtatacagaaaagttaagtgacttgattgtgattttatggtggcagatatgtcacttaaacgtaatcagtcttctacattaaagattgcttcttttgtattgcataacactgcctttctagaacatagatgcactattagaaaataataa

SEQ ID NO: 259489 - DNA, 588 bp, Homo sapiens
tatactttctgggagacaacatgattttctatgatactattgatgaagcatgaagtatggcacaagaaagaccagctacaccactatgtaaccctagaaaaatgatttaacctgtacatgaatttgctccttgatctataagttggtaatgttaaataattaatgcttaaaactgttgccrtgtattaaatgaaataatgtatattaagcaaatagaggatataagcctcaacaaagatgaatcttatttgttttatgtagttcttacttataatgagactattatttagttatattttaaatttataccaatatataattttcaaagcacatttattactacagttgattccctcaaattaattctatgcagttggcagagttataatgacccctgattttcctaccaaacaatgttacagaaaaaatacagaaaaagtatacagaaaagttaagtgacttgattgtgattttatggtggcagatatgtcacttaaacgtaatcagtcttctacattaaagattgcttcttttgtattgcataacactgcctttctagaacatagatgcactattagaaaataataa

SEQ ID NO: 259490 - DNA, 588 bp, Homo sapiens
tatactttctgggagacaacatgattttctatgatactattgatgaagcatgaagtatggcacaagaaagaccagctacaccactatgtaaccctagaaaaatgatttaacctgtacatgaatttgctccttgatctataagttggtaatgttaaataattaatgcttaaaactgttgccatgtattaaatgaaataatgtatattaagcaaatagaggatataagcctcaacaaagatgaatcttatttgttttatgtagttcttacttataatgagactattatttagttatattttaaatttataccaatatataattttcaaagcacatttattactacagttgattccctcaaattaattctatgcagttggcagagttataatgacccctgattttcctaccaaacaatgttacagaaaaaatacagaaaaagtatacagaaaagttaagtgacttgattgtgattttatggtggcagatatgtsacttaaacgtaatcagtcttctacattaaagattgcttcttttgtattgcataacactgcctttctagaacatagatgcactattagaaaataataa

SEQ ID NO: 259491 - DNA, 597 bp, Homo sapiens
cactagaaatataactagcattcttaaaatgcatttttagcaatttgttaaagtatagcatacacatagaaaaatacataaaaatatcacatcaatgaattatcacagtaaagcacatctatgtaataaacataaaaaaaataggttgctaccaacatccaaaatagcccttcagccttcttcagaaccaaaatatcttccctcttctacaaaggtagctagtatactggcttctaaaattatagcatagttttgtcttttttaaaagcttttgagctttatatcaatggaaatrtaagtatgtattatttgtgtctagcttcttttgatcattgtgatcaaaagaattgatcacaattcttttcattcatttatgtccttttcattcatttatattgttacatgtaattatttattatactttctgtatatttttccatgaaataaatataccaaaatttatgtataaattttactgttggacgtttggaatgtttacagtttgagctgcatagttttgcaatgaatgttctttaacatatatgttagtttgtataatcataaatctttttggggtatatacataaaaataaaata

SEQ ID NO: 259492 - DNA, 597 bp, Homo sapiens
cactagaaatataactagcattcttaaaatgcatttttagcaatttgttaaagtatagcatacacatagaaaaatacataaaaatatcacatcaatgaattatcacagtaaagcacatctatgtaataaacataaaaaaaataggttgctaccaacatccaaaatagcccttcagccttcttcagaaccaaaatatcttccctcttctacaaaggtagctagtatactggcttctaaaattatagcatagttttgtcttttttaaaagcttttgagctttatatcaatggaaatgtaagtatgtattatttgtgtctagcttcttttgatcattgtgatcaaaagaattgatcacaattcttttcattcatttatgtccttttcattcatttatattgttacatgtaattatttattatactttctgtatatttttccatgaaataaatataccaaaatttatgtataaattttactgttggacgtttggaatgtttayagtttgagctgcatagttttgcaatgaatgttctttaacatatatgttagtttgtataatcataaatctttttggggtatatacataaaaataaaata

SEQ ID NO: 259493 - DNA, 286 bp, Homo sapiens
tctgaggatagggccatcatyctccagaacccagaattgtacatccaccaacagcttgcactgttcacctggaaaatctgcagacactcaatgccagctcaggaaagcagccttggggactgtaccttgcagagccaaaggggcagagatgcccaacatcttgggagcccacctcttgcatcatcatggcctggatatgatacctggagtcaaagaatatcatcttgaaactttaagatttaatgactgccctgctgagtttcaaacttgcatggagcctgtagct

SEQ ID NO: 259494 - DNA, 286 bp, Homo sapiens
tctgaggatagggccatcattctccagaacccagaatkgtacatccaccaacagcttgcactgttcacctggaaaatctgcagacactcaatgccagctcaggaaagcagccttggggactgtaccttgcagagccaaaggggcagagatgcccaacatcttgggagcccacctcttgcatcatcatggcctggatatgatacctggagtcaaagaatatcatcttgaaactttaagatttaatgactgccctgctgagtttcaaacttgcatggagcctgtagct

SEQ ID NO: 259495 - DNA, 286 bp, Homo sapiens
tctgaggatagggccatcattctccagaacccagaattgtacatccaccaacagcttgcactgttcacctggaaaatctgcagacactcaatgccagctcaggaaagcagccttggggactgtaccttgcagagccaaaggggcagagatgcccaacatcttgggagcccacctcttgcatcatcatggcctggatatgatacctggagtcaaagaatatcatcttgaaactttaagatttaatgactrccctgctgagtttcaaacttgcatggagcctgtagct

SEQ ID NO: 259496 - DNA, 453 bp, Homo sapiens
ctctgagtctgttggtcatagagggtcccagcaaaggacaggatgaaactggggcaggcagccatgccatcctggmaatactatgggacaaaataaaagtttggtggtcattgatgttgcctcagactaatcttggtcagaaggaggagaatgtaagcaaaaaataaaattataaaccccctaaccatctgaatggaactctcctctaagcaagagcactccaaagttaatcaaaaaaactagttcaggccacaacgggaaaggggaactgaacataccttattacacccttctcccttttggaattactgatagaacagactctttaagtctgataagaaatatttataatctatttcctctgaagctggctaccgggcgcttcatatgcatgacaaaccttggtctctacatcttgttattgtaacctagactttccttcctattgataat

SEQ ID NO: 259497 - DNA, 453 bp, Homo sapiens
ctctgagtctgttggtcatagagggtcccagcaaaggacaggatgaaactggggcaggcagccatgccatcctggcaatactatgggacaaaataaaagtttggtggtcattgatgttgcctcagrctaatcttggtcagaaggaggagaatgtaagcaaaaaataaaattataaaccccctaaccatctgaatggaactctcctctaagcaagagcactccaaagttaatcaaaaaaactagttcaggccacaacgggaaaggggaactgaacataccttattacacccttctcccttttggaattactgatagaacagactctttaagtctgataagaaatatttataatctatttcctctgaagctggctaccgggcgcttcatatgcatgacaaaccttggtctctacatcttgttattgtaacctagactttccttcctattgataat

SEQ ID NO: 259498 - DNA, 542 bp, Homo sapiens
taaggaggcaaatctttgcatacctaaagacaaagaagaatcttacctagaagattatagcaggmaaaaaattactacaaacacacacacagagacatctgtatcattccaactcttgtttgtaaagagaaaggaagtttattttttaaaaaaattattcaaacgtaatagatagaaataagtacacacagatttgtggatataaataggctagtgcatgaatccagaataagcagattcactctctgaggatgaataaatattctattaggaataatctggacaaaagcatagttttaaatatagttctacaaattatgttgattattctaaaaatgaaataatgtattttgcagcaacttagatggaaccagagatcattatctcaagttgttacaataggtagctagtcagacaccaacagggtggaagagagtttttccttgacaccaggaatatcaggggaccatcaggtgatggtcaggcagttgttacacagtctctaaaataataattgatcacagcaggtgccagggaaaggc

SEQ ID NO: 259499 - DNA, 542 bp, Homo sapiens
taaggaggcaaatctttgcatacctaaagacaaagaagaatcttacctagaagattatagcaggcaaaaaattactacaaacacacacacagagacatctgtatcattccaactcttgtttgtaaagagaaaggaagtttattttttaaaaaaattattcaaacgtaatagatagaaataagtacacacagatttgtggatataaataggctagtgcatgaatccagaataagcagattcactctctgaggatgaataaatattctattaggaataatctggacaaaagcatagttttaaatatagttctacaaattatgttgattattctaaaaatgaaataatgtattttgcagcaacttagatggaaccagagatcattatctcaagttgttacaataggtagctagtcagacaccaacagggtggaagagagtttttccttgacaccaggaatatcaggggaccatcaggtgatggtcaggcagttgttacacagtctctaaaatartaattgatcacagcaggtgccagggaaaggc

SEQ ID NO: 259500 - DNA, 527 bp, Homo sapiens
aaaaattatgtttcaagaactatggtatacctattattagattctagtctcatcagttgtttttgagtttttatctgcaatttagactaaccctgcctatttctgtgaaccaaccagtgatctctggctgcagctccgaagaaacaaagggataggtaatgtaaaaatctgaatcaatattctaattctgggcacatactgcaatcagttagcaaccccataaatccaagactaagcaggcatgaatayagcgaccagttacctgggcatgttggcagtctcggaattttttggagctgttattacccacttaatttgttttgacattctaataactcagtttgtcttctcagcttcacaccatccagctccagataatggaggcaaaatcctgcccctgtctccctaggacctggttggataccacttttaccaaatcatgaagccaccttcctacccttacagctagaaacaggccaagacccacagaacaaccatcactgcccctctgtcagcaggcagcagtt

SEQ ID NO: 259501 - DNA, 527 bp, Homo sapiens
aaaaattatgtttcaagaactatggtatacctattattagattctagtctcatcagttgtttttgagtttttatctgcaatttagactaaccctgcctatttctgtgaaccaaccagtgatctctggctgcagctccgaagaaacaaagggataggtaatgtaaaaatctgaatcaatattctaattctgggcacatactgcaatcagttagcaaccccataaatccaagactaagcaggcatgaatacagcgaccagttacctgggcatgttggcagtctcggaattttttggagctgttattacccacttaatttgttttgacattctaataactcagtttgtcttctcagcttcacaccatccagctccagataatggaggcaaaatcctgccsctgtctccctaggacctggttggataccacttttaccaaatcatgaagccaccttcctacccttacagctagaaacaggccaagacccacagaacaaccatcactgcccctctgtcagcaggcagcagtt

SEQ ID NO: 259502 - DNA, 527 bp, Homo sapiens
aaaaattatgtttcaagaactatggtatacctattattagattctagtctcatcagttgtttttgagtttttatctgcaatttagactaaccctgcctatttctgtgaaccaaccagtgatctctggctgcagctccgaagaaacaaagggataggtaatgtaaaaatctgaatcaatattctaattctgggcacatactgcaatcagttagcaaccccataaatccaagactaagcaggcatgaatacagcgaccagttacctgggcatgttggcagtctcggaattttttggagctgttattacccacttaatttgttttgacattctaataactcagtttgtcttctcagcttcacaccatccagctccagataatggaggcaaaatcctgcccctgtctccctaggacctggttggataccacttttaccaaatcatgaagccaccttcctrcccttacagctagaaacaggccaagacccacagaacaaccatcactgcccctctgtcagcaggcagcagtt

SEQ ID NO: 259503 - DNA, 588 bp, Homo sapiens
atagttgttgcaacagaggctactcttgggtttttaaggaagagtgtagagacttagaaatgtctttgtttaaaaaaaattatggtgcactgtaaactcatcacaggcctagtctcataattttcttttggagactcacgattcagtgtgggctctgctcagagctcagagatccggttaaaaataggtagtccctatctaaataaaattggtatycttatacactcttatgataaatttttattttaatgtttaatgtggcatccatctttaatctccctctagaaccaccagattttttctctctgaaccttgagaagtaaattttgctatttgatttttcacataagacttgtttcctttaatatgcagatttatcggacaacttccaggataatgaaacaggttatcaagagattgcaagtctaagatgggggaaaaaaaaaggtctcatgaatcaataagatgtacttctattggcatgccaaatacgtctgtgtatttatgggttgtgtacacagtgtttcactatttaaaatatataaaagagctctaattaattggcttaaagagaaataaaaacactta

SEQ ID NO: 259504 - DNA, 588 bp, Homo sapiens
atagttgttgcaacagaggctactcttgggtttttaaggaagagtgtagagacttagaaatgtctttgtttaaaaaaaattatggtgcactgtaaactcatcacaggcctagtctcataattttcttttggagactcacgattcagtgtgggctctgctcagagctcagagatccggttaaaaataggtagtccctatctaaataaaattggtattcttatacactcttatgataaatttttattttaatgtttaatgtggcatccatctttaatctccctctagaaccaccagattttttctctctgaaccttgagaagtaaattttgctatttgatttttcacrtaagacttgtttcctttaatatgcagatttatcggacaacttccaggataatgaaacaggttatcaagagattgcaagtctaagatgggggaaaaaaaaaggtctcatgaatcaataagatgtacttctattggcatgccaaatacgtctgtgtatttatgggttgtgtacacagtgtttcactatttaaaatatataaaagagctctaattaattggcttaaagagaaataaaaacactta

SEQ ID NO: 259505 - DNA, 588 bp, Homo sapiens
atagttgttgcaacagaggctactcttgggtttttaaggaagagtgtagagacttagaaatgtctttgtttaaaaaaaattatggtgcactgtaaactcatcacaggcctagtctcataattttcttttggagactcacgattcagtgtgggctctgctcagagctcagagatccggttaaaaataggtagtccctatctaaataaaattggtattcttatacactcttatgataaatttttattttaatgtttaatgtggcatccatctttaatctccctctagaaccaccagattttttctctctgaaccttgagaagtaaattttgctatttgatttttcacataagasttgtttcctttaatatgcagatttatcggacaacttccaggataatgaaacaggttatcaagagattgcaagtctaagatgggggaaaaaaaaaggtctcatgaatcaataagatgtacttctattggcatgccaaatacgtctgtgtatttatgggttgtgtacacagtgtttcactatttaaaatatataaaagagctctaattaattggcttaaagagaaataaaaacactta

SEQ ID NO: 259506 - DNA, 588 bp, Homo sapiens
atagttgttgcaacagaggctactcttgggtttttaaggaagagtgtagagacttagaaatgtctttgtttaaaaaaaattatggtgcactgtaaactcatcacaggcctagtctcataattttcttttggagactcacgattcagtgtgggctctgctcagagctcagagatccggttaaaaataggtagtccctatctaaataaaattggtattcttatacactcttatgataaatttttattttaatgtttaatgtggcatccatctttaatctccctctagaaccaccagattttttctctctgaaccttgagaagtaaattttgctatttgatttttcacataagacttgtttcctttaatatgcagatttatckgacaacttccaggataatgaaacaggttatcaagagattgcaagtctaagatgggggaaaaaaaaaggtctcatgaatcaataagatgtacttctattggcatgccaaatacgtctgtgtatttatgggttgtgtacacagtgtttcactatttaaaatatataaaagagctctaattaattggcttaaagagaaataaaaacactta

SEQ ID NO: 259507 - DNA, 551 bp, Homo sapiens
ttaaatttttttgaaataattcctatgctattattgttaagttttggtttgcttagaagaaaaaactgagattaaaatatttttttcttaattaaggttatacatctgtgtatctttctgtatgtgcttttaaagtccttatgacattgagttacaggtctttgactccttgatctgaaaaggacaccaagtcctgctaaatcttaaacactgacagcaattaaaacctcatcttcaggcccagtcaaaggcactaatcaaactaaactgcatttctgagacacagggccagaaattaaagctattcaactcctcaaggcccagggactactgcggaagagawgggcatgtgagattgtaagacacaattttgagagataaaataagttcaatttctctataaattaaccattaataccgaaggcatactgatgcatgaccagcatattggcctttatgtcagattaacaagcttttcttgaagcattaaccaactttttaataaaggttatgaaaggattgtggaaattatatcttttatggtcaaggtg

SEQ ID NO: 259508 - DNA, 470 bp, Homo sapiens
actggcctcataccttttctccacagtctctgtacaggatttctgactgtggtaagtaaagaaggtcatgttctcataggtttcaagytgtcccacatttctggagggaccaatgtacatcttacatatatttattgatgtctcatgtctttctaaaatgtataaaatccagctgtgctccaaccaccttgggcacatgtcattaggacctcttgaggctgtgtcatggaagtgcatcctcaaccttggcaaaataaactttttcaatttactgagatctgtctcagatattcagggttcacacctcctagtgacatttggctggtaagggaagagcacctcaagttagcatgtgcacaactccagtaaacactcttcatattctcacctccccagtgctggctggccactgtgcatgcagagagtccacccctaagaaaatatcagggtagaagagacacaagacccag

SEQ ID NO: 259509 - DNA, 470 bp, Homo sapiens
actggcctcataccttttctccacagtctctgtacaggatttctgactgtggtaagtaaagaaggtcatgttctcataggtttcaagttstcccacatttctggagggaccaatgtacatcttacatatatttattgatgtctcatgtctttctaaaatgtataaaatccagctgtgctccaaccaccttgggcacatgtcattaggacctcttgaggctgtgtcatggaagtgcatcctcaaccttggcaaaataaactttttcaatttactgagatctgtctcagatattcagggttcacacctcctagtgacatttggctggtaagggaagagcacctcaagttagcatgtgcacaactccagtaaacactcttcatattctcacctccccagtgctggctggccactgtgcatgcagagagtccacccctaagaaaatatcagggtagaagagacacaagacccag

SEQ ID NO: 259510 - DNA, 470 bp, Homo sapiens
actggcctcataccttttctccacagtctctgtacaggatttctgactgtggtaagtaaagaaggtcatgttctcataggtttcaagttgtcccacatttctggagggaccaatgtacatcttacatatatttattgatgtctcatgtctttctaaaatgtataaaatccagctgtgctccaaccaccttgggcacatgtcattaggacctcttgaggctgtgtcatggaagtgcatcctcaaccttggcaaaataaactttttcaatttactgagatctgtctcagatattcagggttyacacctcctagtgacatttggctggtaagggaagagcacctcaagttagcatgtgcacaactccagtaaacactcttcatattctcacctccccagtgctggctggccactgtgcatgcagagagtccacccctaagaaaatatcagggtagaagagacacaagacccag

SEQ ID NO: 259511 - DNA, 470 bp, Homo sapiens
actggcctcataccttttctccacagtctctgtacaggatttctgactgtggtaagtaaagaaggtcatgttctcataggtttcaagttgtcccacatttctggagggaccaatgtacatcttacatatatttattgatgtctcatgtctttctaaaatgtataaaatccagctgtgctccaaccaccttgggcacatgtcattaggacctcttgaggctgtgtcatggaagtgcatcctcaaccttggcaaaataaactttttcaatttactgagatctgtctcagatattcagggttcacacctcctagtgacatttggctggtaagggaagagcacctcaagtkagcatgtgcacaactccagtaaacactcttcatattctcacctccccagtgctggctggccactgtgcatgcagagagtccacccctaagaaaatatcagggtagaagagacacaagacccag

SEQ ID NO: 259512 - DNA, 605 bp, Homo sapiens
tgctatacttacatcagacaaaatggatttcaagacagaaattataaaaagagacaaggtcattatataataataaaggaatcaattcaacaagatgatataacaatttaaaatatatatgtamccaacattggaacacccactatataaagaaaattatattagcgctaaagagagagagaagccccaatacaataatagctagagacttcaacatcctactttcagtattagacagatctttcacacagaaaatcaataaagaaacatcagactcagtctgcactatggagcaaatggacctaatagatatttacagaatatttaatcaaaaagctgctgaaaacatattattttactcagcacatggaccattctcaagaataaaccatatgttaggttacaaaacaagtcttaaaacaccaacaaaaaaagaatatcaagtatttctgtgacaacaacagaaaaaacaagaactcaataacaagaggaattttggaaactatacaaatacatggaaattaaataatatgctcctgaagggccagtgggttgatgaagaaattaagaagaaaatggaataatttcttgaaatgaataataat

SEQ ID NO: 259513 - DNA, 605 bp, Homo sapiens
tgctatacttacatcagacaaaatggatttcaagacagaaattataaaaagagacaaggtcattatataataataaaggaatcaattcaacaagatgatataacaatttaaaatatatatgtacccaacattggaacacccactatataaagaaaattatattagcgctaaagagagagagaagccccaatacaataatagctagagacttcaacatcctactttcagtattagacagatctttcacacagaaaatcaataaagaaacatcaractcagtctgcactatggagcaaatggacctaatagatatttacagaatatttaatcaaaaagctgctgaaaacatattattttactcagcacatggaccattctcaagaataaaccatatgttaggttacaaaacaagtcttaaaacaccaacaaaaaaagaatatcaagtatttctgtgacaacaacagaaaaaacaagaactcaataacaagaggaattttggaaactatacaaatacatggaaattaaataatatgctcctgaagggccagtgggttgatgaagaaattaagaagaaaatggaataatttcttgaaatgaataataat

SEQ ID NO: 259514 - DNA, 605 bp, Homo sapiens
tgctatacttacatcagacaaaatggatttcaagacagaaattataaaaagagacaaggtcattatataataataaaggaatcaattcaacaagatgatataacaatttaaaatatatatgtacccaacattggaacacccactatataaagaaaattatattagcgctaaagagagagagaagccccaatacaataatagctagagacttcaacatcctactttcagtattagacagatctttcacacagaaaatcaataaagaaacatcagactcagtctgcactatggagcaaatggacctaatagatatttacagaatatttaatcraaaagctgctgaaaacatattattttactcagcacatggaccattctcaagaataaaccatatgttaggttacaaaacaagtcttaaaacaccaacaaaaaaagaatatcaagtatttctgtgacaacaacagaaaaaacaagaactcaataacaagaggaattttggaaactatacaaatacatggaaattaaataatatgctcctgaagggccagtgggttgatgaagaaattaagaagaaaatggaataatttcttgaaatgaataataat

SEQ ID NO: 259515 - DNA, 605 bp, Homo sapiens
tgctatacttacatcagacaaaatggatttcaagacagaaattataaaaagagacaaggtcattatataataataaaggaatcaattcaacaagatgatataacaatttaaaatatatatgtacccaacattggaacacccactatataaagaaaattatattagcgctaaagagagagagaagccccaatacaataatagctagagacttcaacatcctactttcagtattagacagatctttcacacagaaaatcaataaagaaacatcagactcagtctgcactatggagcaaatggacctaatagatatttacagaatatttaatcaaaaagctgctgaaaacatattattttactcagcacatggaccattctcaagaataaaccatatgttakgttacaaaacaagtcttaaaacaccaacaaaaaaagaatatcaagtatttctgtgacaacaacagaaaaaacaagaactcaataacaagaggaattttggaaactatacaaatacatggaaattaaataatatgctcctgaagggccagtgggttgatgaagaaattaagaagaaaatggaataatttcttgaaatgaataataat

SEQ ID NO: 259516 - DNA, 505 bp, Homo sapiens
aggttttcaacatcactgatcatcagagaagtgcaaatgaaaactgcaatgagatatcatctcatctcatttaaaatggcatatattcaaaagacaggcaataacaaatgctggcagagatgtggagaaaaggaaacccttgtacactgtaacacaggcaaattatattacatttgttccatagaatactgctcagcaataaaaaagtagactcattatgcatgaaacacattggattaatctccacagaattacactcagtgaagaaagaccaaycccccaaaatcacatattgtttaattccattcattaaacataaaataactgatttatagaaatgaagattaagttagtgcctgccagacattaagaacaagatagggggtaaggagcagcaggaaagtggctgtaattaaaaagggcaacatgagggatcctgcagtaagtgttctgattcttgactgtgttggtggatatgtgtgtgtgtgtgtgtgtgtgtgtacag

SEQ ID NO: 259517 - DNA, 575 bp, Homo sapiens
aagttagtgcctgccagacattaagaacaagatagggggtraggagcagcaggaaagtggctgtaattaaaaagggcaacatgagggatcctgcagtaagtgttctgattcttgactgtgttggtggatatgtgtgtgtgtgtgtgtgtgtgtgtacaggtgtgtgtgtaaaatccagtctgggttttagaaactttctaatggactctttaaaaaagagacatgtcgtaaatatatgaatacagaaatttcaaaattaggcaatggaaagtatttatcatgcaaacactaaaacaaaatgaatagacctataatattagacaaatgggtttaaagcaaagagtttcactagaaaaaagaaagctgttacatgatattaaatgagtcaattgatgaggaatatattataattaaatatatatgcaaataaaaatcttttcaaaataaattttaagacttcaaaagaaagtcagaatcagaatgagagacttcatcataactcaattgctgacagaataatctagcataagaacattagtaataagatagaagatctgaacaatataattaacaaa

SEQ ID NO: 259518 - DNA, 575 bp, Homo sapiens
aagttagtgcctgccagacattaagaacaagatagggggtaaggagcagcaggaaagtggctgtaattaaaaagggcaacatgagggatcctgcagtaagtgttctgattcttgactgtgttggtggatatgtgtgtgtgtgtgtgtgtgtgtgtacaggtgtgtgtgtaaaatccagtctgggttttagaaactttctaatggactctttaaaaaagagacatgtcgtaaatatatgaatacagaaatttcaaaattaggcaatggaaagtatttatcatgcaaacactaaaacaaaatgaatagacctataatattagacaaatgggtttaaagcaaasagtttcactagaaaaaagaaagctgttacatgatattaaatgagtcaattgatgaggaatatattataattaaatatatatgcaaataaaaatcttttcaaaataaattttaagacttcaaaagaaagtcagaatcagaatgagagacttcatcataactcaattgctgacagaataatctagcataagaacattagtaataagatagaagatctgaacaatataattaacaaa

SEQ ID NO: 259519 - DNA, 575 bp, Homo sapiens
aagttagtgcctgccagacattaagaacaagatagggggtaaggagcagcaggaaagtggctgtaattaaaaagggcaacatgagggatcctgcagtaagtgttctgattcttgactgtgttggtggatatgtgtgtgtgtgtgtgtgtgtgtgtacaggtgtgtgtgtaaaatccagtctgggttttagaaactttctaatggactctttaaaaaagagacatgtcgtaaatatatgaatacagaaatttcaaaattaggcaatggaaagtatttatcatgcaaacactaaaacaaaatgaatagacctataatattagacaaatgggtttaaagcaaagagtttcactagaaaaaagaaagctgttacatgatattaaatgagtcaattgatgaggaatatattataattaaatatatatgcaaataaaaatcttttcaaaataaattttaagacttcaaaagaaagtcagaatcagaatgagagacttcatcataactcaattgctgacagaataatctagcataagaacattartaataagatagaagatctgaacaatataattaacaaa

SEQ ID NO: 259520 - DNA, 551 bp, Homo sapiens
tcccgaaatctttttgaatgtttttctcttccttcagtttccagattgctttagaagcttttttgtgttgattttcaacattgtcttggatctcattgagtttcctcgcaatctatgctttgaattctttatccgccatttccaagctttccttttatttactgattattgctagagagctagtgtgatcctttggtggtgtcattacattctgattttttatggtaccaaaatgtttgctctggttacttctcatctggagatgytggcgtttctaatttctatagttacttttattcaggtaggatttttttctttttatttctttctctaaatattattggtttcttttctttccttctttttcctattgctcccctccctagtgtgtgtgactgtaaggaatgctggatagggtttgttggttttgctcctacagccctatgctcttctttcagcaggttttatgttgggctgtgcagttcaacgtacaatccagtaggtaaaaacttacaggtaagagctgcctgtgacccatgcagctgggtata

SEQ ID NO: 259521 - DNA, 551 bp, Homo sapiens
tcccgaaatctttttgaatgtttttctcttccttcagtttccagattgctttagaagcttttttgtgttgattttcaacattgtcttggatctcattgagtttcctcgcaatctatgctttgaattctttatccgccatttccaagctttccttttatttactgattattgctagagagctagtgtgatcctttggtggtgtcattacattctgattttttatggtaccaaaatgtttgctctggttacttctcatctggagatgctggcrtttctaatttctatagttacttttattcaggtaggatttttttctttttatttctttctctaaatattattggtttcttttctttccttctttttcctattgctcccctccctagtgtgtgtgactgtaaggaatgctggatagggtttgttggttttgctcctacagccctatgctcttctttcagcaggttttatgttgggctgtgcagttcaacgtacaatccagtaggtaaaaacttacaggtaagagctgcctgtgacccatgcagctgggtata

SEQ ID NO: 259522 - DNA, 551 bp, Homo sapiens
tcccgaaatctttttgaatgtttttctcttccttcagtttccagattgctttagaagcttttttgtgttgattttcaacattgtcttggatctcattgagtttcctcgcaatctatgctttgaattctttatccgccatttccaagctttccttttatttactgattattgctagagagctagtgtgatcctttggtggtgtcattacattctgattttttatggtaccaaaatgtttgctctggttacttctcatctggagatgctggcgtttctaatttctatagttacttttattcaggtaggatttttttctttttatttctttctctaaatattattggtttcttttctttccttctttttcctattgctcccctccctagtgtgtgtgactgtaaggaatgctggatagggtttgttggttttgctcctacagccctatgctcttctttcagcaggttttatrttgggctgtgcagttcaacgtacaatccagtaggtaaaaacttacaggtaagagctgcctgtgacccatgcagctgggtata

SEQ ID NO: 259523 - DNA, 492 bp, Homo sapiens
gggagcagtctggggcacacagttatgggacacatagattggttctaggtcatcaaggtggctttggctgcaaggttcacagcccaggagaaattgcagctatagcagctctcctcctgcygcaggtttgagatgggggagagcaaaattccattgcttactgctgaggcactttccacagttctagctgtgaatgtccttacccatctccaaaacgagcactcaaatttccagcctgagactgaaatgtttgcatggccacactgccggatcaccaaagaatggctgactttgttgcacccagattaaaaatggtgttctgttctcagtcccaggtctgggaaaacgcctgcagcttttattcatgtcttttcctcacagcatctccaagcttcttctcaggttagctctcgtcttgggagaaaaaaaaaatgctctgcctcggcttgggttgcctcagatctccagtgtaaatgtgagtcacagagaaag

SEQ ID NO: 259524 - DNA, 492 bp, Homo sapiens
gggagcagtctggggcacacagttatgggacacatagattggttctaggtcatcaaggtggctttggctgcaaggttcacagcccaggagaaattgcagctatagcagctctcctcctgctgcaggtttgagatgggggagagcaaaattccattgcttactgctgaggcactttccacagttctagctgtgaatgyccttacccatctccaaaacgagcactcaaatttccagcctgagactgaaatgtttgcatggccacactgccggatcaccaaagaatggctgactttgttgcacccagattaaaaatggtgttctgttctcagtcccaggtctgggaaaacgcctgcagcttttattcatgtcttttcctcacagcatctccaagcttcttctcaggttagctctcgtcttgggagaaaaaaaaaatgctctgcctcggcttgggttgcctcagatctccagtgtaaatgtgagtcacagagaaag

SEQ ID NO: 259525 - DNA, 460 bp, Homo sapiens
agacattaatatcatgtgtgaattatgaaagtttttatattttttgtatatgcattgcattaaaaaaattaccagattgaccataacaaccagtatgatattcagtaaatgcagtgatatgcacattattctcttgatgtaaataggatctcacctttaatagtcatgcttattatacattttgattaggcaacatattgtctggtttaaatgttttattatattcataaatttccaaaagattttsacatgaattaatattaaatttagccaatgcatttaaaaaaactatttaggtaattctgtgagatttctcctgcaatctgttagcaataacatttaaagtttttataatgctaagttacctttgggttcttagtgctaatttgactatgacatacattcatacaaacatatacatacatatatatgtgtttgtttgtatttatgtaattggttt

SEQ ID NO: 259526 - DNA, 460 bp, Homo sapiens
agacattaatatcatgtgtgaattatgaaagtttttatattttttgtatatgcattgcattaaaaaaattaccagattgaccataacaaccagtatgatattcagtaaatgcagtgatatgcacattattctcttgatgtaaataggatctcacctttaatagtcatgcttattatacattttgattaggcaacatattgtctggtttaaatgttttattatattcataaatttccaaaagattttcacatgaattaatattaaatttagccaatgcatttaaaaaaactatttaggtaattctgtgagatttctcctgcaatctgttagcaataacatttaaagtttttataatgctaarttacctttgggttcttagtgctaatttgactatgacatacattcatacaaacatatacatacatatatatgtgtttgtttgtatttatgtaattggttt

SEQ ID NO: 259527 - DNA, 564 bp, Homo sapiens
cttcagaaatataaatgttatttggtaaaatccaacaaccatctctaattgtgagaatggaaggttatatgaaataagaattaagatatatttaaaaaatatttttaragagagggtcttgctctgtcacccaggctgaagtatagtgttataattatagttcactgcagcctcaaactcctgatctaactctgactcctgagtagctaggactgcaggcatgcaccacctcaccgagctaattttttagtaatgtttttgtagaaatggggtcttgctataatgctcaggctgggcttgaactccaagcctgaagcgatcttcccaccttgacttccaaaagcattggtattataagtgtaagccactgtgctcagcctgaagagtaaagatgtgtatctcaaaacacatgattcaagatatatatcttaaatcatgattaaaagtgaaatgttatgctcaaccttattgaagttaagaataatacaaacagcaagctatttttgctactatttaactttttactggatatgctcgctgtttcagtatagctaggaaattata

SEQ ID NO: 259528 - DNA, 564 bp, Homo sapiens
cttcagaaatataaatgttatttggtaaaatccaacaaccatctctaattgtgagaatggaaggttatatgaaataagaattaagatatatttaaaaaatatttttagagagagggtcttgctctgtcacccaggctgaagtatagtgttataattatagttcactgcagcctcaaactcctgatctaactctgactcctgagtagctaggactgcaggcatgcaccacctcaccgagctaattttttagtaatgtttttgtagaaatggggtcttgctataatgctcaggctgggcttgaactccaagcctgaagcgatcttcccaccttgacttccaaaagcattggkattataagtgtaagccactgtgctcagcctgaagagtaaagatgtgtatctcaaaacacatgattcaagatatatatcttaaatcatgattaaaagtgaaatgttatgctcaaccttattgaagttaagaataatacaaacagcaagctatttttgctactatttaactttttactggatatgctcgctgtttcagtatagctaggaaattata

SEQ ID NO: 259529 - DNA, 564 bp, Homo sapiens
cttcagaaatataaatgttatttggtaaaatccaacaaccatctctaattgtgagaatggaaggttatatgaaataagaattaagatatatttaaaaaatatttttagagagagggtcttgctctgtcacccaggctgaagtatagtgttataattatagttcactgcagcctcaaactcctgatctaactctgactcctgagtagctaggactgcaggcatgcaccacctcaccgagctaattttttagtaatgtttttgtagaaatggggtcttgctataatgctcaggctgggcttgaactccaagcctgaagcgatcttcccaccttgacttccaaaagcattggtattataagtgtaagccactgtgctcagcctgaagagtaaagatgtgtatctcaaaacacatgattcaagatatatatcttaaatcatgattaaaagtgaaatgttatgctcaaccttattgaagttaagaataatacaaasagcaagctatttttgctactatttaactttttactggatatgctcgctgtttcagtatagctaggaaattata

SEQ ID NO: 259530 - DNA, 612 bp, Homo sapiens
tggtggtaatcacttccatcttggtttctccaaactgtattcayatttttgaaattagttttaatattaaatttctgagaaactagtttaagtgtaatgtcagatttctgagatccttaccgatacagtaatttaccccaaaagtggtcccataaaacagattctcaaaatgagattctgggattggtttgctcacatatttgaggacccccccccccaaagacaatctccttaaacagaaataaattggacagtaagtgactctttgaccattctggactttgacttacctgatttaaaaaccatacaattggatatgtacagtagcataactttacacaattgatatggtatatatgagaccttgttagtgcaggtctgaatgcacaagtaaaccaggtaggaggctcagactcttagagtacctacccctgttactttgctacctgacccatggctcataccaactaccttgtggggagattcccttttaccaaataatgaaagaacaaaagagtaaagttctagttgataggtagattttcatgacaaaccagccccactgatggccactgcactatggtcctattaagatgtggtctcgaaagatag

SEQ ID NO: 259531 - DNA, 612 bp, Homo sapiens
tggtggtaatcacttccatcttggtttctccaaactgtattcacatttttgaaattagttttaatattaaatttctgagaaactagtttaagtgtaatgtcagatttctgagatccttaccgatacagtaatttaccccaaaagtggtcccataaaacagattctcaaaatgagattctgggattggtttgctcacatatttgaggacccccccccccaaagacaatctccttaaacagaaataaattggacagtaagtgactctttgaccattctggactttgacttacctgatttaaaaaccatacaattggatrtgtacagtagcataactttacacaattgatatggtatatatgagaccttgttagtgcaggtctgaatgcacaagtaaaccaggtaggaggctcagactcttagagtacctacccctgttactttgctacctgacccatggctcataccaactaccttgtggggagattcccttttaccaaataatgaaagaacaaaagagtaaagttctagttgataggtagattttcatgacaaaccagccccactgatggccactgcactatggtcctattaagatgtggtctcgaaagatag

SEQ ID NO: 259532 - DNA, 612 bp, Homo sapiens
tggtggtaatcacttccatcttggtttctccaaactgtattcacatttttgaaattagttttaatattaaatttctgagaaactagtttaagtgtaatgtcagatttctgagatccttaccgatacagtaatttaccccaaaagtggtcccataaaacagattctcaaaatgagattctgggattggtttgctcacatatttgaggacccccccccccaaagacaatctccttaaacagaaataaattggacagtaagtgactctttgaccattctggactttgacttacctgatttaaaaaccatacaattggatatgtacagtagcataactttacacaattgatatggtatatatgagaccttgttagtgcaggtctgaatgcacaagtaaaccaggtaggaggctcagactcttagagtacctacccctgttactttgctacctgacccatggctcataccaactaccttgtggggagattcccttttaccaaataatgaaagaacaaaagagtaaagttctagttgataggtagattttcatgacaaaccagccccaytgatggccactgcactatggtcctattaagatgtggtctcgaaagatag

SEQ ID NO: 259533 - DNA, 582 bp, Homo sapiens
tgcaaaaaaggcaaggtttctgttaatttttatttttttcttataatattcctggcattttgaattttatgatgaacagacattattttttacaaagcatccaagatatttttaaaggaagtaaagattgtttttaaraatatgctttttaaaaatgtgtcatacaatcttactggattcgtacttagttagtaggaacacatatacaatgctttccaccctgctgcaaattatattatttacttccgattattccaatggcaaaaatttttaaagacatctctgcctctgagtcattattattcatttcattaaaattgttgcttatttatgtgttttttattgctataaatatatttgcaaagcagttatgtgttttcccagctaagtttctagggaagaggtcaatttaagtgatactattctgtttgaaggcaatcttttaaaattgttttagaccttctaaaatgactgatttggtatgattactgttatatcagaccttatgtagtatactgaaatgccaggggtttggtataggtccttttgctcaccacacagaaagtgaatcactgagacaac

SEQ ID NO: 259534 - DNA, 582 bp, Homo sapiens
tgcaaaaaaggcaaggtttctgttaatttttatttttttcttataatattcctggcattttgaattttatgatgaacagacattattttttacaaagcatccaagatatttttaaaggaagtaaagattgtttttaagaatatgctttttaaaaatgtgtcatacartcttactggattcgtacttagttagtaggaacacatatacaatgctttccaccctgctgcaaattatattatttacttccgattattccaatggcaaaaatttttaaagacatctctgcctctgagtcattattattcatttcattaaaattgttgcttatttatgtgttttttattgctataaatatatttgcaaagcagttatgtgttttcccagctaagtttctagggaagaggtcaatttaagtgatactattctgtttgaaggcaatcttttaaaattgttttagaccttctaaaatgactgatttggtatgattactgttatatcagaccttatgtagtatactgaaatgccaggggtttggtataggtccttttgctcaccacacagaaagtgaatcactgagacaac

SEQ ID NO: 259535 - DNA, 582 bp, Homo sapiens
tgcaaaaaaggcaaggtttctgttaatttttatttttttcttataatattcctggcattttgaattttatgatgaacagacattattttttacaaagcatccaagatatttttaaaggaagtaaagattgtttttaagaatatgctttttaaaaatgtgtcatacaatcttactggattcgtacttagttagtaggaacacatatacaatgctttccaccctgctgcaaattatattatttacttccgattattccaatggcaaaaatttttaaagacatctctrcctctgagtcattattattcatttcattaaaattgttgcttatttatgtgttttttattgctataaatatatttgcaaagcagttatgtgttttcccagctaagtttctagggaagaggtcaatttaagtgatactattctgtttgaaggcaatcttttaaaattgttttagaccttctaaaatgactgatttggtatgattactgttatatcagaccttatgtagtatactgaaatgccaggggtttggtataggtccttttgctcaccacacagaaagtgaatcactgagacaac

SEQ ID NO: 259536 - DNA, 582 bp, Homo sapiens
tgcaaaaaaggcaaggtttctgttaatttttatttttttcttataatattcctggcattttgaattttatgatgaacagacattattttttacaaagcatccaagatatttttaaaggaagtaaagattgtttttaagaatatgctttttaaaaatgtgtcatacaatcttactggattcgtacttagttagtaggaacacatatacaatgctttccaccctgctgcaaattatattatttacttccgattattccaatggcaaaaatttttaaagacatctctgcctctgagtcattattattcatttcattaaaattgttgcttatttatgtgttttttattgctataaatatatttgcaaagcagttatgtgttttcccagctaagtttctagggaagaggtcaatttaagtgatactattctgtttgaaggcaatcttttaaaattgttttagaccttctaaaatgactgatttggtatgattactgttatatcagaccttaygtagtatactgaaatgccaggggtttggtataggtccttttgctcaccacacagaaagtgaatcactgagacaac

SEQ ID NO: 259537 - DNA, 520 bp, Homo sapiens
gtataatatctgttttgtttatatagctgtcataactctattttatgagccaagaatacttattctcaaacttggatgcatattggtatcacctagtgagtttaaaacaaattactaatatcttggtcctagaaagagattttgatttgtcagggcgaggtctgacaaggtttttaaaagattttcaggtaatgttaatgtgcagccaaggttaagaatcactcttytgcaagacaggaaaaataaaaatccagaattgccacaacctgggctgagaaggcttttatttaattacttatagtactagacttctattcagtaaatctactttatgcattgctatgtgttcatctctcaaatcctgctcctctgatgttttttattcaaaatagttaccatttcaaaggccattgactcaatccatactttagaatataagtttctcgaggatgcaaaggttgccttatttctatatactatggataggtcttaggtcttagctaggacgctgaccttgctg

SEQ ID NO: 259538 - DNA, 520 bp, Homo sapiens
gtataatatctgttttgtttatatagctgtcataactctattttatgagccaagaatacttattctcaaacttggatgcatattggtatcacctagtgagtttaaaacaaattactaatatcttggtcctagaaagagattttgatttgtcagggcgaggtctgacaaggtttttaaaagattttcaggtaatgttaatgtgcagccaaggttaagaatcactcttttgcaagacaggaaaartaaaaatccagaattgccacaacctgggctgagaaggcttttatttaattacttatagtactagacttctattcagtaaatctactttatgcattgctatgtgttcatctctcaaatcctgctcctctgatgttttttattcaaaatagttaccatttcaaaggccattgactcaatccatactttagaatataagtttctcgaggatgcaaaggttgccttatttctatatactatggataggtcttaggtcttagctaggacgctgaccttgctg

SEQ ID NO: 259539 - DNA, 471 bp, Homo sapiens
tgtacagtactggatatgggaaaatggcaagaggaaggasttgaaggaaaatttattttgctttcatacatggaatttcctaagtgaaaaacttgaaagttttcttaattatccttaatagctatattagcaagctgtgcctgaaaatacttaattttaatgaagaatatctgttttgtatgaaaataaaactgttctgtttagtgactatccatgcttcaaactagttagtattaggttaggcaattaaactgccaatctcaagttgaaatatagacattcccgttacaagaatcaaggagtattctgccaaggaaggagacgtgatcacttgaatgtgttgatcacagatcaactcctgtgttgagttgtctgccttattatgcagacgctggggaaagcagtagaattgacaagctgaaaaaacgttattctttaaagcgggcaaatgtaagacaaatgaactaattt

SEQ ID NO: 259540 - DNA, 619 bp, Homo sapiens
tatccccctttaggatggattatctacatactttatttgtactttgtccrtgtgaaaaatttgtgtcttcacacccatttattaatttattcaatcatttatttatgttagtttttggactcatgaagatttatactttaagttacaatttggtactactttattcattgtgttgttcaaattgttccagcattggccattgggaactctttcaatggcgcttctgtttcttgatatacccccatctctatgtaactgagcacttttttttttaactttctggccttgaaaaatgttccagactcattttgtatattttctgccccagtcctaaaatcagccaattctcagagaaactctggctcttttattggaggatggtattagaaatcgagatttgggaaattaagtatgtaatttacttctgagatattgcttctcttaggccctctcagctaatggggaaaagaaatatatctgtgcatactaacctgtgtaaatacacatatctataaatacttatatgtgttaccatctggatctatattcatatacatatgtgtgtgtgtgtgtgtgtgtgtgtgtgtgtgtgtgtgtgtgtgttgaaatttaattgtca

SEQ ID NO: 259541 - DNA, 619 bp, Homo sapiens
tatccccctttaggatggattatctacatactttatttgtactttgtccatgtgaaaaatttgtgtcttcacacccatttattaatttattcaatcatttatttatgttagtttttggactcatgaagatttatactttaagttacaatttggtactactttattcattgtgttgttcaaattgttccagcattggccattgggaactctttcaatggcgcttctgtttyttgatatacccccatctctatgtaactgagcacttttttttttaactttctggccttgaaaaatgttccagactcattttgtatattttctgccccagtcctaaaatcagccaattctcagagaaactctggctcttttattggaggatggtattagaaatcgagatttgggaaattaagtatgtaatttacttctgagatattgcttctcttaggccctctcagctaatggggaaaagaaatatatctgtgcatactaacctgtgtaaatacacatatctataaatacttatatgtgttaccatctggatctatattcatatacatatgtgtgtgtgtgtgtgtgtgtgtgtgtgtgtgtgtgtgtgtgtgttgaaatttaattgtca

SEQ ID NO: 259542 - DNA, 619 bp, Homo sapiens
tatccccctttaggatggattatctacatactttatttgtactttgtccatgtgaaaaatttgtgtcttcacacccatttattaatttattcaatcatttatttatgttagtttttggactcatgaagatttatactttaagttacaatttggtactactttattcattgtgttgttcaaattgttccagcattggccattgggaactctttcaatggcgcttctgtttcttgatatacccccatctctatgtaactgagcacttttttttttaactttctggccttgaaaaatgttccagactcattttgtatattttctgccccagtcctaaaatcagccaattctcagagaaactctggytcttttattggaggatggtattagaaatcgagatttgggaaattaagtatgtaatttacttctgagatattgcttctcttaggccctctcagctaatggggaaaagaaatatatctgtgcatactaacctgtgtaaatacacatatctataaatacttatatgtgttaccatctggatctatattcatatacatatgtgtgtgtgtgtgtgtgtgtgtgtgtgtgtgtgtgtgtgtgtgttgaaatttaattgtca

SEQ ID NO: 259543 - DNA, 619 bp, Homo sapiens
tatccccctttaggatggattatctacatactttatttgtactttgtccatgtgaaaaatttgtgtcttcacacccatttattaatttattcaatcatttatttatgttagtttttggactcatgaagatttatactttaagttacaatttggtactactttattcattgtgttgttcaaattgttccagcattggccattgggaactctttcaatggcgcttctgtttcttgatatacccccatctctatgtaactgagcacttttttttttaactttctggccttgaaaaatgttccagactcattttgtatattttctgccccagtcctaaaatcagccaattctcagagaaactctggctcttttattggaggatggtattagaaatcgagatttgggaaattaagtatgtawtttacttctgagatattgcttctcttaggccctctcagctaatggggaaaagaaatatatctgtgcatactaacctgtgtaaatacacatatctataaatacttatatgtgttaccatctggatctatattcatatacatatgtgtgtgtgtgtgtgtgtgtgtgtgtgtgtgtgtgtgtgtgtgttgaaatttaattgtca

SEQ ID NO: 259544 - DNA, 584 bp, Homo sapiens
ggtccttttaatgaagtcccttaagtttttttagtttatgtttacccttmtttattctttttttttctttttgcttctcacactcaattatttcaaacaactagtcaagttgttgattcttccctctgcttacttgcatatactgttgaatcccttttgtgaatgtttcaattcagttatacaattttttaatataagaattttgatttggctttctttttataatttctgtagttttgttgatattttcattttgctcttatattgtttttctgatttttattattccatgtccatctttcccttcaggtctttcagcataagggaaacacagttactttaaaattttggctagtaagtccaagcctgtgtttctctagagacaatttcttcaactttattgtttgtttgtttgtttgttttgaatggatcagatttttctgatgttttctgtatgccttgttatttttgttgctgtcaaacattgaatattcaaaaaaagcagattcctctctcagtctttgaagactggctctgagccaaggaagtcattctctaatcagcagagcattttttgagcctta

SEQ ID NO: 259545 - DNA, 584 bp, Homo sapiens
ggtccttttaatgaagtcccttaagtttttttagtttatgtttacccttatttattctttttttttctttttgcttctcacactcaattatttcaaacaactagtcaagttgttgattcttccctctgcttacttgyatatactgttgaatcccttttgtgaatgtttcaattcagttatacaattttttaatataagaattttgatttggctttctttttataatttctgtagttttgttgatattttcattttgctcttatattgtttttctgatttttattattccatgtccatctttcccttcaggtctttcagcataagggaaacacagttactttaaaattttggctagtaagtccaagcctgtgtttctctagagacaatttcttcaactttattgtttgtttgtttgtttgttttgaatggatcagatttttctgatgttttctgtatgccttgttatttttgttgctgtcaaacattgaatattcaaaaaaagcagattcctctctcagtctttgaagactggctctgagccaaggaagtcattctctaatcagcagagcattttttgagcctta

SEQ ID NO: 259546 - DNA, 584 bp, Homo sapiens
ggtccttttaatgaagtcccttaagtttttttagtttatgtttacccttatttattctttttttttctttttgcttctcacactcaattatttcaaacaactagtcaagttgttgattcttccctctgcttacttgcatmtactgttgaatcccttttgtgaatgtttcaattcagttatacaattttttaatataagaattttgatttggctttctttttataatttctgtagttttgttgatattttcattttgctcttatattgtttttctgatttttattattccatgtccatctttcccttcaggtctttcagcataagggaaacacagttactttaaaattttggctagtaagtccaagcctgtgtttctctagagacaatttcttcaactttattgtttgtttgtttgtttgttttgaatggatcagatttttctgatgttttctgtatgccttgttatttttgttgctgtcaaacattgaatattcaaaaaaagcagattcctctctcagtctttgaagactggctctgagccaaggaagtcattctctaatcagcagagcattttttgagcctta

SEQ ID NO: 259547 - DNA, 584 bp, Homo sapiens
ggtccttttaatgaagtcccttaagtttttttagtttatgtttacccttatttattctttttttttctttttgcttctcacactcaattatttcaaacaactagtcaagttgttgattcttccctctgcttacttgcatatactgttgaatcccttttgtgaatgtttcaattcagttatacaattttttaatayaagaattttgatttggctttctttttataatttctgtagttttgttgatattttcattttgctcttatattgtttttctgatttttattattccatgtccatctttcccttcaggtctttcagcataagggaaacacagttactttaaaattttggctagtaagtccaagcctgtgtttctctagagacaatttcttcaactttattgtttgtttgtttgtttgttttgaatggatcagatttttctgatgttttctgtatgccttgttatttttgttgctgtcaaacattgaatattcaaaaaaagcagattcctctctcagtctttgaagactggctctgagccaaggaagtcattctctaatcagcagagcattttttgagcctta

SEQ ID NO: 259548 - DNA, 547 bp, Homo sapiens
aagaggcactttaacctgcacatgctaaaagctggcagttatcagcaagcatatctaggacttaccacccttgtactgtggtaattaggctgggctgattgattggaacagaaaggaagcagctgtgtttgctaagactcgctaacacacttctgccagagacttcctggcaaagttttgaacaatcctgttttcagcatgattcatggctccctgcagacatcacctaattcaggaaatacttttgaaacactgttcatgtgcagtttgtgaaaacaatccaggaaaacaatctttagtgccattgaaaataaaacttacctccctcctctgtgaaatagatgccaggtgaaagaagctgcaraggaaactgtcttcttatcatcagctctggaaaaaagactcctacaggggcaaataagttaatgtctggatttttgaaaattatttacctagttcatatttccatgttgggccaacagcagtagggacagaaacagcaagctcacctaaacaacatggtgcatggacagttgccacatgtgcc

SEQ ID NO: 259549 - DNA, 593 bp, Homo sapiens
aggttcaaagtactgtccatctctctcttcttcttgagtaacatcagattcttcatcagtgccaactgaagtcccactctgattcaacttggcaggagacttagatggactcaaagcagatttaaaactgaagttaaatcctgttgttgactcaccaaaayggaaaagattttttctcacagggctacttgccaatggagaagcatgtactgagctactactgacactatcatccaaagcatcttcccttaaatcatagttatcccattctaatgtgggcccagtgttttcaggattgggttttattgttgtgtctgaggcaccggccgcacctgtacctgaacccttattttcttcctcagtgacttttgtttgatcatttgtcaaaaatgttttgaaatctttcagtccactcttcatttcttcagctctctgtattaacttggcagctctgccagtatctacaagtttatggggagtttgaagtggtatgtctaacagaagccgctggcattcctcaaatttctgcttgaattcttcagccagctctggtgttttaaattttgctgccaactgctctagtttggcatcac

SEQ ID NO: 259550 - DNA, 593 bp, Homo sapiens
aggttcaaagtactgtccatctctctcttcttcttgagtaacatcagattcttcatcagtgccaactgaagtcccactctgattcaacttggcaggagacttagatggactcaaagcagatttaaaactgaagttaaatcctgttgttgactcaccaaaacggaaaagattttttctcacagggctacttgccaatggagaagcatgtactgagctactactgacactatcatccaaagcatcttcccttaaatcayagttatcccattctaatgtgggcccagtgttttcaggattgggttttattgttgtgtctgaggcaccggccgcacctgtacctgaacccttattttcttcctcagtgacttttgtttgatcatttgtcaaaaatgttttgaaatctttcagtccactcttcatttcttcagctctctgtattaacttggcagctctgccagtatctacaagtttatggggagtttgaagtggtatgtctaacagaagccgctggcattcctcaaatttctgcttgaattcttcagccagctctggtgttttaaattttgctgccaactgctctagtttggcatcac

SEQ ID NO: 259551 - DNA, 346 bp, Homo sapiens
gaaatgctctcaaatataggaaatgttaataaggtggttagyttttagttttcttcaccctgttcagtacttctgagtatctcctatgagctcattaatctttaattttaatcatcttatttttaaaaaacaaggaccatcttgatatatgtttacttttattaaggaaaaagaatctatgaacacaggaacagaaatcaggagatcttggctctcgccctttcagtgccacaaagctgttttgtgaacctgtaaataatccatttggagtctccatgtttctcaattgtaaaatgaggatgtgctgcttctacacatttcacagggtcattgcaagaataaaatg

SEQ ID NO: 259552 - DNA, 594 bp, Homo sapiens
aaaaacaagtatctacaaactaaacttctttccycaactttcacagtcctctaacattacactgaccatcctttcagtgtgttctttctgcactgcaatctggactacctgacattccgcgttacctccccaaattagcttttcacttaaccccatgctgaaacaaaatacaactaattctcaaggtgatgttcaaatgctccaccaggaaagggaaaaaagtagtagctgcagagaatttattatgtatataataatacgtccaatgcacttaaactcttaatttttatactatctacactgttaggtaaacaatattagctcctatcttaaaatgagagaaacggatgcagggaataacagctggaatttgaaccagatctgactccaaaaatgttttcttaacacaactctgctgccttgacaagatggcagatagatacaatgccgtctagtgtagctatgtggctacctcatctctgctgaagaaaactaaatgacagcaccatacccaaccctagaacctacaaaatgtccccttacaaaacagacacttaacaggaaattctttttccaaagaaattgtagtggtat

SEQ ID NO: 259553 - DNA, 594 bp, Homo sapiens
aaaaacaagtatctacaaactaaacttctttcctcaactttcacagtcctctaacattacactgaccatcctttcagtgtgttctttctrcactgcaatctggactacctgacattccgcgttacctccccaaattagcttttcacttaaccccatgctgaaacaaaatacaactaattctcaaggtgatgttcaaatgctccaccaggaaagggaaaaaagtagtagctgcagagaatttattatgtatataataatacgtccaatgcacttaaactcttaatttttatactatctacactgttaggtaaacaatattagctcctatcttaaaatgagagaaacggatgcagggaataacagctggaatttgaaccagatctgactccaaaaatgttttcttaacacaactctgctgccttgacaagatggcagatagatacaatgccgtctagtgtagctatgtggctacctcatctctgctgaagaaaactaaatgacagcaccatacccaaccctagaacctacaaaatgtccccttacaaaacagacacttaacaggaaattctttttccaaagaaattgtagtggtat

SEQ ID NO: 259554 - DNA, 463 bp, Homo sapiens
ctccccaaattagcttttcacttaaccccatgctgaaacaaaatacaactaattctcaaggtgatgttcaaatgctccaccaggaaagggaaaaaagtagtagctgcagagaatttattatgtatataataatacgtccaatgcacttaaactcttaatttttatactatctacactgttaggtaaacaatattagctcctatcttaaaatgagagaaacggatgcagggaataacagctggaatttgaaccasatctgactccaaaaatgttttcttaacacaactctgctgccttgacaagatggcagatagatacaatgccgtctagtgtagctatgtggctacctcatctctgctgaagaaaactaaatgacagcaccatacccaaccctagaacctacaaaatgtccccttacaaaacagacacttaacaggaaattctttttccaaagaaattgtag

SEQ ID NO: 259555 - DNA, 563 bp, Homo sapiens
atgacacttggaaatgccacattgtagataacacattttcagagtatggataatatgggatagcactggaataaatgggacaaccaggaaattaaagagatcctcatgcaataacctatgaaaaaaaaaaagcatgatgaatagaatggcraagggaagacgtgacagctgccttcaaatattaaaattattttataaaagaaatcatcaaaagaagaaacaagaccaacaggtagaaggcttgaagaatatttttattctatataaggaagtaccaagagccaaaccacctaaagatgcactgggctatcttgaaaagtaatgaatgtccatcactgaaaacgtccagtcataggcaatgcccacttactagaaacatgccaaaagtaactatatgggtgactagagcatcggcttttaattctatcaccactttcttaattggtggtggaaatgtaatttgatacaacctctttagggttagatatttggcaacagctctaaaaattataaatgcacagatatactttgatactgcaattctttcaggaattcatggcaca

SEQ ID NO: 259556 - DNA, 222 bp, Homo sapiens
gcccacaagttctaatcaacccctgctctaaactaacatctttatacaaatccaagtgatgtttttgttcaatggaatttattttcaaaatggagacactggttttcaaaatcaaaatttaggaaaaaaggtaaatcacatagttgagttattttgtttctyagctaaaacagtattttctgaaataccagtgatgctaagtgcttatactaatacatgtga

SEQ ID NO: 259557 - DNA, 593 bp, Homo sapiens
actctgtatttcattcccctctctcctttatcaatttctcctcttctggatgagatggatgaaaccctggcctctccctattgcaaaagccctagtctttgactctatgttaaamatatttttaaaaaccactatgagtgctttttaaaaagttctatctcatacttgagagaaaaagccttctcaacagtaatactctcattcattaaacaaatgtcagaaactgtttaccttagcaagccttaaattttaggagaaatggaattactttgcatgacagttataaatctcatggatttcaattccaaaaaaaaaaaatctgatacaggaaaggtgtaacagtgccttcaagttattaaagaaaatctttaaagaatgcttcaaagtatctaacttgttacactgcaagaaaagaatctcctatcattacatatgttctttaacactactgacaccagattaactggattgccacgcccaatatgggagttatgtttgaggcataacacctaagagagtaaagaaatctgcacaattagacctcacgttttagattaatatttaaaatccagctgcttattactggggagaaa

SEQ ID NO: 259558 - DNA, 593 bp, Homo sapiens
actctgtatttcattcccctctctcctttatcaatttctcctcttctggatgagatggatgaaaccctggcctctccctattgcaaaagccctagtctttgactctatgttaaaaatwtttttaaaaaccactatgagtgctttttaaaaagttctatctcatacttgagagaaaaagccttctcaacagtaatactctcattcattaaacaaatgtcagaaactgtttaccttagcaagccttaaattttaggagaaatggaattactttgcatgacagttataaatctcatggatttcaattccaaaaaaaaaaaatctgatacaggaaaggtgtaacagtgccttcaagttattaaagaaaatctttaaagaatgcttcaaagtatctaacttgttacactgcaagaaaagaatctcctatcattacatatgttctttaacactactgacaccagattaactggattgccacgcccaatatgggagttatgtttgaggcataacacctaagagagtaaagaaatctgcacaattagacctcacgttttagattaatatttaaaatccagctgcttattactggggagaaa

SEQ ID NO: 259559 - DNA, 593 bp, Homo sapiens
actctgtatttcattcccctctctcctttatcaatttctcctcttctggatgagatggatgaaaccctggcctctccctattgcaaaagccctagtctttgactctatgttaaaaatatttttaaaaaccactatgagtgctttttaaaaagttctatctcatacttgagagaaaaagccttctcaacagtaatactctcattcattaaacaaatgtcagaaactgtttaccttagcaagccttaaattttaggagaaatggaattactttgcatgacagttataaatctcatggatttcaattccaaaaaaaaaaaatctgatacaggaaaggtgtaacagtgccttcaagttattaaagaaaatctttaaagaatgcttcaaagtatctaacttgttacactgcaagaaaagaatctcctaycattacatatgttctttaacactactgacaccagattaactggattgccacgcccaatatgggagttatgtttgaggcataacacctaagagagtaaagaaatctgcacaattagacctcacgttttagattaatatttaaaatccagctgcttattactggggagaaa

SEQ ID NO: 259560 - DNA, 593 bp, Homo sapiens
actctgtatttcattcccctctctcctttatcaatttctcctcttctggatgagatggatgaaaccctggcctctccctattgcaaaagccctagtctttgactctatgttaaaaatatttttaaaaaccactatgagtgctttttaaaaagttctatctcatacttgagagaaaaagccttctcaacagtaatactctcattcattaaacaaatgtcagaaactgtttaccttagcaagccttaaattttaggagaaatggaattactttgcatgacagttataaatctcatggatttcaattccaaaaaaaaaaaatctgatacaggaaaggtgtaacagtgccttcaagttattaaagaaaatctttaaagaatgcttcaaagtatctaacttgttacactgcaagaaaagaatctcctatcattacatatgttctttaacactactgacaccagattaactggattgccacgcccaatatgggagttatgtttgaggcataacacctaagagagtaaagaaatctgcacaattagacctcaygttttagattaatatttaaaatccagctgcttattactggggagaaa

SEQ ID NO: 259561 - DNA, 531 bp, Homo sapiens
cagttgaacccaggaggtggaggttgcagtgagccagaggttgcagtgagctgagatcgtgccattgcactccagcctgggcgacagagcgagactccatctcccaaacatcatcatcatcatcatcatcatcatcatcatcatcatcatcataaataagctgggtgcagttggtcacacctttaattctagcactttcagagaccaaggtgggaggctagctttgaggccaagagtttgaaaccagcctgtgcaacacaacaagatcctgtctccagggrgaaaaaaatagccaggcatagtggagcatgcctgtgttcctagctactcaggaggccaaggaaggagaatcacttgagcccaggaggttgacactgccgtgagttatgactgtgacactgcactccagcgtgggtgacacagggagatcctctctctaaataataaatacataacatacaaaaaataaattcaagaaagtaagacaagcagacaacagaagaattttcatcagccttggaaatcttggaa

SEQ ID NO: 259562 - DNA, 531 bp, Homo sapiens
cagttgaacccaggaggtggaggttgcagtgagccagaggttgcagtgagctgagatcgtgccattgcactccagcctgggcgacagagcgagactccatctcccaaacatcatcatcatcatcatcatcatcatcatcatcatcatcatcataaataagctgggtgcagttggtcacacctttaattctagcactttcagagaccaaggtgggaggctagctttgaggccaagagtttgaaaccagcctgtgcaacacaacaagatcctgtctccagggagaaaaaaatagccaggcatagtggagcatgcctgtgttcctagctactcaggaggccaaggaaggagaatcacttgagcccaggaggttgacactgccgtgagttatgactgtgacactgcactccagcstgggtgacacagggagatcctctctctaaataataaatacataacatacaaaaaataaattcaagaaagtaagacaagcagacaacagaagaattttcatcagccttggaaatcttggaa

SEQ ID NO: 259563 - DNA, 531 bp, Homo sapiens
cagttgaacccaggaggtggaggttgcagtgagccagaggttgcagtgagctgagatcgtgccattgcactccagcctgggcgacagagcgagactccatctcccaaacatcatcatcatcatcatcatcatcatcatcatcatcatcatcataaataagctgggtgcagttggtcacacctttaattctagcactttcagagaccaaggtgggaggctagctttgaggccaagagtttgaaaccagcctgtgcaacacaacaagatcctgtctccagggagaaaaaaatagccaggcatagtggagcatgcctgtgttcctagctactcaggaggccaaggaaggagaatcacttgagcccaggaggttgacactgccgtgagttatgactgtgacactgcactccagcgtgggtgacacagggagatcctctctctaaataataaatacataacatacaaaaaataaattcaagaaagyaagacaagcagacaacagaagaattttcatcagccttggaaatcttggaa

SEQ ID NO: 259564 - DNA, 508 bp, Homo sapiens
tccaggttacaatgaactgtgatagcgccactgcattccatcctgggcaccagagtgagacmcttgtctcaaaaaaaaaaaaaaaaaggaaaaggaatagcccccccaaatctatatatatttcactagcagaataacagaacataccaaaatttaacagtaataatgtaaagattttgagccgtctgtattttccaaatcttcaaaaatgtctattttgggaatttggatattaaaatcttacttttaaaacaaaatttaacaaaacatttttaatagtgagaaccttttagattttaaaagctcacatttgtgtaaacattacagtctgaattatgtggacaaatatcaaatgcgttgacatttttaactggaaatttgggctattttggttgtggataattttttatcctttttgtttttccatattttctaaattttgatataatgaacaagtattgcctttctaaaaaaggaaaaacagcattttgttttatttcaacaatat

SEQ ID NO: 259565 - DNA, 508 bp, Homo sapiens
tccaggttacaatgaactgtgatagcgccactgcattccatcctgggcaccagagtgagacccttgtctcaaaaaaaaaaaaaaaaaggaaaaggaatagcccccccaaatctatatatatttcactagcagaataacagaacataccaaaatttaacagtaataatgtaaagattttsagccgtctgtattttccaaatcttcaaaaatgtctattttgggaatttggatattaaaatcttacttttaaaacaaaatttaacaaaacatttttaatagtgagaaccttttagattttaaaagctcacatttgtgtaaacattacagtctgaattatgtggacaaatatcaaatgcgttgacatttttaactggaaatttgggctattttggttgtggataattttttatcctttttgtttttccatattttctaaattttgatataatgaacaagtattgcctttctaaaaaaggaaaaacagcattttgttttatttcaacaatat

SEQ ID NO: 259566 - DNA, 508 bp, Homo sapiens
tccaggttacaatgaactgtgatagcgccactgcattccatcctgggcaccagagtgagacccttgtctcaaaaaaaaaaaaaaaaaggaaaaggaatagcccccccaaatctatatatatttcactagcagaataacagaacataccaaaatttaacagtaataatgtaaagattttgagccgtctgtattttccaaatcttcaaaaatgtctattttgggaatttggatattaaaatcttacttttaaaacaaaatttaacaaaacatttttaatagtgagarccttttagattttaaaagctcacatttgtgtaaacattacagtctgaattatgtggacaaatatcaaatgcgttgacatttttaactggaaatttgggctattttggttgtggataattttttatcctttttgtttttccatattttctaaattttgatataatgaacaagtattgcctttctaaaaaaggaaaaacagcattttgttttatttcaacaatat

SEQ ID NO: 259567 - DNA, 508 bp, Homo sapiens
tccaggttacaatgaactgtgatagcgccactgcattccatcctgggcaccagagtgagacccttgtctcaaaaaaaaaaaaaaaaaggaaaaggaatagcccccccaaatctatatatatttcactagcagaataacagaacataccaaaatttaacagtaataatgtaaagattttgagccgtctgtattttccaaatcttcaaaaatgtctattttgggaatttggatattaaaatcttacttttaaaacaaaatttaacaaaacatttttaatagtgagaaccttttagattttaaaagctcacatttgtgtaaacattacagtctgaattatgtggacaaatatcaaatgcgttgayatttttaactggaaatttgggctattttggttgtggataattttttatcctttttgtttttccatattttctaaattttgatataatgaacaagtattgcctttctaaaaaaggaaaaacagcattttgttttatttcaacaatat

SEQ ID NO: 259568 - DNA, 306 bp, Homo sapiens
ctcttaaagtttaaataaaaggctgtgctctgaaacacgagatgcacgtgcttaaagagcactgtaatacacatgaaaatagttcyggcgtcaaacttgaaattgttcaaaaccgaagcaggtaaaaggtggcatgacaaacactgggcttcctagacttttgttttaaagtattaaatatgacttgaaactgactttattcacatactttgtacagtggagcattacccactgtgtttgtggttacagttagagtgaagtgacacaagtgacatgcttgttccagtgggtcggaagccccagacc

SEQ ID NO: 259569 - DNA, 609 bp, Homo sapiens
aaggctgaagaaaagctaaaagctccgtcctattgagaagttcatcacagggaagactccactgaagtaatcagatgcctttcctgctgccctgagtctttaactgtccaaagggagtcctgaacccaaagctgtttcagctgcatgcgattgttaggatcattcactcatacctcttcgtttaggatagagaacaatcaggcaaagaarggggaggactaacccaaggtcagataattagctaagggcatcagaacccacagttcagggttgttagtaccacatcaagctcccttgcaaattagcttcataaattctaagcccacaggctcagggctcatctgaaagagatggaccagagaggaggagatggagaaaaaagtctcctaccacacactggaaccacttttacagaagtgcctgttgtctcccctgcacccctgcactcccaaccccaacaatgccaggcagcaagctgttgcagaaaggaagcaggctgctgcccctgcagtgttcaggcctcctcctggcagggctccctctacctgaatccatctcagggaaatggtcatctctgactatgctgcacagagcctgcaaagctatgtt

SEQ ID NO: 259570 - DNA, 591 bp, Homo sapiens
aaaaaaaaaaaacatcagagaaaactatctcttagggctgggcatggtggctccggcctgtaatcccagcactttgggaggccaaggtgggtggatcacttgaggtcaggggaccagcctggccaacatggtgaaaccctgtctctgctaaaaatacaaaaaattagcagggtgtggtggcatgcacctgtaatcccaactactcggtaggctgaggcaggagaatcccttgaacccaggaggcagaggttgcagtgagccragatcacaccaccgacagagaaagactcagtttcaaaaacaaacaaacaaaaaaaccaaaaacttacctcttaatttaatgattttattcaagagtaagcaaagaggattataacctgggatgcacagctatagcaagtctcaggtgcacctgaagaggggaaggtaagaggaagcttttatttggcaaaaagggagaggtttacataagctacttagaaagacttttattggttctgtaggctcaaagctggaattggcatcagttcattggtggagatgccattactaggcaagtgttcttctgagaacattttatctgaattgctg

SEQ ID NO: 259571 - DNA, 586 bp, Homo sapiens
tttatatcattgcagcttcatgaatgttaaattgagctgatgacacccgtcttgggcctcttagaattaggagccaggttttattcccctttcctatgcttccccagatttagagtcccagcactagcctggtatctcattggtgaccctgtcatcttcctttccaaggttaagtttaggagactggtgaggataatctaacaccctgctycttggagccctccgtcaccattatgtttgcctgttgtgactgtcaacatattgtaaagctaaatttccagaggcagaagagccatatccataaacagccacatctctgggactcgccaggcctctaggtccaagatcctatgcatttcctttcctttctatgagaatatcacattctccctgtccacctctaactaattccatgaattagaagtgcatttggagaatctcaatagagccctttgggaacactgaagaaaaaccggggctttaaaaaagcagggatgggactggctgctgaaaaatcatcagaaagagcactacgatattagagatgactgtgaggaaagtagaggcaactactgaggcggagaag

SEQ ID NO: 259572 - DNA, 608 bp, Homo sapiens
ttgtagtcattccaacgttgaaagaggctagcacagtttcatagcttgttatatttatcttccttcccaggatttttatattgcattttatgaatacggcttcaatttatatgtaagcctcgtaatcattagcattatgttaaagaaaaaaaaaggaaagaaaaaaatgcttgggaagaaaaaacactccaacaacaatgcttgggaaacccttgagagaattgttagtttttaaaatgcataatatataaacatcttaaaggaatatccagagtttcttttgaaattagaaattatgtgaagcaaggaaagaatcataaaagcttattgatttcccaaacccactgagtagaagtatttttaaaccatgattcacataagggatacatttgacacatcaatagaaactggagaccagactccgcaccgccacatcagatactgctcctagctgagtttgtttatcattacaaagtgaaaagaaatttgtttytcctcccctgctccctctcccttgagaatggtgatttttattgattttgtcctttagaaaacagttgaagttaaaatggccatgataaactcatcagagctatttcccttttaat

SEQ ID NO: 259573 - DNA, 420 bp, Homo sapiens
cctgtcactcacttccttgtctcctccttcatcttcattcatcatcatcaccctcatgacatttccatgagggattttcttgcataaaagcaactcaataatgaaatagttgcaaatccaggcatggcaatagaatgaagtatgagtctttcccattttttaatttcccagagtsctggtgagccagccctgggatctcggtgtctgactgggactcactcacaggtacagccatgaaaactcaaaggagaaagggacacactctttgtcacattcagctgtggagctcccatctcaccagctacacagccatttcctcaagtggttagtttctaaacagcatgcttagcacaggttactctgagctcttggttgttaatacatgaaaagaacagaaagctaaggatattctgattctac

SEQ ID NO: 259574 - DNA, 594 bp, Homo sapiens
gacacactctttgtcacattcagctgtggagctcccatctcaccagctacacagccatttcctcaagtggttagtttctaaacagcatgcttagcacaggttactctgagctcttggttgttaatacatgaaaagaacagaaagctaaggatattctgattctaccccagggctgcttcaaagacaaaaggaaagaaatgagaaatgggaaaatgcccaaggaatcagaaaatatcacaaggtcaacccacctcktgtaaatcagcgcacaccgttccagagggtcgcatagaaacctcacgctcaggtttaatttgcccatcctgaagtatttttcctagtagtgccaaatgccataatgctctctgtcagtgatttgaaattattctataagccacatatcgggtacactattgttaatgaaatgcacacaagatgatgaacaacttccttttcctgctggagccccagctgcaaccagtgcctggatccttcatgctgtaaatcagccctttgtactccaggaggattcaatgagctgcaggtgtgggctgtggaaggccgcctgggattaggtagcagcatttgatatga

SEQ ID NO: 259575 - DNA, 600 bp, Homo sapiens
gccctaatgattcaaaattgcacttttagttgcctgaccaagatggagtatgacatgttaccaaaacccatttcttaacatttaacatttattcaaataattggctgttgtggatacatctgccagaagttgaggccaaatggttttgttaagaaatctttcatctttctcttcatatgcatggtcaatcatcaactggttattataaggagccatacacggatccagaatgagcagtcctcaaggcttgaacaccagaggcattgattacatgaaattcttggtagtgtctcacagtcactccctacccattgacctctggaaaattgccattggtaataagtaatcatgtgcattttttaggtccttatcatggwtcaaactcttcaagttttataattttaaaatgacagccacaaactcctacctctaaagaattctcggaggtcagtgggagaagaaagaataaaccaaatccatgtgctctttcaggtcagggagaacataaataatgtgctttgtcccagaggaaatcttaactaacctggcatagaagagaaccaaataagaaggggtgaaatgagcagcacatcttcataa

SEQ ID NO: 259576 - DNA, 600 bp, Homo sapiens
gccctaatgattcaaaattgcacttttagttgcctgaccaagatggagtatgacatgttaccaaaacccatttcttaacatttaacatttattcaaataattggctgttgtggatacatctgccagaagttgaggccaaatggttttgttaagaaatctttcatctttctcttcatatgcatggtcaatcatcaactggttattataaggagccatacacggatccagaatgagcagtcctcaaggcttgaacaccagaggcattgattacatgaaattcttggtagtgtctcacagtcactccctacccattgacctctggaaaattgccattggtaataagtaatcatgtgcattttttaggtccttatcatggatcaaactcttcaagttttataattttaaaatgacagccacaaactcctacctctaaagaattctcggaggkcagtgggagaagaaagaataaaccaaatccatgtgctctttcaggtcagggagaacataaataatgtgctttgtcccagaggaaatcttaactaacctggcatagaagagaaccaaataagaaggggtgaaatgagcagcacatcttcataa

SEQ ID NO: 259577 - DNA, 565 bp, Homo sapiens
attcgaagcaaaaactcatctttgaaaaatgaagttaataatatggttcattaatatttaagtaatactttgaatgctaattgtttgaatactaataacwaagaattactaagaccagtagagcaacatatgaaaaaattatcattttggagttatatattcaattggatttaaaatccaattatattcccataagaaatttcggcattacatctaccaatgaaaaaagaaaaaagaatcctgttaaatttaaataaaggatcatgtatttgatgttgtaatttaaactttaaagagactaaatcacctatagtctggctaagggaaagaaaaggtttctattcactagaagacaataaattaatatgaaaactcttctacctttttccataccactgagcaagcattatttctttgagaatttgtgtaaacatcatttatcttaaatgatgacttaagaatttgaaggcatcatcattaaaaagtatcgatgaggacttgtgtgcagccatttcaagaataaaaactatgtttaaaaagttatcaccaaagaagtaagttttaa

SEQ ID NO: 259578 - DNA, 587 bp, Homo sapiens
aagcattgatttattctaaaattcttgttttacaggggaaaaaagaaacatccagagaggtttcgtgtcaccaactaattagggataaaagccaagatcagaatctagaatgccctacttttacccagccagtattgctctgattgggaaygttgggtactaaagtgtactttatgctaaacaaactatgagccctcctgtccatcctcccagaatcagccttgcatcttccacctccatgtctctggtcatgccaagctccctagctggaatcccctctctctctcctgtccattgctagagtgtttctcatccctaaatgccacttgcctgaccatgctgaaccacacagctctgtccgtctgaacattgctggtgtccactatcccagtcacccacacagcatttcctcagaacacaacggctggttccatttacccaccgattccatccctgtaactaggttgagtcagggattgcttctaaactttctgcaaatccttagtgcctctagaaaatgccttataggtgcttgagatggttaatattgagtgtcaacttgattgcattgaaagatgcaaagtaaa

SEQ ID NO: 259579 - DNA, 587 bp, Homo sapiens
aagcattgatttattctaaaattcttgttttacaggggaaaaaagaaacatccagagaggtttcgtgtcaccaactaattagggataaaagccaagatcagaatctagaatgccctacttttacccagccagtattgctctgattgggaatgttgggtactaaagtgtactttatgctaaacaaactatgagccctcctgtccatcctcccagaatcagccytgcatcttccacctccatgtctctggtcatgccaagctccctagctggaatcccctctctctctcctgtccattgctagagtgtttctcatccctaaatgccacttgcctgaccatgctgaaccacacagctctgtccgtctgaacattgctggtgtccactatcccagtcacccacacagcatttcctcagaacacaacggctggttccatttacccaccgattccatccctgtaactaggttgagtcagggattgcttctaaactttctgcaaatccttagtgcctctagaaaatgccttataggtgcttgagatggttaatattgagtgtcaacttgattgcattgaaagatgcaaagtaaa

SEQ ID NO: 259580 - DNA, 587 bp, Homo sapiens
aagcattgatttattctaaaattcttgttttacaggggaaaaaagaaacatccagagaggtttcgtgtcaccaactaattagggataaaagccaagatcagaatctagaatgccctacttttacccagccagtattgctctgattgggaatgttgggtactaaagtgtactttatgctaaacaaactatgagccctcctgtccatcctcccagaatcagccttgcatcttccacctccatgtctctggtcatgccaagctccctagctggaatcccctctctctctcctgtccattgctagagtgtttctcatccctaaatgccacttgcctgaccatgctgaaccacacagctctgtccgtctgaacattgctggtgtccactatcccagtcacccacacagcatttcctcagaacacaacggctggttccatttacccaccgattccatccctgtaactaggttgagtcagrgattgcttctaaactttctgcaaatccttagtgcctctagaaaatgccttataggtgcttgagatggttaatattgagtgtcaacttgattgcattgaaagatgcaaagtaaa

SEQ ID NO: 259581 - DNA, 587 bp, Homo sapiens
aagcattgatttattctaaaattcttgttttacaggggaaaaaagaaacatccagagaggtttcgtgtcaccaactaattagggataaaagccaagatcagaatctagaatgccctacttttacccagccagtattgctctgattgggaatgttgggtactaaagtgtactttatgctaaacaaactatgagccctcctgtccatcctcccagaatcagccttgcatcttccacctccatgtctctggtcatgccaagctccctagctggaatcccctctctctctcctgtccattgctagagtgtttctcatccctaaatgccacttgcctgaccatgctgaaccacacagctctgtccgtctgaacattgctggtgtccactatcccagtcacccacacagcatttcctcagaacacaacggctggttccatttacccaccgattccatccctgtaactaggttgagtcagggattgcttctaaactttctgcaaatccttagtgcctctagaaaatgccttataggtgcttgagatggttaataktgagtgtcaacttgattgcattgaaagatgcaaagtaaa

SEQ ID NO: 259582 - DNA, 604 bp, Homo sapiens
gcagcgtttcctgccttcaaagatcatcagccaccaaagtctgaaaaactaacatgatttgtttacatgaaggaaagatgctcaaaggtctgagtcgagacccgcagaattaagctcactacattttcaagcttgaactgtggtttccgtgctgaaagtttcaaactgtcctggctgggagagcaaatctacactaccrcccacctcagggaagccaccctgtggaggtggctttggattcggggtatgaggcctgctgcttccttctagaggtgggttacaagagaaggctgggatggaagtcctgtggcactctctcccatctgttctgcagctgccctcactaaggtggaaggtgctagaagtccttgcccaagtcactctgagagacaggctgtttccaggaagcacaagtgcttgcattctgggcatgcaggcaggtttacctgtgctggacatcaaatttatttctgctgtttgcttctcatgtttcagatcttccaagtccatttttaagttgcaggtagttgtgtgagaaaagtgtcaggctgagccccaaagccagagtttacaaccactaactcaggtcctctgggccaagtcc

SEQ ID NO: 259583 - DNA, 448 bp, Homo sapiens
tttttttttccgagacagagtttcactcttgttgctcaggctggagtgcaayggtatgatctcagccccctgcaacctctgcctccctggttcaagtgattctcctgcctcagcctcccaagtagctgggattacaggcatgtgccaccatgcccagctaatttttgtgtttttagttgagatgaggttttgccatgctggccaggctggtcttgaactcctgacctcaggtgacccagtcacctcagcttcccaaagtgctgggattataggcgtgagccactgcaccggccataattttgattttcttaaatttactgagactcattctgtggcctatcatatggtctgtgttggaggacattccatgtgctaatgaatagaatgtatattcttcagttgtttggtagaatgttctgtaaatatctgttaagtccatttgttgtag

SEQ ID NO: 259584 - DNA, 493 bp, Homo sapiens
ttggcaaaattttgacagctttgggcctgctgcatgatcttgggccaggtacaaaatctctccgggccttggttttcatatctggaaaatgggggttttgttgttgaattaacaaatgtaaaatgggctcrtagtagacacttaaaaatgcagttccctggacccactctcatgtattttgaagtaatccatctgcatctctctgagtggcctgtccccctcacacatagctcttttctcttcccacactgggtctcatttcacgtgcacagcagcccactagggaaggccctgctatgcccagcatccgccttaggttcagatgggcttcctctctgctcctgaagcattttgatcactttcagcttgtgttcaccacaatatttgcctttctccccagttagaacctggaggaaagaaactgtgttttgttcttcccaactttgttcccttaaggtttaacattctgtcaggcacatagatgatggtcaaa

SEQ ID NO: 259585 - DNA, 465 bp, Homo sapiens
tgaatcccaatggagaaataaagaatattagtaaggataaataaatagaaaaatataaaagttagaataaatgtattttgggtttgtaacttctyttttttcctatgtgatttaaaacacaactacataaaacaataaatataaatctatgtcagttgggatacaatatataaacatgtaattcaatagggaaaactaagctatatagggggaaatttttatataccattgaaactattttggtactaatttgaactagattgttataaatgaagacattaattgtaatccccaaggcaaccactaataaaataactaacgcagaacgcagtgtaaaataaataaagaggtaatcaaaatgttatgctagtagacatcaatttcacacgaaagaagacagtaagggaggaattcagcaacaaaaaaaaaaatatgacatatggagtaaaaggtaacaaaatggca

SEQ ID NO: 259586 - DNA, 465 bp, Homo sapiens
tgaatcccaatggagaaataaagaatattagtaaggataaataaatagaaaaatataaaagttagaataaatgtattttgggtttgtaacttctcttttttcctatgtgatttaaaacacaactacataaaacaataaatataaatctatgtcagttgggatacaatatataaacatgtaattcaatagggaaaactaagctatatagggggaaatttttatataccattgaaactattttggtactaatttgaactagattgttataaatgaagacattaattgtaayccccaaggcaaccactaataaaataactaacgcagaacgcagtgtaaaataaataaagaggtaatcaaaatgttatgctagtagacatcaatttcacacgaaagaagacagtaagggaggaattcagcaacaaaaaaaaaaatatgacatatggagtaaaaggtaacaaaatggca

SEQ ID NO: 259587 - DNA, 465 bp, Homo sapiens
tgaatcccaatggagaaataaagaatattagtaaggataaataaatagaaaaatataaaagttagaataaatgtattttgggtttgtaacttctcttttttcctatgtgatttaaaacacaactacataaaacaataaatataaatctatgtcagttgggatacaatatataaacatgtaattcaatagggaaaactaagctatatagggggaaatttttatataccattgaaactattttggtactaatttgaactagattgttataaatgaagacattaattgtaatccccaaggcaaccactaataaaataactaacgcagaacrcagtgtaaaataaataaagaggtaatcaaaatgttatgctagtagacatcaatttcacacgaaagaagacagtaagggaggaattcagcaacaaaaaaaaaaatatgacatatggagtaaaaggtaacaaaatggca

SEQ ID NO: 259588 - DNA, 465 bp, Homo sapiens
tgaatcccaatggagaaataaagaatattagtaaggataaataaatagaaaaatataaaagttagaataaatgtattttgggtttgtaacttctcttttttcctatgtgatttaaaacacaactacataaaacaataaatataaatctatgtcagttgggatacaatatataaacatgtaattcaatagggaaaactaagctatatagggggaaatttttatataccattgaaactattttggtactaatttgaactagattgttataaatgaagacattaattgtaatccccaaggcaaccactaataaaataactaacgcagaacgcagtgtaaaataaataaagaggtaatcaaaatgtyatgctagtagacatcaatttcacacgaaagaagacagtaagggaggaattcagcaacaaaaaaaaaaatatgacatatggagtaaaaggtaacaaaatggca

SEQ ID NO: 259589 - DNA, 639 bp, Homo sapiens
tttaaaaggaagaggatgcctgtaattaaggaagtaacaatgaagatggatgctggggaaagatgtgggaagtattgaggagataatgttgattggactttgtgactgattagatattgagaggtgagaaaaaaattttaggatggcccccagttttctggcttggatgattggatgcttagtagtgttgttaaacaacagagggaacacaggagaaggtttaggagaagacctagttcagtttagcatatgttgaatctgaagcacttgtgggaccaaacagcgatgtctaattggtaattgaatctagttatcaggagagtggtctgagatagggatagaartctgtgaattgcggcagggaaagaagtgttttccctattccaagcacccggtgtaaagataaaaaggaagggaaaaaagaacgaagcactgtggagagtacaaaggaatgggtaggggaaagaaggggcaaaggaacgtatttagggaataatagaagaatgagagcaagggaagaagaaatctggaaaacagaaggaaaactaggagaaggcaatgtcctggagatctagggagttaaactcttgacgaacgtggaggaaaggctttctgctactccgcatatccaaccgtcag

SEQ ID NO: 259590 - DNA, 623 bp, Homo sapiens
gggcaagaacaggaggaagcagtggycacaggtggggctggcagtttatgtcccactggagctggggaagtggagtatgctatcagacgggcaggcagtcttcagttattatctgttctcaccattgctgctgctgctgatgctgctattgttattaataccattatgtcagcaccacatatttagggctgattatgagtgaagctctgtgcagaacctttcacctgcattaccttacttaatcctcctgacagccctgcagctttagtgtcattgtccagatgaagaaactgaggtagagatcggtgatccagacacacagacctgtaggtgatccagatacacagagtgagaacttgaaccctacagggcttcaagttccatgtgctttcacctcatcctgttgtcttcctaatcaggcaaagtttcaggggcagagattgaagaaatggtggggtattccaacagaagggacacagcaaaaggaaatcaggatgtgtggggtagaatgggtcctagaacactgaagaagtgagcagagagagctttcacctggggctgtggatttggaagccctcagtataggggttaaagccaagagaaggaattagcatgtctagcaa

SEQ ID NO: 259591 - DNA, 623 bp, Homo sapiens
gggcaagaacaggaggaagcagtggtcacaggtggggctggcagtttatgtcccactggagctggggaagtggagtatgctatcagacgggcaggcagtcttcagttattatctgttctcaccattgctgctgctgctgawgctgctattgttattaataccattatgtcagcaccacatatttagggctgattatgagtgaagctctgtgcagaacctttcacctgcattaccttacttaatcctcctgacagccctgcagctttagtgtcattgtccagatgaagaaactgaggtagagatcggtgatccagacacacagacctgtaggtgatccagatacacagagtgagaacttgaaccctacagggcttcaagttccatgtgctttcacctcatcctgttgtcttcctaatcaggcaaagtttcaggggcagagattgaagaaatggtggggtattccaacagaagggacacagcaaaaggaaatcaggatgtgtggggtagaatgggtcctagaacactgaagaagtgagcagagagagctttcacctggggctgtggatttggaagccctcagtataggggttaaagccaagagaaggaattagcatgtctagcaa

SEQ ID NO: 259592 - DNA, 623 bp, Homo sapiens
gggcaagaacaggaggaagcagtggtcacaggtggggctggcagtttatgtcccactggagctggggaagtggagtatgctatcagacgggcaggcagtcttcagttattatctgttctcaccattgctgctgctgctgatgctgctattgttattaataccattatgtcagcaccacatatttagggctgattatgagtgaagctctgtgcagaacctttcacctgcattaccttacttaatcctcctgacagccctgcagctttagtgtcattgtccagatgaagaaactgaggtagagatcggtgatccagacacacagacctgtaggtgatccagatacacagagtgagaacttraaccctacagggcttcaagttccatgtgctttcacctcatcctgttgtcttcctaatcaggcaaagtttcaggggcagagattgaagaaatggtggggtattccaacagaagggacacagcaaaaggaaatcaggatgtgtggggtagaatgggtcctagaacactgaagaagtgagcagagagagctttcacctggggctgtggatttggaagccctcagtataggggttaaagccaagagaaggaattagcatgtctagcaa

SEQ ID NO: 259593 - DNA, 623 bp, Homo sapiens
gggcaagaacaggaggaagcagtggtcacaggtggggctggcagtttatgtcccactggagctggggaagtggagtatgctatcagacgggcaggcagtcttcagttattatctgttctcaccattgctgctgctgctgatgctgctattgttattaataccattatgtcagcaccacatatttagggctgattatgagtgaagctctgtgcagaacctttcacctgcattaccttacttaatcctcctgacagccctgcagctttagtgtcattgtccagatgaagaaactgaggtagagatcggtgatccagacacacagacctgtaggtgatccagatacacagagtgagaacttgaaccctacagggyttcaagttccatgtgctttcacctcatcctgttgtcttcctaatcaggcaaagtttcaggggcagagattgaagaaatggtggggtattccaacagaagggacacagcaaaaggaaatcaggatgtgtggggtagaatgggtcctagaacactgaagaagtgagcagagagagctttcacctggggctgtggatttggaagccctcagtataggggttaaagccaagagaaggaattagcatgtctagcaa

SEQ ID NO: 259594 - DNA, 539 bp, Homo sapiens
gcagaaacaggtcagatttaggcttcatcattcatgtttttctaggaggacttgtcatttttttctaagatctatgtagataaaataaggtaaaattttttaattcagacataaaaactgaaaaatggagaaaattgataacctctgtttatcttcacaacacaatgtacttatttgacagatttttttcctctcaataaatttccatttttcttttattcagctttatggaagtatgattgaaaaataaaaattgtatgtatttagtgcatgtaatgtgatgttttgatatattataccttgtgcagtgattagtacaattaagctaattaacatagccatcatcttacwcagtaatgaccatttgtatgtgtgtttgtggtgagaacacttgagacatttgtttcttttttaaggttgaataatattccattgtttgtatataacacattttctttgtccatttatctgtctacacttaggttgtttccgtatttgacaattgggaataaggctgcaatgaatatggaagtgcaaat

SEQ ID NO: 259595 - DNA, 539 bp, Homo sapiens
gcagaaacaggtcagatttaggcttcatcattcatgtttttctaggaggacttgtcatttttttctaagatctatgtagataaaataaggtaaaattttttaattcagacataaaaactgaaaaatggagaaaattgataacctctgtttatcttcacaacacaatgtacttatttgacagatttttttcctctcaataaatttccatttttcttttattcagctttatggaagtatgattgaaaaataaaaattgtatgtatttagtgcatgtaatgtgatgttttgatatattataccttgtgcagtgattagtacaattaagctaattaacatagccatcatcttactcagtaatgaccatttgtatgtgtgtttgtggtgagaacacttgagacatttgyttcttttttaaggttgaataatattccattgtttgtatataacacattttctttgtccatttatctgtctacacttaggttgtttccgtatttgacaattgggaataaggctgcaatgaatatggaagtgcaaat

SEQ ID NO: 259596 - DNA, 642 bp, Homo sapiens
gtcatgagtcctgcccatattagctcaactgttacctctcaatgctgacctctggcccccatgaccaggtctctcagaccccacttccttgccatgaacattctggctgccattatcctggctgttgaggcaggtgttgagctagtggcagaaagatttgccctggtgtcatttcttccttccctccagaccaaggtcaccactgcctccataagctaaggcatgagcaaccagttcatctaggattctgtcttactctgcagttcacccctatagactcagttggacctttaaaaagagtatgcagaagagagttacattgttaaccacctagccastgtgccacatggcctcaatgggtggagtgtagaattaatgtgcacagaccaaactgctgctcagcccagcaggaggagtttcggtctacaaataaccaagtagtcagtcagtgctcagtgttcaaacactggatgctacatgaatgaatgaatgaatgagtagatagctgcccactggttttctcatgcatttagcctttggatgtcagttttcattcattctttcattcattcacacaatacaaaaagttggttgaatgcttgtggattgggcaatgtcagggtcctgggcacacagggtgac

SEQ ID NO: 259597 - DNA, 642 bp, Homo sapiens
gtcatgagtcctgcccatattagctcaactgttacctctcaatgctgacctctggcccccatgaccaggtctctcagaccccacttccttgccatgaacattctggctgccattatcctggctgttgaggcaggtgttgagctagtggcagaaagatttgccctggtgtcatttcttccttccctccagaccaaggtcaccactgcctccataagctaaggcatgagcaaccagttcatctaggattctgtcttactctgcagttcacccctatagactcagttggacctttaaaaagagtatgcagaagagagttacattgttaaccacctagccagtgtgccacatggcctcaatgggtggagtgtagaattaatgtgcacagaccaaactgctgctcagcccagcaggaggagtttcrgtctacaaataaccaagtagtcagtcagtgctcagtgttcaaacactggatgctacatgaatgaatgaatgaatgagtagatagctgcccactggttttctcatgcatttagcctttggatgtcagttttcattcattctttcattcattcacacaatacaaaaagttggttgaatgcttgtggattgggcaatgtcagggtcctgggcacacagggtgac

SEQ ID NO: 259598 - DNA, 559 bp, Homo sapiens
tggggcttggtggaaggtgattgtattatgggggtgcatttgtcatgaatggtttagcaccatcctcttgtgctgtccttgagacagtgagtgagttctyattagatctggccctttataagtgtgtagcaccttcccctttgcacttgctcctgcgcccaccatgtgagacacctgcttcatcttctgccatgattgtaagcttcccaaggcctccccagaagcagatgccagcattatgcttcctttacagcctgcagagccatgagccaattaaacctcttttctttataaattacccaatctcaagtatttcttcacagcaatgccaagaatggcctaatacatataatttcagttctttaaaatttgttgagctttgtttgatggcccagaagatagtgcttcttaatgaatgttccatgtgtacttgaaaagaatatgtattctattactgatgggtgaagtgttctatacatgtcaatttgctgaagttggttgatagtgcagttcatgtctcctatattcttacaattttttgtgtatttgttctatcaat

SEQ ID NO: 259599 - DNA, 559 bp, Homo sapiens
tggggcttggtggaaggtgattgtattatgggggtgcatttgtcatgaatggtttagcaccatcctcttgtgctgtccttgagacagtgagtgagttcttattagatctggccctttataagtgtgtagcaccttcccctttgcacttgctcctgcgcccaccatgtgagacacctgcttcatcttctgccatgattgtaagcttcccaaggcctccccagaagcagatgccagcattatgcttcctttacagcctgcagagccatgagccaattaaacctcttttctttataaattacccaatctcaagtatttcttcacagcaatgccaagaatggcctaatacatataatttcagttctttaaaatttgttgagctttgtttgatggcccagaagatagtgcttcttaatgaatgttccatgtgtacttgaaaagaatatgtattctattactgatgggtgaagtgttctatacatgtcaatttgctgaagttrgttgatagtgcagttcatgtctcctatattcttacaattttttgtgtatttgttctatcaat

SEQ ID NO: 259600 - DNA, 535 bp, Homo sapiens
agtctgagctgaaacagccttaggagaagtcctaatgaggaatgggacttgtgctcagcacaaacggactgggaaagctgaacgtgtatggatatccttcacaggctgactaatcacacaaagtgcaatgactagtttgactaaaagtaatgagagtgggacatgarctccactactgacttaaaccttgctttaaacaagttatttaacctcttgagttctctaatttcttatggtacctgcactactcgttcaaaatggcagactgaacacatgcgttgacttccttccttcccccaacccacctaaatgacaaaaagcagcggcatgcagttatttgacacccagatgcatcatcttttaatactccctttttatgacaaaattgctttcagtactaatcgttatttcattaatttgtttcacagtttgaaacaaaggtttactttgtatacaaaaattttcatttaaaaatacttagtgaaataaatcatgtatgaactaaaattagtacttaccacaaaaatattacagc

SEQ ID NO: 259601 - DNA, 535 bp, Homo sapiens
agtctgagctgaaacagccttaggagaagtcctaatgaggaatgggacttgtgctcagcacaaacggactgggaaagctgaacgtgtatggatatccttcacaggctgactaatcacacaaagtgcaatgactagtttgactaaaagtaatgagagtgggacatgaactccactactgacttaaaccttgctttaaacaagttatttaacctcttgagttctctaattycttatggtacctgcactactcgttcaaaatggcagactgaacacatgcgttgacttccttccttcccccaacccacctaaatgacaaaaagcagcggcatgcagttatttgacacccagatgcatcatcttttaatactccctttttatgacaaaattgctttcagtactaatcgttatttcattaatttgtttcacagtttgaaacaaaggtttactttgtatacaaaaattttcatttaaaaatacttagtgaaataaatcatgtatgaactaaaattagtacttaccacaaaaatattacagc

SEQ ID NO: 259602 - DNA, 404 bp, Homo sapiens
ccttccttcccccaacccacctaaatgacaaaaagcagcggcatgcagttatttgacacccagatgcatcatcttttaatactccctttttatgacaaaattgctttcagtactaatcgttatttcattaatttgtttcacagtttgaaacaaaggtttactttrtatacaaaaattttcatttaaaaatacttagtgaaataaatcatgtatgaactaaaattagtacttaccacaaaaatattacagctatttggtctgttgatcattgttttcaatttaaacacaaataaaactcaaaattatcagataaaatgagataatggaagtaattcaagttctgtttcttctttatcatcactgcactgtcattgttcatttcaaatctactcttttcaacgcaa

SEQ ID NO: 259603 - DNA, 629 bp, Homo sapiens
atttgtttcacagtttgaaacaaaggtttactttgtatacaaaaattttcatttaaaaatacttagtgaaataaatcatgtatgaactaaaattagtacttaccacaaaaatattacagctatttggtctgttgatcattgttttcaatttaaacacaaataaaactcaaaattatcagataaaatgagataatggaagtaattcaagttctgtttcttctttatcatcactgcactgtcattgttcatttcaaatctactcttttcaacgcaagcataggtagcaccatagggattggagatacaaatgcttccgaaagtgagcttgaatgcttccaaatctttaagaacttactcttgaracaaacataggtagctgaatccctttgtgttgaagtcaattatgtaactggaagatttccaagttagcctctctgtagaatccaatgtttgttacagaacaagcagtaaaaattacgcttatttgtgttggggtcaaccgtgtaactgggaaatttccaaattagcttcactgtagaattcagtgttgttaaagaataagcaggcagtaaaaactgtggtttttttctgatacacatatatattattaaaactctacagtaaccaaa

SEQ ID NO: 259604 - DNA, 629 bp, Homo sapiens
atttgtttcacagtttgaaacaaaggtttactttgtatacaaaaattttcatttaaaaatacttagtgaaataaatcatgtatgaactaaaattagtacttaccacaaaaatattacagctatttggtctgttgatcattgttttcaatttaaacacaaataaaactcaaaattatcagataaaatgagataatggaagtaattcaagttctgtttcttctttatcatcactgcactgtcattgttcatttcaaatctactcttttcaacgcaagcataggtagcaccatagggattggagatacaaatgcttccgaaagtgagcttgaatgcttccaaatctttaagaacttactcttgagacaaacataggtagctgaatccctttgtgttgaagtcaattatgtaactggaagatttccaagttagcytctctgtagaatccaatgtttgttacagaacaagcagtaaaaattacgcttatttgtgttggggtcaaccgtgtaactgggaaatttccaaattagcttcactgtagaattcagtgttgttaaagaataagcaggcagtaaaaactgtggtttttttctgatacacatatatattattaaaactctacagtaaccaaa

SEQ ID NO: 259605 - DNA, 592 bp, Homo sapiens
tgtgcacttggggagggactacgcagcgattgtgggactttgcattggatctcacttctgccctatcacagtggaaaacaaaacaaggaaaaattcagccagcacccacagagggaacatttagatgagccctagccagaggggaattgtccatcccagcagacagaaactgaactctggcaagctccaccaccataggttaaagtactctaggatcctaaataaacttgaaaggcactctaggccacgaggactgcaattcctsggcaagtcctggtgctatgctgggctcagagccactggacttggggtgcacacaacctagtgagacaccagctgggagggctaacagagtgcttgcataaccccttccccaaccccaggcagtacagctcacaactccttccctatacttgaggatacaagaggggaaagtaaagaggactttgtcttacaacttggataccagcccagccacagtagaacagagcaccaggcagagtcatgaggaccccattccaggccctagctcctggatgacatttctggacacatcctgggcaagaggggagcccactgccctgaaagagag

SEQ ID NO: 259606 - DNA, 620 bp, Homo sapiens
tgaaacaagtgaaaataaagacacaacatatcaaaacctatgggatacactgaaaacagtactaagaggaaagtttatagcaataagcacctatattaaaaaagaagaaaaacttcaaataacctaatgatataacttaaagtactaggaaagcaagaacaaaccaaacccaacattagtagaagggaagaaacaaagattagagcagaagtaagtaaaattgaaatgaagaaaacaatacagaagattaatgtattagtccattctcrcattgctgtaaagacatacccgagactgggtgatttcaaaagaaaaaagaggtttaactgactcacagttctgcatggctgggaaggcctcaggaaacttacattcatggtggaaggggaagcaaacacgtccttcttcacatggtagcaggagacagaggggtaccagcaggggaatcaccagatgcttataaaaccatcagatctcatgagaactcactatcacaagaacaggatggggggaacagcccccatgattcaattacctcccactgggtccctcccatgacacatggggattatgagagttacaattcaagctgagatttgggtggaaacacaaccaaatca

SEQ ID NO: 259607 - DNA, 620 bp, Homo sapiens
tgaaacaagtgaaaataaagacacaacatatcaaaacctatgggatacactgaaaacagtactaagaggaaagtttatagcaataagcacctatattaaaaaagaagaaaaacttcaaataacctaatgatataacttaaagtactaggaaagcaagaacaaaccaaacccaacattagtagaagggaagaaacaaagattagagcagaagtaagtaaaattgaaatgaagaaaacaatacagaagattaatgtattagtccattctcgcattgctgtaaagacatacccgagactgggtratttcaaaagaaaaaagaggtttaactgactcacagttctgcatggctgggaaggcctcaggaaacttacattcatggtggaaggggaagcaaacacgtccttcttcacatggtagcaggagacagaggggtaccagcaggggaatcaccagatgcttataaaaccatcagatctcatgagaactcactatcacaagaacaggatggggggaacagcccccatgattcaattacctcccactgggtccctcccatgacacatggggattatgagagttacaattcaagctgagatttgggtggaaacacaaccaaatca

SEQ ID NO: 259608 - DNA, 542 bp, Homo sapiens
caaaatgaaagacaaaagccatacgatcatttcagttgatgctgaaaaaacatttgataaaattagtatttcttcatgataaaaacagtcaaaaaactgggtataggaggaaaataccccaacagaataaaacagaaaaacagaaaaaagaataaaatgtgacacacccacagctagtatcatactaaaggaggcaaaactaaaaacctttcttctaagatctggaagatgacaaggatgcccactttcaccactgcaattcaacatagtactgaagtcctagctagagcaatcagaaaagaaaaagaaataaagatcctccaaattggaaaggaagaagtcaaattaaccttgtttgccgataatatgatcttgtatttaggaaaacctaaagattccaccaaaaaactattagaactgattaacaaattcastgaagttgcaggatacaaagtcagtagcatttctatgtgccaacagctaacaagctaaaaaagaaatcaagaatgtaatcctaattacaatagctacaaataaaataa

SEQ ID NO: 259609 - DNA, 510 bp, Homo sapiens
tttaggaagtataaacattcacaaatatttagtgaagtgcaattgaataaggacaatgggaaattagaggggccaggggtggggcaaacagataggaaagtgagaagaaggaaagatasgtgactggagtgactactgagaactcagaagtgactctctgatgccctttcagctgattccaagtgcttcattcagtacacaggcctgctagtcaaggacgatccacaccaattcgtcaagaccctctctcaggactcaggtgcttatttagatgttgaagcccagcctaattcacatgctaatcagaaatttcttctaccagggcctgcctgatcaagaggggcgggtacatattatgatggcaggaataaaggtagtgatggatacatctgtgaaagaagggggtggggggtcaatacattggaaatcacacattatttcgtagcataaaattcacaggcccaagataaaggtatacttgcaactaataagtgaaaaaaatattgaatt

SEQ ID NO: 259610 - DNA, 510 bp, Homo sapiens
tttaggaagtataaacattcacaaatatttagtgaagtgcaattgaataaggacaatgggaaattagaggggccaggggtggggcaaacagataggaaagtgagaagaaggaaagatacgtgactggagtgactactgagaactcagaagtgactctctgatgccctttcagctgattccaagtgcytcattcagtacacaggcctgctagtcaaggacgatccacaccaattcgtcaagaccctctctcaggactcaggtgcttatttagatgttgaagcccagcctaattcacatgctaatcagaaatttcttctaccagggcctgcctgatcaagaggggcgggtacatattatgatggcaggaataaaggtagtgatggatacatctgtgaaagaagggggtggggggtcaatacattggaaatcacacattatttcgtagcataaaattcacaggcccaagataaaggtatacttgcaactaataagtgaaaaaaatattgaatt

SEQ ID NO: 259611 - DNA, 407 bp, Homo sapiens
gcctgcctgatcaagaggggcgggtacatattatgatggcaggaataaaggtagtgatggatacatctgtgaaagaagggggkggggggtcaatacattggaaatcacacattatttcgtagcataaaattcacaggcccaagataaaggtatacttgcaactaataagtgaaaaaaatattgaattaaggagaaagtaaaaggaatgatgatcctctggacatctgcttctgtggtttttcacttcagtgctacctctgctattaagaacccagtgtgcacattggctgaagacaatctgttgttgcagaatttaaatacagacatattatgttttcatatttatactgtgaccaagagaatcctcattcaggcctcagccttgtatttttgctaccatttccaaa

SEQ ID NO: 259612 - DNA, 494 bp, Homo sapiens
aattcacacccaattttcataggttggcataatagatgacacatatttatttgccatctgatgtggctttgctgtctccccacccaaatctcatcttgaattgtagctcccataattctcacatgtcatgggaggkacctggtaggaggtaattgaatcacattgacagatctttcccatgctgttctcgtgatagtgaataaatctcacgagatttgatggttttataaaggggagttcccctgcacccgctctcctgtctgctgcaatgtaagatgtgtccttgctcctcctttgtcttccaccatgattgtgaggcctctccagccatgtggaactgtgagtctattaaacctcttttttctttataaattactcagtctcgggtgtgtctttattagcagcataagaatgaactaatacaccatctctatacagaaggatgaagactctatctctatacataattataactactttttagagtattgtag

SEQ ID NO: 259613 - DNA, 543 bp, Homo sapiens
ggcaccttcagaaagcagggagaggatgtacctccctgccaaaatcaatcctggtcaactccaagtgagtctataagccgtactaaaataaagctgatttaacaaataatggcttaacacatggaatcactaaatgctatgctttaatgtatttgtaagaaaatctcaccatttgatgttaaaaggaggaacaagatgaattttgacacgcatttgtcaaatcttgaggaacattaactttctgagyagagaagacctttttagagcccccagatggaaactggataaagtcctttagacttatgaaaagctacatgcttgaacacagctcctgccctgtggtttcaaatacaggcttaggacttctgcctctgaataggctgtcgggcagcagactgatgctctcaccaaaaataactagaaaggccacataaaataaaattaaatttaaaactctgttaaaagacataagagaactgctgatgcataggtgactatcaaggccacagtttgaagagggtagaatcacagaggggtgagttg

SEQ ID NO: 259614 - DNA, 543 bp, Homo sapiens
ggcaccttcagaaagcagggagaggatgtacctccctgccaaaatcaatcctggtcaactccaagtgagtctataagccgtactaaaataaagctgatttaacaaataatggcttaacacatggaatcactaaatgctatgctttaatgtatttgtaagaaaatctcaccatttgatgttaaaaggaggaacaagatgaattttgacacgcatttgtcaaatcttgaggaacattaactttctgagtagagaagacctttttagagcccccagatggaaactggataaagtcctttagacttatgaaaagctacatgcttgaacacagctcctgccctgtggtttcaaatacaggcttaggacttctgcctctgaataggctgtcgggcagcagactgatgctctcaccaaaaataactagaaaggccacataaaataaaattaaatttaaaactckgttaaaagacataagagaactgctgatgcataggtgactatcaaggccacagtttgaagagggtagaatcacagaggggtgagttg

SEQ ID NO: 259615 - DNA, 485 bp, Homo sapiens
aatcctggtaagcatacaactcaactggcagaagcagaagtatgcgggttaggagaaggtagcaaattactaggtgggagcatgggcatgccatgggcattcattagtatgtttcatagaggcgtggtcaatcccgtaagaaagcaaagtagaggtcatataagagagcttatagagaaagtgttattaaggacaaggagcagcttccatttgcaaagggtaagtattccagagtatttaaatatatgatagtttaactattaattaagttaaactgccttaacatattaacattttatagtaaagaatggaaaatacatacrtcaccattacatgtacatatatagtaatacatagtcaaatatttaattgcttttaaatatatttaacataaattatatttataccatattcaaaagtctttttgaaatattttaaattttcctttgctatcttctaccaatttaggatgaaaaaggggggtt

SEQ ID NO: 259616 - DNA, 523 bp, Homo sapiens
gacggtgagcccataagatcctgatggagctgaagaactcctgtttttacagctaacctgttatacagtaggagtatattctaaaataactataaaaagtacaataacatagttattatcaaatatgtactgtactaattgcatgtgctatacttttatatcacagtgcagtgggcttgtgtacactagcatactagcatcaccacaaayacatgagtaatgcactgtctcaaaaaaaagaaaaaaaaaatcttaggtagatcctttagaatatgagttgtctggtggtttttttttttttttttttggaagacttatgtgtatgttctcttttttttaaacaggtggtgtttggttatatgatgttcactttatttaatgacaagtaaaagtgtaaggaaattgagctatgttgtcacattgtggaaaacatctcaaggcagcaagaaactggataatcctgaatatttttacctgaaggactaagtaaagatcatagcatggtggtttctaagacacaaac

SEQ ID NO: 259617 - DNA, 609 bp, Homo sapiens
cctgatagatcatggatatatgatcttcaaatattcccttccattctatgcattatcttttcactttctgttttaaattttagattcgggggtacatgtgcaggtttgttacaygagttagctgcatgatgctgaggctgggcttctaatgatcccgtcacccaagtagtgaacatggtacccaataggtagtttttcagcccttcccttcctccttccttcccttcctgcttttggagtctccagtgtctaaccgcacctttgtgtccatgtgtatccaatgcttagctcccacttccaagtgtgaatataaggtatttggttttctgttacttaggatttgcttaggataatggcttctagctacatccatgtcttggcaaaggacatgattttgttcttttatggctgtgtagtattccatggcgtataagtaccacattttctttatctaatccactgctgatgggcacctgggttgattctatgtctttgctattgtcttttcactttcttttttaattattatttcaataggttttgggagaacaagtggtacttgattacatggatgagttctttactggtggtttctgagattttggtgca

SEQ ID NO: 259618 - DNA, 609 bp, Homo sapiens
cctgatagatcatggatatatgatcttcaaatattcccttccattctatgcattatcttttcactttctgttttaaattttagattcgggggtacatgtgcaggtttgttacatgagttagctgcatgatgctgaggctgggcttctaatgatcccgtcacccaagtagtgaacatggtacccaataggtagtttttcagcccttcccttcctccttccttcccttcctgcttttggagtctccagtgtctaaycgcacctttgtgtccatgtgtatccaatgcttagctcccacttccaagtgtgaatataaggtatttggttttctgttacttaggatttgcttaggataatggcttctagctacatccatgtcttggcaaaggacatgattttgttcttttatggctgtgtagtattccatggcgtataagtaccacattttctttatctaatccactgctgatgggcacctgggttgattctatgtctttgctattgtcttttcactttcttttttaattattatttcaataggttttgggagaacaagtggtacttgattacatggatgagttctttactggtggtttctgagattttggtgca

SEQ ID NO: 259619 - DNA, 602 bp, Homo sapiens
ctgggtgatgagtaatctgtacaccaagtgcccatgatatgcaatttacctatataacaaatctatacatgtacccctgaaactaatagttaaaaaaaacttttgtagttttagtatttccatttttgtctttgatctattttgagttagtttttatatatggcatgatgaaagggaccaacttctttcttttgcctgtggctatccagttgttctagcgccatttgttraaaagattgttcgtcccctcattgaattgctctgacacttcggtcacaattcaattggccattaattaacagcttctttgtgcactttcaattctatttcaatgatctataagtctatcttcatgccagtaccatactgtcttaattattggatctttgtcataggtttcaaaattgggaagtatgaatcctcctattttttttttcaagattgttttggctccagaactgtgggaaataaatttctgttgcttaaaatctgcccaatttgtggtattgtgttatagcaaccaaaatggactaaggcaagcagccttccataagttttgatatgttgtggttttctttttttcatctcaaagtattatttcc

SEQ ID NO: 259620 - DNA, 617 bp, Homo sapiens
tttggctaatttccacaattctgaaaaaaattgattttgactatttttgccaggatgtttattgcttcttatggaaaagtctatttttggaggtcattactctaccattccagaaatgtttccctagaatctgaattcccacaagatcctcagatagttgtaggcacataaaagtttgagaaaccttggtttataggatatcacctgtccctaaattttctggatatcttcatttgaagttatcaggtgaccaagkaatcttccaattggtttggattctaactgtatataggtaatatctaatatgaaaagtttatattgtcagatcctacaatgattaaaaaaaaaaacagcctctgtctacctttgtgcttatttctggaaatgtttgtatgagccttgatcattttatttgattgtcactcattaattaacataaaagtttccacttggtataattttttggcatcttctcaccaaacatgggtgttgctggctattctaaatgaactcagaataccctatctcctgacccaagggtagcctgttttctgtgacaaagtaaacaaaatagtttcttcctagcttttgtttatttgtttgtttcctgaaagagc

SEQ ID NO: 259621 - DNA, 590 bp, Homo sapiens
gcacatctcttcctcttggacatggatgtagaatttgccaaattaaccactcatgtccatccttaatgtcctacaaccaggccactctgccattagagagaagcaacttttttttcagtatagaagaaaaggaggagttatgcttcaaaggagaaaaatacttcaccacctcaattgctaattttgctgaagtcttcaaaaataacaaaataaaatgtaaatcaatagctgcatgaagaggaacaggcactagaacygagctgtcttggacaagaagacgggtgggtactgctcaggctgaaatgcattggcttggatttaacatatagatgaagcacagctcggtgcctttagctggtaagaatcaaatcatgaggctaaacactaaattagctgtgtgcctgtacctcacagcagagccaaaatgaggcactgtttttttatccctgcaccttccgatgcctgccaaaaagaattcaagcaaggaaaaatatgcctcctgttgtttgggggagttacaagatacatttaaaaattgatttatggtttaatcgcttttgaagcttcattattccaagtattagcgtgaa

SEQ ID NO: 259622 - DNA, 590 bp, Homo sapiens
gcacatctcttcctcttggacatggatgtagaatttgccaaattaaccactcatgtccatccttaatgtcctacaaccaggccactctgccattagagagaagcaacttttttttcagtatagaagaaaaggaggagttatgcttcaaaggagaaaaatacttcaccacctcaattgctaattttgctgaagtcttcaaaaataacaaaataaaatgtaaatcaatagctgcatgaagaggaacaggcactagaactgagctgtcttggacaagaagacgggtgggtactgctcaggctgaaatgcattggcttggatttaacatatagatgaagcacagctcggtgcctttagctggtaagaatcaaatcrtgaggctaaacactaaattagctgtgtgcctgtacctcacagcagagccaaaatgaggcactgtttttttatccctgcaccttccgatgcctgccaaaaagaattcaagcaaggaaaaatatgcctcctgttgtttgggggagttacaagatacatttaaaaattgatttatggtttaatcgcttttgaagcttcattattccaagtattagcgtgaa

SEQ ID NO: 259623 - DNA, 609 bp, Homo sapiens
aaggttgcgttcttagccctgacaggtctgctatgctaaggcctggagtgggacctgggcctgggataggtatatctgggttggtgtactagaaaagtgggaatttccagattcttctgaaccctctgggaccacagttgggtcccactgctctttgttaaaggctaatgctcctcccttgcctgaagatgtcacagaggtctctgttttacaaggcaacatgctcctcctcycccaaatccgctcacagcttccctcttgatcaacaggcatgtgaatagggttgagtcataccttgacttgtttggggaagcagtgggtctgctggaaaagaaaaaggctgcactggaaaggggctgcaggacctaaataacacatactggcaaaagccaggatactacccgtaggactggattctgcgagttctggatcctagacagaaaataaagttggacaagggagagtttagggatatgagaatcctctcccatgatacagaatataacaccctgacaaggaccccaagaaaacaatctaaatgctgctatgatgtatcttggaacttggagaaatagatggctcatactatatgaagtggaagtgtcagaa

SEQ ID NO: 259624 - DNA, 609 bp, Homo sapiens
aaggttgcgttcttagccctgacaggtctgctatgctaaggcctggagtgggacctgggcctgggataggtatatctgggttggtgtactagaaaagtgggaatttccagattcttctgaaccctctgggaccacagttgggtcccactgctctttgttaaaggctaatgctcctcccttgcctgaagatgtcacagaggtctctgttttacaaggcaacatgctcctcctcccccaaatccgctcacagcttccctcttgatcaacaggcatgtgaatagggttgagtcataccttgacttgtttggggaagcagtgggtctgctggaaaagaaaaaggctgcactrgaaaggggctgcaggacctaaataacacatactggcaaaagccaggatactacccgtaggactggattctgcgagttctggatcctagacagaaaataaagttggacaagggagagtttagggatatgagaatcctctcccatgatacagaatataacaccctgacaaggaccccaagaaaacaatctaaatgctgctatgatgtatcttggaacttggagaaatagatggctcatactatatgaagtggaagtgtcagaa

SEQ ID NO: 259625 - DNA, 609 bp, Homo sapiens
aaggttgcgttcttagccctgacaggtctgctatgctaaggcctggagtgggacctgggcctgggataggtatatctgggttggtgtactagaaaagtgggaatttccagattcttctgaaccctctgggaccacagttgggtcccactgctctttgttaaaggctaatgctcctcccttgcctgaagatgtcacagaggtctctgttttacaaggcaacatgctcctcctcccccaaatccgctcacagcttccctcttgatcaacaggcatgtgaatagggttgagtcataccttgacttgtttggggaagcagtgggtctgctggaaaagaaaaaggctgcactggaaaggggctgcaggacctaaataacacatactggcaaaagccaggatactacccgtaggactggattctgcgagttctggatcctagacagaaaataaagttggacaagggagagtttagggatatgagaatcmtctcccatgatacagaatataacaccctgacaaggaccccaagaaaacaatctaaatgctgctatgatgtatcttggaacttggagaaatagatggctcatactatatgaagtggaagtgtcagaa

SEQ ID NO: 259626 - DNA, 566 bp, Homo sapiens
tccactgtattctttctaacccttcaaatgagtcttcttatataacaatattttcattttgtttccatttattaattcaactagtaactctttttgagaaggagtcttgctctgtcrcccaggctggagtgcagtggtgctatctcggctcactgcaagctctgactcccgggttcacgccattctcctgcctcagcctcccaggtagctgggactacaggggcccaccaccatgcccagctaattttttttgtatttttagtagagacagggtttcaccgtgttagccaggatggtctccatctcctgaccttgtgatctgcccaccgcagcctcccaaaaggctgggattataggtgtgagccaccgcgccctgccaactagtaactctttaatcaatctaatcacattgaatttatcacttacagtggagcaatgaatgaagccacatgtaacttattatttgaagtacatgcttaccatacgtaacaaggcctttcagctttacctgtttcacataggcctcctgatatggtttggctgtgtccccacccaaatctcatctt

SEQ ID NO: 259627 - DNA, 566 bp, Homo sapiens
tccactgtattctttctaacccttcaaatgagtcttcttatataacaatattttcattttgtttccatttattaattcaactagtaactctttttgagaaggagtcttgctctgtcacccaggctggagtgcagtggtgctatctcggctcactgcaagctctgactcccgggttcacgccattctcctgcctcagcctcccaggtagctgggactacaggggcccaccaccatgcccagctaattttttttgtatttttagtagagacagggtttcaccgtgttagccaggatsgtctccatctcctgaccttgtgatctgcccaccgcagcctcccaaaaggctgggattataggtgtgagccaccgcgccctgccaactagtaactctttaatcaatctaatcacattgaatttatcacttacagtggagcaatgaatgaagccacatgtaacttattatttgaagtacatgcttaccatacgtaacaaggcctttcagctttacctgtttcacataggcctcctgatatggtttggctgtgtccccacccaaatctcatctt

SEQ ID NO: 259628 - DNA, 566 bp, Homo sapiens
tccactgtattctttctaacccttcaaatgagtcttcttatataacaatattttcattttgtttccatttattaattcaactagtaactctttttgagaaggagtcttgctctgtcacccaggctggagtgcagtggtgctatctcggctcactgcaagctctgactcccgggttcacgccattctcctgcctcagcctcccaggtagctgggactacaggggcccaccaccatgcccagctaattttttttgtatttttagtagagacagggtttcaccgtgttagccaggatggtctcsatctcctgaccttgtgatctgcccaccgcagcctcccaaaaggctgggattataggtgtgagccaccgcgccctgccaactagtaactctttaatcaatctaatcacattgaatttatcacttacagtggagcaatgaatgaagccacatgtaacttattatttgaagtacatgcttaccatacgtaacaaggcctttcagctttacctgtttcacataggcctcctgatatggtttggctgtgtccccacccaaatctcatctt

SEQ ID NO: 259629 - DNA, 582 bp, Homo sapiens
tgttcatgtgagcaatgcctcacgatagaggtgatgtctttccattaaacatttccaaccctcattacacctcagcctttttacctctaccatttgttgataatgtaaggttataaaaaccaacaaatacaaatcaataacaatgtccattcccaattaattttatctaacatttgatacatgctggcagggcaatgagtaaagcctttctttgcggggagtgagggtttgtggagtaaaatgccttcgtttctaaccttagccctcctgttccttcccaaggtgtgctcagcctcctcctgtgatgtatctggatttcatcctccatggtgaaaggcaaaaggctgtttatctcttctctggtctgtgtatgaaagctacatgaaaatgagcattgaaagggttaagtgcactcttcatgcagaaagacaaaacttgtggattttctattccattgggtccaaacaagaagaacggtctgttgctattattttargattcaactcaatagctgataaatttgatttctttcacactcggcaaagacttgaaacattgtagccccagaatgggaagtctctt

SEQ ID NO: 259630 - DNA, 580 bp, Homo sapiens
agcatagctcaagacacagaaaggactctctccctcttccttttacctgcccctctcctggagacctggggaagcttaaggagtttggattgtattgaaagtgtcatgctgtttcaggctggacaggccttggatggtgcaaaaacttcagaacccactcagtggggcttttatgtcaggggttggttccactagggaaaggttgcctcagggcagagtggggctctgaggattccctggctggcgcagctctgggacatccaagtgggttgacagagtcctttcaaaggcagttttctgacaggagagctcagaatagccaacaggaaactttctgttatactctggaattaaaaccaagcctctcactgcgtgtattactgtcctgtaaacagtagacagtccctgtcagacctgtggggtttctcacccaaacaaccactgcactacctgaattgagcctgtgaactctaaagaatcctaatgaaaatataccaccacaaatgctccaaagagcytgctttaacacactggaatcatgtacctgcccagctggtgacagggttaaaactgccaaatt

SEQ ID NO: 259631 - DNA, 573 bp, Homo sapiens
aagttctgtaatccaaagatagcattatgattagtggcagtgaatatgatattttctctttgggcaatcagtggcttagttagaacagtggataattcatgggcaacacaagatggttctgttaataacttgggsttaagctcaagctttagaatggaaatgtgctacaaagcagttttggtatgggcacataagtgttgttgggaccatcacctccatcagagatggtgattttgggtaaaattgccaaagttgaggtggttcacaaaggtctttgtgtaaatgcagacaaatggtgtatcaccgtaaagggaaactcatatcaatgggcctgacttgactcccttttgaggggtccaaacagcttccaatttatgtaatttacgtcttttatttaaaatccatttcctcagtacagttgtatcatgcatggtaattgtaggattgctaatttttaaagagcttcctttgatagagtgaggaaaagccctgtatacaccagggagagtgtgaattggtacaacttctttcaaaaatgattttgcaatatctggccaaatgtaaaattcaaaa

SEQ ID NO: 259632 - DNA, 532 bp, Homo sapiens
attgtgaagttcttgtattgtgtttttcagcttcaacaggtcagttatgttcctctctaaactggctattctggttatcacctcctgtattgttttatcgtggtccttagcttctttgcactgggttataacatgctcctttagctcagagtagttcattattactygctttctgaagcctacgtctgtcaattcagctatctcagcctcagcccaattttgtgtctttgctggagagatattacagtaatttggaggagaaaaggcactctggttttttgagttctcagcatttttgagttgattctttctcatctttgtgggcttatctacctttgatctttgaggttgctgacctttgaatggggtttttatggggtcttttttgttgatgttgttgttgttttctgtttgattttcttttaacagtcaggccacacttccatagggctgttgtggtttgctgtggtctgttccagatcctaattgccttggtttttcccatacctaaaggtatcactagtgaagactg

SEQ ID NO: 259633 - DNA, 532 bp, Homo sapiens
attgtgaagttcttgtattgtgtttttcagcttcaacaggtcagttatgttcctctctaaactggctattctggttatcacctcctgtattgttttatcgtggtccttagcttctttgcactgggttataacatgctcctttagctcagagtagttcattattactcgctttctgaagcctacgtctgtcaattcagctatctcagcctcagcccaattttgtgtctttgctggagagatattacagtaatttggaggagaaaaggcactcyggttttttgagttctcagcatttttgagttgattctttctcatctttgtgggcttatctacctttgatctttgaggttgctgacctttgaatggggtttttatggggtcttttttgttgatgttgttgttgttttctgtttgattttcttttaacagtcaggccacacttccatagggctgttgtggtttgctgtggtctgttccagatcctaattgccttggtttttcccatacctaaaggtatcactagtgaagactg

SEQ ID NO: 259634 - DNA, 469 bp, Homo sapiens
ctgtacctaatgtcctggcctatacaaagtagagcctattcccttctgaggtgaatacttctttgaaagagaaatttactccaagtttttgagggcttaagttagatgccctgtggataaatttccctggtatcaaactctctgtttcatgtcatcctttaccacacacttttttttttttttaaatcaakacagggcttcactctgttgccaaaggcaggagtgcagtggcatgatctcagctcactgcaacctccgcctcctgggctcaagcgatcttcctgcctcagcctcccaagtagccaagactacaggcacatgccaccacacccagctaactttgtatttttatagagacagggtttcgccatgttgcccagactggtcttgaactcctgagctcaaaggatcagccctcctcagcctcccaaattgttgggattacagccatgagccaccatgcctggcc

SEQ ID NO: 259635 - DNA, 469 bp, Homo sapiens
ctgtacctaatgtcctggcctatacaaagtagagcctattcccttctgaggtgaatacttctttgaaagagaaatttactccaagtttttgagggcttaagttagatgccctgtggataaatttccctggtatcaaactctctgtttcatgtcatcctttaccacacacttttttttttttttaaatcaagacagggcttcactctgttgccaaaggcaggagtgcagtggcatgatctcagctcactgcaacctccgcctcctgggctcaagcgatcttcctgcctcagcctcccaagtagccaagactacaggcacatgccaccacacccagctaactttgtatttttatagagacagggtttcgccatgttgcccagactggtcttgaactcctgagctcaaaggatcagccckcctcagcctcccaaattgttgggattacagccatgagccaccatgcctggcc

SEQ ID NO: 259636 - DNA, 555 bp, Homo sapiens
aaagtccatttgcattgcacataccagcagatcatgcttggatgggtttttttaatttcttgacttatttcctttactaatgacctctgtactcattagaaggtattagcacattacaaagacattatgaagcatcgatgggcrtacatttgtcccatatttaattttattcctgagagtaatgctcaggttttccttcatgctggttttcttttcagcacactctggtagtttgcaaataaaacaatcagggctagtttcacaggagtacaacctatgcaaccacacagggtcccatgtttagaaagttcccagacttggaaggatcacatacttgtcttaatgttctgctgtcatttttgttagtttatttccaaagaaattcatttctttggagagccattctctctgtggttttaggttgacataagtgactccattttggtactgatacccttcacatcgtcttgagattctcaataatttcgaacaaggggccacatactcgttttgcacttggtcctgaaaattttgtagctggtactaaccacaata

SEQ ID NO: 259637 - DNA, 594 bp, Homo sapiens
cttcatgctggttttcttttcagcacactctggtagtttgcaaataaaacaatcagggctagtttcacaggagtacaacctatgcaaccacacagggtcccatgtttagaaagttcccagacttggaaggatcacatacttgtcttaatgttctgctgtcatttttgttagtttatttccaaagaaattcatttctttggagagccattstctctgtggttttaggttgacataagtgactccattttggtactgatacccttcacatcgtcttgagattctcaataatttcgaacaaggggccacatactcgttttgcacttggtcctgaaaattttgtagctggtactaaccacaatacttggaatttcagatctcacctctgatcattattagctgtgtggccttggacaggtttctgaacctctctcaacttcactctcttcaaacattaaatttgaaagaacaacatctgtctcagaattgttgtaagaattagcactcaaataagatagaaaatacactggtgtgtagcacatggttctagtaactaactcttattaattgcacactctgtgccaggcaccgtgcgtg

SEQ ID NO: 259638 - DNA, 594 bp, Homo sapiens
cttcatgctggttttcttttcagcacactctggtagtttgcaaataaaacaatcagggctagtttcacaggagtacaacctatgcaaccacacagggtcccatgtttagaaagttcccagacttggaaggatcacatacttgtcttaatgttctgctgtcatttttgttagtttatttccaaagaaattcatttctttggagagccattctctctgtggttttaggttgacataagtgactccattttggtactgatacccttcacatcgtcttgagattctcaataattycgaacaaggggccacatactcgttttgcacttggtcctgaaaattttgtagctggtactaaccacaatacttggaatttcagatctcacctctgatcattattagctgtgtggccttggacaggtttctgaacctctctcaacttcactctcttcaaacattaaatttgaaagaacaacatctgtctcagaattgttgtaagaattagcactcaaataagatagaaaatacactggtgtgtagcacatggttctagtaactaactcttattaattgcacactctgtgccaggcaccgtgcgtg

SEQ ID NO: 259639 - DNA, 594 bp, Homo sapiens
cttcatgctggttttcttttcagcacactctggtagtttgcaaataaaacaatcagggctagtttcacaggagtacaacctatgcaaccacacagggtcccatgtttagaaagttcccagacttggaaggatcacatacttgtcttaatgttctgctgtcatttttgttagtttatttccaaagaaattcatttctttggagagccattctctctgtggttttaggttgacataagtgactccattttggtactgatacccttcacatcgtcttgagattctcaataatttcgaacaaggggccacatactcgttttgcacttggtcctgaaaattttgtagctggtactaaccacaatacttggaatttcagatctcacctctgatcattattagctgtgtggccttggacaggtttctgaacctctctcaacttcactctcttcaaacattaaatttgraagaacaacatctgtctcagaattgttgtaagaattagcactcaaataagatagaaaatacactggtgtgtagcacatggttctagtaactaactcttattaattgcacactctgtgccaggcaccgtgcgtg

SEQ ID NO: 259640 - DNA, 576 bp, Homo sapiens
aattgttgtaagaattagcactcaaataagatagaaaatacactggtgtgtagcacatggttctagtaactaactcttattaattgcacactctgtgccaggcaccgtgcgtgctgtttacacagatcagcttattaattccttgcacctgtggctgatgatcagcaaatacaccatttgcacttagaggatttttatagccagtgtccatttctcactggtccagcctccattctggttggtgtctatggtgattatggttatcattactatttctctcgatgctctgtgcagctggtagtattttataaatgaaagaattgaggcacagacatattaagtaacttgcccaagatcacacagcttataagtagacactccttaaytattaatggcataaactctagtaaatagcagagagaggtgagatcttttaacttgaagtttaatgttctttccttctgtctccaattttttaccctcaaggagttaatagttgagtgagagtgatgttacatataaatctggctactgcacaaagctgtgtgctcctacctgttcagcctcacctgccaa

SEQ ID NO: 259641 - DNA, 623 bp, Homo sapiens
ctccttaactattaatggcataaactctagtaaatagcagagagaggtgagatcttttaacttgaagtttaatgttctttccttctgtctccaattttttaccctcaaggagttaatagttgagtgagagtgatgttacatataaatctggctactgcacaaagctgtgtgctcctacctgttcagcctcacctgccaaacacatgctctccaagctgcttgcagttaccctctcaggcttccaggcctttgattaaattgtttcctcatctaaaggttcttccctaattcccagtccttagcacttcctacctaatttctcacttycttttaagaatcaacttaagtggttcaccccttaagaagtcctctcctctgagcactcttagaattttacacatagttttatcataatgcatctcacataaattctaatgctggttttcttgtctgccttcctccaggcctgaaagatcattgatgagcaaagatgacatattgctcatctgggtgtcaccagcacttaggaaagtgtgcctgacacatagctactattcagtacataatgaatgaaagttggtaccattttccaaggaatatcagatgctctaattcaaaggggg

SEQ ID NO: 259642 - DNA, 623 bp, Homo sapiens
ctccttaactattaatggcataaactctagtaaatagcagagagaggtgagatcttttaacttgaagtttaatgttctttccttctgtctccaattttttaccctcaaggagttaatagttgagtgagagtgatgttacatataaatctggctactgcacaaagctgtgtgctcctacctgttcagcctcacctgccaaacacatgctctccaagctgcttgcagttaccctctcaggcttccaggcctttgattaaattgtttcctcatctaaaggttcttccctaattcccagtccttagcacttcctacctaatttctcactttcttttaagaatcaacttaagtggttcaccccttaagaagtcctctcctctgagcactcttagaattttacacatagttttatcataatgcrtctcacataaattctaatgctggttttcttgtctgccttcctccaggcctgaaagatcattgatgagcaaagatgacatattgctcatctgggtgtcaccagcacttaggaaagtgtgcctgacacatagctactattcagtacataatgaatgaaagttggtaccattttccaaggaatatcagatgctctaattcaaaggggg

SEQ ID NO: 259643 - DNA, 567 bp, Homo sapiens
atttctgcagcatgacatgtaacatgactggacactgggctaaaggcatcataattatgctttaatcagagatacatagaytcacttattttctctccattaattttgacatattcaactaaagctataaaaccgtaagaatagttgacacttagttctttcaggtgataggcattactttaaatgtgttaaagggaggaaggtataaaacatatcaggagaaggagaaggcagtctcccgactgcctatcttctgatggtctgttgagcactatacagcaaatccacagtcctgaattagcaactgacttctacacttgtgcacgtgagctgtgcccacttccgtgactgcctgaatgcttcccagcagaccccccatggatactgctctgtgacatgaatgggatatttctaccagttcctacttattagcactacaggaaagagatttttttgagataaggaaacataggcaagagttagctgtgctttggaaacatttatataacaaataacctaagtgttcatctgcagcctcctagctctgtgccagtgttccaaattcca

SEQ ID NO: 259644 - DNA, 602 bp, Homo sapiens
aggtctgaacagaaggagttaacaaagatcactcattcaaaatgtctacagagcactgtgcctggtctcaggaagtgtttatctggggaaattgaggactgctttcaacagaatacttttctttcatattagatgtgttaaagcaaactaaatatggcctgagaaggactctgtacttctatatttgagtccttgtggatgaactgtaacctggytaaataagcagacaaaattgagaacctaacttagtggtatgcatctgtaacaatagctaagtcttggccaatcccagcagctgtacttcaaccagtcatacactgctgagtgttccaactgtgttcaaataaggcatacactgagctgtgaccaatccagctgttctgtaactcacttccaaatttctgtatgtcacttcccttttttgtctacaactctcttccaccacatggctgtgcaggagtctgtgaatctactgtgattctgggggctgcccgattcacaaatcattcattgctcaattaaactcctttaaatttaattctgctgaagtttttcttttatcagatggcagagttttggaaaacataaaataaacattagaa

SEQ ID NO: 259645 - DNA, 602 bp, Homo sapiens
aggtctgaacagaaggagttaacaaagatcactcattcaaaatgtctacagagcactgtgcctggtctcaggaagtgtttatctggggaaattgaggactgctttcaacagaatacttttctttcatattagatgtgttaaagcaaactaaatatggcctgagaaggactctgtacttctatatttgagtccttgtggatgaactgtaacctggttaaataagcagacaaaattgagaacctaacttagtggtatgcatctgtaacaatagctaagtcttggccaatcccagcagctgtacttcaaccagtcatacactgctgagtgttccaactgtgttcaaataaggcatacactgagctgtgaccaatccagctgttctgtamctcacttccaaatttctgtatgtcacttcccttttttgtctacaactctcttccaccacatggctgtgcaggagtctgtgaatctactgtgattctgggggctgcccgattcacaaatcattcattgctcaattaaactcctttaaatttaattctgctgaagtttttcttttatcagatggcagagttttggaaaacataaaataaacattagaa

SEQ ID NO: 259646 - DNA, 411 bp, Homo sapiens
caaacgaatatgaatacatcttcaaaagaaaaataattattgatgcaacacaaaaaaataaaccaaggaatgaagaatcaggggaattgtttcattcccttctcatagtggatgcttcactaagaaacaaatgtgtgataagayacaatttattatgatgagagtggtccttgacttcccatcttctctgatctttctaaaagatgcctgccattgccatttcaattttcctctctccattccctcccttgaggagagtttatctctgccagacaagttcttctggcacttttgatgttggatcaaaaaatagatgttgtatcagaaatagattagagagacagaaggagcattgtaagggcctctggaaagatgtgtagggactacacataagtgaagagctgaacaaga

SEQ ID NO: 259647 - DNA, 576 bp, Homo sapiens
ggttgtttgtggttagccatctctcagaacagttgctgacaatctccacctggggccccttccttgacgctgcttacttatcaggactccagggtgccttggctctgagactggaccacatgggttatagcttaatggggtcataagtctaactttgtaagactttatcaggttccaaatactgacaaactaatcttagttatttgaatctccgagcccgttttctcatttgtaaaatggagaaaatagataggattgacatttctgaattatgttctatagaaacgtaataaacattatctagaaaagttatcytaagtaaaaatttgaaaacaatgggtttaacatatttagactagcctgttaccgcaagggggtctgagagaagcctttgaaatttagccaatgtgacttgggaatttcggttaatgttctccagacttgcttgactgtgggacgctttttctataacatctctctgctcagtgtgtttcagattatactttggataaatgctggactagatattctttgttttttcctccctaattctaaaatacatgatgttatgaaaaa

SEQ ID NO: 259648 - DNA, 299 bp, Homo sapiens
tcacagaagtaggtttattactcacagatccagagagaagagggtagctgagaagagggtttagctgtgtccccagccaaatctcatcttgaattcccacatgttgtgggagggaacagmtgggaggtaattgaatcatgggggcaggtctttcccatgctgttcttctgatagtgaataagtctcacaagatctgatggttttataaaggggagtttcctgcacaagctctcttgtcttgtctgctgccaggtgagacgtgcctttcggcttgtgccatgattgtgaggcctacccag

SEQ ID NO: 259649 - DNA, 376 bp, Homo sapiens
cagcctcctgcacattctttaggcttaggagtggatggccaggyggaagggagcaggggtctggaaaggcagtccagagagaggatccagcaaacctactgggaatcctccaccttctcccctcctcttcctaccaacagccagagcaacctgggaggctgagctgaagatggaagagcctgtctgcgtgtctccccagtgactagtgaggtggcttttcctcccgaagctggaccttacatcagtgagaaataaacttccattgtgctaagccaccaaagtctgaaatgttacagcagctagcagtaccttaacccattgagtacaaagataaataacactcagtcactatctgaaaatcaagtggaatgcctgt

SEQ ID NO: 259650 - DNA, 376 bp, Homo sapiens
cagcctcctgcacattctttaggcttaggagtggatggccaggtggaagggagcaggggtctggaaaggcagtccagagagaggatccagcaaacctactgggaatcytccaccttctcccctcctcttcctaccaacagccagagcaacctgggaggctgagctgaagatggaagagcctgtctgcgtgtctccccagtgactagtgaggtggcttttcctcccgaagctggaccttacatcagtgagaaataaacttccattgtgctaagccaccaaagtctgaaatgttacagcagctagcagtaccttaacccattgagtacaaagataaataacactcagtcactatctgaaaatcaagtggaatgcctgt

SEQ ID NO: 259651 - DNA, 376 bp, Homo sapiens
cagcctcctgcacattctttaggcttaggagtggatggccaggtggaagggagcaggggtctggaaaggcagtccagagagaggatccagcaaacctactgggaatcctccaccttctcccctcctcttcctaccaacagccagagcaacctgggaggctgagctgaagatggaagagcctgtctgcgtgtctccccagtgactagtgaggyggcttttcctcccgaagctggaccttacatcagtgagaaataaacttccattgtgctaagccaccaaagtctgaaatgttacagcagctagcagtaccttaacccattgagtacaaagataaataacactcagtcactatctgaaaatcaagtggaatgcctgt

SEQ ID NO: 259652 - DNA, 239 bp, Homo sapiens
accatgtaggtcaggctggtctccaactcctgacttcaggtgatctacccacttcagcctcccaaagtgttgggattacaggcrtgcgcctggccagctttttgacatatttcaagatggctactcggaagactggagatagcttcttctacaaaaatagctgaaaagctgtgtttgttggggagatttgtatttgtagagaaaatctgcattgatatagacaggctttccctgagata

SEQ ID NO: 259653 - DNA, 239 bp, Homo sapiens
accatgtaggtcaggctggtctccaactcctgacttcaggtgatctacccacttcagcctcccaaagtgttgggattacaggcgtgcgcctggccagctttttgacatatttcamgatggctactcggaagactggagatagcttcttctacaaaaatagctgaaaagctgtgtttgttggggagatttgtatttgtagagaaaatctgcattgatatagacaggctttccctgagata

SEQ ID NO: 259654 - DNA, 239 bp, Homo sapiens
accatgtaggtcaggctggtctccaactcctgacttcaggtgatctacccacttcagcctcccaaagtgttgggattacaggcgtgcgcctggccagctttttgacatatttcaagatggctactcggaagactggagatagcttcttctacaaraatagctgaaaagctgtgtttgttggggagatttgtatttgtagagaaaatctgcattgatatagacaggctttccctgagata

SEQ ID NO: 259655 - DNA, 613 bp, Homo sapiens
  misc_feature (1)...(613): n = A,T,C or G
actcaggcatttagaaagttcatttagacaaagttataaaaacttgctgtcctttctgcctatatcacctaaaaatcctaatttaagaggtaataacattttttatttgatatacaatttatcaacacaayaaaaatctaacaattatcatgtgcagagtgtgaaaatctcatcagattaaggaacacaaagacatctttttcatatttcgaatgtanaactgttttggaaactgttatttttagaaacagttaaaaacattttttcattagtttttcatgtaaaattgtgacaaccagcatgaaataactgtcatcacagaagcatggtatattcgattccaaaacatattctttgtaagttttaatatatttacgtattatttatacttagattgtaacccataatgtacagatattatttttccttcaactcttaagaatattcttaaataataaaattaaaattaatgaattataatttttgttgcttgggaaaaagaatagacacacacgtgacagtgcatcacttcaccccatcatttcatctcatcatttcatcatttcatctcatcattttatctcatttcatctcatcccatctcatctcatca

SEQ ID NO: 259656 - DNA, 613 bp, Homo sapiens
  misc_feature (1)...(613): n = A,T,C or G
actcaggcatttagaaagttcatttagacaaagttataaaaacttgctgtcctttctgcctatatcacctaaaaatcctaatttaagaggtaataacattttttatttgatatacaatttatcaacacaataaaaatctaacaattatcatgtgcagagtgtgaaaatctcatcagattaaggaacacaaagacatctttttcatatttcgaatgtanaactgttttggaaactgttatttttagaaacagttaaaaacattttttcattagtttttcatgtaaaattgtgacaaccagcatgaaataactgtcatcacagaagcatggtatattcgattccaaaacatattctttgtaagttttaatatatttaygtattatttatacttagattgtaacccataatgtacagatattatttttccttcaactcttaagaatattcttaaataataaaattaaaattaatgaattataatttttgttgcttgggaaaaagaatagacacacacgtgacagtgcatcacttcaccccatcatttcatctcatcatttcatcatttcatctcatcattttatctcatttcatctcatcccatctcatctcatca

SEQ ID NO: 259657 - DNA, 546 bp, Homo sapiens
ttcctctcatcattacatctcatctcatctcatcatttcatcatttcatctcatcattgcatctcatcatttcatctcatttcgtctcatcattcatctcgtcatttcatctcatctcatcatttccatttcattatttcatttcatcatttaatttcatcatctcaatttcacctcatttcattatttcattttttcrtttcattatgtcatttcatttcatctcatttcatctcatcatttcatttcatctcatcttttcatctcatcatttcatcttatcatctcatcaactcttttcatcttatcatttcatcatttcatcttatcacttcatttcatctcgtatcttctcatctcatttcaatttcatttcattatttcatttcattatttcatgtcatctcatctcatcatttcatctcatcacatctcatcattttatcattttatttcatcatctcatcatttcatctcatctcatttcaattttatttatttatttcaatttcatttcatctcatcagttcatctcatcatttcatc

SEQ ID NO: 259658 - DNA, 546 bp, Homo sapiens
ttcctctcatcattacatctcatctcatctcatcatttcatcatttcatctcatcattgcatctcatcatttcatctcatttcgtctcatcattcatctcgtcatttcatctcatctcatcatttccatttcattatttcatttcatcatttaatttcatcatctcaatttcacctcatttcattatttcattttttcgtttcattatgtcatttcatttcatctcatttcatctcatcatttcatttcatctcatcttttcatctcatcatttcatcttatcatctcatcaactcttttcatcttatcatttcatcatttcatcttatcacttcatttcatctygtatcttctcatctcatttcaatttcatttcattatttcatttcattatttcatgtcatctcatctcatcatttcatctcatcacatctcatcattttatcattttatttcatcatctcatcatttcatctcatctcatttcaattttatttatttatttcaatttcatttcatctcatcagttcatctcatcatttcatc

SEQ ID NO: 259659 - DNA, 371 bp, Homo sapiens
gggagggtccagggcaagggcaaggccagggcagaaccagagccagagcaggccaaaggccgggccagggcagggcaaggycagggtagggcggggccagtgtagggtgagggtagggccagggtgagttcagggccagggcaggactaagatagcacagggccaaggcagggccagggcagggcaaaaggaggggccagggccaagcatggccagtgtcagacctggggattgtcagggccagggtcagggtcaaggctgggcagggacagggccagagcaagggcagggcatgggagaaagcagaaccagagaggatccagagcaaggccagggtcagggcagaaccaggaccaggataaggcaaagca

SEQ ID NO: 259660 - DNA, 609 bp, Homo sapiens
gcaggagcagggccaggttcatctaagaaccagggacaaagccaggcccagagctgggccaggacaggtacctggcagggctagggtctgagacagggccacagcaggaccagggccacaaccaggtctgtgctatggccaggtccaacacagtgcccaggtaaggctagggtgaaggccaaggtagggccagggcagggtcaaagccaggctagggccaaggcagggccagggccggcaaggcagggccaggaaagcatagggccagggcagggcagggccagggcagggcrgggccaggacagtgccaagacctgggcagggccagggccagggccatggccacggcctggggaagaccaggttcagggcaggagcaaaacaatggcaaggacagtgcaggttcttggcacagccagggtccaggacagtgtcagggcagggccaaggcagggtctgggccatggtaagaccaacaacagggctggggctaggccagtgacaggaccagagtcagggcaagggccagagcagtgcaaggccagggtagggccaggcatttcagggtcagggccaggggagaaccagggcaaggtctcaagcagggaa

SEQ ID NO: 259661 - DNA, 341 bp, Homo sapiens
agggccagggcagggcagggccaggacagtgccaagacctgggcagggccagggccagggccatggccacggcctggggaagaccaggttcrgggcaggagcaaaacaatggcaaggacagtgcaggttcttggcacagccagggtccaggacagtgtcagggcagggccaaggcagggtctgggccatggtaagaccaacaacagggctggggctaggccagtgacaggaccagagtcagggcaagggccagagcagtgcaaggccagggtagggccaggcatttcagggtcagggccaggggagaaccagggcaaggtctcaagcagggaagggccagg

SEQ ID NO: 259662 - DNA, 341 bp, Homo sapiens
agggccagggcagggcagggccaggacagtgccaagacctgggcagggccagggccagggccatggccacggcctggggaagaccaggttcagggcaggagcaaaacaatggcaaggacagtgcaggttcttggcacagccagggtccaggacagtgtcagggcagggccaaggcagggtctgggccatggtaagaccarcaacagggctggggctaggccagtgacaggaccagagtcagggcaagggccagagcagtgcaaggccagggtagggccaggcatttcagggtcagggccaggggagaaccagggcaaggtctcaagcagggaagggccagg

SEQ ID NO: 259663 - DNA, 590 bp, Homo sapiens
tgcatagagtggcgctgcctgtggaggcgatgggagagaagaaggagggcggtggtgggggtgatgyggcggccacggagggtggcacaggggctgcggccagccgggcgctgcagcagtgcgggcagctccagaagctcatcgtcatcttcattggcagcctgtgcgggctgtgcaccaagtgcgctgtgtccaacgacctcacccagcaggagatacagaccccggaggtaaggggttcggggacccgggctgggctccaggagcggcccggacacctccttcggggccccagttcactcctggccgagttgcatctttgagcccacgtcacccccttggaggcttcccctccctcctgcactcgctgatgcggcagccagaggacccaggaccagccctcaccttgggcaggatttgtggagcgggtgcgtggtgggaactgggatggaggctccagggtcccgtgggggtgggggtgggctgcgtgaggacatccccttaccccctgaatttccatctggtccagccctctcatcttgtaggtgaggaaaccgaaggcctgagggagaaatgacttgccaggaacc

SEQ ID NO: 259664 - DNA, 487 bp, Homo sapiens
agccatggtgtcgcaggctctaggtgtctcctcctcctcctggcacagagcagctgggcgggcaaagccagaaaagcctagggaaagatgtgaggggtggaagggttagagcctcaacttgtcatgccggccactgggtgcaggggccagtttcagcaaaggcactcacacccaccctmcaaagtccagcctctccttttggcccaagctgggaggaactggggtctggggtgggtgctggagacaccacagcatccagctccccactccacaggaacccctgggcccactggggctgcactcctcggggagcaggagaagcagaaaaattcagacccagccagccctccacacccaggtgccaattcctgttccggacgcctccacgcacagggccctgtcccccgtggtgtccccaggggtgcctggcagcctctgaggcacagacccacagtacacaggcccaggaaccacggtgggtgtgggg

SEQ ID NO: 259665 - DNA, 487 bp, Homo sapiens
agccatggtgtcgcaggctctaggtgtctcctcctcctcctggcacagagcagctgggcgggcaaagccagaaaagcctagggaaagatgtgaggggtggaagggttagagcctcaacttgtcatgccggccactgggtgcaggggccagtttcagcaaaggcactcacacccaccctccaaagtccagcctctccttttggcccaagctgggaggaactggggtctggggtgggtgctggagacaccacagcatccagctccccactccacaggaaccmctgggcccactggggctgcactcctcggggagcaggagaagcagaaaaattcagacccagccagccctccacacccaggtgccaattcctgttccggacgcctccacgcacagggccctgtcccccgtggtgtccccaggggtgcctggcagcctctgaggcacagacccacagtacacaggcccaggaaccacggtgggtgtgggg

SEQ ID NO: 259666 - DNA, 487 bp, Homo sapiens
agccatggtgtcgcaggctctaggtgtctcctcctcctcctggcacagagcagctgggcgggcaaagccagaaaagcctagggaaagatgtgaggggtggaagggttagagcctcaacttgtcatgccggccactgggtgcaggggccagtttcagcaaaggcactcacacccaccctccaaagtccagcctctccttttggcccaagctgggaggaactggggtctggggtgggtgctggagacaccacagcatccagctccccactccacaggaacccytgggcccactggggctgcactcctcggggagcaggagaagcagaaaaattcagacccagccagccctccacacccaggtgccaattcctgttccggacgcctccacgcacagggccctgtcccccgtggtgtccccaggggtgcctggcagcctctgaggcacagacccacagtacacaggcccaggaaccacggtgggtgtgggg

SEQ ID NO: 259667 - DNA, 265 bp, Homo sapiens
ggaaaattaacaaagtgtggttattaaagaagaactgagttgggagtcagacctggaggcccscacccgtggttaagacattataccaccttgagtctggcctgttgactgagggtgagccactccatcctcatgtgattgtggggtcttaacctcaaggggtttcctgcaggaagaagcaaatgggtttgctttcctagctctgtccagtactttagggaccctgaggactgaagagattcttggagagccatctggtgtatgt

SEQ ID NO: 259668 - DNA, 418 bp, Homo sapiens
aacccaacaggctctcaaataggaacaaggyagaacagacatgagctagaattataagccaactacagttaaattaaaactttaaatgaaccacagcctattaaccacaacctaccattagacttttatgaatttttaaaagccatacttttactagaaagaactggtaatagaggtttaattaaaaacacaagcagaggcaaccatcaatcttctgtagttgaaaacaaagacatttatttctgcggcaaactggaccatgagaaatggccatcagaatgatcaccgtgggtcttacaagtccctgagtcatggaagaaacctttaattatgctcagtacacatcacttatgagagattcaggttttggaagattttcaacaacagggggctgtctggctgatgctgactttggtgg

SEQ ID NO: 259669 - DNA, 418 bp, Homo sapiens
aacccaacaggctctcaaataggaacaaggcagaacagacatgagctagaattataagccaactacagttaaattaaaactttaaatgaaccacagcctattaaccacaacctaccattagacttttatgaatttttaaaagccatacttttactagaaagaactggtartagaggtttaattaaaaacacaagcagaggcaaccatcaatcttctgtagttgaaaacaaagacatttatttctgcggcaaactggaccatgagaaatggccatcagaatgatcaccgtgggtcttacaagtccctgagtcatggaagaaacctttaattatgctcagtacacatcacttatgagagattcaggttttggaagattttcaacaacagggggctgtctggctgatgctgactttggtgg

SEQ ID NO: 259670 - DNA, 277 bp, Homo sapiens
aatgacttgccaggaacccctgttaaggaaaattaacaaagtgtggttattaaagaagaactgagttgggagtcagacctggaggcccgcacccgtggttaagacattataccaccttgagtctggcctgttgactgagggtgagccactccatcctcatgtgattgtggggtcttaacctcaaggggtttcctgcaggaagaagcaaatgggtttgctttcctagctctgtccagtackttagggaccctgaggactgaagagattcttggagagc

SEQ ID NO: 259671 - DNA, 543 bp, Homo sapiens
tctggcctcacgaaagctttccacattgtcactgtatcactataaggctctgtcttcacgggatttggctcccctggaatgagcagccagttatctttgatcagcttgggctgccataacaaaggaccacagatcatcaacttcaataacaggaatttctcttctcagggtcctggggytagaaatccaagatcaaggtatgggcagggttggttccttttgaggcctctctctttggcttgtagatggtcaatttcctccagtgtctttacatggctgtctctctgtgtgtgtctgtgtccttctctcctcttgttataaagacaccagggccaggcgcagtgcctcacgcctgtaatcccaatactttgggaggccgaggcaggtggattgcctgaggtcaggagttcgagaccagcctggccaacatggtgaaacctcatctctactaaaaatacaaaaattagctgggcatggtggcaggtgcctgtaacccgagctacttgggagactgaggcaggagaattgcttgaacccaggaga

SEQ ID NO: 259672 - DNA, 543 bp, Homo sapiens
tctggcctcacgaaagctttccacattgtcactgtatcactataaggctctgtcttcacgggatttggctcccctggaatgagcagccagttatctttgatcagcttgggctgccataacaaaggaccacagatcatcaacttcaataacaggaatttctcttctcagggtcctggggctagaaatccaagatcaaggtatgggcagggttggttccttttgaggcctctctctttggcttgtagatggtcaatttcctccagtgtctttacatggctgtctctctgtgtgtgtctgtgtccttctctcctcttgttataaagacaccagggccaggcgcagtgcctcacgcctgtaatcccaatactttgggaggccgaggcaggtggattgcctgaggtcaggagttcgagaccagcctggccaacatggtgaaacctcatctctactaaaaatacaaaarttagctgggcatggtggcaggtgcctgtaacccgagctacttgggagactgaggcaggagaattgcttgaacccaggaga

SEQ ID NO: 259673 - DNA, 582 bp, Homo sapiens
gactgagggtgagccactccatcctcatgtgattgtggggtcttaacctcaaggggtttcctgcaggaagaagcaaatgggtttgctttcctagctctgtccagtactttagggaccctgaggactgaagagattcttggagagccatctggtgtatgtcatgggtgggtctttttggaaggtcagtctgcccagtgggctggctcagcccaaatgaactgtcttgaatctttggagttgtctgtgtacttttaagggcttctcagccttgcaccaaaagatccccctggaaattaggtgggaaaaaccttaacttttgtggggccttgtgtttgtcttaaaagttcatgcacatagccaggtgtggtggctcccacctgttatcctttcctggatcccttgagtcaaggagtttgagaccaacctggacaatatagtgaraccccatctctacaaaaaataaaatattagccaggggtggttgtgcgcatctgtagtcccagctactactgtggctgaggcgggaggagcacttgatcctgcactgagctctgatctcaccagtgtattccagcctgggcc

SEQ ID NO: 259674 - DNA, 558 bp, Homo sapiens
ataatttcttggctaggacaccaaaaatgcaagcaacaaaaattaaaataaataagatgaactacatgaaaatgaaaaatttttgcacatcacaggatgctaccaacgaagtggaaagacagcccacagaaccggagaaaacattagcaaattatatacttaataagtcattaatatccacaatatacagatttgtttacattaaatacctcatataatgaaatcgtacagtactgtcctttggtggttgagtttattttacttagcataatgtccttatggctcatccatactgtatcrtgtgtcagaatttccttcctttttaagccgaataatattttgttgtatgtctatacctcactgtgtttatccatctatctgttgatggatgctgggtcgcttccaccttttggatactgaaaataatgctgctatgagagaatttatagagaattcttatacattgacagcaatgggctgggcacagtggctcgcacctgtaatcccagcactttgggaggccgaggagggtgaataacttgaggtcagaagttggag

SEQ ID NO: 259675 - DNA, 558 bp, Homo sapiens
ataatttcttggctaggacaccaaaaatgcaagcaacaaaaattaaaataaataagatgaactacatgaaaatgaaaaatttttgcacatcacaggatgctaccaacgaagtggaaagacagcccacagaaccggagaaaacattagcaaattatatacttaataagtcattaatatccacaatatacagatttgtttacattaaatacctcatataatgaaatcgtacagtactgtcctttggtggttgagtttattttacttagcataatgtccttatggctcatccatactgtatcatgtgtcagaatttccttcctttttaagccgaataatattttgttgtatgtctatacctcmctgtgtttatccatctatctgttgatggatgctgggtcgcttccaccttttggatactgaaaataatgctgctatgagagaatttatagagaattcttatacattgacagcaatgggctgggcacagtggctcgcacctgtaatcccagcactttgggaggccgaggagggtgaataacttgaggtcagaagttggag

SEQ ID NO: 259676 - DNA, 558 bp, Homo sapiens
ataatttcttggctaggacaccaaaaatgcaagcaacaaaaattaaaataaataagatgaactacatgaaaatgaaaaatttttgcacatcacaggatgctaccaacgaagtggaaagacagcccacagaaccggagaaaacattagcaaattatatacttaataagtcattaatatccacaatatacagatttgtttacattaaatacctcatataatgaaatcgtacagtactgtcctttggtggttgagtttattttacttagcataatgtccttatggctcatccatactgtatcatgtgtcagaatttccttcctttttaagccgaataatattttgttgtatgtctatacctcactgtgtttatccatctatctgttgatggatgctgggtcgcttccaccttttggatactgaaaataatgctgctatgagagaatttatagagaattcttatacattgacagcaatgggctgggcacagtggytcgcacctgtaatcccagcactttgggaggccgaggagggtgaataacttgaggtcagaagttggag

SEQ ID NO: 259677 - DNA, 512 bp, Homo sapiens
aagcaacccagcatccatcaacagatggatggataaacacaatgaggtatagacatacaacagaatattattcagcttaaaaaggaaggaaattttgacacacgatacrgtatggatgagccatgaggacattatgctaagtaaaataaactcaaccaccaaaggacaatactgtaggatttcattatatgaggtatcaaacgtaagcaaattcatagacagaaatagaatggtggttgccaggtgctagagggagggaagaatgaagagttagtgtttaatgaggacagagtttcagttttgcgagatgaaaaagttctggaggttggttgcacaacagtgcatatgtgcttaacaccactgagctgtgcacttgaaaactgctaagttggtaaattttatgtatataaatgcatgttttaccataattaaaaatatattaataaaataaattctagcccaggcatggtggctcatgcctgtaattccagcactttgggaggccaaggcgg

SEQ ID NO: 259678 - DNA, 604 bp, Homo sapiens
ctcttgactggtctgcttttgctttgactgacccacttccacttcttggtagccattgctttgattgtgctttgtcttcaggatagtactacraaatccatgtttcataacttgttgcaacttttcgaacaaatgcttcaggatcttgatcccactgtttaaatttccattgaaagctctgctgttgtttgcaactgatctgggcacaacagttttggcacccatcaagtgcaaagttggctttcagtcagaattgtgtaacctgaaccaatttgacgtctatgacactgtctattgtttctgctattgttaactgctattaatcatcagtcctctttgattagggcataaacaagatgaattttttcctcaaagattcgtgtgtagggtctcttactgagggcttcctcttcaacatcatctcataccttcttaaaacaagttattcatttgtaagctgttgatttctttggggcattgttcccataaacttttcatgaagcattagtgattttaccatttttcacccaagcttcataataaattgatgtttgttcttgcttcgattttagcagaattaatgtggtctcttttcaaactgatg

SEQ ID NO: 259679 - DNA, 604 bp, Homo sapiens
ctcttgactggtctgcttttgctttgactgacccacttccacttcttggtagccattgctttgattgtgctttgtcttcaggatagtactacgaaatccatgtttcataacttgttgcaacttttcgaacaaatgcttcaggatcttgatcccactgtttaaatttccattgaaagctctgctgttgtttgcaactgatctgggcacaacagttttggcacccatcaagtgcaaagttggctttcagtcagaattgtgtaacctgaaccaatttgacgtctatgacactgtctattgtttctgctattgttaactgctattaatcatcagtcctctttgattagggcataaacaagatgaattttttcctcaaagattcgtgtgtagggtctctyactgagggcttcctcttcaacatcatctcataccttcttaaaacaagttattcatttgtaagctgttgatttctttggggcattgttcccataaacttttcatgaagcattagtgattttaccatttttcacccaagcttcataataaattgatgtttgttcttgcttcgattttagcagaattaatgtggtctcttttcaaactgatg

SEQ ID NO: 259680 - DNA, 588 bp, Homo sapiens
cttcataccatcctaattggccagttattagctcttgggaaactgggttttaactaattgttttaaacacatgccagccttagatttctatccakgttgtaaacatactcttcaagaaaaaaaaaaaaagatataaaatgtgtgaaggctgacactggggcactctccacccaagctccctccagggagtgtgatccaaatgtcctcccttcccgggctgctgcctcggttgtgccggaccctcacatcactgcctgattgattcatcactgcctgattcggctgcctgattgtggcctttgcctggccttgctccctattttaaatgacactctcgccacaccttcacatacccatgacaacaaactgggtttacttctgtctactcatcatgcctgactttcccctttgcaaacatcatgacgggatgtgatattcctgatcctagattctgctttccctttctttccctctccattaccatttattgagtggacacctactgtgtcaggcactgtaattggtgttttacaaacattattactattacccacaaccctacaagacagatattgttcccacttcaca

SEQ ID NO: 259681 - DNA, 612 bp, Homo sapiens
taattgttttaaacacatgccagccttagatttctatccatgttgtaaacatactcttcaagaaaaaaaaaaaaagatataaaatgtgtgaaggctgacactggggyactctccacccaagctccctccagggagtgtgatccaaatgtcctcccttcccgggctgctgcctcggttgtgccggaccctcacatcactgcctgattgattcatcactgcctgattcggctgcctgattgtggcctttgcctggccttgctccctattttaaatgacactctcgccacaccttcacatacccatgacaacaaactgggtttacttctgtctactcatcatgcctgactttcccctttgcaaacatcatgacgggatgtgatattcctgatcctagattctgctttccctttctttccctctccattaccatttattgagtggacacctactgtgtcaggcactgtaattggtgttttacaaacattattactattacccacaaccctacaagacagatattgttcccacttcacagctgaaaaaagattacaggctgactaccccttctctgaaatgcttgggaccagaagtgttttggattttggaatactt

SEQ ID NO: 259682 - DNA, 588 bp, Homo sapiens
cttcataccatcctaattggccagttattagctcttgggaaactgggttttaactaattgttttaaacacatgccagccttagatttctatccatgttgtaaacatactcttcaagaaaaaaaaaaaaagatataaaatgtgtgaaggctgacactggggcactctccacccaagctccctccagggagtgtgatccaaatgycctcccttcccgggctgctgcctcggttgtgccggaccctcacatcactgcctgattgattcatcactgcctgattcggctgcctgattgtggcctttgcctggccttgctccctattttaaatgacactctcgccacaccttcacatacccatgacaacaaactgggtttacttctgtctactcatcatgcctgactttcccctttgcaaacatcatgacgggatgtgatattcctgatcctagattctgctttccctttctttccctctccattaccatttattgagtggacacctactgtgtcaggcactgtaattggtgttttacaaacattattactattacccacaaccctacaagacagatattgttcccacttcaca

SEQ ID NO: 259683 - DNA, 607 bp, Homo sapiens
aacaaactgggtttacttctgtctactcatcatgcctgactttcccctttgcaaacatcatgacgggatgtgatattcctgatcctagattctgctttccctttctttccytctccattaccatttattgagtggacacctactgtgtcaggcactgtaattggtgttttacaaacattattactattacccacaaccctacaagacagatattgttcccacttcacagctgaaaaaagattacaggctgactaccccttctctgaaatgcttgggaccagaagtgttttggattttggaatacttgcattgtattccaaaacccgaaatgctccaatgagcatttcctttgagtgccatatcagcaatcaaaaagtttcagattttgaaattagggatactaaacctgtactactgaaggtcttgaagctagtaaatggcagggtatgatctgaaccagacacaagtggtgattaagtcaaatcattactagaagtcaccttacagagaaaacaatcaacatgaggtacattctgtcacaatgcttatgctgtttagatttaatgtagatatatttgcatttgaaagtgcaaatactgtctttata

SEQ ID NO: 259684 - DNA, 607 bp, Homo sapiens
aacaaactgggtttacttctgtctactcatcatgcctgactttcccctttgcaaacatcatgacgggatgtgatattcctgatcctagattctgctttccctttctttccctctccattaccatttattgagtggacacctactgtgtcaggcactgtaattggtgttttacaaacattattactattacccacaaccctacaagacagatattgttcccacttcacagctgaaaaaagattacaggytgactaccccttctctgaaatgcttgggaccagaagtgttttggattttggaatacttgcattgtattccaaaacccgaaatgctccaatgagcatttcctttgagtgccatatcagcaatcaaaaagtttcagattttgaaattagggatactaaacctgtactactgaaggtcttgaagctagtaaatggcagggtatgatctgaaccagacacaagtggtgattaagtcaaatcattactagaagtcaccttacagagaaaacaatcaacatgaggtacattctgtcacaatgcttatgctgtttagatttaatgtagatatatttgcatttgaaagtgcaaatactgtctttata

SEQ ID NO: 259685 - DNA, 607 bp, Homo sapiens
aacaaactgggtttacttctgtctactcatcatgcctgactttcccctttgcaaacatcatgacgggatgtgatattcctgatcctagattctgctttccctttctttccctctccattaccatttattgagtggacacctactgtgtcaggcactgtaattggtgttttacaaacattattactattacccacaaccctacaagacagatattgttcccacttcacagctgaaaaaagattacaggctgactaccccttctctgaaatgcttgggaccagaagtgttttggattttggaatayttgcattgtattccaaaacccgaaatgctccaatgagcatttcctttgagtgccatatcagcaatcaaaaagtttcagattttgaaattagggatactaaacctgtactactgaaggtcttgaagctagtaaatggcagggtatgatctgaaccagacacaagtggtgattaagtcaaatcattactagaagtcaccttacagagaaaacaatcaacatgaggtacattctgtcacaatgcttatgctgtttagatttaatgtagatatatttgcatttgaaagtgcaaatactgtctttata

SEQ ID NO: 259686 - DNA, 580 bp, Homo sapiens
gcaatcaaaaagtttcagattttgaaattagggatactaaacctgtactactgaaggtcttgaagctagtaaatggcagggtatgatctgaaccagacacaagtggtgattaagtcaaatcattactagaagtcaccttacagagaaaacaatcaacatgaggtacattctgtcacaatgcttatgctgtttagatttaatgtagatatatttgcatttgaaagtgcaaatactgtctttataaagtctttgaagaacagagttagcccttgttatttctatggttaattcaaagtgctaatagctaaaaaccagaagtcattccaaagtttgcatgaacaaaactcacaagaaagttataaaaatattttatttaaatggtacagaaaaaaatatgtatacttaaaaatgattaaaacttcacattaggaaatgctaaaaacccagtaatttacacaatgataaaatctaaagtgaygggaaaacataaaatattttcatttggtcctgtcacctaacaaaacgatcataaatatgagattatagtaattactaaagctggttaaaggcacatgacaac

SEQ ID NO: 259687 - DNA, 548 bp, Homo sapiens
gtgagggctcccagtggttccaagacacagcaaggtgcctgaaagaggctggagacattggcgtgggcatggaggtgctagcaactattttcagactgctaacaatgagactrtgtccatttcttctttgtacagttaccattgaccttcctttaaaatcccacagggagaacatgctgtttttagcagaaatgtcagttttcattaactccttgaaaatttagtgtattaactttcatttccatgagcttcaatttccacacctgtcaactgctgtataaagcaggtttcctgcaagttctgatgtaagtgacctgacaggaggcactatctttgtccttctcaacatgcctctaagcatctggagtgagtattctcaatatgcacttatttaataacagagttatccgacactcagaaaacagcctccactgtgtaaggcagcagatctcaggatggggtgatctgtagggaggcagaaattctataaataacaccaaacaaaagctgattgtgtcatccaacacatttttatgaggaagtcagaa

SEQ ID NO: 259688 - DNA, 548 bp, Homo sapiens
gtgagggctcccagtggttccaagacacagcaaggtgcctgaaagaggctggagacattggcgtgggcatggaggtgctagcaactattttcagactgctaacaatgagactgtgtccatttcttctttgtacagttaccattgaccttcctttaaaatcccacagggagaacatgctgtttttagcagaaatgtcagttttcattaactccttgaaaatttagtgtattaactttcatttccatgagcttcaatttccacacctgtcaactgctgtataaagcaggtttcctgcaagttctgatgtaagtgacctgacaggaggcactatctttgtccttctcaacatgcctctaagcatctggagtgagtattctcaatatgcacttatttaataacagagttatccgacactcagaaaacagcctccactgtgtaaggcarcagatctcaggatggggtgatctgtagggaggcagaaattctataaataacaccaaacaaaagctgattgtgtcatccaacacatttttatgaggaagtcagaa

SEQ ID NO: 259689 - DNA, 541 bp, Homo sapiens
cttaccttcggaaatcatccaaggagtgtgataaacattataacccccataaactgggtaaacaacaacaatggagtgaaaaacgaccacacatgccataaagcaatgttgaagctgaaaagaacaagacataaacagttgacaactcaaatatgcatcaatatattttattctagaatccagatttaaagtattcaatgtagaaaagttcatccagtcagcaaccttctccatgtatcatatttctcagctatgtgacttagccaatgctggaaagaaaactctagatatacttacacaagtatcacaatttcttcaagaaggccctggaactggaaccactaaaggtctcctaataggagttgacatggcttaatagaaactgmagtctcttagtttctgcacttgaacaagaatttaaatggctacagcccatttttatgacatcacacactaaactatggtaaaaaagaccaaagtattttctcttaaaaacagaatgaaaacagttatcacttataagctgctattatatatttca

SEQ ID NO: 259690 - DNA, 541 bp, Homo sapiens
cttaccttcggaaatcatccaaggagtgtgataaacattataacccccataaactgggtaaacaacaacaatggagtgaaaaacgaccacacatgccataaagcaatgttgaagctgaaaagaacaagacataaacagttgacaactcaaatatgcatcaatatattttattctagaatccagatttaaagtattcaatgtagaaaagttcatccagtcagcaaccttctccatgtatcatatttctcagctatgtgacttagccaatgctggaaagaaaactctagatatacttacacaagtatcacaatttcttcaagaaggccctggaactggaaccactaaaggtctcctaataggagttgacatggcttaatagaaactgcagtctcttagtttctgcacttgaacaagaatttaaatggctacagcccatttttatgacatcacacactaaactatggtaaaaaagaccaaagtattttctcttaaaaacagaatgaaaacrgttatcacttataagctgctattatatatttca

SEQ ID NO: 259691 - DNA, 605 bp, Homo sapiens
gctgaaaagaacaagacataaacagttgacaactcaaatatgcatcaatatattttattctagaatccagatttaaagtattcaatgtagaaaagttcatccagtcagcaaccttctccatgtatcatatttctcagctatgtgacttagccaatgctggaaagaaaactctagatatacttacacaagtatcacaatttcttcaagaaggccctggaactggaaccactaaaggtctcctaataggagttgacatggcttaatagaaactgcagtctcttagtttctgcacttgaacaagaatttaaatggctacagcccatttttatgacatcacacactaaactatggtaaaaaagaccaaagtattttctcttaaaaacagaatgaaaacagttatcacttataagctgctattatatatttcattgagaagaacactattcctgtcatcaaagtaaaattaaaacactttctaagtgtaaagrttgttaatgactgaaatttctaagaacagaataggaaaaactatattcaaataagttcagatggttattggttttaacatacaatattttgataagtatgagtattaaataactata

SEQ ID NO: 259692 - DNA, 442 bp, Homo sapiens
aagaaaggaggagagcagagcagcaataggctatgccccggagccctccccrctgctggagacaccaggtgggtgaggggtctcttgggcccttccagcctgcagagctgctgagagtcaggcctggctgccaacaaagcagctgaagtcttgagaaaacttcctgattgcattagcgaggttgcaacaccaggacataatcaaatctccctggaggacgtggcttcaggaagggctgctacaagccagtggcagaacaagggcaaccagggtcagacacggtggaaggagggaagtcccagagccgagcatgggtggacatcagaggggtgtgggctgcaccatctgggtgcaggggccagcaggcagtgcgggtccacccagcccagggccagcctttcccagcagtcgcgtgcagaaacctggcacacgtcatggggca

SEQ ID NO: 259693 - DNA, 442 bp, Homo sapiens
aagaaaggaggagagcagagcagcaataggctatgccccggagccctccccactgctggagacaccaggtgggtgaggggtctcttgggcccttccagcctgcagagctgctgagagtcaggcctggctgccarcaaagcagctgaagtcttgagaaaacttcctgattgcattagcgaggttgcaacaccaggacataatcaaatctccctggaggacgtggcttcaggaagggctgctacaagccagtggcagaacaagggcaaccagggtcagacacggtggaaggagggaagtcccagagccgagcatgggtggacatcagaggggtgtgggctgcaccatctgggtgcaggggccagcaggcagtgcgggtccacccagcccagggccagcctttcccagcagtcgcgtgcagaaacctggcacacgtcatggggca

SEQ ID NO: 259694 - DNA, 442 bp, Homo sapiens
aagaaaggaggagagcagagcagcaataggctatgccccggagccctccccactgctggagacaccaggtgggtgaggggtctcttgggcccttccagcctgcagagctgctgagagtcaggcctggctgccaacaaagcagctgaagtcttgagaaaacttcctgattgcattagcgaggtygcaacaccaggacataatcaaatctccctggaggacgtggcttcaggaagggctgctacaagccagtggcagaacaagggcaaccagggtcagacacggtggaaggagggaagtcccagagccgagcatgggtggacatcagaggggtgtgggctgcaccatctgggtgcaggggccagcaggcagtgcgggtccacccagcccagggccagcctttcccagcagtcgcgtgcagaaacctggcacacgtcatggggca

SEQ ID NO: 259695 - DNA, 576 bp, Homo sapiens
aagccccttggcttcttgagctcccatgtgcagagtgaggggcggatgcaggggcagggtgtgactttgatgaacattccctccaggtggctctgccctcggccccctctcaggattgtttgtagctctttgcctcttcttggccatttggagttttcaggggccctactaggtcctcttgacttctcactttgctctccttggtggtctaattcatggccaagggcccacctgccgtccagacactgcttttcaacctgacctctcagctccaggctggttatttccaacagcctacttgggtgtctcaaaggcactttacactcaatgtgtccaacactgaactcaaggctcccggcatcgccattcagttatccctccacatttccaaccctatggattgcactagcgtctgtccattatgcaggccaggctgcaaaggctgtctcaaygctgcccttatgctgtcggggcttagaacatgacaccccaaagcgtggtgcctcagcctgagtattttgaactgaaggacattggaaggaactcagaagcaaggtctttccaacctcctcagac

SEQ ID NO: 259696 - DNA, 586 bp, Homo sapiens
gaggactaaatcactgggaagtcttatgataaagaagccattggcttaaatcagcaaagcaagcygtcccttggtttaaggtgtttttcctggccatcctgtcttgactagaactttacctacaccttcctttttggtttaggcaaattatagtatctaaaactaaagtctcagctctgtgtctttgacatataaatgttctaccatgtcttctctggaatctgataactatctatctctttaaaatgcaagtctagggagatgactcatcagaaaaagaagaaaaaagaggtatttggaaattgtgcaaattaaagcagcccctgatgtcaaagtctacacattcctgagtgagtcagttctggccagttctagctggatcaagagagctcttctgggcaggcctgaagagcacctggatggcagacacctgaggagccaggtgcctgaaacttcctccaccttcttgaggagggccaaagcccaggtgctggctggacaaccccttctggctgcctaagcagatggcagaagaaggaaacaaggtcagaggcagagtattgaaccctgcctcccaggtgggtgg

SEQ ID NO: 259697 - DNA, 586 bp, Homo sapiens
gaggactaaatcactgggaagtcttatgataaagaagccattggcttaaatcagcaaagcaagccgtcccttggtttaaggtgtttttcctggccatcctgtcttgactagaactttacctacaccttcctttttggtttaggcaaattatmgtatctaaaactaaagtctcagctctgtgtctttgacatataaatgttctaccatgtcttctctggaatctgataactatctatctctttaaaatgcaagtctagggagatgactcatcagaaaaagaagaaaaaagaggtatttggaaattgtgcaaattaaagcagcccctgatgtcaaagtctacacattcctgagtgagtcagttctggccagttctagctggatcaagagagctcttctgggcaggcctgaagagcacctggatggcagacacctgaggagccaggtgcctgaaacttcctccaccttcttgaggagggccaaagcccaggtgctggctggacaaccccttctggctgcctaagcagatggcagaagaaggaaacaaggtcagaggcagagtattgaaccctgcctcccaggtgggtgg

SEQ ID NO: 259698 - DNA, 586 bp, Homo sapiens
gaggactaaatcactgggaagtcttatgataaagaagccattggcttaaatcagcaaagcaagccgtcccttggtttaaggtgtttttcctggccatcctgtcttgactagaactttacctacaccttcctttttggtttaggcaaattatagtatctaaaactaaagtctcagctctgtgtctttgacatataaatgttctaccatgtcttctctggaatctgataactatctatctctttaaaatgcaagtctagggagatgactcatcagaaaaagaagaaaaaagaggtatttggaaattgtgcaaattaaagcagcccctgatgtcaaagtctacacattcctgagtgagtcagttctggccagttctagctggatcaagagagctcttctgggcaggcctgaagagcacctggatggcagacacctgaggagycaggtgcctgaaacttcctccaccttcttgaggagggccaaagcccaggtgctggctggacaaccccttctggctgcctaagcagatggcagaagaaggaaacaaggtcagaggcagagtattgaaccctgcctcccaggtgggtgg

SEQ ID NO: 259699 - DNA, 586 bp, Homo sapiens
gaggactaaatcactgggaagtcttatgataaagaagccattggcttaaatcagcaaagcaagccgtcccttggtttaaggtgtttttcctggccatcctgtcttgactagaactttacctacaccttcctttttggtttaggcaaattatagtatctaaaactaaagtctcagctctgtgtctttgacatataaatgttctaccatgtcttctctggaatctgataactatctatctctttaaaatgcaagtctagggagatgactcatcagaaaaagaagaaaaaagaggtatttggaaattgtgcaaattaaagcagcccctgatgtcaaagtctacacattcctgagtgagtcagttctggccagttctagctggatcaagagagctcttctgggcaggcctgaagagcacctggatggcagacacctgaggagccaggtgcctgaaacttcctccaccttcttgaggagggccaaagcccaggtgctggctggacaaccccttctggctrcctaagcagatggcagaagaaggaaacaaggtcagaggcagagtattgaaccctgcctcccaggtgggtgg

SEQ ID NO: 259700 - DNA, 337 bp, Homo sapiens
gtaattcaaacccttcccttggagacaaaacatgacaaggaattctgaggtcaggggacaagaatcacaaagtgggagactgaggaggcagtgtccttcctgcccttggtctactggctaagaaccttcctcagcctgacctttgcacattgcactttcagctctgtttgcaattttcctcctttagtgctgagggaatcccagtgttcsatcctgaaatctgtacgttcctaatgggtggttaaaaaaaacctcagcgagagaagcagaaaatgtttcctcttcctgaaaaactgtagaaaggcaggcaccattctgggtgaggacatggtccttg

SEQ ID NO: 259701 - DNA, 337 bp, Homo sapiens
gtaattcaaacccttcccttggagacaaaacatgacaaggaattctgaggtcaggggacaagaatcacaaagtgggagactgaggaggcagtgtccttcctgcccttggtctactggctaagaaccttcctcagcctgacctttgcacattgcactttcagctctgtttgcaattttcctcctttagtgctgagggaatcccagtgttcgatcctgaaatctrtacgttcctaatgggtggttaaaaaaaacctcagcgagagaagcagaaaatgtttcctcttcctgaaaaactgtagaaaggcaggcaccattctgggtgaggacatggtccttg

SEQ ID NO: 259702 - DNA, 337 bp, Homo sapiens
gtaattcaaacccttcccttggagacaaaacatgacaaggaattctgaggtcaggggacaagaatcacaaagtgggagactgaggaggcagtgtccttcctgcccttggtctactggctaagaaccttcctcagcctgacctttgcacattgcactttcagctctgtttgcaattttcctcctttagtgctgagggaatcccagtgttcgatcctgaaatctgtasgttcctaatgggtggttaaaaaaaacctcagcgagagaagcagaaaatgtttcctcttcctgaaaaactgtagaaaggcaggcaccattctgggtgaggacatggtccttg

SEQ ID NO: 259703 - DNA, 548 bp, Homo sapiens
  misc_feature (1)...(548): n = A,T,C or G
ccccaccacagccctgcactgtgtgctccaggcatgtgctgagtgcctggtcaatcaccagtgccctattgatcccagtctccagagagagcatttagtgtcactccacagagggggaaactcggcccagagaagtaaggtgactctcyccagtcacagagctggtcagcagtaggatgggaagctagtcccttgctgtctgactccctgagcccacccatatcccaaggcagccaacctctgcccgccctggttcaggccccgactggccccagtggtgggtgatgtctatcttcctggcctttgtgctcccagccaactggantggagcctccagctggcatgacatgttgtagctacggacagaagagtggctgtgaggctgccaggaatctcaccagtgccccntcccagggcctgtccagagtgaggtctggtaccccnagcattgccagaccacaggatctgatgttgccaagagggccatgnccacaggctttctgaggctggcccccagggagagttcaatcctactatcccaattcctg

SEQ ID NO: 259704 - DNA, 548 bp, Homo sapiens
  misc_feature (1)...(548): n = A,T,C or G
ccccaccacagccctgcactgtgtgctccaggcatgtgctgagtgcctggtcaatcaccagtgccctattgatcccagtctccagagagagcatttagtgtcactccacagagggggaaactcggcccagagaagtaaggtgactctccccagtcacagagctggtcagcagtaggatgggargctagtcccttgctgtctgactccctgagcccacccatatcccaaggcagccaacctctgcccgccctggttcaggccccgactggccccagtggtgggtgatgtctatcttcctggcctttgtgctcccagccaactggantggagcctccagctggcatgacatgttgtagctacggacagaagagtggctgtgaggctgccaggaatctcaccagtgccccntcccagggcctgtccagagtgaggtctggtaccccnagcattgccagaccacaggatctgatgttgccaagagggccatgnccacaggctttctgaggctggcccccagggagagttcaatcctactatcccaattcctg

SEQ ID NO: 259705 - DNA, 548 bp, Homo sapiens
  misc_feature (1)...(548): n = A,T,C or G
ccccaccacagccctgcactgtgtgctccaggcatgtgctgagtgcctggtcaatcaccagtgccctattgatcccagtctccagagagagcatttagtgtcactccacagagggggaaactcggcccagagaagtaaggtgactctccccagtcacagagctggtcagcagtaggatgggaagctagtcccttgctgtctgactccctgagcccacccatatcccaaggcagccaacctctgcccgccctggttcaggccccgactggccccwgtggtgggtgatgtctatcttcctggcctttgtgctcccagccaactggantggagcctccagctggcatgacatgttgtagctacggacagaagagtggctgtgaggctgccaggaatctcaccagtgccccntcccagggcctgtccagagtgaggtctggtaccccnagcattgccagaccacaggatctgatgttgccaagagggccatgnccacaggctttctgaggctggcccccagggagagttcaatcctactatcccaattcctg

SEQ ID NO: 259706 - DNA, 502 bp, Homo sapiens
  misc_feature (1)...(502): n = A,T,C or G
ggcagccaacctctgcccgccctggttcaggccccgactggccccagtggtgggtgatgtctatcttcctggcctttgtgctcccagccaactggantggagcctccagctggcatgacatgttgtagctayggacagaagagtggctgtgaggctgccaggaatctcaccagtgccccntcccagggcctgtccagagtgaggtctggtaccccnagcattgccagaccacaggatctgatgttgccaagagggccatgnccacaggctttctgaggctggcccccagggagagttcaatcctactatcccaattcctgtcctggccttacctctcagtctcaccgagccgcttcatggtcccaaaccaggacccaaagtgctgcttgggctcaaggttgtaattatttgcagtcaactggagcagtggacctccttgcttactttgaattcctgggtccagagggaaaaactgggtggtgacagggactggacagggatg

SEQ ID NO: 259707 - DNA, 548 bp, Homo sapiens
  misc_feature (1)...(548): n = A,T,C or G
ccccaccacagccctgcactgtgtgctccaggcatgtgctgagtgcctggtcaatcaccagtgccctattgatcccagtctccagagagagcatttagtgtcactccacagagggggaaactcggcccagagaagtaaggtgactctccccagtcacagagctggtcagcagtaggatgggaagctagtcccttgctgtctgactccctgagcccacccatatcccaaggcagccaacctctgcccgccctggttcaggccccgactggccccagtggtgggtgatgtctatcttcctggcctttgtgctcccagccaactggantggagcctccagctggcatgacatgttgtagctacggacagaagagtggctrtgaggctgccaggaatctcaccagtgccccntcccagggcctgtccagagtgaggtctggtaccccnagcattgccagaccacaggatctgatgttgccaagagggccatgnccacaggctttctgaggctggcccccagggagagttcaatcctactatcccaattcctg

SEQ ID NO: 259708 - DNA, 508 bp, Homo sapiens
ctctgatcagtgatgaccttggtatggtggtgatggtcagtcttggcatcaaatgagccagtttatatcatcagctattcaataaaatactaatctaggtgtcaccgtgaaagtattttgtgacattgttatgtacgtgttgttacaaatgtgcatgatgcatttactacagcatagaattttgcctgggtgccagcstgaagtctgtccgacagatcatagccatgttaatcccacagtcacgggggccaattgattaaattattttatctcccttgaaaactaaaaataaaatcctaagccccccacccgacttaacagaccccctgttggccaacggaacctcaaataaatcttaaaattcagttcttggccatgacaggacaggaggtcagacatacctccctgtacctccctccctcttatggtttagacccaacaactgaacagcattaatgttaaaatagagatcatgagactgacagaacagactctttgtggcaataag

SEQ ID NO: 259709 - DNA, 508 bp, Homo sapiens
ctctgatcagtgatgaccttggtatggtggtgatggtcagtcttggcatcaaatgagccagtttatatcatcagctattcaataaaatactaatctaggtgtcaccgtgaaagtattttgtgacattgttatgtacgtgttgttacaaatgtgcatgatgcatttactacagcatagaattttgcctgggtgccagcgtgaagtctgtccgacagatcatagccatgttartcccacagtcacgggggccaattgattaaattattttatctcccttgaaaactaaaaataaaatcctaagccccccacccgacttaacagaccccctgttggccaacggaacctcaaataaatcttaaaattcagttcttggccatgacaggacaggaggtcagacatacctccctgtacctccctccctcttatggtttagacccaacaactgaacagcattaatgttaaaatagagatcatgagactgacagaacagactctttgtggcaataag

SEQ ID NO: 259710 - DNA, 508 bp, Homo sapiens
ctctgatcagtgatgaccttggtatggtggtgatggtcagtcttggcatcaaatgagccagtttatatcatcagctattcaataaaatactaatctaggtgtcaccgtgaaagtattttgtgacattgttatgtacgtgttgttacaaatgtgcatgatgcatttactacagcatagaattttgcctgggtgccagcgtgaagtctgtccgacagatcatagccatgttaatcccacagtcacrggggccaattgattaaattattttatctcccttgaaaactaaaaataaaatcctaagccccccacccgacttaacagaccccctgttggccaacggaacctcaaataaatcttaaaattcagttcttggccatgacaggacaggaggtcagacatacctccctgtacctccctccctcttatggtttagacccaacaactgaacagcattaatgttaaaatagagatcatgagactgacagaacagactctttgtggcaataag

SEQ ID NO: 259711 - DNA, 508 bp, Homo sapiens
ctctgatcagtgatgaccttggtatggtggtgatggtcagtcttggcatcaaatgagccagtttatatcatcagctattcaataaaatactaatctaggtgtcaccgtgaaagtattttgtgacattgttatgtacgtgttgttacaaatgtgcatgatgcatttactacagcatagaattttgcctgggtgccagcgtgaagtctgtccgacagatcatagccatgttaatcccacagtcacgggggccaattgattaaattattttatctcccttgaaaactaaaaataaaatcctaagccccccacccgacttaacagaccccctgttggccaacggaacctcaaataaatcttaaaattcagttcttggccatgacaggacaggaggtcagacatacctccctgtacctccctccctcttatggtttagacccmacaactgaacagcattaatgttaaaatagagatcatgagactgacagaacagactctttgtggcaataag

SEQ ID NO: 259712 - DNA, 541 bp, Homo sapiens
ggactcgttctggccagttttggaggcagtgcctttacagaggctgagtaccttcatgtccctgcttcactttttgatgtgtagggctaattataatacatttaaatgtcaagtctccaccccagaatgaacatgcatgtttattgaatgtgcatgcattaggacctcttttatgagtattctcataaaatgatatagctcctctgatatcctattgagtatgtatatgtagccaactcatttggctcaaattcctgtcctctccttccctccctggaaatgcctgcctctggccttggctgtaggccacacttcccagcctgtcataatggccaccttgcagactgcaaacctatataagaaataaagctctcytttctaaatttataaaattgtgtgatttttcagttgatgctctctttctacacacacacacacacgcaatttatacagaaggaaatctggagaatatatgtgggaatggatattaagtgtgtggcaccatggtggaagtaacataaagttggattaggctaaattt

SEQ ID NO: 259713 - DNA, 514 bp, Homo sapiens
aataaaagactaactcaaattaatgaaacacagatctaaaaccctcaatcaattcccagacttgagccagttcacaggcccacaaccccttaagtgaaggggaggctgggtgatcttggggaagtacgctgctacattgccaaaaatttacattgttaatctttttcccagtcttccccaaagggacctacagccttctgccaggatgactgtgacttaaagaaaagaaaattytcagatatttggggaattactggacactggctctcatttgacactattatcactatgttgcctaggatggattcatgctcctgggttcaagcagtcctcctacctcagcctcccaaagtgctgggattacagacatgagccactgtggccagcagagctttgaaactagaacatggaggtccagtggtaaagatttgacaagtctgggaagagattgggccaaggcaatgttgatgattcttttttttttttttttttttttttttttacaacagagtct

SEQ ID NO: 259714 - DNA, 514 bp, Homo sapiens
aataaaagactaactcaaattaatgaaacacagatctaaaaccctcaatcaattcccagacttgagccagttcacaggcccacaaccccttaagtgaaggggaggctgggtgatcttggggaagtacgctgctacattgccaaaaatttacattgttaatctttttcccagtcttccccaaagggacctacagccttctgccaggatgactgtgacttaaagaaaagaaaattctcagatatttggggaattactggacactggctytcatttgacactattatcactatgttgcctaggatggattcatgctcctgggttcaagcagtcctcctacctcagcctcccaaagtgctgggattacagacatgagccactgtggccagcagagctttgaaactagaacatggaggtccagtggtaaagatttgacaagtctgggaagagattgggccaaggcaatgttgatgattcttttttttttttttttttttttttttttacaacagagtct

SEQ ID NO: 259715 - DNA, 462 bp, Homo sapiens
gctgtgcccctgacatagtccctggcatacagcaggtgcctggcaaatgtctgttagatggagaagagggtctccctgcagccaaactcttctgggccttccaccttcagagcccctcctcactgcctagcaaactgaaggaacctgggtgatccaaggctagggtggatcaggtttgcttggcagacacacagccattctgactttagamgggacttactttcccaactttgtgttcttagggtgatatcaaaagctgcagaccccgtatgcaccatctgaaattcaggggaggaagctcaaaagcctctgagctgctggggcaacagggagcaggcttgataacagaggctagtagcacagagctgacttcacccagagtgatgggcaggcacctctgtggactggggcactcccctccagccaccagtcaccatcactgcagagactcatgcggtggca

SEQ ID NO: 259716 - DNA, 596 bp, Homo sapiens
gtgctagcaagcatgcaggagacaggtgctctccgatatcagtgcggggaaagtaaacgggcaccaccttctggaagagaagctggctgtcatatggagggccctctcatcacaggaaggcagatgctgcaagtaaatgacgaaacaggtcaccaaagccctgaaggcgatgcagtctctgacccataattccattctttccattctacccttctactcaaagggacaaataaaaaaatgtaatcaaagagtcaggtaaggccaggagtggtgactcagccctgtaatcccagcactttgggaggccaaggcaggtggatcacttgaggtcgggagttcgagaccagcctggccaacatggcgaaacctcatctctattaaaactacaaaaattagccaggtgtggtggcaagcctgtaataccagctactggggaggctgaggcagaagaatcgcttgaacctgggaggcagaagttgcagtcagctgagatcgcaccactgcactccrgcctaggtgacagagcgagactcagtctcaaaaaataatttaaaaaaaagtcaggtaaaattgtgtgtgtgtgtgtgtgtgtgtgt

SEQ ID NO: 259717 - DNA, 581 bp, Homo sapiens
taaactaagccaaagtagaatagacataaaagtcctsaacacttcaacttcctatccttcaagaagtatacctcgcaaagctcatttgagagaggaaaagctttcctccaccctctgttttacagcgctgaggcttctcatcacatttctatgacttgtagcttaaatccatgttacatggtaactggcattgttagtgcttctcttttaacacagtaggaattaatcaatttggtggtgtatttaattaattctatcactagaggattgtaaaattacatatatgaatacctcactttagaggccacttaatttttttccaaggggatatttgactacatttcacttgtgtcttatttaatgattttataatttaaaccctaaattataaatctagaatttagaaagtatatttccccactggattacatttttggaaatattattttatatgtgcacaaatattacaaaatcactgtagacacctgaaaactatattatcttttaaaagcaatatttacattaaactggtataacaaaattgtttggtgcatttttttccagtacattttgtatatatt

SEQ ID NO: 259718 - DNA, 557 bp, Homo sapiens
cctcaacacttcaacttcctatccttcaagaagtatacctcgcaaagctcatttgagagaggaaragctttcctccaccctctgttttacagcgctgaggcttctcatcacatttctatgacttgtagcttaaatccatgttacatggtaactggcattgttagtgcttctcttttaacacagtaggaattaatcaatttggtggtgtatttaattaattctatcactagaggattgtaaaattacatatatgaatacctcactttagaggccacttaatttttttccaaggggatatttgactacatttcacttgtgtcttatttaatgattttataatttaaaccctaaattataaatctagaatttagaaagtatatttccccactggattacatttttggaaatattattttatatgtgcacaaatattacaaaatcactgtagacacctgaaaactatattatcttttaaaagcaatatttacattaaactggtataacaaaattgtttggtgcatttttttccagtacattttgtatatattacatgttta

SEQ ID NO: 259719 - DNA, 557 bp, Homo sapiens
cctcaacacttcaacttcctatccttcaagaagtatacctcgcaaagctcatttgagagaggaaaagctttcctccaccctctgttttacagcgctgaggcttctcatcacatttctatgacttgtagcttaaatccatgttacatggtaactggcattgttagtgcttctcttttaacacagtaggaattaatcaatttggtggtgtatttaattaattctatcactagaggattgtaaaattacatatatgaatacctcactttagaggccacttaatttttttccaaggggatatttgactacatttcacttgtgtcttatttaatgattttataatttaaaccctaaattataaatctagaatttagaaagtatatttccccactggattacatttttggaaatattattttatatgtgcacaaatattacaaaatcactgtagacacctgaaaactatattatcttttaaargcaatatttacattaaactggtataacaaaattgtttggtgcatttttttccagtacattttgtatatattacatgttta

SEQ ID NO: 259720 - DNA, 406 bp, Homo sapiens
atattcaacataatttttttagtactaacttgtgcctggagtattattggtttttctattatgaacttatgcacttgttaatttttttcataaaaattatatgtacaactccaytcaaaagcagtttttggtgggttttttttttttttgagacagagttttgctcttttcacccaggctggagggcaatgctgcgaatttggctcacagcaacctagcaacttttgcctcccaggttcaggtgattctcttgcctcagcctctcgagtggttaggactacaagcatgcaccaccatgcctggctaattttgtgtttttagtagagacatggttttgccatgttgaccaggctggtcttgaactcctgacctgaggtaatccacccatcttggcctcccaaagtgc

SEQ ID NO: 259721 - DNA, 406 bp, Homo sapiens
atattcaacataatttttttagtactaacttgtgcctggagtattattggtttttctattatgaacttatgcacttgttaatttttttcataaaaattatatgtacaactccattcaaaagcagtttttggtgggttttttttttttttgagacagagttttgctcttttcacccaggctggagggcaatgstgcgaatttggctcacagcaacctagcaacttttgcctcccaggttcaggtgattctcttgcctcagcctctcgagtggttaggactacaagcatgcaccaccatgcctggctaattttgtgtttttagtagagacatggttttgccatgttgaccaggctggtcttgaactcctgacctgaggtaatccacccatcttggcctcccaaagtgc

SEQ ID NO: 259722 - DNA, 406 bp, Homo sapiens
atattcaacataatttttttagtactaacttgtgcctggagtattattggtttttctattatgaacttatgcacttgttaatttttttcataaaaattatatgtacaactccattcaaaagcagtttttggtgggttttttttttttttgagacagagttttgctcttttcacccaggctggagggcaatgctgcgaatttggctcacagcaacctagcaacttttgcctcccaggttcaggtgattctcttgcctcagcctctygagtggttaggactacaagcatgcaccaccatgcctggctaattttgtgtttttagtagagacatggttttgccatgttgaccaggctggtcttgaactcctgacctgaggtaatccacccatcttggcctcccaaagtgc

SEQ ID NO: 259723 - DNA, 567 bp, Homo sapiens
aaagctgcccatggatcccctgaatctataataataataataataataataataataataataataaaaagtgactttgtcattcgcagggaaatgtgaatgacattcactctgcctctcaggcccttggattcccaaagtttgttttcatcacgcccaggggacactcagaatstcgtttgcagaacacgggttgtttttcttagaaacgccttgcaaaacaaaataggaagcaaaatctttctcactccttccactccataatagacaaaataaaatgagggggcaggaatccagagactttgaccacagttggcagatttattgtggtacagacatgaaggcaagcagtgttctctctgattctacgaaccgtacagcccgggccagctgccttctgctttctggatggtgcaggcgtgagctccaagcccaaatttcactggagctccaagaatcgagcctggcccaggcactcactgcacgggggccaagcgtgaagccagtgatcactccagcaaggtaacaggacagcttggtgatccttcttgccggccacaaaaggtt

SEQ ID NO: 259724 - DNA, 567 bp, Homo sapiens
aaagctgcccatggatcccctgaatctataataataataataataataataataataataataataaaaagtgactttgtcattcgcagggaaatgtgaatgacattcactctgcctctcaggcccttggattcccaaagtttgttttcatcacgcccaggggacactcagaatctcgtttgcagaacacgggttgtttttcttagaaacgccttgcaaaacaaaataggaagcaaaatctttctcactccttccactccataatagacaaaataaaatgagggggcaggaatccagagactttgaccacagttggcagatttattgtggtacagacatgaaggcaagcagtgttctctctgattctaygaaccgtacagcccgggccagctgccttctgctttctggatggtgcaggcgtgagctccaagcccaaatttcactggagctccaagaatcgagcctggcccaggcactcactgcacgggggccaagcgtgaagccagtgatcactccagcaaggtaacaggacagcttggtgatccttcttgccggccacaaaaggtt

SEQ ID NO: 259725 - DNA, 567 bp, Homo sapiens
aaagctgcccatggatcccctgaatctataataataataataataataataataataataataataaaaagtgactttgtcattcgcagggaaatgtgaatgacattcactctgcctctcaggcccttggattcccaaagtttgttttcatcacgcccaggggacactcagaatctcgtttgcagaacacgggttgtttttcttagaaacgccttgcaaaacaaaataggaagcaaaatctttctcactccttccactccataatagacaaaataaaatgagggggcaggaatccagagactttgaccacagttggcagatttattgtggtacagacatgaaggcaagcagtgttctctctgattctacgaaccgtacagcccgggccagctgccttctgctttctggatggtgcaggcgtgagctccaagcccaaatttcactggagctccaagaatcgagcctggcccaggcactcactgcacgggggccaagcgtgaarccagtgatcactccagcaaggtaacaggacagcttggtgatccttcttgccggccacaaaaggtt

SEQ ID NO: 259726 - DNA, 595 bp, Homo sapiens
ggttcactttttggagagacatttctgccctggagatccatacatattgaacccaaatgaatattttttaataaaaaaaaattaaactttagaaagttcaatattgaggcagctacgagtatgaattcctcatttttcctaaatgcatgttgtcaaaatttgtattgcatttagtaactacttatgtttctaatgtatataaggttacacaatgttttcttctttttctgctcctcagggtcagaatttgaaataaaagttttggaaagaaaaaacactcttgtctgtttgtgcaaaaataaaataacccatattttaagaatattttaaaataaatacaaattttgtgtgggggggttgcttataagaattcttyatatcctaaatcaaagatagatcttgttattaaccagaaaacaaaatgtgtgtgtataaatgtacaacactcttacactcacacaaacacaggcacacatgcacacacacacattcacgcactcactgatgtactcacacaaacacaggcattcatgtataaatacacacataagcgtgtatttatagaaatataattatgcacatacaatatataatt

SEQ ID NO: 259727 - DNA, 561 bp, Homo sapiens
ttagcccctgtggcttggaacccaaggacgcttctgagctgaggcagacttcagggagtactagttaggataggtcagctgcaagtaacaaacaaacaaacaaaatacrcagcaaactctggccctcagggccaaattcagcccaccatctatttttataagtaaagttttattggaacataggtgtacccattcatttacacattgtctatggttgtttttagggttgtagtgccaacagagatctcatggcccacacagagcctaaaatgttttccatgtggccctttatggaaaaagttcgcccacccctggcttgaacaatgacaacattgaattatctgccatcacaagaactccagaggaaggtggctccagggtcacacgaaggctcagcaaagtcctcgaggccccaggctcctgttccctccttggcaggttggcctttcttcttgggctggtttcttcatggtcacaagccggctgccacagttccaggcttgactgcctctcagaagcacattcaggccaggaggaagggcaggcttcctcctcacctct

SEQ ID NO: 259728 - DNA, 423 bp, Homo sapiens
acaagccggctgccacagttccaggcttgactgcctctcagaagcacattcaggccaggaggaagggcaggcttcctcctcacctcttcttatttagggatcaaaaatccctccagggcggtgcagcagaggtcccttacctctcagtgtttagaccagaggtcagtaagcatttcctataaaggaccagatagtgagtattttaggcttgtcaggtcacatatgatctctgcagcatattctgtgtgtgtgtgtgtgtgtgtgtgtgtgtgtgtgtgtgtgtgagagagagagagagagatgaccctttaaaaatgtacactccattcttctcatgagccatagyttgtcaacgcctggtctggcactcttcacatgccctctccgtgcccatctccagcaaaggatagcgggcttaccctt

SEQ ID NO: 259729 - DNA, 595 bp, Homo sapiens
gccctcccagcctcccccacccaactcagtcccattcacacgyggcatgccagggactctcccatcaggggaacaccctgtaactcccaagttcctccaaagcctcttgagagggaccatggtgccctgcagggagtgggtcctggtgggtccagtggagggaacgtccttgctgaaactggctgggtcttagccgggaagtggtgacaggtatctctcacatacgctacgggaacccagcgcagccaatggagtccaatcagcacaccttgcgcccaccccttcgtttggtaacttgaggccactgcccacccgccaggtaccctctctcaagcgtgccctgaagttcagggaaagacgccagcaccccctgctggttgcgctctcccatagcagggctcacattttgggagaaagaaatcagctgttagcagctttcgttcttcaccatgttaagcaaagcacaacattttataactgggtgaaaagccagatattctgtcagctgatttgattgttctgtacgcatatccctaagccattgtttgacggatatttttactgagttgactttcttcataagatgataggacta

SEQ ID NO: 259730 - DNA, 595 bp, Homo sapiens
gccctcccagcctcccccacccaactcagtcccattcacacgcggcatgccagggactctcccatcaggggaacaccctgtaactcccaagttcctccaaagcctcttgagagggaccatggtgccctgcagggagtgggtcctggtgggtccagtggagggaacgtccttgctgaaactggctgggtcttagccgggaagtggtgacaggtatctctcacatacgctacgggaacccagcgcagccaatggagtccaatcagcacaccttgcgcccaccccttcgtttggtaacttgaggccactgcccacccrccaggtaccctctctcaagcgtgccctgaagttcagggaaagacgccagcaccccctgctggttgcgctctcccatagcagggctcacattttgggagaaagaaatcagctgttagcagctttcgttcttcaccatgttaagcaaagcacaacattttataactgggtgaaaagccagatattctgtcagctgatttgattgttctgtacgcatatccctaagccattgtttgacggatatttttactgagttgactttcttcataagatgataggacta

SEQ ID NO: 259731 - DNA, 595 bp, Homo sapiens
gccctcccagcctcccccacccaactcagtcccattcacacgcggcatgccagggactctcccatcaggggaacaccctgtaactcccaagttcctccaaagcctcttgagagggaccatggtgccctgcagggagtgggtcctggtgggtccagtggagggaacgtccttgctgaaactggctgggtcttagccgggaagtggtgacaggtatctctcacatacgctacgggaacccagcgcagccaatggagtccaatcagcacaccttgcgcccaccccttcgtttggtaacttgaggccactgcccacccgccaggtaccmtctctcaagcgtgccctgaagttcagggaaagacgccagcaccccctgctggttgcgctctcccatagcagggctcacattttgggagaaagaaatcagctgttagcagctttcgttcttcaccatgttaagcaaagcacaacattttataactgggtgaaaagccagatattctgtcagctgatttgattgttctgtacgcatatccctaagccattgtttgacggatatttttactgagttgactttcttcataagatgataggacta

SEQ ID NO: 259732 - DNA, 595 bp, Homo sapiens
gccctcccagcctcccccacccaactcagtcccattcacacgcggcatgccagggactctcccatcaggggaacaccctgtaactcccaagttcctccaaagcctcttgagagggaccatggtgccctgcagggagtgggtcctggtgggtccagtggagggaacgtccttgctgaaactggctgggtcttagccgggaagtggtgacaggtatctctcacatacgctacgggaacccagcgcagccaatggagtccaatcagcacaccttgcgcccaccccttcgtttggtaacttgaggccactgcccacccgccaggtaccctctctcaagcgtgccctgaagttcagggaaagacgccagcrccccctgctggttgcgctctcccatagcagggctcacattttgggagaaagaaatcagctgttagcagctttcgttcttcaccatgttaagcaaagcacaacattttataactgggtgaaaagccagatattctgtcagctgatttgattgttctgtacgcatatccctaagccattgtttgacggatatttttactgagttgactttcttcataagatgataggacta

SEQ ID NO: 259733 - DNA, 607 bp, Homo sapiens
gttataaacactgtaaaaccaaccataggaaactatgttaattaaggtacattcacttgatagactatcatacagcattaaaatgatatttataaagaacttataacaatatgggggcaaggtttatgccatattgttaagtaggaaaataactgaatacaaaatcaaatatgttacatcaccattcaaaggtataataatgacaataaaaagaatctcatcaacatggtcggaagaaatacaccaagatattaaaagtaattgttaattgaacaatggcatcgtaggtgactttttctctctacttttctgaaatatccaaattttttacaataaacatgtgtgtatttacagtgaaagagagaacagtgaaatttctttttaaaaatacttgaaaatgatcacaaaaatgtgccaacatttcargtaagaaatgtgttttatatgggtctgtatacaaatttctatccagctgataaaaataacttcaagaaattaaacctattcagaaacaatagtgattgtgtctaaattcataggctttgagaaggataaatttttaaagtataaattactatgcaggtggtcaggaaaaggttgtatggag

SEQ ID NO: 259734 - DNA, 535 bp, Homo sapiens
tcggtctcaaaaaataaaaataaattaattaaaaaaataaaatggtttgttgtgtctgtactgaataggtacaaactttcttcttgtcattattctctaaacaatacaatgtaacaactatttacatagcatttaaattgtattaggtattctaagtaatttagagatgtcttaaagtgtacgggaggatgggtaggttacatgcaagtataggacttgagcatctgtgcatttggtatacaccacgggggccctggaaccaagacccctctcttctgctttgcttactggctgctgtgactcttaggagctctcctacttgttcggcgggtccctcccagtctcctttgctgtttcatcctttgctctgcctcttaatgttagccagcgtccagggctcattcctgggtccctttctattctctctacacatgaaccctggggctytctcccagtccctggttgtaaataccagctataggcctatgacttcccagtctcaatctccagcctggaccacttccaagaaccccag

SEQ ID NO: 259735 - DNA, 661 bp, Homo sapiens
acttgaatcctcatttattagtactgcactatcttttcttagctgtttttgtgaacatatgtgtgctgcttttttaccctaactagattggaagtacattgtgggtagaaacttggttttatttgtttttcctatattctcctttacagcagtttagacctgatgggaagtaggtatttcccaaacacgtgattgaactgaaatacattggtagatttcattttatcaggagactgccaaaagtatagtcataaataaggaatttggaagagaatcaaaaagctagtatgtactcatctgtcagcttgaaggcctgtataagactccatacttctgtggagtaaaaagggtagggttctggggctggacgyggtagctcacacctgtaatcccaacactttggggaaaaaaagagggttctgggactattctttgcttcttcttcttttttttttttttttgagacagttttgctctgtcattcaggctggagtgcagtggcatgaattcgactcaccacaacctctacctcaggttcaagcagttctcctgcctgagcctcctgagtagctgggattacaggtgcttgcgaccacacctggctaatttttttatatttttagtagagatgggggttttaccatgatggccaggctggtta

SEQ ID NO: 259736 - DNA, 661 bp, Homo sapiens
acttgaatcctcatttattagtactgcactatcttttcttagctgtttttgtgaacatatgtgtgctgcttttttaccctaactagattggaagtacattgtgggtagaaacttggttttatttgtttttcctatattctcctttacagcagtttagacctgatgggaagtaggtatttcccaaacacgtgattgaactgaaatacattggtagatttcattttatcaggagactgccaaaagtatagtcataaataaggaatttggaagagaatcaaaaagctagtatgtactcatctgtcagcttgaaggcctgtataagactccatacttctgtggagtaaaaagggtagggttctggggctggacgcggtagctcacacctgtaatcccaacactttggggaaaaaaagagggttctgggactattctttgcttcttcttcttttttttttttttttgagacagttttgctctgtcattcaggctggartgcagtggcatgaattcgactcaccacaacctctacctcaggttcaagcagttctcctgcctgagcctcctgagtagctgggattacaggtgcttgcgaccacacctggctaatttttttatatttttagtagagatgggggttttaccatgatggccaggctggtta

SEQ ID NO: 259737 - DNA, 661 bp, Homo sapiens
acttgaatcctcatttattagtactgcactatcttttcttagctgtttttgtgaacatatgtgtgctgcttttttaccctaactagattggaagtacattgtgggtagaaacttggttttatttgtttttcctatattctcctttacagcagtttagacctgatgggaagtaggtatttcccaaacacgtgattgaactgaaatacattggtagatttcattttatcaggagactgccaaaagtatagtcataaataaggaatttggaagagaatcaaaaagctagtatgtactcatctgtcagcttgaaggcctgtataagactccatacttctgtggagtaaaaagggtagggttctggggctggacgcggtagctcacacctgtaatcccaacactttggggaaaaaaagagggttctgggactattctttgcttcttcttcttttttttttttttttgagacagttttgctctgtcattcaggctggagtgcagtggcatraattcgactcaccacaacctctacctcaggttcaagcagttctcctgcctgagcctcctgagtagctgggattacaggtgcttgcgaccacacctggctaatttttttatatttttagtagagatgggggttttaccatgatggccaggctggtta

SEQ ID NO: 259738 - DNA, 661 bp, Homo sapiens
acttgaatcctcatttattagtactgcactatcttttcttagctgtttttgtgaacatatgtgtgctgcttttttaccctaactagattggaagtacattgtgggtagaaacttggttttatttgtttttcctatattctcctttacagcagtttagacctgatgggaagtaggtatttcccaaacacgtgattgaactgaaatacattggtagatttcattttatcaggagactgccaaaagtatagtcataaataaggaatttggaagagaatcaaaaagctagtatgtactcatctgtcagcttgaaggcctgtataagactccatacttctgtggagtaaaaagggtagggttctggggctggacgcggtagctcacacctgtaatcccaacactttggggaaaaaaagagggttctgggactattctttgcttcttcttcttttttttttttttttgagacagttttgctctgtcattcaggctggagtgcagtggcatgawttcgactcaccacaacctctacctcaggttcaagcagttctcctgcctgagcctcctgagtagctgggattacaggtgcttgcgaccacacctggctaatttttttatatttttagtagagatgggggttttaccatgatggccaggctggtta

SEQ ID NO: 259739 - DNA, 498 bp, Homo sapiens
gctggagtgtgatgtgataggaaatgtgcagccaaagagaaaaaaagatgtaagtaagcttgactcattgcagctaagaacccagatgttatcttgagggtattaactaataagcagtttaaatcagaatggcatattctgatttgttttttgtatgttyacatttggcaggcatagatactgtttgaagagagaaaagacagtagatagaggtaacaaacttaaatatgtgcgaagtctagaaacaagagacccggggataaggacctttcaaaataaaatgcgagatttgaaaactgattggctggggcatgaggaaaaggcaggtctttaaggtcaatccctgttttgctttaagttgttaggggttggttttatcacatattgtagaacatgtcatttcagttttgaacatcttgagttaaattgtcctaacatatcttatgaatttgattttcttccctgggaagctaatatttcaaaaactgaaagagtata

SEQ ID NO: 259740 - DNA, 498 bp, Homo sapiens
gctggagtgtgatgtgataggaaatgtgcagccaaagagaaaaaaagatgtaagtaagcttgactcattgcagctaagaacccagatgttatcttgagggtattaactaataagcagtttaaatcagaatggcatattctgatttgttttttgtatgtttacatttggcaggcatagatactgtttgaaragagaaaagacagtagatagaggtaacaaacttaaatatgtgcgaagtctagaaacaagagacccggggataaggacctttcaaaataaaatgcgagatttgaaaactgattggctggggcatgaggaaaaggcaggtctttaaggtcaatccctgttttgctttaagttgttaggggttggttttatcacatattgtagaacatgtcatttcagttttgaacatcttgagttaaattgtcctaacatatcttatgaatttgattttcttccctgggaagctaatatttcaaaaactgaaagagtata

SEQ ID NO: 259741 - DNA, 498 bp, Homo sapiens
gctggagtgtgatgtgataggaaatgtgcagccaaagagaaaaaaagatgtaagtaagcttgactcattgcagctaagaacccagatgttatcttgagggtattaactaataagcagtttaaatcagaatggcatattctgatttgttttttgtatgtttacatttggcaggcatagatactgtttgaagagagraaagacagtagatagaggtaacaaacttaaatatgtgcgaagtctagaaacaagagacccggggataaggacctttcaaaataaaatgcgagatttgaaaactgattggctggggcatgaggaaaaggcaggtctttaaggtcaatccctgttttgctttaagttgttaggggttggttttatcacatattgtagaacatgtcatttcagttttgaacatcttgagttaaattgtcctaacatatcttatgaatttgattttcttccctgggaagctaatatttcaaaaactgaaagagtata

SEQ ID NO: 259742 - DNA, 498 bp, Homo sapiens
gctggagtgtgatgtgataggaaatgtgcagccaaagagaaaaaaagatgtaagtaagcttgactcattgcagctaagaacccagatgttatcttgagggtattaactaataagcagtttaaatcagaatggcatattctgatttgttttttgtatgtttacatttggcaggcatagatactgtttgaagagagaaaagacagtagatagaggtaacaaacttaaatatgtgcgaagtctagaaacaagagacccggggataaggacctttcaaaataaaatgcragatttgaaaactgattggctggggcatgaggaaaaggcaggtctttaaggtcaatccctgttttgctttaagttgttaggggttggttttatcacatattgtagaacatgtcatttcagttttgaacatcttgagttaaattgtcctaacatatcttatgaatttgattttcttccctgggaagctaatatttcaaaaactgaaagagtata

SEQ ID NO: 259743 - DNA, 607 bp, Homo sapiens
aaatgcgagatttgaaaactgattggctggggcatgaggaaaaggcaggtctttaaggtcaatccctgttttgctttaagttgttaggggttggttttatcacatattgtagaacatgtcatttcagttttgaacatcttgagttaaattgtcctaacatatcttatgaatttgattttcttccctgggaagctaatatttcaaaaactgaaagagtatatagatttccaacttgtatccaatttataaaactatctctrggctgctgatttcaggaggaggctcatgaatattctctttgcagagaatatatcaggagttaacaacagcttcaatatttgtggacgaccagttaactaagccacctcttagtgtatttagatgggaaatcttagctgaagatattcaataatgaaccatcagtgactaaaaaattcaacatttaagtatatttcattgtaattaatttgaattgaagtagcagctagtatttactacattgaacaatgcaaataagaggaaaaaattaataaccatctctaataccacatgccaaaatcctcatcaatttattctagctaaaggagttgatcagaagcagcagttg

SEQ ID NO: 259744 - DNA, 607 bp, Homo sapiens
aaatgcgagatttgaaaactgattggctggggcatgaggaaaaggcaggtctttaaggtcaatccctgttttgctttaagttgttaggggttggttttatcacatattgtagaacatgtcatttcagttttgaacatcttgagttaaattgtcctaacatatcttatgaatttgattttcttccctgggaagctaatatttcaaaaactgaaagagtatatagatttccaacttgtatccaatttataaaactatctctgggctgctgatttcaggaggaggctcatgaatattctctttkcagagaatatatcaggagttaacaacagcttcaatatttgtggacgaccagttaactaagccacctcttagtgtatttagatgggaaatcttagctgaagatattcaataatgaaccatcagtgactaaaaaattcaacatttaagtatatttcattgtaattaatttgaattgaagtagcagctagtatttactacattgaacaatgcaaataagaggaaaaaattaataaccatctctaataccacatgccaaaatcctcatcaatttattctagctaaaggagttgatcagaagcagcagttg

SEQ ID NO: 259745 - DNA, 607 bp, Homo sapiens
aaatgcgagatttgaaaactgattggctggggcatgaggaaaaggcaggtctttaaggtcaatccctgttttgctttaagttgttaggggttggttttatcacatattgtagaacatgtcatttcagttttgaacatcttgagttaaattgtcctaacatatcttatgaatttgattttcttccctgggaagctaatatttcaaaaactgaaagagtatatagatttccaacttgtatccaatttataaaactatctctgggctgctgatttcaggaggaggctcatgaatattctctttgcagagaatatatcaggagttaacaacagcttcaatatttgtggacgaccagttaactaagccacctcttagtgtatttagatgggaaatcttagctgaagatattcaataatgaaccawcagtgactaaaaaattcaacatttaagtatatttcattgtaattaatttgaattgaagtagcagctagtatttactacattgaacaatgcaaataagaggaaaaaattaataaccatctctaataccacatgccaaaatcctcatcaatttattctagctaaaggagttgatcagaagcagcagttg

SEQ ID NO: 259746 - DNA, 607 bp, Homo sapiens
aaatgcgagatttgaaaactgattggctggggcatgaggaaaaggcaggtctttaaggtcaatccctgttttgctttaagttgttaggggttggttttatcacatattgtagaacatgtcatttcagttttgaacatcttgagttaaattgtcctaacatatcttatgaatttgattttcttccctgggaagctaatatttcaaaaactgaaagagtatatagatttccaacttgtatccaatttataaaactatctctgggctgctgatttcaggaggaggctcatgaatattctctttgcagagaatatatcaggagttaacaacagcttcaatatttgtggacgaccagttaactaagccacctcttagtgtatttagatgggaaatcttagctgaagatattcaataatgaaccatcagtgactaaaaaattcaacatttaagtatatttcattgtaattaatttgaattgaagtagcagctagtatttactacattgaacaatgcaaataagaggaaaaaattaataacyatctctaataccacatgccaaaatcctcatcaatttattctagctaaaggagttgatcagaagcagcagttg

SEQ ID NO: 259747 - DNA, 488 bp, Homo sapiens
agaagggtaaactttttaataacataatttatcctyctagaatttgaatgttggtctatttgatgatgtcccacagattcattagtctctgctcattgtttattttttattctttctgtttctcagagtcagtattttccattatcttctcttcaagttcatggcttcttctgtgtgtgcaaatagactcttaaatccctctggtgattttgaaatttttatcattgtagttttccattccagaatttctgttatctctttgctgatattcctactttttaatattttttctgattcctttatttctttgattatgttttccttttgacatttgagtataatgaagagagttgttttaaagtctttgtctagtaagtttgatgtctgggtttccttagggatattttctgtcaatttattttgttcctttgaatgagccacactttcccattctttgtatgccttgtaacgttttttgaaaactggac

SEQ ID NO: 259748 - DNA, 488 bp, Homo sapiens
agaagggtaaactttttaataacataatttatcctcctagaatwtgaatgttggtctatttgatgatgtcccacagattcattagtctctgctcattgtttattttttattctttctgtttctcagagtcagtattttccattatcttctcttcaagttcatggcttcttctgtgtgtgcaaatagactcttaaatccctctggtgattttgaaatttttatcattgtagttttccattccagaatttctgttatctctttgctgatattcctactttttaatattttttctgattcctttatttctttgattatgttttccttttgacatttgagtataatgaagagagttgttttaaagtctttgtctagtaagtttgatgtctgggtttccttagggatattttctgtcaatttattttgttcctttgaatgagccacactttcccattctttgtatgccttgtaacgttttttgaaaactggac

SEQ ID NO: 259749 - DNA, 488 bp, Homo sapiens
agaagggtaaactttttaataacataatttatcctcctagaatttgaatgttggtctatttgatgatgtcccacagattcattagtctctgctcattgtttattttktattctttctgtttctcagagtcagtattttccattatcttctcttcaagttcatggcttcttctgtgtgtgcaaatagactcttaaatccctctggtgattttgaaatttttatcattgtagttttccattccagaatttctgttatctctttgctgatattcctactttttaatattttttctgattcctttatttctttgattatgttttccttttgacatttgagtataatgaagagagttgttttaaagtctttgtctagtaagtttgatgtctgggtttccttagggatattttctgtcaatttattttgttcctttgaatgagccacactttcccattctttgtatgccttgtaacgttttttgaaaactggac

SEQ ID NO: 259750 - DNA, 583 bp, Homo sapiens
cattagtctctgctcattgtttattttttattctttctgtttctcagagtcagtattttccattatcttctcttcaagttcatggcttcttctgtgtgtgcaaatagactcttaaatccctstggtgattttgaaatttttatcattgtagttttccattccagaatttctgttatctctttgctgatattcctactttttaatattttttctgattcctttatttctttgattatgttttccttttgacatttgagtataatgaagagagttgttttaaagtctttgtctagtaagtttgatgtctgggtttccttagggatattttctgtcaatttattttgttcctttgaatgagccacactttcccattctttgtatgccttgtaacgttttttgaaaactggacattctaataactataattactaagtggttactctgcaaatcgaacactccctacaaacacagtaatgttttgtggttttaaattttctttacttattatattgttaaggattttttttttagtgaaattttccaaagtgatttacaaaactgtttgctttataaggtgtggtca

SEQ ID NO: 259751 - DNA, 488 bp, Homo sapiens
agaagggtaaactttttaataacataatttatcctcctagaatttgaatgttggtctatttgatgatgtcccacagattcattagtctctgctcattgtttattttttattctttctgtttctcagagtcagtattttccattatcttctcttcaagttcatggcttcttctgtgtgtgcaaatagactcttaaatccctctggtgattttgaaatttttatcattgtagttttccattccagaatttctgttatctctttgctgatattcctrctttttaatattttttctgattcctttatttctttgattatgttttccttttgacatttgagtataatgaagagagttgttttaaagtctttgtctagtaagtttgatgtctgggtttccttagggatattttctgtcaatttattttgttcctttgaatgagccacactttcccattctttgtatgccttgtaacgttttttgaaaactggac

SEQ ID NO: 259752 - DNA, 583 bp, Homo sapiens
cattagtctctgctcattgtttattttttattctttctgtttctcagagtcagtattttccattatcttctcttcaagttcatggcttcttctgtgtgtgcaaatagactcttaaatccctctggtgattttgaaatttttatcattgtagttttccattccagaatttctgttatctctttgctgatattcctactttttaatattttttctgattcctttatttctttgattatgttttccttttgacatttgagtataatgaagagagttgttttaaagtctttgtctagtaagtttgatgtctgggtttccttagggatattttctgtcaatttattttgttcctttgaatgagccacactttcccattctttgtatgccttgtaacgttttttgaaaactggacattctaataactataattactaagtggttactctgcaaatcgaacacyccctacaaacacagtaatgttttgtggttttaaattttctttacttattatattgttaaggattttttttttagtgaaattttccaaagtgatttacaaaactgtttgctttataaggtgtggtca

SEQ ID NO: 259753 - DNA, 635 bp, Homo sapiens
ccgcggctatttgccccccgccgccgcgacgttatatggttttttgctcccactgctttttgcctccgccaccgcggctttttgccccccccaccaccgcagcyttttgcgcgtctcggctttttgccccaccagcgccgcggctgtttgccccctgccaccacggctttttccccgcctcggctttttgcccccccccgccgcctcgggtttatgcccgccgcggctttttgcccccccgccgccgcggctttttgccccatggccatcctcagaagtgtgagtggaacagagtgaagggaaagctgttttcttcgaaagctcaaaaatcttgaactttcaaatagggataagtgttatttttgctccaagcacacatttgagaaatcttccatttagcggatctgatgataaacccacatttttgtttgttttaatctgaaaatgtatttgtatggttcttggaaatattttttcatataaaattatagtgtatcagcttatttcaagttttatttaccatttgataattactcctaaaatgtcattgattaaagaatcatctattgctccaactgccctttactaaaggtaatttgtctttttaacctcatcaggctccttttaagctctca

SEQ ID NO: 259754 - DNA, 635 bp, Homo sapiens
ccgcggctatttgccccccgccgccgcgacgttatatggttttttgctcccactgctttttgcctccgccaccgcggctttttgccccccccaccaccgcagctttttgcgcgtctcggctttttgccccaccagcgccgcggctgtttgccccctgccaccacggctttttccccgcckcggctttttgcccccccccgccgcctcgggtttatgcccgccgcggctttttgcccccccgccgccgcggctttttgccccatggccatcctcagaagtgtgagtggaacagagtgaagggaaagctgttttcttcgaaagctcaaaaatcttgaactttcaaatagggataagtgttatttttgctccaagcacacatttgagaaatcttccatttagcggatctgatgataaacccacatttttgtttgttttaatctgaaaatgtatttgtatggttcttggaaatattttttcatataaaattatagtgtatcagcttatttcaagttttatttaccatttgataattactcctaaaatgtcattgattaaagaatcatctattgctccaactgccctttactaaaggtaatttgtctttttaacctcatcaggctccttttaagctctca

SEQ ID NO: 259755 - DNA, 635 bp, Homo sapiens
ccgcggctatttgccccccgccgccgcgacgttatatggttttttgctcccactgctttttgcctccgccaccgcggctttttgccccccccaccaccgcagctttttgcgcgtctcggctttttgccccaccagcgccgcggctgtttgccccctgccaccacggctttttccccgcctcggctttttgcccccccycgccgcctcgggtttatgcccgccgcggctttttgcccccccgccgccgcggctttttgccccatggccatcctcagaagtgtgagtggaacagagtgaagggaaagctgttttcttcgaaagctcaaaaatcttgaactttcaaatagggataagtgttatttttgctccaagcacacatttgagaaatcttccatttagcggatctgatgataaacccacatttttgtttgttttaatctgaaaatgtatttgtatggttcttggaaatattttttcatataaaattatagtgtatcagcttatttcaagttttatttaccatttgataattactcctaaaatgtcattgattaaagaatcatctattgctccaactgccctttactaaaggtaatttgtctttttaacctcatcaggctccttttaagctctca

SEQ ID NO: 259756 - DNA, 459 bp, Homo sapiens
ctcaaactgacctttttttttttttacagattcaatgcattaagtcaatttattacttatgatgaatttatttatgtatttattttcgctaacacaagtagaaaaagcctataagttgctatgccaaaaacctgcctctagatggcaaacaaaccccgcaatacacaaaagagagccaaattcttaraaaccctgggaaaggaagagggctactgtcccattaacaacttggagcccttaaggcaagaatgaggtggaacatctggaacatctgggaggagacacaagggtgcggagtagtggggaacctgctctgtgctctgagactgaaagcccagccttgcctctcaccgctgccttgactgtgtccccatctgctgtgaagtgaatggtgtcttctaaattcgtgctgagccctaattgctgaaaactgtaagacatgcaatggggggattatgt

SEQ ID NO: 259757 - DNA, 567 bp, Homo sapiens
taagacatgcaatggggggattatgtgcatcttcccgacaccaacatgatgctcaggaaggagacttcttgttttctcttaggattcttttactaaccaagattttgcctctactgcatatttccctttgctgattgtccctcccttttgacagaagatggcccagggcattcactactaagtctcaacctcttacccaaagccctcagtctagtgttgctctttccttcgtgctatttttgtttctttcttttcttgtaatcatcttggcaataaaataatcagttttttctttctacctattaaagatgttaccttagttaattacaggggtttccttcagaatgataaatggtctttcaaaatgatgtaaagagatctaaatccgtgtgctccagaacttgaatgaagctctgtctagcrcgggtgccagtgactctcccaaagtgctccatgcagctggacccacagagtccctctgtgctgtcatatcacccactgccttctgtgaatgagatattctgattagaatcctggtggatgctatttgagccagtgcccccacaa

SEQ ID NO: 259758 - DNA, 567 bp, Homo sapiens
taagacatgcaatggggggattatgtgcatcttcccgacaccaacatgatgctcaggaaggagacttcttgttttctcttaggattcttttactaaccaagattttgcctctactgcatatttccctttgctgattgtccctcccttttgacagaagatggcccagggcattcactactaagtctcaacctcttacccaaagccctcagtctagtgttgctctttccttcgtgctatttttgtttctttcttttcttgtaatcatcttggcaataaaataatcagttttttctttctacctattaaagatgttaccttagttaattacaggggtttccttcagaatgataaatggtctttcaaaatgatgtaaagagatctaaatccgtgtgctccagaacttgaatgaagctctgtctagcgcgggtgccagtgactctcccaragtgctccatgcagctggacccacagagtccctctgtgctgtcatatcacccactgccttctgtgaatgagatattctgattagaatcctggtggatgctatttgagccagtgcccccacaa

SEQ ID NO: 259759 - DNA, 197 bp, Homo sapiens
ctgtaagcagccctgcaagccaggttctgagcaagccctcctgtgtggggccctcttacctggacataggtgtgtaaaccaaaaatgaaactctaagctccctaaccaactgaatgaactcctcctctcagccaagsacacaccaaaatcaacctgaaatacaatgcagcccatgatcggaacggatgattggatat

SEQ ID NO: 259760 - DNA, 556 bp, Homo sapiens
agcattccatctttctgatgttcccacattcctagcagcatggccccttcctccatcactccagtttccctgtccattgtcccaggtcctctctggctgttaccttcctccctccctattgtaaggacccttgtgattatgatggtctcacccagataattcaggatattctcctgacctcaaaattctcaaccacgtctgccaagttatttttgacttgttcataagtaatgatcatagattccagatattaggacaatgatgtctttagtgggtgtattattcattccacaaacaactctcatcatccacacaatggccttccyctaaggtagaataaaaatatcacaaggcagatttatgaggcgatcgacctagaaaaaacatgagactctaggactgtctgatgtgtggatgtcaaatcctgggagattctgagcctctgctctatgtggactctatgttgtgtagccatttgtggaaggcttctgtgattttgtgacctagagaaaacgaatctctgctaaaatcaaatctaagaaagattggcaaaggg

SEQ ID NO: 259761 - DNA, 556 bp, Homo sapiens
agcattccatctttctgatgttcccacattcctagcagcatggccccttcctccatcactccagtttccctgtccattgtcccaggtcctctctggctgttaccttcctccctccctattgtaaggacccttgtgattatgatggtctcacccagataattcaggatattctcctgacctcaaaattctcaaccacgtctgccaagttatttttgacttgttcataagtaatgatcatagattccagatattaggacaatgatgtctttagtgggtgtattattcattccacaaacaactctcatcatccacacaatggccttcccctaaggtagaataaaaatatcacaaggcagatttaygaggcgatcgacctagaaaaaacatgagactctaggactgtctgatgtgtggatgtcaaatcctgggagattctgagcctctgctctatgtggactctatgttgtgtagccatttgtggaaggcttctgtgattttgtgacctagagaaaacgaatctctgctaaaatcaaatctaagaaagattggcaaaggg

SEQ ID NO: 259762 - DNA, 556 bp, Homo sapiens
agcattccatctttctgatgttcccacattcctagcagcatggccccttcctccatcactccagtttccctgtccattgtcccaggtcctctctggctgttaccttcctccctccctattgtaaggacccttgtgattatgatggtctcacccagataattcaggatattctcctgacctcaaaattctcaaccacgtctgccaagttatttttgacttgttcataagtaatgatcatagattccagatattaggacaatgatgtctttagtgggtgtattattcattccacaaacaactctcatcatccacacaatggccttcccctaaggtagaataaaaatatcacaaggcagatttatgaggcgatcgacctagaaaaaacmtgagactctaggactgtctgatgtgtggatgtcaaatcctgggagattctgagcctctgctctatgtggactctatgttgtgtagccatttgtggaaggcttctgtgattttgtgacctagagaaaacgaatctctgctaaaatcaaatctaagaaagattggcaaaggg

SEQ ID NO: 259763 - DNA, 531 bp, Homo sapiens
tgacatccagatgacccagtctccatcctccctgtctgcatctgtaggagacagagtcaccatcacttgccgggcgagtcagggcattagcaataatttaaattggtatcagcagaaaccagggaaaactcctaagctcctgatctatgctgcatccagtctgcaaagtgggattccctctcggttcagtgacagtggatctggggcagaytacactctcaccatccgcagcctgcagcctgaagattttgcaacttattactgtcaacagagtgacagtacccctcccacagcgttacaagtcataacataatccccaaggaagcagatgtgtgaggctgggctgccccaatgctccttccggtgcctctatctgctgagggaagttctcaaactcagtcaggtttggaaagtcattgggagattttcctagaggaggccagggaggttcctctgaaccctaagcctctttcaccctcatccccagcagaaaagatgtgacaatgcctgtcctgactgaataaagaagag

SEQ ID NO: 259764 - DNA, 531 bp, Homo sapiens
tgacatccagatgacccagtctccatcctccctgtctgcatctgtaggagacagagtcaccatcacttgccgggcgagtcagggcattagcaataatttaaattggtatcagcagaaaccagggaaaactcctaagctcctgatctatgctgcatccagtctgcaaagtgggattccctctcggttcagtgacagtggatctggggcagactacactctcaccatccgcagcctgcagcctgaagattttgcaamttattactgtcaacagagtgacagtacccctcccacagcgttacaagtcataacataatccccaaggaagcagatgtgtgaggctgggctgccccaatgctccttccggtgcctctatctgctgagggaagttctcaaactcagtcaggtttggaaagtcattgggagattttcctagaggaggccagggaggttcctctgaaccctaagcctctttcaccctcatccccagcagaaaagatgtgacaatgcctgtcctgactgaataaagaagag

SEQ ID NO: 259765 - DNA, 612 bp, Homo sapiens
gggaggttcctctgaaccctaagcctctttcaccctcatycccagcagaaaagatgtgacaatgcctgtcctgactgaataaagaagagagataagtccaactgaggagtctgtgttatgggataattggaatttgtacagcaaaagagaagctattctcagtatttcaaggagaaattattcaagttgaataaattagagcctaaaccacagtctttccgaagcctatggaatgttattcatgaagcaggtactagacacaggggattctcaggtgctacttcagaagccagggtgcacctgcccctggtggtatgtgttgaacaccgtgtgatgatcctcagtcctgtctgggaagcccaggtcttcccagacaggaatgctttgataaatccactgctaggtaggtaattcttctgtaacattaataattcggttttacttttggatcctaaagtggaactacttagaaaatctgcaaaaatcatgcaaagaaaatcatgtaaaatcatgatctttacttaggcacttacaggtgaaatgacgaggtatctggaattgcattaaaatagatcaaggtgaaaaagactgacaaaaacattaactgttaaa

SEQ ID NO: 259766 - DNA, 584 bp, Homo sapiens
ctagaggaggccagggaggttcctctgaaccctaagcctctttcaccctcatccccagcagaaaagatgtgacaatgcctgtcctgactgaataaagaagagagataagtccaactgaggagtctgtgttatgggataatyggaatttgtacagcaaaagagaagctattctcagtatttcaaggagaaattattcaagttgaataaattagagcctaaaccacagtctttccgaagcctatggaatgttattcatgaagcaggtactagacacaggggattctcaggtgctacttcagaagccagggtgcacctgcccctggtggtatgtgttgaacaccgtgtgatgatcctcagtcctgtctgggaagcccaggtcttcccagacaggaatgctttgataaatccactgctaggtaggtaattcttctgtaacattaataattcggttttacttttggatcctaaagtggaactacttagaaaatctgcaaaaatcatgcaaagaaaatcatgtaaaatcatgatctttacttaggcacttacaggtgaaatgacgaggtatctggaattgcattaaaata

SEQ ID NO: 259767 - DNA, 441 bp, Homo sapiens
gggaggttcctctgaaccctaagcctctttcaccctcatccccagcagaaaagatgtgacaatgcctgtcctgactgaataaagaagagagataagtccaactgaggagtctgtgttatgggataattggaatttgtacagcaaaagagaagctattctcagtatttcaaggagaaattattcaagttgaataaattagagcctaaaccacagtctttccgaagcctatggaatgttattcatgaagcaggtactagacacaggggattctcaggtgctacttcagaagccagggtgcacctgcccctggtggtatgtgytgaacaccgtgtgatgatcctcagtcctgtctgggaagcccaggtcttcccagacaggaatgctttgataaatccactgctaggtaggtaattcttctgtaacattaataattcggtttta

SEQ ID NO: 259768 - DNA, 589 bp, Homo sapiens
cattaactgttaaaacttggggctatatatcaaagacattagtttctctatgagtatatttcaaaytttcctcaataaattttttaaaaattcaatttaaaattcaagccacaaataaatgctttttaaaaatttcttagattatacaaatagtgccataacatcaagaataatcccaaatcattccatatacttcaaaagatacaaaaccaggctgggtgcggtggctcacgtctgtaatcccaacactttgggaggccgaggtgggcggatcacctgaggttgtgagtttgaaaccagtctgaccaacatggagaaaccccgtctctaccaaaaatacaaaattagctgggtgtggtggtgcatgcctgtaatcccagctactggggaggctgaggcaggagaatcacttgaactcgggaagtggaggttgcagtgagccgagattgtgccattgcactccagcctgggcgacaagagcaaaactccatctcaaaaaaaaaaaaaaaaaaaaaaaaaaaaaagacacaaaagcaggaactcttttccaggagcaatcccatttagttaagaaaaagaagaaaaaaat

SEQ ID NO: 259769 - DNA, 424 bp, Homo sapiens
gattcccaagcatatatctctcatcatgcgtccccctcacatatctgctctttaattcttctttttaattcattggataccttctaaaagtctctcacaattcagatagtccttcaagccaggaacatgggagtcattctcaaattatctttctcactcaccccctgtcccatctccaaatttttatataagcttcagatttcatggactgtayttaaaaattttttatagttgatgtgtctctatttcagcagctactgtgttatcatttctcatcttagactattacaatctttctggctgtgtttacagatctttccagtccacccccacactgaggtcaggagatctttctaaaatgtatttcatactctatcttgcttaaaactttcaagtgcttaacaactaaatgcagtatatattt

SEQ ID NO: 259770 - DNA, 424 bp, Homo sapiens
gattcccaagcatatatctctcatcatgcgtccccctcacatatctgctctttaattcttctttttaattcattggataccttctaaaagtctctcacaattcagatagtccttcaagccaggaacatgggagtcattctcaaattatctttctcactcaccccctgtcccatctccaaatttttatataagcttcagatttcatggactgtacttaaaaattttttatagttgatgtgtctctatttcagcagctactgtkttatcatttctcatcttagactattacaatctttctggctgtgtttacagatctttccagtccacccccacactgaggtcaggagatctttctaaaatgtatttcatactctatcttgcttaaaactttcaagtgcttaacaactaaatgcagtatatattt

SEQ ID NO: 259771 - DNA, 364 bp, Homo sapiens
tgaggtttgccaatttgtaatctccttgtggamaaacaggggaaaacacatctcagcctaataagatttctctactaaagagtctagacttgatccatttgtccttgcaattcaaaagctaattcaaatactgatttgatgtattgtgtgaacaaccattgctgattatcatcgcatacctggcattctcttgtatctgatatctaaaatatttggtaattcctggactttctcttttcaaacccaggacggtttaatttgagtcttagaacagttgtctttgagaaattcttccctctactgcatctgtgaatgggcatagcatggttacatacatactgtcactccatagaacatttgttaa

SEQ ID NO: 259772 - DNA, 364 bp, Homo sapiens
tgaggtttgccaatttgtaatctccttgtggacaaacaggggaaaacacatctcagcctaataagatttctctactaaagagtctagacttgatccatttgtccttgyaattcaaaagctaattcaaatactgatttgatgtattgtgtgaacaaccattgctgattatcatcgcatacctggcattctcttgtatctgatatctaaaatatttggtaattcctggactttctcttttcaaacccaggacggtttaatttgagtcttagaacagttgtctttgagaaattcttccctctactgcatctgtgaatgggcatagcatggttacatacatactgtcactccatagaacatttgttaa

SEQ ID NO: 259773 - DNA, 364 bp, Homo sapiens
tgaggtttgccaatttgtaatctccttgtggacaaacaggggaaaacacatctcagcctaataagatttctctactaaagagtctagacttgatccatttgtccttgcaattcaaaagctaattcaaatactgatttgatgtattgtgtgaacaaccattgctgattatcatcgcatacctggcattctcttktatctgatatctaaaatatttggtaattcctggactttctcttttcaaacccaggacggtttaatttgagtcttagaacagttgtctttgagaaattcttccctctactgcatctgtgaatgggcatagcatggttacatacatactgtcactccatagaacatttgttaa

SEQ ID NO: 259774 - DNA, 491 bp, Homo sapiens
ccttttcacatttttctgcctgctttatatcctggccatgctggcagctgattagatggtgctgtgactcagataagactttgaactttagacttttgagttaatgctgaaatgagttgagactttgggggactgttgggaaggcatgattggttttgaaatgtgaatatatgagatttgggaggggccaggggtgcaatgatgtggtttggctctgtgtccccacccaaatctcatcttgtagctcctgtaattyccatgtattgtgggagggacctggtgggagatgatggaatcatgcggaaggtctttcccatgctgttctcatgatagtgtatgggtatcatgaaatctggtttaaaaacaggagtttctctgcgcaagctctctctttgcctgctgccatccatgtgggatgtgacttgctcctccttgccttctgattcatgattgtggaggcctccacagccatgtggacctgtaagtccaat

SEQ ID NO: 259775 - DNA, 491 bp, Homo sapiens
ccttttcacatttttctgcctgctttatatcctggccatgctggcagctgattagatggtgctgtgactcagataagactttgaactttagacttttgagttaatgctgaaatgagttgagactttgggggactgttgggaaggcatgattggttttgaaatgtgaatatatgagatttgggaggggccaggggtgcaatgatgtggtttggctctgtgtccccacccaaatctcatcttgtagctcctgtaatttccatgtattgtgggagggacctggtgggagatgatggaatcatgsggaaggtctttcccatgctgttctcatgatagtgtatgggtatcatgaaatctggtttaaaaacaggagtttctctgcgcaagctctctctttgcctgctgccatccatgtgggatgtgacttgctcctccttgccttctgattcatgattgtggaggcctccacagccatgtggacctgtaagtccaat

SEQ ID NO: 259776 - DNA, 411 bp, Homo sapiens
acccatgagttcaagacaagcctgggcaatatggctaaactccatggttgcaaaaactacaaaaattagccaggcatggtggcctgygcctgtagtcccagctacctaggagactgaggccaaaggatcatctgggctcaggaggccgaggctgcagtcggccatgattatgctactgcactgtagtgtgggcaacagagtgagaccctgtctcaaaacaaacaaacaaacaacaaaacatcaccaaatcaaaacatattccaagaactgagagaggaagttccagacatgaaactaactgaataccctgataggtaattgttaataagctaaaattcctcaaatcaaggttttctgagctgtacatttgtgctaaattcaaagattcatgttaagagtatttgaaagttt

SEQ ID NO: 259777 - DNA, 603 bp, Homo sapiens
attcaccactaccaagccaacactacaagaactgctaaaaggatctctaaatcttgaaacaaatgttggaaacacatcaaaacagaacctctttaaagtgcaaatctcacaggacctataaaacaaaaatacagttaaaaaacaaaaaaacaagatatacaggcaacaaatagcatgatgaatgaaatggtacctcacatctcagtattagctcttaatgtacatagcccaaatgcgccactgaaaagatactgaattgcagaatggataagagttcaccaactatctgctgccttcaagagactcacctaacacatgaggactcacataaacttaagataaaggggtggaaaaacacattccatgcaagtgaacaccaaaagcaagcaagagtagctattcttataccagacaaaataaaccctaaagcaacagcagttaaaaaagacaaagtgggctattatctaatgacaaaaggccttgtctgacagaaaaatatcacaatcctaaatatatatgcacctaacactwtatctcccaaatttataaagcaattactaatagacctaagaaatgagataaacagcaacacaataatagtgg

SEQ ID NO: 259778 - DNA, 615 bp, Homo sapiens
atcaaaaccgaaactcaacaaagaaacaatggatttaaactgtagcctgggacaaatggatgtaacagatatatacagaacattcttccaaacaatcgcagaatatgcattctgttcaacagcatatggtacttccttcaagatagaccatatgataggccacaaaatgagtctcaataaatttaagaaaatttaaattatatcaagcaccctctcagacaacagtggaataaatctggaaatcgtctcgaaaaggaaccttaaaaccatgcaaataaatggaaattaaagaatctgctcctgaatgatcattgggtcaaaatgaaatcaagatggaaattaaaaaattatttgaactgaatgacaacagtgacaaaatctatcataactactgggataagacaaaggtgctgctaagaggaaagttcatagccctaaacacctayatcaaaaagtctgaaagagtacaaacagacaatctaagatcatacctcaaggaactagataagcaagaacaaataaaacccaaacccgtcagaagaaaggaaattaccaagatcagagcagaactaaatgaaattgaaacaaacaaacaaaaatacaagataaatgaaa

SEQ ID NO: 259779 - DNA, 560 bp, Homo sapiens
gatgatttaacatatgcaagtcattaaatatgatataccacacaaacagaattaaaaacaaaaatcacatgatcatctcaatagctgcagaaaaagcatacgttcaacaaaatctggcatccctttatgattaaaactctcagcaaaattggcacagaagggatatgcctcaatgtagtaaaagccatctaagacaaacttacagccaacatatactgaaygcggaaaagttgaaagcattccctctgagaactggaacaagacaagaatgcctactctcaccactcctcttcaacatagtactggaagtcctggccagaacaatcagacaagagaaagaaattaagggcatccaaatcaagaaagaggaagtcaaatttcctctgttcactgatgacatgattgtttacctagacagccctaaagacttcttcagaaagctcctagaattgataaaagaattcagcgaagtttccagatacaaaattaatatacattattcagtagctcttctatacacaaacagtgaccaagctgagactcaaatcaagcactcaacc

SEQ ID NO: 259780 - DNA, 575 bp, Homo sapiens
tagctgcaaaaaaattaaaatacttatgaatatacctaaccaaggaggtgaaaaacctctacaggtaaaatgacaaaaccttgctgaaagaaatcctagatgacacagacaaatgcaaacacatctcatgctcatggatgggtagaatcaatattgtgaaaatgaccttactaccaaaagcaatctataaattcaatgcaattcccatcaaaatatcaccttcattcttcggagaattagaaaaagcaatcctaaaatacatatgtgaccaaaaaagagcccacatagctaaagcaaggctaagcaaaaagaacaaatctggattacctgatttcaaactatactataaggccrtagtcaccaaaacagcatggtacttgtataaaaataggcccaaaaatcaatggaacagaatagagaacccagaaataaatccaaatacttagagccaactgatccttaacaaagcaaacaaaaacataaagtgaggaaaggacaccctatttaacaaagggtgctgggataattggcaagccacatgcaggagaatgaaactggatcttcatatctcacct

SEQ ID NO: 259781 - DNA, 545 bp, Homo sapiens
ttggcttaggcaagtatttcatgactaagaacccaaaagcaaatgtaataaaaacaaaaataatagctgggacttaaaggaaagagcttttgcacagcaaaaggaacagtcagcagagtaaaccgacaacccacagagtgggagaaaatctttacaatatatacatctgactaaggactaatatcaagaatctacaacaaactcaaacaaattaggaagaaaaaaacaacctcattaaaaagtgtgctaaagacatgaatacataattctcagaagaagattatacaaatggccaacaaacatatgaaaaaatatgcaacatcactaatgatcagggaaatgcaattcaaaaccacaatgcaataccaccttactcctgcaaaatrtccataataaaaaactaaaaaaaaaaaaataaatgttggtgtggatatgatgaacagggaacacttctatactgctggtgggaatgtaagctagtaaaaccactatggaaaacagtatggagattctgtaaagaacaaaaagtggaactaccatttgat

SEQ ID NO: 259782 - DNA, 570 bp, Homo sapiens
ttattccagaatagctctttggaaatgagttaatctgtgatatagccagttactggctgtcatctgtcaaaccctctgaatttcatgggtaggtattttgttgcatgacttagtgctgttgaaaaatccagattatcatctagctagaaaatataaaggaataggagaggcatacattccttctctccactacagtagaaacttggaaattagaacactccggtagaaacatatatgtagaaggaagaggattgggttatcagtatctctagtgaatacagtcaaaagataatgcatctgtcttgttggctgttggtaaatgagaatgctgggttctgagatttaattatttcttcwttacctataaccattgcttacagttgggtgtcactcataaaaagaaggaagaaactatcactgtgatctcgctcccagtgtgggccctgcaatgccttgtgggcactattattgtctgattcaagaaatggagtcagttgtaagttttcctaacagggttataaaactgaagttaattttcaaggagcaaacattggtcttgtgtgtgacaca

SEQ ID NO: 259783 - DNA, 506 bp, Homo sapiens
agagatcttttaccccccttgttagctgtattcctaggtattttgttcttttcatgtcaattgtgaattgttcctgttttggctcttggctttactttttctttytttttttttttttttttttggtgtataagaatgctagtgatttttgcacatttattttgtatcctgagactttgctgaagttatttatcagctttagaagcttttgtactgaaactatcaattttcctagatatagcatcatgttgtctggaaagagagacagtttgacatcctcccttcatttctttctcttgcctgattgccctgaatagaacttccaatactatgttgactaggaatggttgagagagggcgtccttctcttctgccagttttcaatgggaatgcttccagctttttcccattcagtatgatgttggctgtgggtttgtcatatatggcccttattattttgagatatgttccttcaacacctagtttgttgagagtttttaacatga

SEQ ID NO: 259784 - DNA, 506 bp, Homo sapiens
agagatcttttaccccccttgttagctgtattcctaggtattttgttcttttcatgtcaattgtgaattgttcctgttttggctcttggctttactttttctttttttttttttttttttttttgrtgtataagaatgctagtgatttttgcacatttattttgtatcctgagactttgctgaagttatttatcagctttagaagcttttgtactgaaactatcaattttcctagatatagcatcatgttgtctggaaagagagacagtttgacatcctcccttcatttctttctcttgcctgattgccctgaatagaacttccaatactatgttgactaggaatggttgagagagggcgtccttctcttctgccagttttcaatgggaatgcttccagctttttcccattcagtatgatgttggctgtgggtttgtcatatatggcccttattattttgagatatgttccttcaacacctagtttgttgagagtttttaacatga

SEQ ID NO: 259785 - DNA, 506 bp, Homo sapiens
agagatcttttaccccccttgttagctgtattcctaggtattttgttcttttcatgtcaattgtgaattgttcctgttttggctcttggctttactttttctttttttttttttttttttttttggtgtataagaatgctagtgatttttgcacatttattttgtatcctgagactttgctgaagttatttatcagctttagaagcttttgtactgaaactatcaattttcctagatatagcawcatgttgtctggaaagagagacagtttgacatcctcccttcatttctttctcttgcctgattgccctgaatagaacttccaatactatgttgactaggaatggttgagagagggcgtccttctcttctgccagttttcaatgggaatgcttccagctttttcccattcagtatgatgttggctgtgggtttgtcatatatggcccttattattttgagatatgttccttcaacacctagtttgttgagagtttttaacatga

SEQ ID NO: 259786 - DNA, 506 bp, Homo sapiens
agagatcttttaccccccttgttagctgtattcctaggtattttgttcttttcatgtcaattgtgaattgttcctgttttggctcttggctttactttttctttttttttttttttttttttttggtgtataagaatgctagtgatttttgcacatttattttgtatcctgagactttgctgaagttatttatcagctttagaagcttttgtactgaaactatcaattttcctagatatagcatcatgttgtctggaaagagagacagtttgacatcctcccttcatttctttctcttgcctgattgccctgaatagaacttccaatactatgttgactaggaatggttgagagagggcgtccttctcttctgccagttttcaatgggaatgcttccagctttttcccattcagtatgatgttggctgtgggtttgtcatatatggcccttattattttgrgatatgttccttcaacacctagtttgttgagagtttttaacatga

SEQ ID NO: 259787 - DNA, 609 bp, Homo sapiens
taaattaagtcagatgtaacacgaaagatggctagcttctgcccaaatcccattcacatgcccttcacacagatactaagaccttattcctccctacatacgagatttagataaaacataacaatacatcaaagaaatgtctagattcagactcctcctgattttgtaactttcatgtcagaaactagagccacaggggagatttgggatgagaaacatgatcactaggtagtataaaaaatagaatcagaccagagacatctaaaaaaaaatgaccagacatgagagcctccggagcgaagtaaagtgagcaaagtcatgtgtatttacttttatatccaacttcccaacctgccctttttcctccctccatctttcacctctgtctctgaggacactagagtttccctcctttattcagactasatcttgggcaatgagaccaagggactgaatagacagccgtggtagcaacaagccaaagaaacagaagagaagattcaagagtgtttccaagttcgatgcagtactggtgggaagcccgagatattctgggtaagcactggcttttaaaaataactctgtataagagcctacacacacaacaac

SEQ ID NO: 259788 - DNA, 609 bp, Homo sapiens
taaattaagtcagatgtaacacgaaagatggctagcttctgcccaaatcccattcacatgcccttcacacagatactaagaccttattcctccctacatacgagatttagataaaacataacaatacatcaaagaaatgtctagattcagactcctcctgattttgtaactttcatgtcagaaactagagccacaggggagatttgggatgagaaacatgatcactaggtagtataaaaaatagaatcagaccagagacatctaaaaaaaaatgaccagacatgagagcctccggagcgaagtaaagtgagcaaagtcatgtgtatttacttttatatccaacttcccaacctgccctttttcctccctccatctttcacctctgtctctgaggacactagagtttccctcctttattcagactacatcttgggcaatgagaccaagggactgaatagacagccgtggtagcaacaagccaaagaaacagaagagaagattcaagagtgtttccaagttcgatgcagtactggtgggaagccygagatattctgggtaagcactggcttttaaaaataactctgtataagagcctacacacacaacaac

SEQ ID NO: 259789 - DNA, 606 bp, Homo sapiens
tagcacgttgattactgaagtagttcacagcgctatagataaaaccaaaaggatattaaatcatttaatggctttctatgaattatagaagaaggtccattactgtggtatgttgttacataaaactacatgttccagagaagacatccacagccttctgcagccttcctcagggatttctttatccatttagaattctctcatgtgaaccaggtcaaatattaagtgtctctcggaggagtgacaaattttgtattcttcagaatggtgcaataaaatttagccactcatagacatattgattaatcactggatctgttaaatgtaaaaatcaaatttgtaagatgmaaatttagatgacctagaccttttttgcaaaataaaaaaagaagagcattgaagaattaaacataactgctgaatcagaggaaagtttccaaactaaccttttatatttttaatatctaaaataaaccacatataacaggaattatactttcacatttttgaaataagcattcatacatgagtatattgaatagtattaaatagcaactaaatttatgcaaaggaaatagaaactagctacatattgattatgcatta

SEQ ID NO: 259790 - DNA, 617 bp, Homo sapiens
gcaccttccacagaaggcaataagtgaatcctgtcttgaggaggtgttctcattcttttccttttctggtgagtgaagttgagcattcttttcctctatggacatttgaagacagaaatagcattgaaatttcccaatttcaatggctatatgagaaaaattctaactaaaaaaagagatgggtttatgatattaatggacatgatttaaaggcttaacttttaagtgtattattaaaaatgaacatataactgctgtgatagacatatatattttcttcatagcatctttttccttgtgagggaagtagaatttttctcttctgtctcagcagagcccaacaccagctgccaaccccaggtaagatcaggcatgaacctagrtctaatctcatgaccttgaacaccaagaacagctcaacaataggctgaaaaattaaataaggcaatcagaatcctctctgcagtttttctccttgaattatttggaaataatgtctgtttccaatagaaaatacctagtaagatgtcccacagtgtttaaactaatagtgcattcactgcatggagacaacttgtgccagaactaacatgataggatttacttaatggcacatt

SEQ ID NO: 259791 - DNA, 567 bp, Homo sapiens
ttccaagtacaaataatgttctttatttccccaaagcttttygttaaagttcagtttttctatgagacttataattgatctctatttaatagcaatattggctcgatggtttgtttttactacgtacttctaagcataaaaatatatcaaatgaatacttttacaacaaatatgacttgaaatactcgaaatcaagttcctcatactagtgcatttaggaatgagaatatctaaaaaaatacaggatttagaactcttccaaaaacagtatctagtgtatctctcagtgccctgacgagaactatgtcacctcaatggtgactcttatgtaccataaacatcattacctttggactcatctcctaatgacatggagaaaaaagtattctacaacaataaaatatatttttgtagtctttaaattagtccctatttatttgagctgtctaatggagtctattatcctgaaatgcaccaacataccacagtaattcaaggaaacttgcaaaataagcaaataatacttcaatgcattcaaagatcacttttctttaatttaaaaaatat

SEQ ID NO: 259792 - DNA, 563 bp, Homo sapiens
cctgctgcattaccaatgctgctggtacgtgtgagtgagcatagatccaactgccaccaccctgatgaagcgctttggccagtatcttccactggattcttgtggccagtgaactgggtatacctttgcctctctagtgcagcagtttctaacctcaaggggccagagtatgaaaccagaggcccaatacaagcaccctagggttagagcatgaaagcaggagtgctaagctgaactttggccccccgaagtcttcaagaaatgaagccagttgactgatcccactttataccacaataaaaccctcaaatgcatgagagaagataaaagcaaaaagtctgatccaaacaaccacaacttcaaagtttaaaggaacatcaacccatacggatgagaaagaagaagctcaagaactctgrcaactgaaaaaaccaatgtcttcttgtctccaaataactgcactagctccccagcaatgcttcttaaccaagctgaaatggctgaaatgatagtcttaaaattcagaatatggataggaacaaaaattataaagattcagaaga

SEQ ID NO: 259793 - DNA, 560 bp, Homo sapiens
atctgatagagctgcaaaagccactacaagaatttcataatacagttgcaagtatgaacaacaggacagaccaaactgagaaaagattctgcaagcttgaagactgattctccaaattaactcggacaaaaatggtaaaaaagaaagaacaaaatctatgagaaatatgagattgggtcaagagaccaaatgtatgactctttggcatccctgaaagagagagagagagaaagcaagcaatgtggaaaacatatttgaggatggcattcatgaaaatttcctcaatcttgctaggcaggccaacatttaaattcaggaaatgcagagaacacctgtgagatactacataaggtgaccataatcaagatacatagtcatcagattctctaaggttgacatgaaagaaaaaaatattaaaagcagttatagagaatgggcaggtcatttacaaaktgaaccccatcaggctaacagtggacctttcaccagaaatcctacaagtcagaaaagattaggggcctatattcagcatttttaaagaaactccaaacaggaattac

SEQ ID NO: 259794 - DNA, 563 bp, Homo sapiens
ggtttatagagtaatatctaaattaatatccccaaattaaacaacctaaatacctatgaaccatagaataaattagttattttgtggtgtaatcatataatggaataagataaattaatgagagttaaactacaactacaaccaaaactttaaaaaattttacagatatatcatggagtaaaagaattcagactttaaaaagtattaatgcataatgatatttaaattaagtttgtaaacaagcacactcctttcatagtattgggatggttgttatccctggaatgggaagaaaatgtcttggttcaaaggtggtttcttggtatggtcattgatctgcaaactggattacacattcttaagatgtatactcattcatatgttgcactttaattttaaaaaagtttwtctgaaaaactataatgatgcttgaaataaaaagtaaaaaataaagtctttattttatttcttaatgctttaaataatcatgatttaatactgacaggacaaaactatcagtaatgataaaagtcagatttacaaggtcatttaccaattaaagt

SEQ ID NO: 259795 - DNA, 619 bp, Homo sapiens
aacactatttaaattaggccaattaataaccttacaatgccctttaagtgatcaagtgaaaggaagagtcacatgtctcccactttaaatcataagctaaaaatgattgagcttggtgaggaaggtatgttgatagcctagactggcttctcttaccagtcaagttgtgaatgcaaagtaatagttcttgaataaaattaaaagtgtacaccagtgaacacatgaatggtaataaaataaaacrgccttattactgatatggagaaagtttcagtggtccagatagaagatcaaaccagccacaccattaccttaaaccaaagcctaatccagggcaaagccctaactctcttcaattctgtaaaggctcatgggggtgaagaggctgcagaactaaagaaattacgtctataagaaaaaagtgcaatttgaagcagcaagtgctgatgtataagctgcaaattatccagaagatttagctatgatcattaatgaaggtggctgcactaaacaacaaatattcaatgtagataaaacaagcttctgctggaaagagatgcgatctaggaccttcatagctagagaggagaagtcaatgcctggattcaaagcttcaact

SEQ ID NO: 259796 - DNA, 552 bp, Homo sapiens
tcttgactctgtccagcaccctttataagtttctggggtatgacataaaaattttaaaaccttaaagagaaaaggctacagaaaaagaaaagatactgaaaagataatgtataayaaatattcaacaaagttgttttttcctgttcaagtaaagtcacttaataaagaatcagagattgatttgactttgactcctgttgcctgaaggaaattacttaaacacacacacacacacacacacacacacacacacacacacacacaatctttattctattctctaaactatacctagggagaatgttctgtttatagataacggttccctgaaacaaactgcttctttgtaaaataagtgtatagtatatgataccctgtgcaggtgaacataaaatactaagactcatgtacacggatgagtatgtctttatttatagagaagttgggggatttggttttctttttttttcttttcttttttttttttttttaaacagagtctcactctgtcacccgggttagagtgcagtggcctgacctcaactcagtgca

SEQ ID NO: 259797 - DNA, 552 bp, Homo sapiens
tcttgactctgtccagcaccctttataagtttctggggtatgacataaaaattttaaaaccttaaagagaaaaggctacagaaaaagaaaagatactgaaaagataatgtataacaaatattcaayaaagttgttttttcctgttcaagtaaagtcacttaataaagaatcagagattgatttgactttgactcctgttgcctgaaggaaattacttaaacacacacacacacacacacacacacacacacacacacacacacaatctttattctattctctaaactatacctagggagaatgttctgtttatagataacggttccctgaaacaaactgcttctttgtaaaataagtgtatagtatatgataccctgtgcaggtgaacataaaatactaagactcatgtacacggatgagtatgtctttatttatagagaagttgggggatttggttttctttttttttcttttcttttttttttttttttaaacagagtctcactctgtcacccgggttagagtgcagtggcctgacctcaactcagtgca

SEQ ID NO: 259798 - DNA, 570 bp, Homo sapiens
ataagtgtatagtatatgataccctgtgcaggtgaacataaaatactaagactcatgtacacggatgagtatgtctttatttatagagaagttgggggatttggttttctttttttttcttttcttttttttttttttttaaacagagtctcactctgtcacccgggttagagtgcagtggcctgacctcaactcagtgcaacctctgccccaggggttcaagtgattctcgtgcttcagcctcctgggtagctgggattacaggtacctgccaccacgcctggctaatttttstatttttagtagagataaggtttccccatgttggccaggctggtcttgagctcctgacctcaggcaatctgcccgcctcagcctcccaaagtgctgggattacaggcgtgatccactgtgcccggcctggttttctttttgacacgctttggctttaggaacacagccataaatagtttgtcagtctttttttcgctgaattccaagagaaagttactgaaatagtaacttcacacagtcttcagatccatcctaacaatagcccaatctcaacag

SEQ ID NO: 259799 - DNA, 615 bp, Homo sapiens
gctttagaaacctaaagaactgcggtgagagcacaaagattatagtgaacaaatgaggtggatgggtgctctcctgagctgcagaagaaatggtttggtgttgaacacaaaacaaaagtcaaatttattagagttgttcacagttcacaatggtgatcttcttgctgatcttgtcattccataatatccacaacagtcataccctcatgccctctttcacattgtccaggcccacatggttgccatccaaccattcagccttggcatggcagattaaaaattggaaaccatttttattgggtccagcatttgccatggacaagatgccaggacctctatgcttctggatgaaattttcataaccaaatttctcctcgcatatggatttgccatcagtgccattatggcatgaagttaccaccctggcacataaaccttggaataattttgtgaaagcagaatctcktataaccaaattctttctctacagttcccaaagcacaaaagttttctgctgtctttggaactttgcctacaaacagtttgaagaagacgtggcccaagggctcaccctctgcagctatgccaaacagagtggggttggccatggctagt

SEQ ID NO: 259800 - DNA, 615 bp, Homo sapiens
gctttagaaacctaaagaactgcggtgagagcacaaagattatagtgaacaaatgaggtggatgggtgctctcctgagctgcagaagaaatggtttggtgttgaacacaaaacaaaagtcaaatttattagagttgttcacagttcacaatggtgatcttcttgctgatcttgtcattccataatatccacaacagtcataccctcatgccctctttcacattgtccaggcccacatggttgccatccaaccattcagccttggcatggcagattaaaaattggaaaccatttttattgggtccagcatttgccatggacaagatgccaggacctctatgcttctggatgaaattttcataaccaaatttctcctcgcatatggatttgccatcagtgccattatggcatgaagttaccaccctggcacataaaccttggaataattttgtgaaagcagaatctcgtataaccaaattctttctctacagttcccaaagcacaaaagttttctgctgtctttggaactttgcctacaaacagtttraagaagacgtggcccaagggctcaccctctgcagctatgccaaacagagtggggttggccatggctagt

SEQ ID NO: 259801 - DNA, 546 bp, Homo sapiens
aactatactaacttattttttaaacatatgcagagctgagaggtaccactattcaaatatcattaaaaagctttctaaaggcacacaaacgcatgagttcaggcagtgtaccacaactgtaaatgctggaaagaagctctaatggacaaagcacttgagtacaggcagtagcaagaggctggctgartctgtgacactccagaggcatggctgtaaacatttgacagcactaatagtggctcagaaagggctaaccactggcaacagtggaaaaaaaatagttactccacatttttacaactgacattgctatttctgaaaccttcctcttctttccctttctctatgttgtaataggaattcaggtattgacatgtctcaagtatgattaataagtaattcatgcaagaaatattctatgaatatgaaaaatatttgagggcaaagagtgattacttttgttcccattagtctcataatgacagcctgttctgacataagttagctctggctagtctcaaccaaaatattttcaggtacagttca

SEQ ID NO: 259802 - DNA, 546 bp, Homo sapiens
aactatactaacttattttttaaacatatgcagagctgagaggtaccactattcaaatatcattaaaaagctttctaaaggcacacaaacgcatgagttcaggcagtgtaccacaactgtaaatgctggaaagaagctctaatggacaaagcacttgagtacaggcagtagcaagaggctggctgagtctgtgacactccagaggcatggctgtaaacatttgacagcactaatagtggctcagaaagggctaaccactggcaacagtggaaaaaaaatagttactccacatttttacaactgacattgctatttctgaaaccttcctcttctttccctttctctatgttgtartaggaattcaggtattgacatgtctcaagtatgattaataagtaattcatgcaagaaatattctatgaatatgaaaaatatttgagggcaaagagtgattacttttgttcccattagtctcataatgacagcctgttctgacataagttagctctggctagtctcaaccaaaatattttcaggtacagttca

SEQ ID NO: 259803 - DNA, 599 bp, Homo sapiens
atcttctggcaatacagtgcactgcagaatatcagttgtttaccctcataatcttgtggcctgactggtagcttcagttgctgccccccggcattgcaagagagtatggaaccacacatccttagcctgggaaaagatgaaaaattcaaaattcaaaataaggtttctactgaagatgtatcacttttgcaccactgtaaaattgtaagttgaattatttttcaggattctattacaattatagtcatgrcctgcataactgttttaggcaaagattatgttttagtcaaacattatgccctgcataatgtttaagtcaatgacagaaaattgcacatacaaatgtcattttataagattaaatactgtatttttactgtacctttactatgtttagatatgtatagatacaaaaatatttaccattgtgtgacaattgcctacagtatttagtacagtaacatgctgtacaggtttgtagcccaggagcaataggctatatcatacagcctaggtgtgtagtaggctaaccctgtttaagtatcctctatgatgttcctataatgacacagtcacctacaaatgcattctttagaaca

SEQ ID NO: 259804 - DNA, 650 bp, Homo sapiens
ggggcctttgggaggcaattaggtcatgagggggaagccctcataaatgcgattagtgcccttataaaggagaccagagagcaactaactcaccccttctgcyatgtgaggacaccagaagaagtcagaattctgcaacatggaagggagccctccaccagaacatgaccatgctggcacccttatctaagacttccggattccagaactgtgagaaataaatttctgttttctcaagtagcccagtatgtggtacccagttatgatactatgacacccagccagaactaagacagacccttcttccaaataaaattatatttataggaactggaatgaggacttcaacatattttgtgaagaacacaattcaacccatgacaactgccagaggtatgattgtaaaagatgttgtattacatccctctctttcttaactccccattattatttcataaagtcaactacttaggaaataattaaggctatcttcaacctacttccaatatttctttctcatcttgtctgctggtaatgcctatcaatggccccttgctccagccagtatattcctgatgctttgaattttctgggttttgctgaaactccactctttacctgaaatatttttcccactttcccctggctac

SEQ ID NO: 259805 - DNA, 637 bp, Homo sapiens
ggggcctttgggaggcaattaggtcatgagggggaagccctcataaatgcgattagtgcccttataaaggagaccagagagcaactaactcaccccttctgctatgtgaggacaccagaagaagtcagaattctgcaacatggaagggagccctccaccagaacatgaccatgctggcacccttatctaagacttccggattccagaactgtgagaaataaatttctgttttctcaagtagcccagtatgtggtacccagttatgatactatgacacccagccagaactaagacagacccttcttccaaataaaattatatttataggaactggaatgaggacttcaacatattttgtgaagaacacaattcaacccatgacaactgccagaggtatgattgtaaaagatgttgtaktacatccctctctttcttaactccccattattatttcataaagtcaactacttaggaaataattaaggctatcttcaacctacttccaatatttctttctcatcttgtctgctggtaatgcctatcaatggccccttgctccagccagtatattcctgatgctttgaattttctgggttttgctgaaactccactctttacctgaaatatttttcccact

SEQ ID NO: 259806 - DNA, 549 bp, Homo sapiens
ttgtcttctttttaatactgacaaaatcctacttcaattaaaatagtgtaatttataaaaattaaatattttaggtatttcatggaatatcttaattatataggaaagatatatttcaatgattaaagaaaatttmtcattaaactacaaaattggaaataaaaatgacattttctgaataaagccgaacggggaaatttttaaaataaaagctttgattttagcacagtgttttcacagagttttgtcaaattatcatatggtccattagttgatgagtacaatttatatgtagtagaaacatttgaaaatattagttatagatggaaattttttgcctagttagttgtaatatattactcacctactaggtacaaaatattaaagtatccattgattttacatttgtgtttgattagtgattaatatagttttgtgtagtttatgtaaaactgtaactaaacaaaaattttttggcatgattcatattcttttcaacataccagaaatgtttacagtgatgttttctttctttaaaatgtgtcatac

SEQ ID NO: 259807 - DNA, 552 bp, Homo sapiens
ttttcttcggtacttggtttctaatactattctcaaattttaaaaactagggttctttggaaaagtccattatgtacaaccattggagcattttttttagtgtcaggaagtaagcaagtggtaaaacaaaacaaaacacaaacacaaacaaacaaaagcagaaatttaaaaaaatataatgaggctatgtcaaaggggtatagaaactaactgaaagagctaccaatggccaaagctggaaccatttagcaaaaggcaaaaattaaataaatattagattatactacaaagtataaaattaatatatgagtccatataatatatataacaattgaatacgcaaataaatgaagaatagacaaatctatgcagaagaattctaaataatttagatattccrccttcaaaatggtggagtgtaattcctgactccttaagtgcaggctccacatagttacctccttctaaagagtataatatgggaatggaagaaagaggtaactttacagtggacaaatctgacaaacactacctcaagccaggtagtcaagt

SEQ ID NO: 259808 - DNA, 552 bp, Homo sapiens
ttttcttcggtacttggtttctaatactattctcaaattttaaaaactagggttctttggaaaagtccattatgtacaaccattggagcattttttttagtgtcaggaagtaagcaagtggtaaaacaaaacaaaacacaaacacaaacaaacaaaagcagaaatttaaaaaaatataatgaggctatgtcaaaggggtatagaaactaactgaaagagctaccaatggccaaagctggaaccatttagcaaaaggcaaaaattaaataaatattagattatactacaaagtataaaattaatatatgagtccatataatatatataacaattgaatacgcaaataaatgaagaatagacaaatctatgcagaagaattctaaataatttagatattccgccttcaaaatggtggagtgtaattcctgactccttaagtgcaggctccacatagttacytccttctaaagagtataatatgggaatggaagaaagaggtaactttacagtggacaaatctgacaaacactacctcaagccaggtagtcaagt

SEQ ID NO: 259809 - DNA, 552 bp, Homo sapiens
ttttcttcggtacttggtttctaatactattctcaaattttaaaaactagggttctttggaaaagtccattatgtacaaccattggagcattttttttagtgtcaggaagtaagcaagtggtaaaacaaaacaaaacacaaacacaaacaaacaaaagcagaaatttaaaaaaatataatgaggctatgtcaaaggggtatagaaactaactgaaagagctaccaatggccaaagctggaaccatttagcaaaaggcaaaaattaaataaatattagattatactacaaagtataaaattaatatatgagtccatataatatatataacaattgaatacgcaaataaatgaagaatagacaaatctatgcagaagaattctaaataatttagatattccgccttcaaaatggtggagtgtaattcctgactccttaagtgcaggctccacatagttacctccttctaaagagtataatatgggaatggaagaaagaggtaactttayagtggacaaatctgacaaacactacctcaagccaggtagtcaagt

SEQ ID NO: 259810 - DNA, 603 bp, Homo sapiens
ctagtgttaagtgcctgaggcttttccaggtgcagggtgcaaactgttggtggatctaatattctggggtgtgaaggatgatgccctcttctcacagctccactaggcagtgccccagtgaagactgtgtggtggctccaacccctacatttcccctttgcaccgcccaactagaggttctccatgagagctccactcctgsagcagacttctgcctgggcatccaggtatttccatacatcctctgaaatctagatagaggttcccaaacctcaactcttgccttctgcacacctgcaggcccaacatcatgtggaagctgccaagtcttgggccttgcatcctctaaagccatggcccgagctctactttggcctgttttagtcagggctaaaggtggaatggctgtgacacaggacaccatgtcttgaggctgcatagagcagccgggcctggctcaggaacatttttacctcctaggcctccagacctgtgatgggaggggctgttgtaaatttatctaaaatgccctggagccacattccctattgtctagctgttaacatttggctcctttttacttatgcaaatttctgcagcagg

SEQ ID NO: 259811 - DNA, 603 bp, Homo sapiens
ctagtgttaagtgcctgaggcttttccaggtgcagggtgcaaactgttggtggatctaatattctggggtgtgaaggatgatgccctcttctcacagctccactaggcagtgccccagtgaagactgtgtggtggctccaacccctacatttcccctttgcaccgcccaactagaggttctccatgagagctccactcctgcagcagacttctgcctggrcatccaggtatttccatacatcctctgaaatctagatagaggttcccaaacctcaactcttgccttctgcacacctgcaggcccaacatcatgtggaagctgccaagtcttgggccttgcatcctctaaagccatggcccgagctctactttggcctgttttagtcagggctaaaggtggaatggctgtgacacaggacaccatgtcttgaggctgcatagagcagccgggcctggctcaggaacatttttacctcctaggcctccagacctgtgatgggaggggctgttgtaaatttatctaaaatgccctggagccacattccctattgtctagctgttaacatttggctcctttttacttatgcaaatttctgcagcagg

SEQ ID NO: 259812 - DNA, 605 bp, Homo sapiens
agatttagggtagctcacagtatggggacacaaaatcaccgaataggagagatgctatagaaagtccataatgtacatttgcaactaatgggggtgatagggactacaagataggagtaaagktgtgtccggaattggttccttctggtgggttcttggtctcgctgacttcaagaatgaagccgcagaccctcgcagtgagtgttatagttcttaaagatggtgtgtccggagtttgttccttccgatgttcagatgtgtctggagtttcttcctttcggtgggtttgtggtctcgcttgacttcaggagtgaagccacagaccttcgcagtgagtgttacagctcttaaaggtggtgtgtccagagtttttcattcctcccagtgggctcgtgggctcgctgacttcaggagtgaagctgcagaccttctcagtgagtgttacagttcttgaaagtggcgcatccagagttgttcattcctcccagtgggttcgtggtcttgctggcttcaggagtgaagctgcagaccttcgcggtaagtgttccagctcataaaggtagtgcagacccaaagagtgagcagcagcaagatttattgtgaag

SEQ ID NO: 259813 - DNA, 588 bp, Homo sapiens
ttttgtaagaaaataactggagtttctagatctgtttaatttttagctctgttacataaaaactattttattttagagggtatgaaacatctgaagactcagcttcctcatttgaaagctatggacaatgtctgccttcatagaatgctataggtrttaaaatagaaagtataaaatgagcccttagtgcactaacagacaaatggctagaatatgataaaagctcctctctttcctttgtgtgcatactctatgagtgactggaattggtagtattatagaacatatcaccatagacattttcaactttaactttacaccttttatcataattttataagaattgctatttcatataaaatatatataattggattaattgccttacccaaactgaaaaagccaggcttaaaaaaaaaaaaatatatatatatatatatattgctttccaacttggacccagtagaatggctcccgcaaagaagggtggccagaagaaaaacggccattctgccatcaacgaggtggtgacccgagaatacaccatcaatattcccaagtgtgtccatggagtgggattcaagaagc

SEQ ID NO: 259814 - DNA, 522 bp, Homo sapiens
tttaatgacttcctctaaatttcttggaatatgagactaactgcattgtaaaagtaatccaagcatagacaaagtaatggttttatcattaagattctgtatcatacagtacaaagaaactctgttgttgtgttttgcatttcagaacatcacacagttgaatattggtattatgcagttatgaatagtgcctaaattttctcttaaaaagtctgcttttcattttcaaccagaaaactaaatgtatgagtatcacaactttcattcaaataatgtatgtggtagtcatgattgctgtccatatcagttatgtctgggccttcttccctgccaccttgcaattgggaagctctatggtctaggttgctttggacaatgaaatgttaacagaagtgacttgtatcatttatgaactgagatttttaaamcagcaataatccattacattttttttctctgccacagtgatatagtttagctatgtccccacccaaatttcatcttgaactatagttcccataa

SEQ ID NO: 259815 - DNA, 610 bp, Homo sapiens
tacttttcactcactttatggtatgaaaacacaacaaatttagtcttcttttttcaatttaaagaggtgttcttgttatgttttgttgtatgacctgtcagttttctgtaactttaaaagtccgttacttaaaatattaagctttgtatagaaatagagtcctgataattagaagatgccccagtatcagagtaggtgtgatcagagttgcgtgttggctctggaggcaaatctaagtctcagctttggctccactattcaaaataatatggctgctatcaagccaattcgtctttgtaaaatacacagtaggacctctctcactggttttatgagggaaaaaaagacaatggggacatttgaacatttacatccaaccttatttcattaattatttaaaccattctattgttacctaaaatacagaagataacatagatttattagtagatttattagtatctatttggtattttctagaggtcaattgtccatataaaactgagtggtaagtagcagctgtccaaacagtgctaactgttgtgctctactgcarttactactattggagttgtatcattaacctcataaaatcatcttcttttaaaaa

SEQ ID NO: 259816 - DNA, 646 bp, Homo sapiens
tgagtttgaaatgttctatttgtgttagaagtttgggcaagtttaatttgttgcctttactgagatgtacgaattctgtattttccaccttttctccacagttttaaattggttaactctaaagagcttcatattaattattctcaagtttcatgatttctcattggaagcacagataaattctgcagagtcatttacccacccccatacttctagatagcaataatggatgcctgagtagcattttacagtatacaaagtactttgttgtatgatagctcactaaaggcacagaagtactgtgatgtaggcaatgttatctctattgaacactgaactgtatgacacattaaccaaaaacaaataggtgatggctgagctattcattaggcaggtaattataagcctccttgtgcttttacttggctrctttgtatgtgtctaatggttttctctctccaattagcttgtaaaagcttcaaagatcatgccatataaataatatatgcacaatgctgaataaacaataaatgttcaatgaattacttgagagaatgaatgaacagagaatgactcattagagaagaagcctttacaatttaccccaataacactaaacccagggcttttgaaagttaagaaatgt

SEQ ID NO: 259817 - DNA, 591 bp, Homo sapiens
gccatataaataatatatgcacaatgctgaataaacaataaatgttcaatgaattacttgagagaatgaatgaacagagaatgactcattagagaagaagcctttacaatttaccccaataacactaaacccagggcttttgaaagttaagaaatgtggctccacattgaggctgcatccctgcctatccaatttcgggccttgatcagtttcataatatgaactaggaattgctgatcacagctgacatcttttatctcgrtggggctcctctcctacaacctcaaaatacctgataggccattttcccacctttataaagcccttcttgcctgaactttatgatctttccttcctctgaatttttacttaattgtaattcagttagcactcaatcattccccaaccctttgaaaaaaaaaatttttatattctcatcttggtcaagacaatgagattttgtagactgttgtagacaattttctatttcttttggatcagccagagtatttggcatagtagcagagtcacataataggcacttgtcaaatatttttatagataatggttttactagttcatttgataaat

SEQ ID NO: 259818 - DNA, 554 bp, Homo sapiens
aataggtcatgaatttagttacaggcttgctgagtttgaagtgcctgtgccacatcaacatggagatataccttgggcagttagaaatcggtctcaagtttgggtccttcacattggaggcatgggagtagatggacacacccaaggagcatgcagagtgggaagactggcaggccaaggaccattcacagagtggtcatgtcttttctggccattgagcaggtggttgctggtgaaggaaagctacaaaraaaaaattagatcatcaagcctcaaatcacaagagaacatgttgggtttttttttttttttttgagattgtctgctaaataaagcaatctgtgtgcagctgaacatttccagttttgtcttacaaaaggctcctgatagactagagtcagtagaaactggttccagggtctatgatttaggttggtattcttaagaacttgcctcctctcctcctactgcccccttcactccagtcatctgggaattaacccctcttttcaaaattatagttttccaacattcttatgttctgaagaactttt

SEQ ID NO: 259819 - DNA, 554 bp, Homo sapiens
aataggtcatgaatttagttacaggcttgctgagtttgaagtgcctgtgccacatcaacatggagatataccttgggcagttagaaatcggtctcaagtttgggtccttcacattggaggcatgggagtagatggacacacccaaggagcatgcagagtgggaagactggcaggccaaggaccattcacagagtggtcatgtcttttctggccattgagcaggtggttgctggtgaaggaaagctacaaaaaraaaattagatcatcaagcctcaaatcacaagagaacatgttgggtttttttttttttttttgagattgtctgctaaataaagcaatctgtgtgcagctgaacatttccagttttgtcttacaaaaggctcctgatagactagagtcagtagaaactggttccagggtctatgatttaggttggtattcttaagaacttgcctcctctcctcctactgcccccttcactccagtcatctgggaattaacccctcttttcaaaattatagttttccaacattcttatgttctgaagaactttt

SEQ ID NO: 259820 - DNA, 547 bp, Homo sapiens
tcaatttgaagtacatgtgtgatgtcaaaaaagatgtcaaggaagcacttggatacagaattggagcatggaggtatgcacagcgctagtgtggaagagacaggtactactcactgcttattcctttgctttcctatattttttgatcccctcttcattttggtgggtcacatgactggttctggacaatgggctatgccaacttgggctgaaacgtagaagagggaatttgagttttgcagtgatccctcctgctgctgccacagagaacagcaatgtcccagatggcagakcccttttcaacctgggtccctgactgggttatgtgaagcagagtcaccatttcctctcataacctgtattagtcatataggatgagacacacataaatcttctgtgtcaagccagtaaggtttgggagcaaattattattattattattatttttactgtagcacaacttagcctgtactgactactacagccaaagaaatggattaagacattaccagtaaaaggatactttctaaaatgatgggaatggaca

SEQ ID NO: 259821 - DNA, 601 bp, Homo sapiens
tgggcagaggcatatgtattcaacacatcaagcttttctgacctcactccagactaggttagatgcttctccttggggtttccactgcatccactggatgcctctaagggttggtatatggcaatttaagtgtctgtttccccagataatatctcctccaagacactctccagtgcctacagtggtgtctgccacaaagcgaattctcagtcagtgtttgttcaatgaataaatagtcttccatggcacctgcaagagcacctcccacaaatataaggtgataagggtctggttgttagaaacgtaaggtgataatgattmtattaacatcacatgactaagaaaagtctaaccctcggttcagattcctcacacatcctagtccattgacaagtatttaacggagtgcctgctgtgtaccaaaagttgtgccattggaaaaaaaagaaaatatctatcttagcctctatcctcaaggaactagcaatgcagttgaaaggactagctaatgactatgaaaccattagagaccagtaggaaatactacacagttaattgaaaaactgaatggcagagacaatgagcattacaggagtatgat

SEQ ID NO: 259822 - DNA, 628 bp, Homo sapiens
tgttaaataactgtaagtatttgcatatggtagagagtacttggcaatgtcattttccttctaaggtactaatgctctgaacaagcatcacttggtaccaggctacatgcattgtttgaatcataagactgaaggaaaaagaataaaaagaaaaccatgacttgtcccccagtggttcagaaaaatgcaarcgccaacactcaataaaaatgattaaaatgtgcatgaaattgtactgctttccatttcaccaatctcaaaaagaccatgaacaacattatgtataatcaatggcctacccatctgcaacgcatgaacaagctcgttttaactaagccctactctatggtctttctgtgaagttccatctgcactagtaagacttcactagccagacatcttctttgagtttattcactcagatggagttgcctatggaaagacttacgccttctccaatggtttttaagtccattcattcaaaacatggaagggttatttaatttgtgtggtttagtgactcatggccttcagagagtgagagaaagtgtttatttacatctttcccttgacttgagggaagaaggggatgatggttatctaaaccaaccagcagaaacttgaataa

SEQ ID NO: 259823 - DNA, 557 bp, Homo sapiens
aggtatggctatagtaatgctagacaaagtagactcttggaccagaagttttactacacataaataggaatattttataagtgtacaagtgtcaatttaactgaaagacatggatatcctaattcttttttaatctgagggaaaaaaatagagaactagacaaatccactatcatcattggagattttaacaactccttctctcaagaactgaaagaatggcagacaaaaatacttaaggatgtagaagatgtgaagaacacaattagctaaactgtcctaatcaaatatgtatraaacgatactcaacaactgcagaatccacattcctctcaagggcatataaaacatttccaaaataaagcatgcatttggtcataaagcaaaacaatgaatctcaagggattgaatcatacagattatgcactctgcccccagcggaattgatttagaaataaaaagcagaaagataactagaaaaatccaccaactttttgaaaattgagtaatatacctctaaataagaaaataggaaaaaaaatgaaattacaaaatgtt

SEQ ID NO: 259824 - DNA, 542 bp, Homo sapiens
acatatcaggaattaatgaggggcatcaccacacggaaacagataatgagagaatattatgaacaaatttatagcaataaatctgtcaaactagatgaaagggatacattcacaaaaaaaacacaaattaccaaaatgtatgaaaaacaatgaaaatttgtatctataatttaaaacctttccacaaaagcccagaaggctttacaaatgaatgcctcccaacatttaaggaagaaacaacaccaagcttaaacatactcccttatggaataaaaaaaaaagtaaaaatactttccaatttatgttatgaggctaggataatcctgayactgaaacctaagaaggatattacaagaaaataaattacacatcattattcctcataaacaaagatacaaaaattctaaccaaaatattagtaaatgaaatgcagcaatatataaagagatgacacaacatgatcaagaggtatttattccagtgatgcaagataggtttaacaaccaaaagtcaatcaacatggcataagtaagacaaaatct

SEQ ID NO: 259825 - DNA, 584 bp, Homo sapiens
tataatttaaaacctttccacaaaagcccagaaggctttacaaatgaatgcctcccaacatttaaggaagaaacaacaccaagcttaaacatactcccttatggaataaaaaaaaaagtaaaaatactttccaatttatgttatgaggctaggataatcctgacactgaaacctaagaaggatattacaagaaaataaattacacatcattattcctcataarcaaagatacaaaaattctaaccaaaatattagtaaatgaaatgcagcaatatataaagagatgacacaacatgatcaagaggtatttattccagtgatgcaagataggtttaacaaccaaaagtcaatcaacatggcataagtaagacaaaatctgtgagttttggtgtatcaaaattaagtaacttactcttcaaagatgccattaaacaaagcaaaagataaccccacacactgggaaaaatatttatgaactacgtatatgataaaggacttccaacccaatttttagaatgggcaaaagttgtgaataaagactttacaacaggagatacaccaatggaaaataagccatgaaaata

SEQ ID NO: 259826 - DNA, 547 bp, Homo sapiens
aaacactacataaatgttcgtagcagcattattcataacagccaaaagagcagaaacatataaatgttcaccaactgacaaataaaacgtggtgtatccatacaatggaatattagtagacaataaaaagaaakaaatactggtacatattcatgaacacagatgtaccttgaaaacatgccaagtgaaatgagtcagtcacagaagatcatgcactgtataattctatttatattaaatgtccagaattggaaaatctataggatctataggaacagaaagtagattagggttgcctcggatggggggcgggggagggagtggagttgagaggaaagggagagtgattgtgaatgggcatggggtttccttttggatgatgaaaatagcttaaaatttattgtagtgatggctgcaccacttcatatatatactaaacaccattgtattgtacgttttaaatgggtaaactctttggtatgcgaattacatctcaataaagttgtaattttttttaaaaaccctgtttttttgatgtcattaaaat

SEQ ID NO: 259827 - DNA, 547 bp, Homo sapiens
aaacactacataaatgttcgtagcagcattattcataacagccaaaagagcagaaacatataaatgttcaccaactgacaaataaaacgtggtgtatccatacaatggaatattagtagacaataaaaagaaagaaatactggtacatattcatgaacacagatgtaccttgaaaacatgccaagtgaaatgagtcagtcacagaagatcatgcactgtataattctatttatattaaatgtccagaattggaaaatctataggatctataggaacagaaagtagattagggttgcctcggatggggrgcgggggagggagtggagttgagaggaaagggagagtgattgtgaatgggcatggggtttccttttggatgatgaaaatagcttaaaatttattgtagtgatggctgcaccacttcatatatatactaaacaccattgtattgtacgttttaaatgggtaaactctttggtatgcgaattacatctcaataaagttgtaattttttttaaaaaccctgtttttttgatgtcattaaaat

SEQ ID NO: 259828 - DNA, 547 bp, Homo sapiens
aaacactacataaatgttcgtagcagcattattcataacagccaaaagagcagaaacatataaatgttcaccaactgacaaataaaacgtggtgtatccatacaatggaatattagtagacaataaaaagaaagaaatactggtacatattcatgaacacagatgtaccttgaaaacatgccaagtgaaatgagtcagtcacagaagatcatgcactgtataattctatttatattaaatgtccagaattggaaaatctataggatctataggaacagaaagtagattagggttgcctcggatggggggcgggggagggagtggagttgagaggaaagggagagtgattgtgaatgggcatggggtttccttttggatgatgaaaatagcttaaaatttattgtagtgatggctgcaccacttcatatatatactaaacaccattgtattgtacgttttaaatgggtaaactctttggtatgcgaattacatctcaataaagttgtaatttttttwaaaaaccctgtttttttgatgtcattaaaat

SEQ ID NO: 259829 - DNA, 565 bp, Homo sapiens
ttgctatatctttctattttatcctattcatttatttctgtaggatccttaattattccctctttcttctttctttccaattatcaccaactctccaatggaagctccccatgtcaagtcacccttctccaccagatgcaatgtcttcttgagacagccatgtcatgtcccacaaacatcccagttatttccttccagtgccccagtagctggcacactggtctacaaagtcttagacctcctcctaaggcctccaatgtcagtggtactttccctctattgagtgaatattttctgtttccatcaactcccgctgyttcccctctcctcttttctcagtttcctctgctacacttgggtgtttctctatttagaggtaatacacagtttgtagcgtccttggtctctaggttatgttgtgattttatttgctctttttgttgatctgtattttttctctggaaaacctggatacatttggattagacatcctaagtaccatttttactacccccaatatgctaactatcatggcagagataagtataaattacagtctttgaat

SEQ ID NO: 259830 - DNA, 489 bp, Homo sapiens
tggtgaaggcgaatcaagtttcaaaacctgttctctaaggaaacccaaggcaagtagaatgtataataaacacacacacaaacacacacacacacacacacacaaacacacacacaaaccaggaaagattcccaagcactaggagaccacagagagttagaaagggtaagcttacaatttggtaaggccctgagaacaaagctccttcccctcccaggccattaaagatccctaatgggtttaagaaataaraaaagacaaaatctgtctacagagggctccatcttttctatcaattaaaattgaagagtcctttgctcatgcaatgagcttggtataaagtaacatatttcccattttctaaactagcccctccacaaagagtttgtggtatccattttaactttgctgttgtttagatacaaaaaccaatcttggaaacaaaatcagtttttgtaacatttattcatctgtccctaattccccata

SEQ ID NO: 259831 - DNA, 646 bp, Homo sapiens
ttccccataagaaaattcattactctctcctctagagtactcccataaatgtcacatatcaagttgtacattacttattcttaaagtatctatttccttgatcaggttgcaagcatcttgagagcacacagcaaatctttttatctttgtatcatcagctatggtacagtgtctgacacacaggagttccttagtgaactagactgaaattacttactgtacatttcaaaatagctagaaaagaataattcgaatgttcctagcatgcacaaaagataaatatttaaggtggtagataygccaattaccctgatttctttgatctttacatattatgtgaatgtatcatattatcagaggtaccctgaaaacatgtatatttattatgtatcaataaaagctaaaaaattaaaaataaaaaaataaaactaagtagtgatcatcagctctttaggattgggaaactcacattcacctttttcatgttaaaaagacaattactttttgctaaggacagaaacatagaaagaaatggcctggaagcagtttcaaaaactataaaaacttaaaaaaaccaaactgttataattttaattattcaatccttgcaataatatccctttaattagtgattttaaacatcctt

SEQ ID NO: 259832 - DNA, 653 bp, Homo sapiens
agatatggatgtatgcacatatgtaagtgtgtgtgagagtgtgtgtgtgtaagtatgtgtctgtgtggtattttattcccccccagctgtttcctaagagggcctagaagcaatgacatttcactaccaatgtgcacactgagtaacctgatctggtattgaaatgccatcctccaggaataaatagctaattctaggctgagttaataaatatacaaaatgataagatgagcctagagcatcctgttgtgccagaaagtaagaaaacactcaaagattgggtgggatggagatatgttaaaagaacacaaatcagcttgaagaggtacctctggccaaatctaggacagtttaggcatcacacacacacaaacacaaaactaatgagagtacataattataccctgttgaataaataggaatccacgagtccatataattaaataaatgatgagatggaagggaaaattatttctcacaatagaatgctaatctgcaaatgtaaaaagaatgatagaactaggtaatcaccatttggcaattasaatagtggtagttaattcaagaaagagtcatcaatgaatgccaagtctgataagtgaaggtttggcataatacggcagtatctccccacaaaatgttactcaaacaca

SEQ ID NO: 259833 - DNA, 612 bp, Homo sapiens
gatggggaaatttgagtgaggtcagcagaatggaaaacagtataccagggttgatgtcctgaacagagggctgtacagtggaatataagagagtgtccttgtttctgggtgggaaacagtagagtattcacamacacacgcacatgaacacatacacacacatgcacatgcacacacacacatgcacacacacacacatgcaaagtggtgggatggggaaatatataaaatgttaacaattagggaaactgagtgataggaaggcagaagtattttcaacctttctgtagatttgaagcagtttcaacatttttaaaatcatatacaatttttttaatggaaatgccaaaacacatgaagaaatttaatggtatgaaagacagcaagttctgttctaaacaatcagaacttgaaatcaccaaaaataaagttaattttgtgtgacactgcaaaaataaaaatatttagagtgctcttttagttataaaatgaaaatagtttttaatacaaagataaatcataaagcaaagacaggcataagttatattaaaagaaaacatataaaagaacaaaatcaaaaccacagcaattgtattagttttatattgctac

SEQ ID NO: 259834 - DNA, 612 bp, Homo sapiens
gatggggaaatttgagtgaggtcagcagaatggaaaacagtataccagggttgatgtcctgaacagagggctgtacagtggaatataagagagtgtccttgtttctgggtgggaaacagtagagtattcacacacacacgcacatgaacacatacacacacatgcacatgcacacacacacatgcacacacacacacatgcaaagtggtgggatggggaaatatataaaatgttaacaattagggaaactgagtgataggaaggcagaagtaytttcaacctttctgtagatttgaagcagtttcaacatttttaaaatcatatacaatttttttaatggaaatgccaaaacacatgaagaaatttaatggtatgaaagacagcaagttctgttctaaacaatcagaacttgaaatcaccaaaaataaagttaattttgtgtgacactgcaaaaataaaaatatttagagtgctcttttagttataaaatgaaaatagtttttaatacaaagataaatcataaagcaaagacaggcataagttatattaaaagaaaacatataaaagaacaaaatcaaaaccacagcaattgtattagttttatattgctac

SEQ ID NO: 259835 - DNA, 612 bp, Homo sapiens
gatggggaaatttgagtgaggtcagcagaatggaaaacagtataccagggttgatgtcctgaacagagggctgtacagtggaatataagagagtgtccttgtttctgggtgggaaacagtagagtattcacacacacacgcacatgaacacatacacacacatgcacatgcacacacacacatgcacacacacacacatgcaaagtggtgggatggggaaatatataaaatgttaacaattagggaaactgagtgataggaaggcagaagtattttcaacctttctgtagatttgaagcagtttcaacatttttaaaatcatatacaatttttttaatggaaatgccaaaacacatgaagaaatttaatggtatgaaagacagcaagttctgttctaaacaatcagaacttgaaatcaccaaaaataaarttaattttgtgtgacactgcaaaaataaaaatatttagagtgctcttttagttataaaatgaaaatagtttttaatacaaagataaatcataaagcaaagacaggcataagttatattaaaagaaaacatataaaagaacaaaatcaaaaccacagcaattgtattagttttatattgctac

SEQ ID NO: 259836 - DNA, 581 bp, Homo sapiens
cctgtgtacatttttctgccacacactgacacatgccaggacaaaattgtttatcttagattataaggatttgagtctctctttatttagactgtgctgtgagcatcacaggttttcaaaacacagagtttaagaatgttatcaagttctaggtggaccagtaaaccagagataaaccttctgcctgcattgggaggccatrggagggcattgttattgccattttttgtttttgttgaatcttaacccctaggttccttaaccccagacttcaaaacaccatgaaataagatgttattaaagattaaagaaaatataaatactttgcatttaagaccagcatatataacccagaatccaaacaatgctgggaaaattgtgacagaaacaaataggtagacagggagcccaattcctttcttcccatgctgaatctactcacctataaaaccccacagattcaataattacccgtgaagcatccttctttgttctcctaactccataaaaactctgtgaaaattccttaagagcatggccagttcttggatatcattgtgcaccttgactgggccaaccat

SEQ ID NO: 259837 - DNA, 623 bp, Homo sapiens
gattagacaaacaaattctaatgtacctagctaggtatgcagcaattcataggtaattaactaatagtaataattactagtcacacttgttgcctacctggatattggtaagccttaccttacagatcctcaaatggctgttattacccaggcccctactctccatcacactcccctcttcaacattttccagaattctcagtagagagtggtgcccttcaccatttaaatcctttactatcagaactccacacatagatgctaataagaaaatagattcaatcaaacatgaaaattagaatttaccacctgagttgttcrgactgagagagggctttgtgaattggcatcatcagtgaaagctcagtggaagtataattggaactggattttgactaatagatataatttggataactgggaccacaggagtagggaaagcaacatttttggccactttaaataagtgtgagtcttgtgggtgactttaaagagataggtctaaaagaagaagaaagtggataataggaaattaacgacaggcaagagttaaattgatgtagtatctggaatcctattttttctgttcaagaaataagcataatttaagttacgtttttcag

SEQ ID NO: 259838 - DNA, 623 bp, Homo sapiens
gattagacaaacaaattctaatgtacctagctaggtatgcagcaattcataggtaattaactaatagtaataattactagtcacacttgttgcctacctggatattggtaagccttaccttacagatcctcaaatggctgttattacccaggcccctactctccatcacactcccctcttcaacattttccagaattctcagtagagagtggtgcccttcaccatttaaatcctttactatcagaactccacacatagatgctaataagaaaatagattcaatcaaacatgaaaattagaatttaccacctgagttgttcagactgagagagggctttgtgaattggcatcatcagtgaaagctcagtggaagtataattggaactggattttgactaatagatataatttkgataactgggaccacaggagtagggaaagcaacatttttggccactttaaataagtgtgagtcttgtgggtgactttaaagagataggtctaaaagaagaagaaagtggataataggaaattaacgacaggcaagagttaaattgatgtagtatctggaatcctattttttctgttcaagaaataagcataatttaagttacgtttttcag

SEQ ID NO: 259839 - DNA, 552 bp, Homo sapiens
atactacatggtatgctttttaaaataaccatctgaaagaactcaaaattaaaatatgcattgctacaaagctgcagtctaagactaaggcaatcgtgcctaactgccacgaagttcagagcyttactcaacattgtgatttttccagaagtaatgagctgttcgctaacataacactaggacacaaatcagcagccagccctcatgcaggcaagtggaacacggccatgagtttcttccaagtcaaggcattgaaaaatcgtttgtgcattagttacttaggattctgtttttagctatggcatgtttaattacaagaggctcataattaaaatatgcccagaaaggcaaaatcaaaagcgagcatcatgtcccttgctgcaaaacacctaagttcaacaatgatagccttttttattcatgcaggaaacattttcacactttcacagatctccacatctaggtcaatgtctaaccttttctagtaggtggacctcttctttttaacgtcaaaaaattctactgatttccacatcacagcaaagagttgtg

SEQ ID NO: 259840 - DNA, 607 bp, Homo sapiens
ctatccgatgtttttaaagtcaacaatgacacctacaattttttcagaagtatctgtgtatattgttacagtgtcagaagaattttcttcataatttttttcacttaaatttgcatgaaaaagagtttctaaccctcaactctcagcaggtagatgaagaaaacacacacacacaaatacacacaacacacacacacacacacacacacttcccagggatagaaaataaaacaattccagggaatctaccagattagatcaactaccctcagaaaacagagaactggccacattacttttcaaaagaagactcctattattaatggcactaaggtttaaaaacagcagtctrtcaaagtgaagcctcaagacagaaactttataaacagcttttaacccacaaagacacgagctttcactcaccactgagtaagacttcttgatttggttagtaacaccctaagtggctttcaggaagccttcaccaactgctgagtagacagtcaagagcacaaaaaggcttccctggagattacctcctcctagttactcgagaaactcagattgccctgacactgccagacaaataactgtatccctttgacat

SEQ ID NO: 259841 - DNA, 495 bp, Homo sapiens
gggagaaacatttgcaaattatgcatctgacagaaatctaatatccagaatctacaaagaacttaaatcaacaagcaaaaaagaaataatgcaatttaaaaaatgggyaaaggacatgaacagacacttcccaaaatatcatgagaaaaattgctgaacatcactaattatcagagaaatgcaaatcaaaaccacaatgagatatcatctcacaccagtcaggatggtgattattaaaaagtcaaaaaataacaaatgctggcactactgcagagaaaaggaaatgcttacacactattggtagaaatgaaaactagttcagccgctgtagaaagcagtttggagttttctcaaagaacttaaagcggaactactatttgacccagcaatcctattactgggtacacatatccaaaagaaaacaaataattctaccaaaaatgacataggcattcacatgtttgtcgcagcactactcacaatagcaaagacaca

SEQ ID NO: 259842 - DNA, 495 bp, Homo sapiens
gggagaaacatttgcaaattatgcatctgacagaaatctaatatccagaatctacaaagaacttaaatcaacaagcaaaaaagaaataatgcaatttaaaaaatgggtaaaggacatgaacagacacttcccaaaatatcatgagaaaaattgmtgaacatcactaattatcagagaaatgcaaatcaaaaccacaatgagatatcatctcacaccagtcaggatggtgattattaaaaagtcaaaaaataacaaatgctggcactactgcagagaaaaggaaatgcttacacactattggtagaaatgaaaactagttcagccgctgtagaaagcagtttggagttttctcaaagaacttaaagcggaactactatttgacccagcaatcctattactgggtacacatatccaaaagaaaacaaataattctaccaaaaatgacataggcattcacatgtttgtcgcagcactactcacaatagcaaagacaca

SEQ ID NO: 259843 - DNA, 495 bp, Homo sapiens
gggagaaacatttgcaaattatgcatctgacagaaatctaatatccagaatctacaaagaacttaaatcaacaagcaaaaaagaaataatgcaatttaaaaaatgggtaaaggacatgaacagacacttcccaaaatatcatgagaaaaattgctgamcatcactaattatcagagaaatgcaaatcaaaaccacaatgagatatcatctcacaccagtcaggatggtgattattaaaaagtcaaaaaataacaaatgctggcactactgcagagaaaaggaaatgcttacacactattggtagaaatgaaaactagttcagccgctgtagaaagcagtttggagttttctcaaagaacttaaagcggaactactatttgacccagcaatcctattactgggtacacatatccaaaagaaaacaaataattctaccaaaaatgacataggcattcacatgtttgtcgcagcactactcacaatagcaaagacaca

SEQ ID NO: 259844 - DNA, 538 bp, Homo sapiens
ccttgcatccacgtcaacatctattgcttttttggtgtttaataatgaccattcttgcaggagtaatgtggtatctcgttgtggttttaatttgcatgtccctgatgattagtgatgtggagcatttttcatatgtttgttgacattcctttgagaagtatctgttcatgtcattggcccactttttgatgggattatttgtttttttcttactgatttgagtcccttgtagattctggatagtcctttgtcagatgtgtagtttgctgayattttctcctattctgtgggttgtctgtttactctgatgataattttttgttgtgcaaaagatttttagtttaattaggttccatttatttttgtttttgttgtatttgtttttggagttttagtcatgaattctttgcctaggccaatgtccacaagagattttccaaggttatcctctagaattgttatggtttcaggtcttagatttaagtctttgattcatcttgagttgatttttgtagaaggtgagagatgtagatccagt

SEQ ID NO: 259845 - DNA, 407 bp, Homo sapiens
gcaggctgtacaggaagcatagcagtttctgcttctggggtagtctcaggaaacttacaatcatggtgaaaagtgaagggaaagcaggcatgccctacatggctggagcaggagcaagagakaaattggggaagtggtacacacttttaaaccaccagatttcataagaactcactattgcaatgacagcaccaaggaagatggtgttaaaccatgacaaactgcccctgtgatccaatcacctccctccagcccctatctcaaaccttggggatcacaattcaacatgagatttgggtggggacacatatccaatatgtcaacatactactggcagaaagcattaataataccacctctgccctagatgtgtagagattagtctaaactcattggcagagttagtg

SEQ ID NO: 259846 - DNA, 407 bp, Homo sapiens
gcaggctgtacaggaagcatagcagtttctgcttctggggtagtctcaggaaacttacaatcatggtgaaaagtgaagggaaagcaggcatgccctacatggctggagcaggagcaagagataaattggggaagtggtacacacttttaaaccaccagatttcataagaactcactattgcaatgacagcaccaaggaagatggygttaaaccatgacaaactgcccctgtgatccaatcacctccctccagcccctatctcaaaccttggggatcacaattcaacatgagatttgggtggggacacatatccaatatgtcaacatactactggcagaaagcattaataataccacctctgccctagatgtgtagagattagtctaaactcattggcagagttagtg

SEQ ID NO: 259847 - DNA, 407 bp, Homo sapiens
gcaggctgtacaggaagcatagcagtttctgcttctggggtagtctcaggaaacttacaatcatggtgaaaagtgaagggaaagcaggcatgccctacatggctggagcaggagcaagagataaattggggaagtggtacacacttttaaaccaccagatttcataagaactcactattgcaatgacagcaccaaggaagatggtgttaaaccatgacaaactgcccctgtgatccaatcacctccctccagcccctatctcaaaccttggggatcacaattcaacatgagatttgggtggggacacatatccaatatgtcaacataytactggcagaaagcattaataataccacctctgccctagatgtgtagagattagtctaaactcattggcagagttagtg

SEQ ID NO: 259848 - DNA, 569 bp, Homo sapiens
attacatgaagattaggtttttagggcctagaaaggtaataaatcagatttcatttgtgactagagtctaatttacagtttatatgcttttacattactacttggcatattaagaggaggataatgcagacaagraggtaaaccatacacattgctaaacatttaaatatttgccttgcagaatctactaaactactaagcttgggggacataagcaataaatatgcaggtttttaaagaaaaaatgctgttgctgggagatgtgtttctatagtgttttggacgtgtttagaaaatactgttactcagttatttctacaactgaagtgtaacttgatgctctttgtctcacaaaaggaaaaatgcagtactaattttaatgtttccattttaggcaagtgtattttcaatgtaggcacccttagaatatttctgatgacaagttgtatctcttttttattttcatttttcaatgtttatttttagattcaggagtacatgtacaggtttgttacctaggtatgttacgtgatgctgaggtttggggtacaaatgatcccattgcccag

SEQ ID NO: 259849 - DNA, 569 bp, Homo sapiens
attacatgaagattaggtttttagggcctagaaaggtaataaatcagatttcatttgtgactagagtctaatttacagtttatatgcttttacattactacttggcatattaagaggaggataatgcagacaaggaggtaaaccatacacattgctaaacatttaaatatttgccttgcagaatctactaaactactaagcttgggggacataagcaataaatatgcaggtttttaaagaaaaaatgctgttgctgggagatgtgtttctatagtgttttggacgtgtttagaaaatactgttactcagttatttctacaactgaagtgtaacttgatgctctttgtctyacaaaaggaaaaatgcagtactaattttaatgtttccattttaggcaagtgtattttcaatgtaggcacccttagaatatttctgatgacaagttgtatctcttttttattttcatttttcaatgtttatttttagattcaggagtacatgtacaggtttgttacctaggtatgttacgtgatgctgaggtttggggtacaaatgatcccattgcccag

SEQ ID NO: 259850 - DNA, 569 bp, Homo sapiens
attacatgaagattaggtttttagggcctagaaaggtaataaatcagatttcatttgtgactagagtctaatttacagtttatatgcttttacattactacttggcatattaagaggaggataatgcagacaaggaggtaaaccatacacattgctaaacatttaaatatttgccttgcagaatctactaaactactaagcttgggggacataagcaataaatatgcaggtttttaaagaaaaaatgctgttgctgggagatgtgtttctatagtgttttggacgtgtttagaaaatactgttactcagttatttctacaactgaagtgtaacttgatgctctttgtctcacaaaaggaaaaatgcagtactaattttaatgtttccattttaggcaagtgtattttcaatgtaggcacccttagaatatttctgatgacaarttgtatctcttttttattttcatttttcaatgtttatttttagattcaggagtacatgtacaggtttgttacctaggtatgttacgtgatgctgaggtttggggtacaaatgatcccattgcccag

SEQ ID NO: 259851 - DNA, 608 bp, Homo sapiens
tttcttactaccaagtaagaagtttcattagcttaattcatatcaccaatacacagtgtttctaccactatggaaaagaaagccaacacacacagagtacattcatccccaaatcttaaatgttgagctcaaagggagacattatgcaaacttgtcatgccatatagttatttctagcaaatcaaatcaacaagtatttagagatggtcttccaagtamattaaaagttaaatggcaattccagagccagatatcaagtgtcaaagcaagacaacaagcttcaaggcaatgccccattctcaaatgaatgtccaaaagaaaaaaaaaaaaaaagaaagaaggaaaccaattatgaatccagtggaaaactagattatggttgcagtgaactgagagggtatctaggaaaggaattcaagctggattttggagggagacaagattgagtagtttggggtggagtaaagcaaaatgatttatctctggaagtattctatcagaaacatattaaatacactgtcacaagtatgttgcacctgcatgcagtcatcatctctagctatatgtagggactcttctttgagagagaaaatgcagttaatttgtga

SEQ ID NO: 259852 - DNA, 532 bp, Homo sapiens
agttatttctagcaaatcaaatcaacaagtatttagagatggtcttccaagtaaattaaaagttaaatggcaattccagagccagatatcaagtgtcaaagcaagacaacaagcttcaaggcaatgccccattctcaaatgaatgtccaaaagaaaaaaaaaaaaaaagaaagaaggaaaccaaytatgaatccagtggaaaactagattatggttgcagtgaactgagagggtatctaggaaaggaattcaagctggattttggagggagacaagattgagtagtttggggtggagtaaagcaaaatgatttatctctggaagtattctatcagaaacatattaaatacactgtcacaagtatgttgcacctgcatgcagtcatcatctctagctatatgtagggactcttctttgagagagaaaatgcagttaatttgtgatctgcatgagaggcagtgagcaaaaaagaaagtgctcctcaaaagcatttgattccctggagcctggacttttttgatatttgaatcaa

SEQ ID NO: 259853 - DNA, 578 bp, Homo sapiens
agctgcttgtattgaaatgagtggctgttacaataacacaaatgcatgtgtggtttccgaacagttaataattgtttaataagcaattcctggtaaacctccctgaatcattgtaagttggatagggatgtattattctgtcccccattattagggacagaataagaaatagctrgtaatgaggaaaacactttaaatataagggggacgttaatggggtaaactgccaattaccatcaggagaaattttcaaagctgacagaaatgtaccatgtgggaaagaaagtgagaatagcagagacaatataatcccgtggatccttggagaattcacttccttttatttccaaatatatttttgcaatatgtgtacagtgaaggcaaagaggaaagctacactgtagagagggagccagcatattttggccaaagacctgaattcctttataacatgagcaataaagatagcttctcttgatttcagaaatgtacacagcaggaataaaaagtgtgtgcttctccccaagttggccctcctgagaggataacaaaatattcaacaatttgaaatgcttgta

SEQ ID NO: 259854 - DNA, 600 bp, Homo sapiens
actcctacttctaccatgggcagagctatgagcaaggtgtgtcagagaaatagagatgacagagcaccagtaccttaatgattttactatatacttttaagttacccctaagctcccttttagaaacaaggaagatatacactatgaatagaagtgttttactctcccctactacctctttccctctggaggaagagttttagtattagagttctgtttacagagcctgcttaagagtccaggaagggctgggtttggtggctcatgcctgtaatcccagcactttgggaggccaaggcgggcggatcatgaggtcaggagatygagaccatcctggccaacatggtgaaaccctgtctctacgaaaatgcaaaaaattagccaggtgtggtggcacgtgcctgtagtcccagctacttgggaggctgaggcaggggaatcgtttgaacccaggaggcagaggttgtagtgagctgagatcatgccattgcactccagtctggtgatagagtgagactccatctgaaaaaaaaaaaaaaaaaaaagagtacaggaaaccttttggctgtaagaggttggtactactctcttgcatcaatt

SEQ ID NO: 259855 - DNA, 545 bp, Homo sapiens
atgttgtacatgataaaaacatgcaatattatctgttaattaaaaaaaagaaaaaacaaaatagaggaatgacaacattcaacagaggaagatcacattatgctcaaattgttccctaatatatgaatttcacatttcagagcaaacatccaggcagaactgactgtacgctgttgcaaacttacgctgagtagcgtgattttccatgcatgctcatcttcttcattatattagacactgtgaagactgtgtttgcttttgctcatgtttgtaacctcatcatccagcacactgcctggcatttgaaaaatgaatgaatgagtctttttgtccattctcatcttgttttctcaggacccttatacctgccgtataccttgtgagcaaaagggttaaaggctgaytatggcttagtgtgttattctacctagctagcaaaatcttgggatggtttcttcatgaattatctatgtggttctcatatcaggcagaattgagctgggaaacagagtacatgccacgtggttctcgttgaaccaaaggga

SEQ ID NO: 259856 - DNA, 453 bp, Homo sapiens
atgtagtgactcactgcttttctcagtgtgcttctagaccagaacagttaataatctttttgccttcaccttgagaagacaacaatacagctgcacaggcgtgctcagaggttccctgaagccccctcttattcttccaagcttttcagtgaagacttaaagatctcaatttcccttgccattcagttatgatacaatatgtggatgatctttgytcatctttgttgagtaaacaaggaaggcttcacaaagaattcagttttcttgcccccagccttagaaaaaaaagggccatacgttttttccaaaacacagtccattatttatggcatgacctgtccaaggagggaaaaacatcctctcctaatagactaaaaaatatcctaacttatcccagaccctttacaaaatgacaatcaaatttctcagtttaagtggatattgcagttaatg

SEQ ID NO: 259857 - DNA, 453 bp, Homo sapiens
atgtagtgactcactgcttttctcagtgtgcttctagaccagaacagttaataatctttttgccttcaccttgagaagacaacaatacagctgcacaggcgtgctcagaggttccctgaagccccctcttattcttccaagcttttcagtgaagacttaaagatctcaatttcccttgccattcagttatgatacaatatgtggatgatctttgctcatctttgttgagtaaacaaggaaggcttcacaaagaattcagttttcttgcccccagccttagaaaaaaaagggccatacgttttttccaaaacacagtccattatttatggcatgacctgtccaaggagggaaaaacatcctctcctaatagactraaaaatatcctaacttatcccagaccctttacaaaatgacaatcaaatttctcagtttaagtggatattgcagttaatg

SEQ ID NO: 259858 - DNA, 565 bp, Homo sapiens
tacaatagtagtgggggcttcaacactcccatgacaggttaggaagatcattgaggcagaaaactaacaaagaaactctggacttaaactcaacacttaaccagttggacctaatagacatctacagaatattccaccaacaaccacaaaatatacattcttctcatctgcaaacagaacatattctaagatcaactacatgttcagccatgacacaagtctccataaattaaaaaaaatctaaattatacaaccacaatgcaatgaaaataaaagtcaataccragataatctctcaaaactatacaaaacatggaaggtaaacaacttgcttctgaataactcttgggtgaacaataaaattaaggcagaaatcgaaaacatctttgaaataagtgaaaatagagacacaacttacctaaatctttgggatacaggtaaagcagtgttaagaggaaagtttatagtattaaatattttcatcaaggggttagaaacatctcaaattaatgatgtaacatcacacatagtggaactagaaaaaaagaacaatacaatcccaagg

SEQ ID NO: 259859 - DNA, 457 bp, Homo sapiens
tctaagtaagaaggtgaaagatttstgcaaggggaattacaaaacactgccaaaaaaaaaaaaatcagagatgacacaaaaaatgggaacatattccatgctcatagattggaagaatcaatattgttgaaatgacaatactgcacaaacaatttacagaatcaatgctatccctattaaaataccaacatcatttttaacagaatagaaaaatatattctaaaattcattccgccccaaaaaagagcccaaatagccaaagcaatcctaaccaaaaagaacaaagccagaggtatcacattgcctgtctccaaactatactgtaaggaaatagtaaccaaaatagcatggtccttgttcaaaacagacacacataccaaaggaacagaatggtgaacctagaaataaaactgcacacctacaaccatgttgatctttgacaaaattgacaaaaaaa

SEQ ID NO: 259860 - DNA, 347 bp, Homo sapiens
cctggaactgataaatttagaaatgtttcaggatagaacatcaatgtacaaaaatcaatagcattgctataccccaataccattctacctgagaaccaaatcaagaacacaatcacattttcagtagccacaaaaaaaatacctagaaattcatctaagtaagaaggtgaaagatttctgcaaggggaattacaaaacactgccaaaaaaaaaaaaatcagagatgacacaaaaaatgggaasatattccatgctcatagattggaagaatcaatattgttgaaatgacaatactgcacaaacaatttacagaatcaatgctatccctattaaaataccaacatcat

SEQ ID NO: 259861 - DNA, 598 bp, Homo sapiens
gctggttgttggcagaagacctcagttccttgccatgtggactcttaatagaattgctggaatatcctcatgacatggaagctggtgttccccatggtgagtgatcgagaaagtgtgagacagaagctgcaatatattttatgtagtagtctaggaagtcacacaccatcactttcacaatttcccattaggggtgggactgtacaaagtgtggataccaggaggtgaggatcagtagagtccatcttggagctggctgccatagtctgccctgtggcctcccatgaccccacctttcccacttgcaaagtatagtaatttctcctccaggccctgagagttgctgctcataaaagcatcagctctatgtccaggatcctatcatctaaatcagtttcaggtattattaacttttacttcacaaaatcttgccattttgggtccccttctacctgccaggttaccttttctcttctttgctgawcattgaacacctgattagcattgattaagtgtgtttctgtgccaggcactaaggtatgagtatgaaaaaaataataaggcaggatgttgatcactggggagctcgcagtcgaat

SEQ ID NO: 259862 - DNA, 517 bp, Homo sapiens
aggtcatgtcataatttaaggtttttttttaaatgatataaactctacaaarcaaaagggaactgggatttcagatatttagatatctaattcttgaattatttcatgttttatatatcattaattaaggaattaactacttaattaatttttattagtacaactttatggagtacgtgtgaaattttgttacgtgtatatagtgtatagtgatcatggtaggatatttaaagtgtccatcatctgagtacaatatatttttgttaactatagctatcccactctgctatcagacactgaatgtattcctcctgtttgtatactttaacccacttctcttcatccttcctttccctcactcaccttttccattactttagtcttaatgaagatatatgtatgtgggtgttaaatataacatgtctcactttaatggcatttgtttatgcctaatttaaaaataaaattgtatatattcattttaatcaaaatgtctatcagtattttttcagtttat

SEQ ID NO: 259863 - DNA, 310 bp, Homo sapiens
aattttataacacaacatctcttaacaatgaatagttctgcaaacaggagcttcgttattttattcatctcaagcctgcttggcatgctgcaggaatttttgggaatagagctttgcaggatgagactattcccattctcaataactcwtgcatctgttcttgcagtgtcatcagtaaagcaaataataaaccactctcaagaaaacctataaaaggctctcctccctattctgagctacagcataatcctcctaaagaccactcttatcagattcaatgaaacagtgtaagcaaattattttggctatt

SEQ ID NO: 259864 - DNA, 560 bp, Homo sapiens
ctcaaacacatatggaaaattgattaccaattaggctccttccaaaacgctgcaaaattccatttctcacagactctgctagaaacccagctttcttctattcatcccatcaacattacacctttcataacaaatactttccagactgttgccaattccaaaactgaagtaagaaccaacaggtagaatgttggaaaatctctaaggttttaggtaggaacgcttttctgcgtgtaaccatacrttaaaaattaaataccaaacaaatgttttcataagtaagccttactgaataattaggtacaattcttaaagaaaataaatgagttatatttcctaaaccaatagtcttggaatgtcagatgccctacagtttcttcaaataacccccacacccctccaccttttttcagagttaagagtgaatttcaggaagtttttaaaggaccttggccattaaaaataacatagtttaatatagtgattttttattaaagttcaaaatatagcttcctacagacctgatattttattaacagtaatacagaacgtgacctctg

SEQ ID NO: 259865 - DNA, 560 bp, Homo sapiens
ctcaaacacatatggaaaattgattaccaattaggctccttccaaaacgctgcaaaattccatttctcacagactctgctagaaacccagctttcttctattcatcccatcaacattacacctttcataacaaatactttccagactgttgccaattccaaaactgaagtaagaaccaacaggtagaatgttggaaaatctctaaggttttaggtaggaacgcttttctgcgtgtaaccatacattaaaaattaaataccaaacaaatgttttcataagtaagccttactgaataattaggtacaattcttaaagaaaataaatgagttatatttcctaaaccaatagtcttggaatgtcagatgccctayagtttcttcaaataacccccacacccctccaccttttttcagagttaagagtgaatttcaggaagtttttaaaggaccttggccattaaaaataacatagtttaatatagtgattttttattaaagttcaaaatatagcttcctacagacctgatattttattaacagtaatacagaacgtgacctctg

SEQ ID NO: 259866 - DNA, 519 bp, Homo sapiens
tttgaggaccttggcagttttgaagagttcatagtcagggattttgtagaatgctctttatttgggctttactcatatttttctcatgattagactggggtttttggggggaagaccactgaggtgaagtgctcttcccaacacaacatatcaagggcgtttattgtcagtttgagtcatcactattgatgttaaccttttacatttgacagctggctagggtagtgctgggaggcttcttcattgcacagttacttttttatttccccctcttctatatgrtgccttttggacaagtcactaagtagagcccaaacttaagaggtgaaaaagttacactccatctccttgaggagaggaatatttatgtaacttatttggaatttttctgtgcaggagatattttcttcccttcatttatttatttattcaaatatttattcatatcagcatggactcatgaatatcttatactttgggttattatccaatagtatgttatttattttttgcagacat

SEQ ID NO: 259867 - DNA, 519 bp, Homo sapiens
tttgaggaccttggcagttttgaagagttcatagtcagggattttgtagaatgctctttatttgggctttactcatatttttctcatgattagactggggtttttggggggaagaccactgaggtgaagtgctcttcccaacacaacatatcaagggcgtttattgtcagtttgagtcatcactattgatgttaaccttttacatttgacagctggctagggtagtgctgggaggcttcttcattgcacagttacttttttatttccccctcttctatatggtgccttttggacaagtcactaagtagagcccaaacttaagaggtgaaaaagttayactccatctccttgaggagaggaatatttatgtaacttatttggaatttttctgtgcaggagatattttcttcccttcatttatttatttattcaaatatttattcatatcagcatggactcatgaatatcttatactttgggttattatccaatagtatgttatttattttttgcagacat

SEQ ID NO: 259868 - DNA, 618 bp, Homo sapiens
aacacaaactgtttcacactgttagtacttctttggcttctctacttcctgtgtagcttttgacacctataaaataacccagcgcagttctttttttccaagttaacaatgagaaatgctagtattttcccaagaacacagaaatcattcagatgaaaaaggaagtgataatgcaagagtgcaagatgttctttaaaaacagttgtccttaaatcctttcatttgacaaattcatgcttccacagacrtagctgcctcagagtgtcatggagacaaagtttgctatcatgatagtaggtatgacattccatacacatctgcttgcatgaactgatcccttcatttcttcagaaaaaataagcatatttttattttctttgcagaaggtcaggatacatacagctgcaataattaagaaaagtttggttttcttttctttaattttacaatttacctaccacccatctactgacttttcccaaatatgtgtctctagctctgactgctagtctgagatccagattcgtaagcaaccatctagaagatacacccagctgtgtattcttgtaggtgtctcaaactcctgcatccccaccaggaagttcacccagcaaaata

SEQ ID NO: 259869 - DNA, 565 bp, Homo sapiens
accaaaccagcagaaaaaaaaggaagaagaaaaaataaaacatgtcaagacaataatgtgatcaataggttaaagagaggcattgatcatttttttgaaagttttttccctttataccctccattgtgcaggtcaagtgtctcctaggatggagaggaggggctctgcctaaaggaagaaggtcaatgccagactctgagtctcaaagactaaaattaatgagtatatagtgaaacaataatattaaaggtcagaatttgtagctaaagaaaaagattctgagattttattatyattactacaaattccctatttctatatcaaaactaaccatgttgaactctgatcacagagttttactataagccatagtgtattgaggatggaggataagaagttcctaccagacaggaaaaacagttcttccatttctcattagcagaggctggagacagaaaggaagaaacatgagttagaaggagtatattcccagccaggggtgaccctcaggcagtagaaaggaggtaggtgtggtgcataccctcaagtgtatgaggaaactcta

SEQ ID NO: 259870 - DNA, 601 bp, Homo sapiens
caggtgcggtggctcatgcctgtaatctcagcactttgggagactgagacaggcagatcacttgaggtcaggagttcaagaccagcctggccacaatggcaaaacccgtctctcctaaaaacacaaaaaattagccaggcgtkgtggtgggcgcctgtaatcccagctactcttgaggctgaggcaggagaatcacttaaacccaggaggcagaggctgcagtgagccaagatcacgccattgcactccagcctgggcaacaagagcaaaactctgtctcaaaaataaaaggaaagaaagaaaatgggtgatattaaaactgataccacagaaatacaaaagatcattcaaggctactatgaccacctttacacacataaactagaaaacctagaggagatggataaattcctagaaataaacaacccacctagattaaaccaggaagaaatagaaactctgaacagactaatagcaaccagtaagattgaaatggtaattaaaaagttaccaaaaaaaaaaagtccaggaccagatggattcacaactgaattctatcaaacattcagagaagaattggtaccaatcccattaacactat

SEQ ID NO: 259871 - DNA, 577 bp, Homo sapiens
tgtaagtcactgcatccaacttagtttattgatgttttgcattatttttctagtctctattttatttatttttgctctagtctttattattttcttccttttgctaactttgagtttagtttgttttctttttcctgttctgtgaggtgtaacattagtttgtttattttgtaatctttcttctattttgatgtaggcatttattgccacaaattttccttttagaactacttttgctgtacactacaagttttgacagttttgtttccattttcatttgtctcgatgtttttaagtttttctttaatttctttacagaccaattgattgtttcagagcatggtttaatttccatgtacttgtgaattttgttattgatttctagttttatactatygtggttggaaaagatacttgatataatttcaatcttcttaaattttatgaggtttgttttatgttctaatatgtgatctctcttggaggatgttttatgtacattttaaaagatatgcattctcttgctgttggatggactattctgtacatgtctgtccagtccatgttgtctgaagtg

SEQ ID NO: 259872 - DNA, 461 bp, Homo sapiens
ccccttgctgttcttgtgacagtgagtgagatctcatagatctgaatgtttaaaagtgtttagcacttgccccttcactctctctctctcttctgctccaccatggtaagacgtgcttgcttcrcctttaccctccaccatgactgtaagtttctgaggcctcccagtcatgcttcctatacagcctgtggaactgtgagtcaattaaacctctttgcttcataaattacccagtctcagatagttctttatagcaatgtgagaacagtctaatataccatgtaacagtcaaggaacgacttcctattaatccagctaggttgaaaggaatcctagcttttccaccactgagaagcaagaagcaattgagagggttttgggggctgacaggatattgtagaaattggatagccaacttctcttcaaaggcccagcccttatatactctcttataactggac

SEQ ID NO: 259873 - DNA, 548 bp, Homo sapiens
ccttttgctgactcccaaaagccacatgccaggtataagaaatcaaccattgggttgtttttttttgtgtttgtttgttttctttttttcttttcttttttttgtttttacaaggagcctatcccaactgattaccttcatatagaacatagcaattgggttcctgctttatttgggctaatcactagcatatattcatttattgattgattcattcatttaacaaataggcctccagttcctcctgtgtgtcaggaacaattccggggattcagctgtgaacacgagtcaacgatcttccccatgtcaagcttatcttccagtggagaagaagaggagtgatcacacttaataggaaaaacaagcaggaaataaaagcaaaaacacaaatccaggtgggctttgtcattgctgagactactcctgataaatccygacatttcagggtactgtgcaggagacttacagacaccagaaacccgaaggcagcattcacctggataatgctagaaggaaacataaaaggtcagagaaggccccgaccatat

SEQ ID NO: 259874 - DNA, 484 bp, Homo sapiens
tgacccattgagagaagaggagcttgggaaatgcagttttgctgtactaggataaaaaagaaaggaatagatcaacacagagcattgtctctgccaactgtttcatagyacatttgtggaaagtcttgaggaacagtactataaaaatacttttgaaatgactgaagagttgcattcacttcaagctgttgttattctctgttttaggaatgggagataactgttttactttaaccctgaacatttcctttgcaacattctctggcatttggaagtcctccaagcccctcatcatttttcaacagccaggcttcccgcagtgcctgctcacagtttcctcaaggtcgagtctcttacaggaacataagttcagccgctccttttagagggcgcagtgaatcatccctcttagcaaatatagaattccctgtgacctctgcaaatggtcccactatgtctgctgctgagccaaaagcaggaaagc

SEQ ID NO: 259875 - DNA, 526 bp, Homo sapiens
aaagtggggagtgcacattttcaaatttcccaaaagggtgttttaaaatgtgtggggcaggcagaaaatatggcagataaaaagatttccgaacggtactgaagggccatttgatgttggtgatcatgcttttgttttagtatgattgtataaatctctcccagctgtgccaggcaaacccagaaaggaacagagaaaaggaattgttggtttgatcctgagtttaggatgttgggatagttgcagaagaaaggcaaggctactaggatgccaagtagccctgaaagaggtaaatggagtgatagagttctccatgaatttgaagagcaggtggtaatgacagagaatagttttatgggaatttaagattgtaggcattgtgaagttctgggtaatgacctaatgtagaaacatgrataatattcacccagtttgcactgtgtgaggatggttctaatgccctatccaggttggggaaaatatgacatgaccattgggcatggtagcatgcacctatagtcccacc

SEQ ID NO: 259876 - DNA, 602 bp, Homo sapiens
tctcttacactccaacctttgcctccctgtgttgacataatttttgttgctgttattaggctgtgagacagaacagattttgctttaattttctggcatcatcctctgaggtgacatcttctcttgactcattcagcttatttcaatcaccttctccttaagaactaggctcawgtccctcagggactggccaggagatagctgagtgacaacctgaggttctgcacacaccactctctattctttagacaaaggtttatgaggctaaagcaaggggaagtaaggcattctgatgagagggagttataagaggaggaggttggcgtggacggttttcatggtgtggggagtccagatcaaagggaatatagtaaagagctaggaacttctcaggggcagcacctcattagagagttggggttacagtgtcagcctctcagaatttggatattctttctaatgcagagttgctcagatcattggtgattaactgataataactaaaatcacccaagactgggcataaaataatgccatcaccatactcagtatactaagaagttcccatacccctccaaattttctttttgtagtaagcccct

SEQ ID NO: 259877 - DNA, 604 bp, Homo sapiens
ataaaatgagttgtgttttaacctcttcctggtggatttggtgaaataaatacacccccaaataacaaagcatgctagtatttgtgccataaagagacactaaaaggaagattatatatataaatctctctctctatatatatatatgtatatatatattccttaaacctcatgaacaaacatatatatatgtgtatgtatatatatatatacacacacagagagagagagaaagagagagagagagagagagatggagtctcactctgtctcccaggctggagtgcagtggcatgatctcagtgcactgcaacctccacatttctgggttcaagcgaatctcctacctcaggctcccgagtagctgggattacaggcccgtgccaccacacccagctaatttttgtatttttagtagggacaggatttcaccatgttgaccaggctgatcttgaactcttgacctcaggtgatccactggcctcagcctcccaaagtgctgggattacaggcgtgagccaccaygcccggcctgcaaggaagatttttaaaaggagatatttgctagaggaatcaaggaaatcttcctagaacaggttgcatt

SEQ ID NO: 259878 - DNA, 593 bp, Homo sapiens
tgcagtgtgagtagataatatatctgaaaatatcttcgtccttctggtcaaactggttctatcattttctgctcatgttctttggccactctttgatctttggcagctgtggacaattctttggccactgaatgcttttttttttttccttaraaaaaactgcccatctgcagatggtttcaccctgacttcaagcttcaaattcccccattaaccagcaggccaagcctaccaaaactatccatcaatgaaaacagccaccatgaggctctctgatgaaactggcagtgtcttaaacaagttgaaagggtaaaaatacactatacctgtggccttaaataaaataacgtgtgtacaatgagtttctgaagtttaattacattttaatatggatttaacttagaaataatatgtataacgatattaacccaattagagacctgtttgatcatccaggggtttctcctccaggtcaggtacttaggtctgtgagaaccaaaagcaggattacagacagctttagcaactgtcattatcaccaagaacttcagaccaagagtgtgttatcccaaactagtacaaacaaaatgcac

SEQ ID NO: 259879 - DNA, 563 bp, Homo sapiens
ttataaaggaaatattaaactaaatgctgccattcaaattcagttctttagggttttgtatctggaccacgtacaggggtagcaatgttattaattcctttatttgaagtatctagagtyctgttagtcatttcctgtttgtttaacttagccagggctggtttattttgcttgcattaaaagaccaaaattcacataaacttgccagagcaagtacacctacttcaacaaataaacagaaaatctgaatttagaagaagaggctgaaaaacaaatccaaatttacaagcccaagaaatcaaaatagcaaaaatcattaaataaaatcaagattttagggcaggattttgtttttgagagaggggtagtatatgaagcaaagacaaagaaagttttccacttcttacatatgatttaattcctcagtataaagatgctcagttaatatcaatgatcattaatataaagatgttgtcagctagagctccagaggcaaaaattgaggtggtaattatttctaggcatagcaaactgagtatcacaaagaaaataaaataaactga

SEQ ID NO: 259880 - DNA, 563 bp, Homo sapiens
ttataaaggaaatattaaactaaatgctgccattcaaattcagttctttagggttttgtatctggaccacgtacaggggtagcaatgttattaattcctttatttgaagtatctagagttctgttagtcatttcctgtttgtttaacttagccagggctggtttrttttgcttgcattaaaagaccaaaattcacataaacttgccagagcaagtacacctacttcaacaaataaacagaaaatctgaatttagaagaagaggctgaaaaacaaatccaaatttacaagcccaagaaatcaaaatagcaaaaatcattaaataaaatcaagattttagggcaggattttgtttttgagagaggggtagtatatgaagcaaagacaaagaaagttttccacttcttacatatgatttaattcctcagtataaagatgctcagttaatatcaatgatcattaatataaagatgttgtcagctagagctccagaggcaaaaattgaggtggtaattatttctaggcatagcaaactgagtatcacaaagaaaataaaataaactga

SEQ ID NO: 259881 - DNA, 458 bp, Homo sapiens
tccccctctctcttcttctggcaactttaccatcatactgcaaagtacagccaggacgtgtcctggtgatgaatggctcggaccattatggaccagcwatagaatagacaattgggtgaggagaattgattgactgattgattgatattttagaagggaaaattaagcttaaaaggagatatgttataaaggtttccaataaagtatttatgaacaatagtagtaagatttgactcaaaatcaagtattagtactttattttgcctcatatgtgtcaacagatactaatttgctttgacaaatacaggataccaaaaacacacacacatacacaatcaagtcgaactgatttcttctgtacttagttgtattgccaagactactttcttatattacagaaaaaaactacttttttatattacagaaaaaaaaataagccacctaaaaggttgttgggg

SEQ ID NO: 259882 - DNA, 613 bp, Homo sapiens
tgagcttccgctgaacgcagctcccaatgagataatccattttttaacttcatattttaaagttttatgaaagaccatttaatctatcttgcccaaatatatttaaatcagaatctccctactcatttagttacccattgatagaaggaaatattcctaatgagacacccaaattggctcaamtattttgagctctgtttggtatgcttttgcgacgtgccaaaatgtatttccctggatatttagaactgatcatttgacttcacagtgcccttatctgcgttttttctctgttctatatgaagtaaaaaaacacccaaagtttgaaagtttcttctccttcatggatgttctttttttccttgaccttatttctttatttatatcccaactgcagccttgtgcccagtcacagtttcaaccaaaaataacttttagtcctactgtaagccgggtgcagaagaaatacacaaaaaaacaatttttaaatattcttgctgacttagttatttaggatcattttaggctgttatttagtggcctctgaaataaaagacttctgatagagtagctcatgcctttaagatatggtgtattttgacatttaaatttt

SEQ ID NO: 259883 - DNA, 517 bp, Homo sapiens
gtgttgaattttgttaaatgctttttctccatctctttatgttactatgtaattttttttcttctctatattcttaatgtgttgggataactggttttgaattataytgagccagccttgcattcccgagataaacctcacttgattgtagtgcattaatcttataatacatttttggactggatttgccaatactttattgaagacttttgcacccatgttatgagagatcctagtctacagtgtttgttttcttttctttgtaatgtgtttgtctgattttgatattagcatgatggtggccttttaggatgagttaggaagtatttcctttgattcttctatcttctaaaaaattgcggagaattgttttattcttctttaaaggttgatttgaactcaccagtatatccaactgagtttcatattttttgttttgacaggttattaatttttgactcaacatctttaatagatatcagtctactaaaattgactatttcttctttttcaggtt

SEQ ID NO: 259884 - DNA, 603 bp, Homo sapiens
gaaactagcttctccatactgggtgtggtgtttatttacactgatcacctttctgaacttatagttatattctgtatttataagaaaatagaaatttagtcagatatatttgtatgttatttattatagctaaatatgataagtaatataaaggcatagagcatggacatatgacagcatagttatataaatgacagtaagtcgataccaaagagtattatatagccattaaatattttggagaaaaaaacccatacagttgtaaagtgttcttaataaaatattacacaaaaatctgcatttaaaattgaatgtttaatatactttcaatattatatttgtggagaaaatctgttactagtagcagtactttgttgtaagatattttgattcatttgtctttatttaccaacaactctacatcagctgtattcaaatgagtgaatttttcttccagaggatatttggcaataacttgttacacttcccttttgtcacaccttgtagtagtatmcccaccggtatctcatgagtagaagcagaggatggtactaaatagcgagcaatgcacacaatagtctccctacccctaacacaacgaag

SEQ ID NO: 259885 - DNA, 509 bp, Homo sapiens
tatttttaatatgtatgaataactttatgaaattaatttattcagttttggtttcaaggaaggcactatattcaaagaaaaaacaatttgttaaataatttcaaaatctgaaattaaatttaaaaaattgcatatgtccctaagggctattggtttatgtatacacatgaaggtatatatgtgaagactatacacggttatatttataggaagcttagagagataycagttataacagaaatctgtagttagagaatgacttacttttacagaaataattatattgccctccttttaatgatgactaaacaggtaagtggtagtagagtaaaagtttaacacgattggttgaagccaattagttatagtattttataatacttaagccactatgcctcatttgtgaactctgagagtctttatttctcagagtctattatcatctctgaccagatgataatagaaagttattttatagaagggtttttcagtctcaccaccactgacat

SEQ ID NO: 259886 - DNA, 571 bp, Homo sapiens
ggattactttaagtgcagtgaagctatgcacatcataacactgtttaggtataagctatgtctattaagataaatatgtataacattttccagtaatcttccagaatatttacaactgttaccaacaatatgttctgcaagatttcttgtcttaaatggagttgatggagcatatacactcattcactattatccagtgtgctttgtgctacaagcaactgaaaaccaaattcaaatttaaaagtaaactaatgcatcatctcacagaaggaaatcaaaggtaagatggctccatccggtgcattcagctacttaattatgagactgagcagccggattctttgaacgtctacattctgccattctgtatgacaacttctactgcagacttgactacgtcatattggcaaactcgttcaggtatcatattcaggtacagtaatgtccaggagggtaagaggggctgcctacttcttggtggragtataaaacttttcccagaagactgtggtgcagaattgggttacatggggacaactgagtcacagagccttttgtaaaacaaaaattg

SEQ ID NO: 259887 - DNA, 576 bp, Homo sapiens
atgctgaccaatgcactaagaaaacagtcttattgactgttcattttattaatgaaactgagaaataatccaagctaggaaggtaaatatgctacatagttatatctttttacatgacttttaaggaaatctcctataatggagcaatgtggggaatataataacaactgaaggactgtatgcaacaacataatagaatattctgagtaatggtaaatacgacttttgaagtcctttgaatacttttgataaccttcagaacacaactttagaragaaaattagagtttgtgatgcataaattaaaccagcagaaattctttttttattattattatactttaagttttagaaattcttaaagtgacaatcatatttggtaaagccataatatgaataactacccagacagttttcatgctattaaaatgtaacaaaattgaaaaataatagcaaataaaaattaaattgagaaacaagtttattaatatcagtactccttgccatttgccctccagtaacaacgcttccactcccaaatatctagtttttccttcaggaaaatttaaataaaagg

SEQ ID NO: 259888 - DNA, 560 bp, Homo sapiens
gtgggtaatatatggaatataagaataagaggcaaagtcaatatagagaaaacaaagaagtcaagccattagatataatgcctaaaaatttctgatggctcatactcattacccatattttaacctaatatgtcatttgtgaaasttaaaataaaaaatactatttaatttagatgtttttgtacttaatataaacatctttccaccagcagtttgcaactaaacacattcatctgtgtaaaatcaatataattatcaaaaaatggcagttaaaaaaaacccagtccaagtaagacagttagacatttacaaggtatgactaacaatttctccactagaaatgctacataaaatcagttttgtcttacagtcaatcagaatataagaattacaagcaaaggactgaatcacaaaatactgtattataaaccatgtcactagaaaaatttagattaaaatatgcttcaagatactaaaatatgatctttacttaaaagatgtcttaattccagagggaaatattactaataaatagcttagagatgtcattcatatctatt

SEQ ID NO: 259889 - DNA, 635 bp, Homo sapiens
tctgttcctaccactttcttcccatcttacttttcatcctttgtgttgctcagatcaaacttttggaggcatcattgacttctcctctctaacttgttatcaaacgctactggctcttcaatgtaagtatttcawaagctcaattctttttttacttcctgcactgctatcatcccagccatcaacatctcccacctgaataactgcaattgatttgcatggccctatgcttgcctattgcaacccaatgtcagtatagcccaagagtttaggtagagcttaaatgtaactaggggcttgaattttgttgttcctgaaactctcagtcttgacttcaaccttagtccttgatatttgaatttgaacctggatacccaagtgactcaacctacttcctttctttatttaggttcttccatactcaatgcagccatcccggctaccctaattagtcctgcaacattctctcccttcatcctaccaatactctctgtcctccttctttatttttctccttaaaattaagtttctgtacctctagcataaagaaaagcacacgacacaaagaattgctcaataaatatttacttaagtggtgccacaactgatcctattatttctagtctcaagaattt

SEQ ID NO: 259890 - DNA, 594 bp, Homo sapiens
gataattattaagtaggcaagaaaggcaagaaagaactatttatgaatgttcataatcatagcattctctgataatattgtatcttttccttgccaatttttaaaatgactgtcattttgaattgcagaaattccagaaatgtttttctctgtgttactttcatagtaatgtgtaatatggattgataacaaatacttgtgttttcatttgcagaatatatattttcaaggatatttggaggatttgrgtatcagataagtcagaatgagcattctagagtaagtcatttaaacctaatgcttcttaaatgattgttccattgatagtgaagccagaatctgatagtcactaactttttttctggaaatcttccattagttgggaaggctgccaaagctcttctcttttaagaagaaagatgtaaaacagatttgaatcagtatagcattagatcaattttctccctcttgataaaactgcaactgcatatgcacaaagattttagattcctattagtaacacaagcttctgacccaagtctagccatgattcaaagttattgctacaaatctgcttaaagtctccattgactc

SEQ ID NO: 259891 - DNA, 505 bp, Homo sapiens
gtgattttatactgtatttatatgtctattcttcacttaaagaaaaacatattagactttagcctgcaggacagcaatatgtacatctcttttattcattaatgtatctggcatgcctagaatatctggcatattgcagataataaatcattgttgaataaatgaatgaagagatacaataatatcttctttaatctttctccattaccattaccaagaatttgcttgattatgtcaattgagagctcacaagtgtcacaggatcctttgggtgtcacttttccagcatgaaacctctgtggctggtggtatcagcctttgcccaagttttgcttgggcccactgggctcattccacccactcagccyggcaggctgtgcttggctcatgctagcagccaagatcccacacctgccaagggcaagccaggagcagagtggtgcagggtgcttgcatgagcaagcgtggggtccggccactgtgcacagctaggcagaccagcagc

SEQ ID NO: 259892 - DNA, 610 bp, Homo sapiens
tgaaatgggtagctcctttctgcaggcaggtcgttccaacaagtgtccagctttcagcccagaggagacccatagtgggtagctcctttccacaggaagggcattccgtgagtgtccaggtctcgttagagagaagacccatggtgggtagctcctttctgcatgcagatcatcctgatgagcgtagccctcagcagagaggagaatggaagctcctatccacaggcaggtcatcccaacaagtgtccagctctcagccaagaggagaactggagtgagtagctcctttctgcgggcaggagatcccaatgagtgtccagctctcagagggtaggygacctggagtgggtagctcctttctgcaggcatgtcatcccgacaagttgaagagactctacgtgggtagctccttctgtagctggtagtcctgatgtttgtgtgagtctggctgagtccagggtttttatgggctcagaagggaggaagtgcatgctgattggtccatgggagtccacgggcaggcctggaaaaagcaacataattctcgctcctgtccaccaacttcattcagaactattcattcagtctggctcccgggcttcaggtcatt

SEQ ID NO: 259893 - DNA, 610 bp, Homo sapiens
tgaaatgggtagctcctttctgcaggcaggtcgttccaacaagtgtccagctttcagcccagaggagacccatagtgggtagctcctttccacaggaagggcattccgtgagtgtccaggtctcgttagagagaagacccatggtgggtagctcctttctgcatgcagatcatcctgatgagcgtagccctcagcagagaggagaatggaagctcctatccacaggcaggtcatcccaacaagtgtccagctctcagccaagaggagaactggagtgagtagctcctttctgcgggcaggagatcccaatgagtgtccagctctcagagggtaggcgacctggagtgggtagctcctttctgcaggcatgtcatcccgacaagttgaagagacyctacgtgggtagctccttctgtagctggtagtcctgatgtttgtgtgagtctggctgagtccagggtttttatgggctcagaagggaggaagtgcatgctgattggtccatgggagtccacgggcaggcctggaaaaagcaacataattctcgctcctgtccaccaacttcattcagaactattcattcagtctggctcccgggcttcaggtcatt

SEQ ID NO: 259894 - DNA, 648 bp, Homo sapiens
ggagtccacgggcaggcctggaaaaagcaacataattctcgctcctgtccaccaacttcattcagaactattcattcagtctggctcccgggcttcaggtcattcctggcttgaaagacgggtttcaccaggcacctgtctgactcctgccatccatcaatcttgtcatccatggcaccctggcagtctacaccaaggggatgctgctggcctgcacaagctggactcagcacccctggcctctgtcccatgttggtcagcacccaaactctggtggggactgaggtggggaggctggtgtgtcagcaccaccctcagctcacacacgctctgcaactttgccccaccacagagcagatgccagagttcggagagggcaggaagtgggagcaggcacttctgagtctgtgggaacaggggggatcctgggtccccagagtgcagcaatgcctggatctggagctgcagttggctggctgcagctgtgcccaggagcacacgctcccgccctgctgaaccagcagggggccaggctctctcacctgttcctaactcccctctggctccatggagcatgtgaccccmgccatgcctcccctgttgcagccagtgtcttcacagtggctgccccagatgggctgctgccgc

SEQ ID NO: 259895 - DNA, 553 bp, Homo sapiens
ggagttgtattgtttgttgatatgctcctccatttaaaaaattcgtggcataaggatcaacaggaggrgtgctaacagggttagatttctctatatatgagggagagattgcagattatcacaacagcagaaactgaataaacagggacaaggtaagagttcattctcaaggtgcatacatgtcctggacgatgcataaaataaaatcctctcttctaagacagttcaaaattcttggtttcttccttttagcctcttagcagcaatgttgtttgtctatacaattaactacagaccatgaaatgtatatacagtatccattttaaagtttaacttaaaaattaatttgtcctctgtaatcattttgtttcataacaataattctttaactcctgtctttaatgatcatgcttttagttccttacatggtctttataaccaaagtgagtttggcttggaagaacacagggaaattgctgtcaaggagccattcagaatatggccccagaagtgtctacatttaaatggtgagatactttagcttccagaagag

SEQ ID NO: 259896 - DNA, 617 bp, Homo sapiens
ctgtgtctggctcactcttgcctgatatctgaaaatgactcatttcttttcactcaagtaattcttcaaacattatctataatgagaaagtttccttaactgctctgccaccttgcctcttccctcagtcacctctatatctgccttgtcattgatcactatcttaaattatattgcgtattgtttgatttctttactgtctgtcttccactccaaaatgtgaaagtaacaaaattagaggttttctttgtccttctaacaccataacccaggtgcctatatgcattactggctcacaatagatgatcaatatgtgtgttcaatgataaacaagttttgagtaaatgaatgcaatagaaatctcaagttataacaaaaaactagacaataaatttggcaacatagaagttaccaatgccctgtggaaaagtagtttcactgctttagctgaatagacattgcaarttaataaataaagtaatcacaagttagagcaggtaaaaatttctatttacagaaggactacataacttgttggaaatttttataatgtgtggtaggtggaaaagcaaatgggaggcaagaaaataaaaacaaaattattctaaaagatttgc

SEQ ID NO: 259897 - DNA, 585 bp, Homo sapiens
agtcagtaagcaaaatgtcagaaaagactctactggatgctttctcttttctctgtgaacaaaatgctgaatttgcccactgagaacagaagggaagatagcaatatatacagcttaatgcaaatagagttttacagtagcattttataaaaagagatataaactgattcaggacacagaacaattagcagaaaatgtgaatggtctagttgagaataaagcatattcatctatagtgataccaagacagccacataggtttcaataataatatgtggattttagtcttaaatatagtaacaaataaacagctgtgtgactctggacaagtcagttcacaggcaactaataatagaattcataggcagcagataatgggaggctttgaaattgaacaggtctaaattcaactcctagctatggcaattawtactggtatagccttttcaattcacatcaactgagttgcattgtcttaatctgtaaaaggacgaaaataatagtaactacaaaataaattaatacatgtaaaatacctacaaatttcttagtaaactcttatcaataagcaggtattgttatttc

SEQ ID NO: 259898 - DNA, 594 bp, Homo sapiens
ccttgcatgttccctccactgaatttcaatactgggaacaccaatttttccactagaaaaatgccaaaagtccctaagctcttaaacaaagcagcattatgataccaccatgcccctattgtgaagcatggatcagacctttctattgtttcagaatactgtcaataaatgtcatctgaaagcataaaaaataaatgatactcatgtaaataagtaaaaattaaaggcatctgggagacagccaatattgatattgtctaatctacataaactattccttaagaagtgtaataatagtgcattttaagaagaggaagctaagttaggagtgcatttcctcaaacactagtctttttcagtttcggaaataattacacccataatactatgaacagctctgttcactgaagsgaataaaagctccagatgaaatcttaacagcttttcctttgtagccaaatactgattgcaaaaggacatatcaggctgtgaatgttattatatgtgagacgttttgcaaatggatggaaaaaatgatgggagtcagataaagctctaagaaatgatcctgaagcaataaatacaatggataag

SEQ ID NO: 259899 - DNA, 594 bp, Homo sapiens
ccttgcatgttccctccactgaatttcaatactgggaacaccaatttttccactagaaaaatgccaaaagtccctaagctcttaaacaaagcagcattatgataccaccatgcccctattgtgaagcatggatcagacctttctattgtttcagaatactgtcaataaatgtcatctgaaagcataaaaaataaatgatactcatgtaaataagtaaaaattaaaggcatctgggagacagccaatattgatattgtctaatctacataaactattccttaagaagtgtaataatagtgcattttaagaagaggaagctaagttaggagtgcatttcctcaaacactagtctttttcagtttcggaaataattacacccataatactatgaacagctctgttcactgaagggaataaaagctccagatgaaatcttaacagcttttcctttgtagccaaatactgattgcaaaaggacatatcaggctgtgaatgttattatatgtgagacgttttgcaaatggatggaaaaaatgatgggartcagataaagctctaagaaatgatcctgaagcaataaatacaatggataag

SEQ ID NO: 259900 - DNA, 584 bp, Homo sapiens
tatgtaagttttgaatattatagaagaaaatattactattggtaaccattgtaatgtattttgtatatttaatttcattatttattgcacttattacctgcaggtgagtccattcataaatataagagaggaaagaaaggtggaaggaaagaaggaagaaaagaaaaaggaggcaacatggagaggaaacgtggctttaatttaacaaattattcctttaacacctttatgccataccatggtagcctgtaaccactggaagatgaaaatgcataaacatagtctctgctctcatgtaatttacattctatagagagtcatggtagcaacataatgtagctacgtattaatacaaaatgttaaaccttccttagtttgacatgatcagggtcagaatgcatgccatgagagctgtggcttaggtaagatgtttcatgcagaagtactaacaaaaagatggagatgcaaggaagtataaagaaayctagaaactacaggcactatcagatcagaaactctgtattatcaggtcataatgtttattacctatgtaataggtaaatgtatacctatgtgtatccagg

SEQ ID NO: 259901 - DNA, 507 bp, Homo sapiens
tgaatggcttaaagaacaaaattaaccaatattaactaacattacattgttccaacaaataatgcagatctaagaaattgagagagctaagtagaaatcaggacatactgtctttaaaagtttaacaagtaatcaaaatgatccaattataatcaaataaaaatattttcattgctatggctacatcctattagtgcagacttggccaaatacttaatgatagctaagtacaacagaaacatcatagtttaaagcatttcacactgaactactgcaagttgtcccctaacagctagccctggatgcctctctgaccacctttgggcttagacaccaaataaaaaattatatttcacttattttaaaggactttgaaatatttaaatacctacatggtataacaaaaatagcatattattaacaatgaactgattacaagtactaayaacatgctacattattatttcataatgaactgttcaatatatgtaggatcagagattttga

SEQ ID NO: 259902 - DNA, 617 bp, Homo sapiens
tgctcagcacttccatagtcacacccacgaagagggcccagagaaggctgttccctaaggcgttaagagatatgctggtaatgggggaggcattgccattcctggggagattggtggtagttgcacactacataaaaagacgagagttggtgatacttcagtgggatttattcctaatcttagtcgaaataatgtgatgctagaataacagaagccagatctgattgttagttatccatcacaaagaaggtaaaygtaattacagtatagataatgaggacaaatagctaccggagacttttgattctaagggatcttgggaaatggccaattaaacacatgttccctagaaataaaataatgggcagcctacaaacattctatatgatatagatagaaaaaaaacatctaagtctgatggacagatgtctaagtaaaatcattactgtggggattcacaaaagtctttccatacttagttcacaggccaatttatagagctgtaaagagttaattgattaggattctgtgtctattttaggaagtatcctttaatagacacacaactatatcctataaatctttccccagtttgctgaagggaatctggagtgatc

SEQ ID NO: 259903 - DNA, 617 bp, Homo sapiens
tgctcagcacttccatagtcacacccacgaagagggcccagagaaggctgttccctaaggcgttaagagatatgctggtaatgggggaggcattgccattcctggggagattggtggtagttgcacactacataaaaagacgagagttggtgatacttcagtgggatttattcctaatcttagtcgaaataatgtgatgctagaataacagaagccagatctgattgttagttatccatcacaaagaaggtaaacgtaattacagtatagataatgaggacaaatagctaccrgagacttttgattctaagggatcttgggaaatggccaattaaacacatgttccctagaaataaaataatgggcagcctacaaacattctatatgatatagatagaaaaaaaacatctaagtctgatggacagatgtctaagtaaaatcattactgtggggattcacaaaagtctttccatacttagttcacaggccaatttatagagctgtaaagagttaattgattaggattctgtgtctattttaggaagtatcctttaatagacacacaactatatcctataaatctttccccagtttgctgaagggaatctggagtgatc

SEQ ID NO: 259904 - DNA, 534 bp, Homo sapiens
ggacaaggtgactagacttagcaacagagaacacagaagaggcaagaacagcacaaagacagaaatctggaactttataaaagaacctatttgagtattcagttgaatactgataagcaaatgtatgtataggttggtgcaacagtaattgcagtttttgcatggttgaaatttgctgtttgatattggaatacattttttttctgagatggtatcttgctatgttgcccaggttggagggyagtggcatgatctcggctcactgctacctctgcctcccgggttcaagcgattctcctgtctcagcctccccagtagctgggattacaggcgtgtgcaccacactcagctaatttttgtatttttagtagagacggggtttcaccatcttggttaggttggtcttgaactgctgacctcatgatctactcacctcggcctcccaaagtgctgggattacaggcgtgacgactgcactcagccgatattggaatacattcttaaataaatgtggttgttatatgtcattttaac

SEQ ID NO: 259905 - DNA, 562 bp, Homo sapiens
gtctcaggtagttctttatagcagtgtaagaacagactaatacactgactatagctttgcagtatattttgaaatcaggaagtgtgatgccaccagcattgctcttctgactaaagattgctttgactgttcatgtttttttgttgttgtagttccatgtgtattttagaaatgttttcattctttacctctcatttagcaagcatctattctgccctgtttgttctatcgcctgcctgctataggtgataacatttagaacatagtctgtgctttctaagagtaccataggaatgacaggatggagctataatagccagttccttaggctagagttagagaagaaactaagttaaagcgcaagttaggttttttgtttttctttgttttttaaaactaataatttaactggttcattggagatagtggcctcggatgtgctggatgttggacttgaacaagtactgcacactccgactggagttctcactaattttggcagctctgatagtgcagggaggartacaatgagataaggtttaggtgatgcctttctctttct

SEQ ID NO: 259906 - DNA, 559 bp, Homo sapiens
aataaactttgcttggtttttaagaatgtaatgtggttaataataaaattacaagtgcatgtaagagaacatgtaattttcttttacataggggacaggtatcaaacctttctgtcaactaaatttttcctagtttctctacaggctgggcaataggtctatctttatagattcttttctcattctaatttctaactgtttaygattcacccagaactaaaacttatatgatacttttatttgaactaagaattacaagatatgcacttttctaaatcatcagtgtcttgattcagctttaaaatatactagactttctgtatgaaagtgattctttccacatggtcagcagaacatgcattcgtattattttttgtccataacatcatggttgtgctcagttctcaaggttcttttggttaaatccttcttattaccaaagttttaagtgtccaggatgccaaacaaggtgagcagtgaggtctgtggccagagaggcagcacagctaactgaatggcccgataagagtgacacacaagtattggctctaaattaata

SEQ ID NO: 259907 - DNA, 559 bp, Homo sapiens
aataaactttgcttggtttttaagaatgtaatgtggttaataataaaattacaagtgcatgtaagagaacatgtaattttcttttacataggggacaggtatcaaacctttctgtcaactaaatttttcctagtttctctacaggctgggcaataggtctatctttatagattcttttctcattctaatttctaactgtttatgattcacccagaactaaaacttatatgatacttttatttgaactaagaattacaagatatgcacttttctaaatcatcagtgtcttgattcagctttaaaatatactagactttctgtatgaaagtgattctttccacatggtcagcagaacatgcattcktattattttttgtccataacatcatggttgtgctcagttctcaaggttcttttggttaaatccttcttattaccaaagttttaagtgtccaggatgccaaacaaggtgagcagtgaggtctgtggccagagaggcagcacagctaactgaatggcccgataagagtgacacacaagtattggctctaaattaata

SEQ ID NO: 259908 - DNA, 670 bp, Homo sapiens
taacttagtaagagtgggaacaattttctgaaatcgtgtaattgtattattagagttaaagatagaaccctaaattagaagctgtaaaaacctatcaacctttcaaagaaccttacccctacattggtagtgttgcccaaatcaagtcctaggaaagacacaagttctaaaaggtgaaaccccatctctactaaaaaagacaaaaaagtagccaggctaggtggcgcatgcctgtaatcccagctactcgggaggctgaggcaggagaatcacttgaacctgggaggcagaggttgccgtgagccgagatcatgccattgcactccagcctgggcaacaagagtgaaactctgtctcaaaaacaaaacaaaaaaaaatagtgtcatgaatactctgggaagttttgtaatatgaaatctttatagacattttctaccggtgtattttaaatagctttcaattttagtttcagtggtacatgtacaggttttttatatagataaatttgatgttgtagygctgtgatgtacagattatttcatcactcaggtgataagcgtagtacctaataggtaagttttcaatcctcaccctcctctgttcctccaacctcaagtgtccccagtgtctattgttctcttgtttgtatccatatgtacttgaacatgtg

SEQ ID NO: 259909 - DNA, 558 bp, Homo sapiens
tcctttgagaaagctgtcttcttatcttccagatgctcacttcatacttattcatcagaggccagtttacccatcagctcctttaccattttgtaaagatttccacaaatctcttgaaaatagaaataatctggcttgtaygctgaaatgtcatattctttatatacatatattttttctatagataattttctatcactatttcttagtgcccatattttgttataattattactgtagtataggttttgttacaacaaagtacatggcaggatggataccatatctttacaattaatgtaaaaagcatatatactgttattaaataaacctggagtagaattctgcttttgaagttgtgtagttataagactttataattatttttcagatgttttctattcaaagataatcaaaacagacaaaacagaaaaagttaatctgaacaagtgttacaagtgtcttttggcatttaactacatgtcctaggaaacaaagctacagaaacatcttgaaatagacaaattagttatcactggaaacattgtgcattagttg

SEQ ID NO: 259910 - DNA, 582 bp, Homo sapiens
tatgtgtataattcactgttttctttataaataaatacatctgtataaccattaccataaccaaaaactaaaacattactatttcccaaaaagttacattcagtttcttttagtccatcttcacataccactatcccaggcaaccaaatatctgctttatctaacaaggatcagatctgtatttggtagagattcatgtaaatgagagaatacaatatattctcttgggtgtctgtgtgtttatattcatccttgttattgcatgtgtcagtggcccatttcttattattttggagtagtagtccattggcagtttcttaaaaggctcaaatacgactakcatatcaatcagccactctatagtatttacttgtgagaaatgaaaacatatatacaggcaattttttgaacaatgaatgcatatagcagtattatttttaatatctcacaaaactggaattaacacaaatgcccatcaacaggtaagtgagtaaaatagttgtggtaaatacatacaatagagtaattctaagcaataaaaaggaatgaacacacaacaactttggtatacagcttagttaa

SEQ ID NO: 259911 - DNA, 512 bp, Homo sapiens
gtacagtcacattctgtacaggtttgttgcctaagggcaacagaatgtgccatacagcttaagtgtgtagtaggctataccatataggtttgtgtaaatacattccatgattttctcacaaaaatgaaatcagctaatgacacatttctcagaacatatttctgcctttaagcaacacgtctttatttatttataactagaaggagatataaactaaagaagataatgaaatgttacaatggaagattgtatttgttttaactcatattaatgcctgctaattttacaaacctgaattctctccatctttaagcaacacatgtctggctatcataaaacttttatttaagtgtatcttcatgaatgtatcatatttctattgcagtagattcaaatgaacacaagaaaagtcatatggctgtgttaagaggagaatatgaytgtcttaagcacttgttaaggagttgatataagcgggaagtaatttgtacatttaggaaaagcagcctatt

SEQ ID NO: 259912 - DNA, 578 bp, Homo sapiens
taataattaatttatagagaaactgaacttattttacctttcaaaatcagcccttacaatcttatgtgcccacctcttccgtgatagttcttgggccttgaggaactgagtagctttaatttcttgccctgtgtctcaggaatgccatttggttacctgtctttcaatgtcatggaagcaggaaaacttgccttcctgttggaaacaaagaaaactccaaaaaaaaaaaaaagaagttgtacagcaaaataaactttagatctcaaacaaaktttgggagatcaggtactctctggagggggttgctctcagacctcagcaaattgtcctatttatttgagccataaagttagctcatgctggtaccaagcacggataggagatttgtcaaaggtcaggggcatctccactcagaatcccccttccccgtggttaccaatatgtgaaccaagaaaatctgagacaggctgcagttaatttaggaagtttattttgccaaggccgaggacacgcccatgacacagcctcaggaggtcctgacaacatgtgccaaaggtggtcagggcacagtgtggttt

SEQ ID NO: 259913 - DNA, 578 bp, Homo sapiens
taataattaatttatagagaaactgaacttattttacctttcaaaatcagcccttacaatcttatgtgcccacctcttccgtgatagttcttgggccttgaggaactgagtagctttaatttcttgccctgtgtctcaggaatgccatttggttacctgtctttcaatgtcatggaagcaggaaaacttgccttcctgttggaaacaaagaaaactccaaaaaaaaaaaaaagaagttgtacagcaaaataaactttagatctcaaacaaagtttgggagatcaggtactctctggagggggttgctctcagacctcagcaaattgtcctatttatttgagccataaagttagctcatgctggtaccaagcacggataggagatttgtcaaaggtcaggggcatctccactcagaatcccccttccccgtggttaccaawatgtgaaccaagaaaatctgagacaggctgcagttaatttaggaagtttattttgccaaggccgaggacacgcccatgacacagcctcaggaggtcctgacaacatgtgccaaaggtggtcagggcacagtgtggttt

SEQ ID NO: 259914 - DNA, 533 bp, Homo sapiens
ttctggcattatttaatttcagttatcatgaacatttttggagagccattgggcctaatgaaacatttaaaaaactcaagctgaggtaaagaaattatggtcaaatctttgtttcctccagtagcagccacacagcgctacctttctccatcatgcttatgaattggcaaaaagaggtatggagcagttcccagcacaaattttgttttgttttgttttataggttttgcttccctagtccactaattatagacttgaaattatactttacagcaatgttgtagtggaaaactgtagaccattcctttgttttatttctgtgagcaaacttgttttttaatctgaattccaataaataattatcatcatctcatgaatcctgctgttgcattttgttagggagtttctggaggtcttgattgaaaattataattgrttaatagaatttgacttactagttcaagtttgttgtgggtagggaaattttggattatattgaaccataatctttctttcagttccatttcaaccaa

SEQ ID NO: 259915 - DNA, 439 bp, Homo sapiens
ccaattataattttcaatcaagacctccagaaactccctaacaaaatgcaacagcaggattcatgagatgatgataattatttattggaattcagattaaaaagcttagcatttccagctgtactatgattactctgattccaaaggttcgtaatcactaccagtggacataggcaattctactctttcagaaaactattttaaaaaataaaaaatgtaactaaaaacaaacaaatacattagaaaataacattaggagaatcattattctgggaatatattcacagggtatttgggtgcrtactctgggtatttgtttctctgccatatctgtctctagcagcacgtcactggtttcattctgaagaatatatatttttttcaatatatgttgatttttgaattttttaaatttaaattgccagtaactttttaaaat

SEQ ID NO: 259916 - DNA, 558 bp, Homo sapiens
tttattattttaagatgctatgccagtcactcagaaggcaatagcaaggagccaatgtccttgcaattttgagcccctcttgttagaagactgacagataaacaaatatataatggtagcatgaactctaattaaagtttatagcagayagacaagagatacaagaggtcacagaaaaattatggggagaaaaatttatttaagggatattaatgaagaaagacgaaagagtgaaaccgtattcacagattcaaagacgcttaaagaaatggaagatattaattatagctaaattaaaacactttatgattaaggaatttgaaaatgtagaaaagaaaagatttttatattaaaaaggggatcagtaatgtgaatacatttgggtttaaatttgaatgaatcatgagttatttcagttattgaagattatgaataataggcttactttgacttttctaaagataacctggctgaatatgggcagttggttatagaagaaggagggaaactaatttgtagaatattaaaatcatatgggaaagaaataagataataagt

SEQ ID NO: 259917 - DNA, 589 bp, Homo sapiens
agctcaagcatagcacaaatgaggtgaaattttccacgaaggcctgaaagagatgcttatcctctgtagccacaggctaaaactgctgaaagctaaacatagagttgaatcttgagtggcttaatacaatgtaaattgatttcccaactttgcgatgtgtctactgttgaattgagggcactgcttatgaagaaatgggattctaaaagttcagatggggtcctgtggaaagatcctaataaatttgaggacatgtagtccctaaattctgatgagtctgcttggccagtagaagcaccctttccatcsccatttcaggggattaattctgcattttttgaggaaactgtaatggcctctcttgagggagttaccttgctatgattctcctctgacccagtcaacgttacaccgctttgcttctggacctataactagactcaaatcccagcacatgcttaaagatgaggtaccaagtgtgactcaggaagaggtgcactatactccaaaagaactatttgagctttctaacatatacagacataaataggggaatatgtgtgtgaacggatattaagagtatgggata

SEQ ID NO: 259918 - DNA, 589 bp, Homo sapiens
agctcaagcatagcacaaatgaggtgaaattttccacgaaggcctgaaagagatgcttatcctctgtagccacaggctaaaactgctgaaagctaaacatagagttgaatcttgagtggcttaatacaatgtaaattgatttcccaactttgcgatgtgtctactgttgaattgagggcactgcttatgaagaaatgggattctaaaagttcagatggggtcctgtggaaagatcctaataaatttgaggacatgtagtccctaaattctgatgagtctgcttggccagtagaagcaccctttccatcgccatttcaggggattaattctgcattttttgaggaaactgtaatggcctctcttgagggagttaccttgctatgattctcctctgacccagtcaacgttacaccgctttgcttctggacctataactagactcaaatcccagcacatgcttaaagatgaggtaccaagtgtgactcaggaagargtgcactatactccaaaagaactatttgagctttctaacatatacagacataaataggggaatatgtgtgtgaacggatattaagagtatgggata

SEQ ID NO: 259919 - DNA, 572 bp, Homo sapiens
atctttcaatgacacaaagcagatattatctactttgttaaattacatattgttaaatggatgttcttttcatgtgtttcataaatggatccaatttctaccacagtagttatcttyaaatttgaagtaagaatttctcatgcacatgtgttgttcgtagtgtagctataatttctttttgcttatcttaggtaagagaagaaaaagaaggcttcattgctatatatcttctggattagttcctatttgattattaccaatattattgctgatgacattgctggaagcctgctgactttccattctaaattttgtgcaaggctgtcatggtgggatatgttactgtaaatctcatgagttaattctacaatttctctgtgccttctttcgtattttttttttgctttgcgcatatttctaagttatattcttaaaatcaactgtttttaaaatgtaaataaaatgcattttgagtgtctcatatctaagaatatatttgccttgtatagatttggtataaattttgtatataaaaatctctaaactgatagatttattattatctttctgta

SEQ ID NO: 259920 - DNA, 557 bp, Homo sapiens
ttgttgttgttgttggtaacagctttactgagatataattcatatatttaacatgtacaatttgatgatttttattatattcatagagttgtgcaaccatcaccacaaacaattttaaaatatttgtatcacactataaagaaaccttttatattttagccatcatcttgcaactccagtcctcagtccaaagcaaccactcatctacattctgtcattatagatttgtgtattctggatgtttcatataagtgcaagcataaaatatatttgctcctggcttatttcctttagcaggttttcagagtttcaccatgttgttgcatggttcartacttcattcatttatagttgaataataattcattgtgtggctgtaacacattttgtgtaacaaaaaatgtatcacatcagttggcagtattatggatattttctaccttttggtttatgaatactatttctgaatactattcctatgaacattcatatatgatatttgcatctgcatacgttttttaagttatatttttgtgttttactgtttattaaaatat

SEQ ID NO: 259921 - DNA, 569 bp, Homo sapiens
attagcttctgcttagcctttgtaaatgcagattgcctagagcaaatacggtaaattctaggctatttcaattaattttgtgtcaacatgcttaattagttaatatactatttaaacagtaaaattacttcatatttatgataactttaatattctatctcacccttgtatcctctgatttacaggtatgtgttaygacattccattatgttcatgcaagagaaagaaattattacaaagtttatttgttagcaatgaaaggattacttttacttttacaatgaaaacctaatagtcaagtaagaaaatgtatgaaatttacatcttgatttagtatgaatgaaaattattattctactaagttcaagacttagaggaaggagttgcagaattttctcctgaagagtttctaaaccaatgtctatactgcatgtgttgtagaatcaatgcattaaaacaggactttcactatgaaaaatatggtcccatcagagctttatttggacttctcacagtactttgggttatgatgtgaaatcatcagaaatatttgacatttggagaccagc

SEQ ID NO: 259922 - DNA, 539 bp, Homo sapiens
aagtattccttccacagcagtcttactactagaaaatcacactgtgcaacctctttctccgacaactattttaatcacactgttcttcagagtgaaccaattcatcctcacctataattaataattatttggcatacctcccggcctgacttcttactcgttaaactcacactagctattctagctcacaaacgatctcaataaattttcatgacactttagtttgttaatacaagattaagtatttagatattctcaattaattgtatatgcctcaagtttttgcacagaccataaacaacaaagctaacactcaacagtctttctataacaaatacctcttattttattctctgtgttattttctcttgtttccaggttgtttatctgctatgtttttaatgccatttgatcccaacaataaaaatatattgataattcatgtagactcctttaaataatattggacagctaaatatatttattttgtgcwtagaaaagatacattcacttcctggatgtataaccatccccttaca

SEQ ID NO: 259923 - DNA, 550 bp, Homo sapiens
gctgatatttttccatctaatacttttatcttacgttatatgggttaaggaacatacgacaatctccaacctaagcacatagtctctaagagatggcaactactctctgcgaagagtactatccatggaacccaagagtactatctccaytacttctaattgatcactagggactgccaaagctacctatctttgtccacctctctgcattcccaaggcctttacccagtgtcagacctccatcatcttccagttttactgctacagcctccaaacgggtctcctctcgctagtgtagtcttgacaaaacaataggtggtctttctaaaatgcaaatcccgtaaccgttctgtcctccctaacctttcaggagttgcccattgctcacagtatggagtctatactacttaacatgggtacaagtccctgcaaaactgaccaccgctgactccttcagtatcatggaatagtacacctcacacctccccacccagctatactaatctttcattcaatgtaattccctatgctttatcagttctcatcgtta

SEQ ID NO: 259924 - DNA, 550 bp, Homo sapiens
gctgatatttttccatctaatacttttatcttacgttatatgggttaaggaacatacgacaatctccaacctaagcacatagtctctaagagatggcaactactctctgcgaagagtactatccatggaacccaagagtactatctccactacttctaattgatcactagggactgccaaagctacctatctttgtccacctctctgcatycccaaggcctttacccagtgtcagacctccatcatcttccagttttactgctacagcctccaaacgggtctcctctcgctagtgtagtcttgacaaaacaataggtggtctttctaaaatgcaaatcccgtaaccgttctgtcctccctaacctttcaggagttgcccattgctcacagtatggagtctatactacttaacatgggtacaagtccctgcaaaactgaccaccgctgactccttcagtatcatggaatagtacacctcacacctccccacccagctatactaatctttcattcaatgtaattccctatgctttatcagttctcatcgtta

SEQ ID NO: 259925 - DNA, 550 bp, Homo sapiens
gctgatatttttccatctaatacttttatcttacgttatatgggttaaggaacatacgacaatctccaacctaagcacatagtctctaagagatggcaactactctctgcgaagagtactatccatggaacccaagagtactatctccactacttctaattgatcactagggactgccaaagctacctatctttgtccacctctctgcattcccaaggcctttacccagtgtcagacctccatcatcttccagttttactgctacagcctccaaacgggtctcctctcgctagtgtagtcttgacaaaacaataggtggtctttctaaaatgcaaatcccgtaaccgttctgtcctccctaacctttcaggagttgccyattgctcacagtatggagtctatactacttaacatgggtacaagtccctgcaaaactgaccaccgctgactccttcagtatcatggaatagtacacctcacacctccccacccagctatactaatctttcattcaatgtaattccctatgctttatcagttctcatcgtta

SEQ ID NO: 259926 - DNA, 615 bp, Homo sapiens
acatacaaatccacatcatttttataacaataaagtaaaacacttataatgaacagaaaatataattttgactcattactataggtaatttatacattaaccttaacttgcatcttattggtcagagtcacacaaaatgttattttatccttttcaaagatgcaataatcattttccatcatgcataacagattagaaattttgccattattgacttattttccatgcctttttttacggcatgaagcattagtttatagatatataatataaaaaattagttctgcttttttttaaaaaaaaatattatcaaaacaaaacactgaattgtgtgattccaatagaaaaacactgctctttcacctcctaaggtgtagttacttttatggaaactaagctgtattgtagacttccatttgcactttgtagattgtttatagccttatgttctcttctcaagtcttattataaatgtcactttgtaagaacgtargacttgtcttcgatttccctaacatatatgaaaactttgtcctcattatcgacaactcagaacaatataatacaagtagtcctcttttatttctcacagagagcctcaaattttcaccaaaa

SEQ ID NO: 259927 - DNA, 598 bp, Homo sapiens
atctttattaagtttcattgaatatgatttagttatgtgtatatggagttatccatctttggggagattactggattggtgagggcgggggaccctggtgtagaatgattatgtgaaaaaacaatttaacttgttaagctcatgatactgtttgaggcatacagcccctgcygtttagtacattggtctgggtcctgaaaattaccagttagataccatcagttgattattgatatgtatgagcagatactagggtgcaatatttcaggtttcataagactggtattgattgtgaccactctcattttttattgtgtaagttcatatggggttattttcaaaatgttaacaaggcaaaaatatattaagaaatagttgaataagcacatgtgaattgtgttgtaaacaaaaagttagaataaaaaaatccacttatttgaattatgcagaatagaatacatacctagaaataaaacaaaaacgtcttatcatgagtattaagataaaatttaaggcataaactcacttcttagaataagtaactcccaactaactttctaggattttaaaacataacacagtgaaaacatacataaac

SEQ ID NO: 259928 - DNA, 562 bp, Homo sapiens
atcattttcggctaggatatggtttctatttctaaaatagtggcacagtgttggtgaatgctttgtgagagcaaggaattggtagtagatttttgcagaatgctgcatttaccaaaagaaaaaaaaaaaccactaggaaattgacatctacaaaagcaaagtacttaagtagtaaattacatttaccaaggatcacatcagtagtgtgctttatctsattattccaatcaaaagggggcaaagtcaggatttgtagtgatacagtggtcctgtagatctaaaatcttaaggtctgagtttaaatccaaactctagcatttgctatctgtgttgggatcactccccgacttcatcagaagacctgctaacatctagacttgtctgttgtcaccaccatctcctttgggataccacctcaaggtactcaagttcgcctccagcctccaattcctttcctgcggtgggaagagaggggagacccagcttcatgttgctcagtgactatagattcccaaacaaatgacaggggaatttagaaacatttctgccttaaaactcaaat

SEQ ID NO: 259929 - DNA, 604 bp, Homo sapiens
gagtagtgcatctttgcacattaaggactcctcctttattttatcacttcgctttaactccgtaggtcctatacaaaccaaagaaattatcttccttccttccttccttctttccttttttttttttttttttttttttttttgatatagggtattgccctgtcacacaggctggagtgcagtgatgaratcatggctcactgtagcctcaaacttctggccccgagtgatactcacacctcaggctcctgagtagctgggatgcataccagcatgcccagctgatttttaaactttcgtacaggcagtatctctctatgttgcccaggtggtcttgaactcctggcctcaagtgatcctcttgcctcagcctcccaaattgctgggatgacaggcatgagccattgtatccagcaagaaagagaaaagaatttaaacttctaaagatgaaactgctacacgtggacagccataacaacaaagagaagagtactcttaagcatttgtgaaagtcagaaacctataaacttttgggaaacaaaataagtatattttccctttaatcttacaagtgatgcaatacacttctagcaaaagtgaaagg

SEQ ID NO: 259930 - DNA, 525 bp, Homo sapiens
tgactgactgatggggaaagttacacaatggatagctttgcagcaacatactaatgcggtagggagatgctgcagagaggctagaaataaaatcatttctttccggagcagcactgcttgctgtcggctgagacaaaaaagagatttcctttttttcctttcttttttttgaaaactcacataacattaattctgttaagcactggatacacggaaaggtgtttaccttagaaaatcatttagcaatttttagaaactagacatatagcaattttaaatctttttaactatctaatgaccaaagcagagggtcctcacaagagggatttagatgctactgaattgaataaagaaaatatggatacatttattgtatgccttattcagtttgaggttcattttgagtttagaaatagggatataaaaacatcaggggttaaatagcatgggtaaaggacatgaaccaagctgcagagaagaggctgactgcctgctayatttgcaggcattactcagcacttttct

SEQ ID NO: 259931 - DNA, 616 bp, Homo sapiens
agtgtgatccggaacaggtttcttaactttctgtgactcagttatctcacttgaaaacagaataaatgtacttagctcatagaggtaatgtgattccaatttagcyggtcagattttgatacctagtttttatactttaaataagtaatccagatgattctgtcatagcagggctgttaatatgtttgttacctaatggttgtaaaaaatcacaaaccattggccaaattatcaatgattatgttgtacatgtggattgaaatcttgccccttgatctaactgaatagttactaagaaaataattatgttataatgatttggtagaaattgctatttatgaagctatatttgttattatctagtaatcttttcttgtttctgggcttatagaaagtgatttgtttacaattttttcccaggatggacattgaatttaacaagccatggttttccagtttctttttctcatttaaatatagccattaccttaacatttatttcaatctaggggccatattcttcaaagtacatagtttaaacataagctgtaactttgtgtttcatctaaacattattgaaacattgccaaataacaggactgactccaaatttatt

SEQ ID NO: 259932 - DNA, 616 bp, Homo sapiens
agtgtgatccggaacaggtttcttaactttctgtgactcagttatctcacttgaaaacagaataaatgtacttagctcatagaggtaatgtgattccaatttagctggtcagattttgatacctagtttttatactttaaataagtaatccagatgattctgtcatagcagggctgttaatatgtttgttacctaatggttrtaaaaaatcacaaaccattggccaaattatcaatgattatgttgtacatgtggattgaaatcttgccccttgatctaactgaatagttactaagaaaataattatgttataatgatttggtagaaattgctatttatgaagctatatttgttattatctagtaatcttttcttgtttctgggcttatagaaagtgatttgtttacaattttttcccaggatggacattgaatttaacaagccatggttttccagtttctttttctcatttaaatatagccattaccttaacatttatttcaatctaggggccatattcttcaaagtacatagtttaaacataagctgtaactttgtgtttcatctaaacattattgaaacattgccaaataacaggactgactccaaatttatt

SEQ ID NO: 259933 - DNA, 439 bp, Homo sapiens
atatttaaaaagtagtattacatyaaaaagaagaaaattacagttaataaagcttcaggagacagtaatagaaaatgttagttgggtgcagtggctcacacctataatcctagcactttgggaggctgaggctggaggatcacttgaggccaggagtttgagaccagtgtgggcaacatagtgagaccccttctctacaaaaaaaaaatatatacacacatatatatatatatatatatatatatatatattaatgagttgggtgtggtggcatcttcccatctcagcctccttagtagctggtgatacgaatgccagtaggtccacttcaatcaccagctccctgaaatctgttgtttgtttgttttatctaagttcaaaatactgactatgagggttatttagggtttattctctctagggaaaatttattggactg

SEQ ID NO: 259934 - DNA, 439 bp, Homo sapiens
atatttaaaaagtagtattacattaaaaagaagaaaattacagttaataaagcttcaggagacagtaatagaaaatgttagttgggtgcagtggctcacacctataatcctagcactttgggaggctgaggctggaggatcacttgaggccaggagtttgagaccagtgtgggcaacatagtgagaccccttctctacaaaaaaaaaatayatacacacatatatatatatatatatatatatatatatattaatgagttgggtgtggtggcatcttcccatctcagcctccttagtagctggtgatacgaatgccagtaggtccacttcaatcaccagctccctgaaatctgttgtttgtttgttttatctaagttcaaaatactgactatgagggttatttagggtttattctctctagggaaaatttattggactg

SEQ ID NO: 259935 - DNA, 439 bp, Homo sapiens
atatttaaaaagtagtattacattaaaaagaagaaaattacagttaataaagcttcaggagacagtaatagaaaatgttagttgggtgcagtggctcacacctataatcctagcactttgggaggctgaggctggaggatcacttgaggccaggagtttgagaccagtgtgggcaacatagtgagaccccttctctacaaaaaaaaaatatatacayacatatatatatatatatatatatatatatatattaatgagttgggtgtggtggcatcttcccatctcagcctccttagtagctggtgatacgaatgccagtaggtccacttcaatcaccagctccctgaaatctgttgtttgtttgttttatctaagttcaaaatactgactatgagggttatttagggtttattctctctagggaaaatttattggactg

SEQ ID NO: 259936 - DNA, 587 bp, Homo sapiens
ccaggctggtctagaactcctgccctcatgccaaatctcctttctgaaatatattttcttctatatttcccaatgtctatgtagagtatcattgtttttccagccatcaaggatagaaaatgtggtcatctttgatttttttggttctcctctatctaccaattctgctttaacaaaaagcctgaactcagcaaggtagaaacaagtaatgattttgcagctccccatcactgttttcaatcatgtgctgttgaatttcctctctctgttccttaatacatcttcagcagatcacagagcttgtagttactttctgtagtccagattaagactcatgttcrtttatttaaaagtctagtccaggtaaaatcaaatcttttctttggtttccagttcaaagcgtgtgaccttattccattgtgcaggtttcctccagatctgcagtgacctgaattggaggcccatcccaggtcaggggtcccccactgtggcttacgagtggagtcttaggatttcactgacccatagattgtggtgtgtctcctcttcatcctttcccatgtggaagtgtttagtgaggttatctt

SEQ ID NO: 259937 - DNA, 587 bp, Homo sapiens
ccaggctggtctagaactcctgccctcatgccaaatctcctttctgaaatatattttcttctatatttcccaatgtctatgtagagtatcattgtttttccagccatcaaggatagaaaatgtggtcatctttgatttttttggttctcctctatctaccaattctgctttaacaaaaagcctgaactcagcaaggtagaaacaagtaatgattttgcagctccccatcactgttttcaatcatgtgctgttgaatttcctctctctgttccttaatacatcttcagcagatcacagagcttgtagttactttctgtagtccagattaagactcatgttcgtttatttaaaagtctagtccaggtaaaatcaaatcttttctttggtttccagttcaaagcgtgtgaccttattccattgtgcaggttycctccagatctgcagtgacctgaattggaggcccatcccaggtcaggggtcccccactgtggcttacgagtggagtcttaggatttcactgacccatagattgtggtgtgtctcctcttcatcctttcccatgtggaagtgtttagtgaggttatctt

SEQ ID NO: 259938 - DNA, 574 bp, Homo sapiens
aaccaaccagacattttcatctctccattattccagtcatccaaacttgaaagccttagttatatttgactgttctctgtccctcatgtcctcctctatttagtcagcccacatctttcctataacagtttcctcaatgtccaaattcccttcttagaatcctgaattgccccttagcacctacaggacgttcttcagtccgataataagtgccatccattgtataccaatggcgctccattcttgtcagaccaaatcccttggtgacaacaaaaaagaaccacatttataccaacctctgratctctgcccatgctatcccttcagaccctaatcccccagctcctttcttccagtcatccaaattctccccatccttctgttcttcaagtccaggtcacatcccatttccttaatgtggtcatctctgaacaccccaaacgacagcaatctcttcagaacccttgtggggttctgaaatcccacaaccctaaggtgtatgtggctaacttcagcatgtttcatcgttcctccttatattgtttgcccttatttcatgtagtcaatttcatga

SEQ ID NO: 259939 - DNA, 603 bp, Homo sapiens
gtaaactagtgcaaccactatggaatgctgtgtggagattcctcaaagaactaaaagtatatctaccatttgatccagcaatcccaatccttggtatctacccagaggaaaagaagtcattagctggatgtgatggcttatgcctgtaatcccagcactttgggaggctaaggcacgcagatcatttgagtctggtcattcaagaccagcctggccaacatggagaagcccctgactctactaaaaatgcaaaaattagccaggtatggtggcacatgcctgtaatcccagctacttgggaggctgaggcaggagaatcacttgaaccctggagacagaggctgcastaaactgagatcacgccactgcactccaggctgagcaaagactctgtcccaaaaaaaattcgttatacaaaaatgatacttgcacatgcatgttaatagcagcacaattaacaattgcaaaaatatggaaccagtccaaatgcccatcaatcaacaagtggataaaaaaaatgtagtacatatataccatggaatactactcaaccataaaaaggaatgaaataatggcattcaaatcaacctggatagaattgga

SEQ ID NO: 259940 - DNA, 277 bp, Homo sapiens
aacaattgcaaaaatatggaaccagtccaaatgcccatcaatcaacaagtrgataaaaaaaatgtagtacatatataccatggaatactactcaaccataaaaaggaatgaaataatggcattcaaatcaacctggatagaattggagaacatcactctaagtgaagtaactcaggaaaggaaaaccaaatatcgtatcttctcagtcataagtgggacctaagctatgaggacacaaaggcttaagaatgatacaatgaactttggggacttgggg

SEQ ID NO: 259941 - DNA, 536 bp, Homo sapiens
aacaaccagaaaagaactaacaaaatggcagcagtaagtccttacttagtaataattactttgaccgtaacagattatgttcttccaaaaagatgtagaatgactgaatggattttacaaaaataagatctaactatatgctgcttacaagagtacaccttgcttttaagaacacacatagatgaaagaaaaaggatggaaaaagacattccatgcaagtggaaatcaaaagaggaggaatagctataatcatatcagacaaaatgtaacttaagtcaaaaactgtaagaggcaaagaaagatattataacatagtagagggttcaattcagcaaaaggatataacaattataaatatayatatatatatatatatatatatatatatatatatatatatatatccaacattggagcatctaaacatgtaaaacaaatattaaaggatctgaggagagaacagattgcaatacagtaatagtaaggaaacactgggtttaaacaacacttcagacaacatggactggacagacatg

SEQ ID NO: 259942 - DNA, 631 bp, Homo sapiens
aaagaggagaaaataaaactgataccacagaaatacgaaggttcgtaagaaactactatgaacaattatacaccaacagattggataacctaataaagccctaaaattatacaatctactaagactcaatcatgaagaaatagaaaatctgaacaaaccaataaagaataagatgattgaatcagtgacaaaaagtctctcatcagaaaaaaataaagcccaggacctgatgacttcactgcttaattctagcaaacatgtaaagaactaacatcaatccttcttaaactcttccaatatattaaagaggagagaatgcttccaaactcttttaatgagactagcagtactctgataccaaagctagacaaggacattccaagacaagaaaattactagccaatatccttgatgaacatatgctctagacaggtgatctgcttaagaaataaaaattcaaaaaaatttaaaaatatccatgatgaacatagacgcaaaaattctgaacaaaacactagcaatctaacaacacattaaaaggkttatctaccatgatcaagtgggatttatctctgggatgcaaagatggttcaatgttcacatcaataagtgtgatatattacattaacag

SEQ ID NO: 259943 - DNA, 548 bp, Homo sapiens
tgtacacatttaatgcagtctctatcaaacttccaatgccttttttcatagaaatagaaaaaaaaaccctaaaattcatatggaactacaaaaaaaatccctaatagccaagtcaattatgagcaaaaagaacaaggtggaaatatcacattacctgatttcaaattatattacaaagctatagtaattaaaacagcatgatactggtaaaaaaaaaaaacagacacatcaacaaatggaacaaaataggaagccccaacataaacctatgcatgtttggtcaatttatttccaaaaaggtgccaagaatatacaatgagaaaaggataggttcttcaataaatggtgttggggaaamcagatatccacatgcagaagaatgaaagtaggcccttatctgacacgatattaaaatatcaattcaaaatggattaatgatgtaaatattaaaaccaaaactgtaaaactattaggagaaaacatggtgagaaactatatgatgttggtctgaacaatgattttttttaaatttgatcccaaaagcacag

SEQ ID NO: 259944 - DNA, 544 bp, Homo sapiens
acttcagtctctgtgacagagtgagactccatctcaaaaaaaaaaaaaaaaattaatcttctataaaccttttataacttacttaaacttcgtttttttaacttaaaataatctttaaaccatctaaactaggcaaaattactttatctttaataaaaaaccatgtttccatgcctttttatarctttttaccaagacatattttactttctttagacaacttgcatgtaaaactgtttttctagtagtcccaattacatatgttataatgtaaactcctagcaacttttattcttaatgaaagataaaggaagtaagcaattttaattatataccaggtgtagaacctaggagacaggatagaacttcagataatgtttgactttttccagcatagccagggagcacagctaagtccatgtgtgccctggctttacttagaatttaatggctccaaagctggcgagtccaacaattattaaaatgtcacagaagcagtttgtgatcttaaaacatctagcaaagacagtatctggcttgctta

SEQ ID NO: 259945 - DNA, 545 bp, Homo sapiens
caggtgatattatttttcatttgccagttttaagtttctttttcttgttttagacgatcggtctcttgattacctgttccctttcccaaacaattgccagccagacagcttcaaatttacwttttcgtagaaatatttattaggtgaaacaaaatagagaattcatattctatttagagtgaggaaaaatggtgtgggtaaaagttcagtcaagacagccagcaaaggcagacactcttacaaatggaaattttctaaaagatctgagtttcttaattggaacttagatctggctttaagattactggctttaaggtggagacttttaaggaatagggccaggaaacatgcattttgtagggctaacaagcaggcacagctggaaggcaaacagacctccccaaatcaaagatctcatttttccaccgaatcctgggtgccccaaagagggaagtgctacaggatgagatagtgcaatgctttcacagtgtataccatcaaaaggacatttctgtgaggctggtgggcaacccaaagccaatcag

SEQ ID NO: 259946 - DNA, 601 bp, Homo sapiens
acttaaattcagcctatactacatcagcttacagctggtttaatcatcctttgctaggggacatgacatcctaggagtgtgccttcctagtgacatgggatcaaaatttctcaacataaaaggagtccaaccattaaattcatctatgatggtttcttcaaaaagttcttgaagaactttcttccaaaaagaagaaaaatgtaaaaataagtaatccaaattgaaggtattggaactctaaaattattttgamccttaaaggaatgtgattatgggcctgcatcacataacagacagctgtaacctttgtttctctgattatagattaagcctccttccttacctgtattgttttgtgttaataaaatgacatgaatgacagaagggcaccaaggaagaccccttccttctcctctgttgatcttcattgtagattaacctccctctcacctttctcacacaaagacttcatgactaccacattgtcttaagatggaatgttaaacatactcttttaaattggaaaggaaatgaaaatcagctatgaataaaacaagccatacagaaaagaaaacaaactctaactaattaatttgttata

SEQ ID NO: 259947 - DNA, 532 bp, Homo sapiens
tctctgcattcctgtgtttattacagcattaatatgatagccaagttatagaatcaactaagtgtccgtgagcagataaataggtaaacaaaatgtggtatatatacaccataaaatactattcagactggaagaaagaaggaaattctgtcatttgcaacgacatgcatggaattgaagaacattatgctaagtaaaataagccagagaaagacaaatactgaatattctcacttatatgtggaatccaaaagaattgaacccatagtagcagagaatagaatagtggttacagaggctgggggttgtggggagatgatggccaaaacgtaaaaagtcttcgacagaaggaatacgacttctttgatcgctattgctcaaaatagagcatagagtattamacaactcaaaattgctaagagggtaaacttgaaatgttctcaccacgagaagtgttaagtatatggggtgatgaatatgttaactaatttgatttagttattccacattgtattcataaatcataaaatca

SEQ ID NO: 259948 - DNA, 532 bp, Homo sapiens
tctctgcattcctgtgtttattacagcattaatatgatagccaagttatagaatcaactaagtgtccgtgagcagataaataggtaaacaaaatgtggtatatatacaccataaaatactattcagactggaagaaagaaggaaattctgtcatttgcaacgacatgcatggaattgaagaacattatgctaagtaaaataagccagagaaagacaaatactgaatattctcacttatatgtggaatccaaaagaattgaacccatagtagcagagaatagaatagtggttacagaggctgggggttgtggggagatgatggccaaaacgtaaaaagtcttcgacagaaggaatacgacttctttgatcgctattgctcaaaatagagcatagagtattacacaactcaaaattgctaagagggtaaacttsaaatgttctcaccacgagaagtgttaagtatatggggtgatgaatatgttaactaatttgatttagttattccacattgtattcataaatcataaaatca

SEQ ID NO: 259949 - DNA, 522 bp, Homo sapiens
ctatttgcaaatgacatgattgtctmcaaaaatctcctaaaaatagtgcatcatcaagattacagaataaaatataaacatgtaaaaatctattgtatttctgtatgctagtgataaatatggacaacaaaattaaaaacctaatacaatatataatcactcaaaataaaatactcagataaatctgacaaaatatgtacaggacttgccaaagactatacaatgctaatgaaagaaatcaaagctctgaataattaaagaaacatatatttatgattggaataaaacacctcaaattaatatacagctttaatgcaatttatctcaaaatcaagatttttgtagatataaacaacagtatcctaaaatgtatatggaaaggcaaagaaactggaatagctaaaataattttgaggaaaaaaagaatcaagtgggagaaatcagtctccccaatatcaaggcactatgtagttacaataatcaagactattggcagacaggtagaaacatagattaatggac

SEQ ID NO: 259950 - DNA, 522 bp, Homo sapiens
ctatttgcaaatgacatgattgtctccaaaaatctcctaaaaatagtgcatcatcaagattacagaataaaakataaacatgtaaaaatctattgtatttctgtatgctagtgataaatatggacaacaaaattaaaaacctaatacaatatataatcactcaaaataaaatactcagataaatctgacaaaatatgtacaggacttgccaaagactatacaatgctaatgaaagaaatcaaagctctgaataattaaagaaacatatatttatgattggaataaaacacctcaaattaatatacagctttaatgcaatttatctcaaaatcaagatttttgtagatataaacaacagtatcctaaaatgtatatggaaaggcaaagaaactggaatagctaaaataattttgaggaaaaaaagaatcaagtgggagaaatcagtctccccaatatcaaggcactatgtagttacaataatcaagactattggcagacaggtagaaacatagattaatggac

SEQ ID NO: 259951 - DNA, 604 bp, Homo sapiens
ataggtaggcatcatccaatcagttgaaggcctgcatggaccaaaagactaaccctcccccaagtaagagaatttctcctgcctgatggccttcaaactggatgttgtctcttcctgattttccaggcaactcctggccttcagacttgaactgggtcatgagctctgcagacttyggccttgccagccttcataatcacatatttctctggagaattctaatacaggcttctcttagctaaaatggtttctcagactttcctggtttctgatgacctttgaggaagagatactcctcaagctgggtttttttaatgtcttttcttattattacaccagcgttacatgtctttgggagggaaacctcagaggtaaaatgcctttcccatcacattactgtaagagtacacatttttcaatatgagttattattaataatattagcctcaatcacttggccaaggtagtttttccagacttctctacagtaaacttacttccccccataccatcttttcacactctgctttttgaaagcaagtcattaagcacacactcactcaaggggtaaggaagtaaactccatgtccttgaagggaaatta

SEQ ID NO: 259952 - DNA, 490 bp, Homo sapiens
aagcaatcagttctgcagaaggcaccagctggatgtcctttaattcaattctgaggctatctacccggagacagcatcagatgccacaggttgagggctcagtccccaaaactgctccccacttyggacactagtagcaagtctggcctctgaaacttctctccagctggcttcaagttagagtttccatgaccccatcttgggttcaattaatttgctagagcagatcacaaaactcagagaaatagttacttacatttactggtttattataaaagatattacaaagaatatagatgaagagatgtgtatggtaaggtatgaagaaaggggtgtgaagcttccatgccctcactgggcatgccatcctctgggagcctccatgtgttcagctatctaaaagcttgccaaactctgtcaacttgggtttttatggaggcttcattatgatcaaaccacaggccattgctgatcagtctgtctttcagcc

SEQ ID NO: 259953 - DNA, 522 bp, Homo sapiens
ctatttgcaaatgacatgattgtctccaaaaatctcctaaaaatagtgcatcatcaagattacagaataaaatataaacatgtaaaaatctattgtatttctgtatgctagtgataaatatggacaacaaaattaaaaacctaatacaatatataatcactcaaaataaaatactcagataaatctgacaaaatatgtacaggacttgccaaagactatacaatgctaatgaaagaaatcaaagctctgaataattaaagaaacatatatttatgattggaataaaacacctcaaattaatatacagctttaatgcaatttatctcaaaatcaagatttttrtagatataaacaacagtatcctaaaatgtatatggaaaggcaaagaaactggaatagctaaaataattttgaggaaaaaaagaatcaagtgggagaaatcagtctccccaatatcaaggcactatgtagttacaataatcaagactattggcagacaggtagaaacatagattaatggac

SEQ ID NO: 259954 - DNA, 608 bp, Homo sapiens
acaatataagacatgttctctcacttcccctgtgtgtctgtcttggcccttggtggaaaggacttytgtccacattgtagccactgcctactccaacagctggaggcttctgctgctgccctcaccagtcaaactgatgcctcacaaactgatacctctttctttacattgctgacttccaagtcaagatctcgcaagggtgagttacctgggaatacgtagatcataggcctgtggtttagttgtacaggaggccagaaaagtggggagtgcacattttcaaatttcccaaaagggtgttttaaaatgtgtggggcaggcagaaaatatggcagataaaaagatttccgaacggtactgaagggccatttgatgttggtgatcatgcttttgttttagtatgattgtataaatctctcccagctgtgccaggcaaacccagaaaggaacagagaaaaggaattgttggtttgatcctgagtttaggatgttgggatagttgcagaagaaaggcaaggctactaggatgccaagtagccctgaaagaggtaaatggagtgatagagttctccatgaatttgaagagcaggtggtaatgacagagaata

SEQ ID NO: 259955 - DNA, 529 bp, Homo sapiens
agaaaagtggggagtgcacattttcaaatttcccaaaagggtgttttaaaatgtgtggggcaggcagaaaatatggcagataaaaagatttccgaacggtactgaagggccatttgatgttggtgatcatgcttttgttttagtatgattgtataaatctctcccagctgtgccaggcaaacccagaaaggaacagagaaaaggaattgttggtttgatcctgagtttaggatrttgggatagttgcagaagaaaggcaaggctactaggatgccaagtagccctgaaagaggtaaatggagtgatagagttctccatgaatttgaagagcaggtggtaatgacagagaatagttttatgggaatttaagattgtaggcattgtgaagttctgggtaatgacctaatgtagaaacatggataatattcacccagtttgcactgtgtgaggatggttctaatgccctatccaggttggggaaaatatgacatgaccattgggcatggtagcatgcacctatagtcccacc

SEQ ID NO: 259956 - DNA, 529 bp, Homo sapiens
agaaaagtggggagtgcacattttcaaatttcccaaaagggtgttttaaaatgtgtggggcaggcagaaaatatggcagataaaaagatttccgaacggtactgaagggccatttgatgttggtgatcatgcttttgttttagtatgattgtataaatctctcccagctgtgccaggcaaacccagaaaggaacagagaaaaggaattgttggtttgatcctgagtttaggatgttgggatagttgcagaagaaaggcaaggctactaggatgccaagtagccctgaaagaggtaaatggagtgatagagttctccatgaatttgaagagcaggtggtaatgacagagaatagttttatgggaatttaagattgtaggcattgtgaagttctgggtaatgacctaatgtagaaacatggataatattcacccagtttgcactgtgtgaggatggttctaatgccctatccaggttggrgaaaatatgacatgaccattgggcatggtagcatgcacctatagtcccacc

SEQ ID NO: 259957 - DNA, 622 bp, Homo sapiens
tgggcatggtagcatgcacctatagtcccacctatgcaggaggctgaggtgggaggactgcttgaaggcaggaatttgaggctgcagcatgctattattatacctgtgaatagccactgcactccaacctgggcaacatagcaagacccaatctataaaaaattaataaaaggacacaaccaatttgcaaggatctcaggatgcaggcattttggcagtagtgctgcatgtttgccattactgatgttaagtgtggtcacagaaggtygggtaatgagaagtggtagttgatagagcaggagcaccatcatctcggacaaacatcgccactttaaattccagctccctttctagcctcatgcatttcaaggaaatcacctctcttctaactacaagcagccagaaagggcagacagtaaaacacagataagacagcgtgggcacagagggaggttggggaaaagcacaacaaaaaagcaaaaaacaaaaaaacacagaagcagtcaaagactctgataaactctcccaccctgaatcattaaaaactcttagtctgtaagagagtgtgcctctgacttgactcagccagtaggctcctctcaggtttattttctctaaaata

SEQ ID NO: 259958 - DNA, 558 bp, Homo sapiens
atattacatagcaaggataagaatgtctcaatcttagatgatcattgtgacactcagtgcagggtaccacactgtgacactcattgcaggtaccacaatgcagggtaccattaagaagcagttttcacagtcacagaatcttttccttgactgtctcctagctctctctctycttttttttgtcacaagatcttagggcagattgcatgtcttccgtgaagtcgatatggccactcttctgtgctcttgtgacccactctgtgctctgtagacccacctgtgcttctatgggtcacagctcctgggaccataaaggccactggtggcctcatgttggtcaccatgtatatgctcctggttgttcatttgtcagaactttttccagtgtggagttagtctctcttacactccaacctttgcctccctgtgttgatataatttttgttgctgttattaggctgtgagacagaacagattttgctttaattttctggcatcatcctctgaggtgacatcttctcttgactcattcagcttatttcaatcaccttctcctta

SEQ ID NO: 259959 - DNA, 558 bp, Homo sapiens
atattacatagcaaggataagaatgtctcaatcttagatgatcattgtgacactcagtgcagggtaccacactgtgacactcattgcaggtaccacaatgcagggtaccattaagaagcagttttcacagtcacagaatcttttccttgactgtctcctagctctctctctccttttttttgtcacaagatcttagggcarattgcatgtcttccgtgaagtcgatatggccactcttctgtgctcttgtgacccactctgtgctctgtagacccacctgtgcttctatgggtcacagctcctgggaccataaaggccactggtggcctcatgttggtcaccatgtatatgctcctggttgttcatttgtcagaactttttccagtgtggagttagtctctcttacactccaacctttgcctccctgtgttgatataatttttgttgctgttattaggctgtgagacagaacagattttgctttaattttctggcatcatcctctgaggtgacatcttctcttgactcattcagcttatttcaatcaccttctcctta

SEQ ID NO: 259960 - DNA, 558 bp, Homo sapiens
atattacatagcaaggataagaatgtctcaatcttagatgatcattgtgacactcagtgcagggtaccacactgtgacactcattgcaggtaccacaatgcagggtaccattaagaagcagttttcacagtcacagaatcttttccttgactgtctcctagctctctctctccttttttttgtcacaagatcttagggcagattgcatgtcttccgtgaagtcgatatggccactcttctgtgctcttgtgacccactctgtgctctgtagacccacctgtgcttctatgggtcacagctcctgggaccataaaggccactggtggcctcatgttggtcaccatgtatatgctcctggttgttcatttgtcagaactttttccagtgtggagttagtctctcttacactccaacctttgcctccctgtgttgayataatttttgttgctgttattaggctgtgagacagaacagattttgctttaattttctggcatcatcctctgaggtgacatcttctcttgactcattcagcttatttcaatcaccttctcctta

SEQ ID NO: 259961 - DNA, 589 bp, Homo sapiens
caaagggaatatagtaaagagctaggaacttctcaggggcagcacctcattagagagttggggttacagtgtcagcctctcagaatttggatattctttctaatgcagagttgctcagatcattggtgattaactgataataactaaaatcacccaagactgggcataaaataatgccatcaccatactcagtatactaagaagttcccatacccctccaaattttctttttgtagtaagcccctcccacaacmcttaacccctgacaaccactgatctcttcaccatccctatagttttgccttttccagaatgccatgcaatactgatatggtttggattggtgtccccacccaaatctcatgtcaaattgtaatccccagtgttagaagaggagcctggtaggaggtgattggatcatgggggtggatttcccacttgctgttctcatgacagtgagtgggttctcatgagatctggttgtttaaaagcatgtagcccctcccctttctgtctctttctgcttctctagccgtgtaagagtgcctgccccctttagaaagtatcctgagacctctccagccatgct

SEQ ID NO: 259962 - DNA, 565 bp, Homo sapiens
ttctgcacacaccactctctattccttagacaaaggtttatgaggctaaagcaaggggaagtaaggcattctgatgagagggagttataagaggaggttggcgtggacggttttcatggtgtggggagtccagatcaaagggaatatagtaaagagctaggaacttctcaggggcagcacctcattagagagttggggttacagtgtcagcctctcagaatttggatattctttctaatgcagagttgctcagatcattggtgattaactgataataactaaaatcacccaagactgggcataaaataatgccatcaccatactcagtatactaagaagttcccatacccctccaaattttctttttgtagtaagcccctcccacaacacttaacccctgacaaccactgatctcttcaccatccctatagttttgccttttccagaatgccatgcaatactgatatggtttggattggtgtcsccacccaaatctcatgtcaaattgtaatccccagtgttagaagaggagcctggtaggaggtgattggatcatgggggtgga

SEQ ID NO: 259963 - DNA, 601 bp, Homo sapiens
caaaccttgtttggattctgtctttaaatgattttaaagtttctaacataactgaaatacccatatttttcagtgcatattaattctgctatcactagaatttcttccttgaaaaagaactattttataaaataaacaatatgtatttatcactgagaaattagaaaaaaacaaacaatcccatcaaaaagtgggctaaggacatgaatagacaattatcaaaagaagctatacaaatggccaacaaacataaaaaaatgctcaacagcactaatgatcagggaaatgcaaatcaaaaccacaatgtgataccaccttactcctgcaagaatggccataatcaaaaaaataaaaaaaacagtagatattggcatggatgtggtaaacaggsaacacttctacactgccggtgggaatgtaaactagtacagccactatggacaacagtatggagattccttaaagaactaaaagcagaactaccatttgatccagcaatcccattactgggtatctacccagaggaaaagaagtcattattcggaaaagatacttgcacatgcatgtttatagaagcaaaattcccagttgcaaaataatg

SEQ ID NO: 259964 - DNA, 585 bp, Homo sapiens
aaaatgagttgtgttttaacctcttcctggtggatttggtgaaataaatacacccccaaataacaaagcatgctagtatttgtgccataaagagacactaaaaggaagattatatatataaatctctctctctatatatatrtatgtatatatatattccttaaacctcatgaacaaacatatatatatgtgtatgtatatatatatatatacacacacagagagagagagaaagagagagagagagagagagatggagtctcactctgtctcccaggctggagtgcagtggcatgatctcagtgcactgcaacctccacatttctgggttcaagcgaatctcctacctcaggctcccgagtagctgggattacaggcccgtgccaccacacccagctaatttttgtatttttagtagggacaggatttcaccatgttgaccaggctgatcttgaactcttgacctcaggtgatccactggcctcagcctcccaaagtgctgggattacaggcgtgagccaccatgcccggcctgcaaggaagatttttaaaaggagatatttgctagaggaatcaaggaaatct

SEQ ID NO: 259965 - DNA, 585 bp, Homo sapiens
aaaatgagttgtgttttaacctcttcctggtggatttggtgaaataaatacacccccaaataacaaagcatgctagtatttgtgccataaagagacactaaaaggaagattatatatataaatctctctctctatatatatgtatgtatatatatattccttaaacctcatgaacaaacatatatatatgtgtatgtatatatatatatatacacacacagagagagagagaaagagagagagagagagagagatggagtctcactctgtctcccaggctggagtgcagtggcatgatctcagtgcactgcaacctccacatttctgggttcaagcgaatctcctacctcaggctcccgagtagctgggattacaggcccgtgccaccacacccagctaatttttgtatttttagtagggacaggatttcaccatgttgaccaggckgatcttgaactcttgacctcaggtgatccactggcctcagcctcccaaagtgctgggattacaggcgtgagccaccatgcccggcctgcaaggaagatttttaaaaggagatatttgctagaggaatcaaggaaatct

SEQ ID NO: 259966 - DNA, 585 bp, Homo sapiens
aaaatgagttgtgttttaacctcttcctggtggatttggtgaaataaatacacccccaaataacaaagcatgctagtatttgtgccataaagagacactaaaaggaagattatatatataaatctctctctctatatatatgtatgtatatatatattccttaaacctcatgaacaaacatatatatatgtgtatgtatatatatatatatacacacacagagagagagagaaagagagagagagagagagagatggagtctcactctgtctcccaggctggagtgcagtggcatgatctcagtgcactgcaacctccacatttctgggttcaagcgaatctcctacctcaggctcccgagtagctgggattacaggcccgtgccaccacacccagctaatttttgtatttttagtagggacaggatttcaccatgttgaccaggctgatcttgaactcttgacctcaggtgatccactggcctcagcctcccaaagtgctgggattacaggcrtgagccaccatgcccggcctgcaaggaagatttttaaaaggagatatttgctagaggaatcaaggaaatct

SEQ ID NO: 259967 - DNA, 581 bp, Homo sapiens
gacaccaggactcatagacatggtcactccctccagaggactcaaatctgtaaactataaatgcaatggagtgctggagttattttatagaaataagaacaggatatggtagaaaaaatatatatagtcagttctgtatgatggacaggcaattaagaagtcttcatagaggaaccatcatcagagccttggagcrtaaatatgggtttaccaaacagacctagaggtgcaggataggaagaaagaggaagggtgtagggggttaggtatggctgtggaaaaaaagataagactggtgagagtacagagagcatgatactggggagtatttcaccttgtgtcaaaaagcttgagctttatcttgcaggaccaaaggtgggacactggatgattataaccatattttcaggatgtcagaagggcgaagaatgagttgagaagtttagggtgaaatgaggtaaaccagctaatatactattctaatgatctgtctgatcaatgccaaaggcttaaagtggaaaagaagagatgttatagaagtaggacatatataattagagagataaataggagtgtggtag

SEQ ID NO: 259968 - DNA, 458 bp, Homo sapiens
acaccaggactcatagacatggtcactccctccagaggactcaaatctgtaaactataaatgcaatggagtgctggagttattttatagaaataagaacaggatatggtagaaaaaatatatatagtcagttctgtatgatggacaggcaattaagaagtcttcatagaggaaccatcatcagagccttggagcgtaaatatgggtttaccaaacagacctagaggtgcaggataggaagaaagaggaagggtgtagggggttaggtatggctgtggaaaaaaagataagactggtgagagtacagagagcatgatactggggagtatttcaccttgtgtcaaaaagcttgagctttrtcttgcaggaccaaaggtgggacactggatgattataaccatattttcaggatgtcagaagggcgaagaatgagttgagaagtttagggtgaaatgaggt

SEQ ID NO: 259969 - DNA, 581 bp, Homo sapiens
gacaccaggactcatagacatggtcactccctccagaggactcaaatctgtaaactataaatgcaatggagtgctggagttattttatagaaataagaacaggatatggtagaaaaaatatatatagtcagttctgtatgatggacaggcaattaagaagtcttcatagaggaaccatcatcagagccttggagcgtaaatatgggtttaccaaacagacctagaggtgcaggataggaagaaagaggaagggtgtagggggttaggtatggctgtggaaaaaaagataagactggtgagagtacagagagcatgatactggggagtatttcaccttgtgtcaaaaagcttgagctttatcttgyaggaccaaaggtgggacactggatgattataaccatattttcaggatgtcagaagggcgaagaatgagttgagaagtttagggtgaaatgaggtaaaccagctaatatactattctaatgatctgtctgatcaatgccaaaggcttaaagtggaaaagaagagatgttatagaagtaggacatatataattagagagataaataggagtgtggtag

SEQ ID NO: 259970 - DNA, 474 bp, Homo sapiens
tctcaaatgaacatagatacaaaaaattctcgataaaatactagsaaaccaaattaagcagcaattaaaagtatcatatatcataactaagtggaatttatccctgggatacaagaatggtttaacttatgcaaatcaatcaatatgatacaacacagtaacaaaatgaaagaaaaaagtatacttatcccaatagacccagaaatagcatttgatgaaatgtaagatatatttatacataaaactctcaacaaaataggtatagaaggaacttactccagcacaataaagtgatatgaaaagccacagctagcatcataatcaatgggaggaaactaaaattattttctctaaaatctggttaaaggcaagaatattcacttttaccactttgtttcaacatagtactgggagtctcagccagaacaattagaaaagaaaagaaaaggcatccaaagctgaaaagatgtaaaa

SEQ ID NO: 259971 - DNA, 525 bp, Homo sapiens
gatggggaacgctgagtaaagggtacatgagctctttctgcattatttgctacaattgcatgtaaatctacaattatctcaaaataaaacctttaattaaagaaaataaacaaaatgcatactaaaggataaacaaacaaagacactttgggagagaagaggtgtgagaaagttaaaatttcatctacacgcaagtaactggaaagcaattacacaatgtcaaaagctgataagaaagatyagtataagctcattttatcagtctaattatcagtataaaatcacattatttagaaatatgagcagttcccaaataatggggatcaaaagtggttgtctctgaagacaggccttgggaaggagaaatgtgagaaagaaggcaggtccttttcatcataaactcttccgtacacttctattaaacaatgtgtttgcattgccttaattaatttttaacactaagctagttcagagccttctctgaagcatacagttataatgcatgtgaatgtctttatgttactg

SEQ ID NO: 259972 - DNA, 561 bp, Homo sapiens
cgattaacctctctattttttttttaaatgctctcttccaataagcagagtatttggagcttaacgatcatgtatttactattttggtagtttttaagctaatattaaaatggttctattcaaaacatttgggactrttttaatatgtcacttgcttaatacaatcatgcaaacatgttctcaacaggtatgtattttattccctcctaaaggcacaaagagaggagggagacttggctgctctttgctctagagcccaaaggcatgaaccattgaggtacaacagtttgaaaatacacatgggctcttttttggtacacatttggtttccatttgcttgaaatagttttgtagcctaataaaaaaagaacctacattttttatatagggaagttaactggctgtggttggaagatttttttgttttttactcagttattttaaggatattatcacaataatgcccaacactccattagagtgacggaagtgagcattgacttgatgtagtatgttttattattcatcatctaaaacaccaagtgccaacacccacatatg

SEQ ID NO: 259973 - DNA, 573 bp, Homo sapiens
caactgttcagtatgaatgatcataatggctgacaacatgataaaaagagaaacaagtataggttaaatagagagatagattataaacaatagatgatagatgagagagagaaagagagagagagagatggcatctatccaagcctctaactataaacacccaatttataagagacaggaaaacatgtaaaacaaccaccacatgtgaacaacaaaatcaaaattgtgagaaattctccaggacaaaagattcagcttcttcaacaacaataacasatgaatcatgagagacataggagaaatgtcaataaatcacaatgtttaggctatatttggattatgattaaaacaaactattgaaaaatttaccttaccatcacaaagcagatgagaaagaaagaaaatgaaattttaaaaaaaaatttacctgataatcagaaatctgggaacactggatagtcgatgctaaggaattaattatgtgagtgtgacaataatattgtggtcatcttatctttgagaggcacatatcaaagtattccgatgtgatgtctgagatttagttcaaaataa

SEQ ID NO: 259974 - DNA, 573 bp, Homo sapiens
caactgttcagtatgaatgatcataatggctgacaacatgataaaaagagaaacaagtataggttaaatagagagatagattataaacaatagatgatagatgagagagagaaagagagagagagagatggcatctatccaagcctctaactataaacacccaatttataagagacaggaaaacatgtaaaacaaccaccacatgtgaacaacaaaatcaaaattgtgagaaattctccaggacaaaagattcagcttcttcaacaacaataacacatgaatcatgagagacataggagaaatgtcaataaatcacaatgtttaggctatatttggattatgattaaaacaaactattgaaaaatttaccttaycatcacaaagcagatgagaaagaaagaaaatgaaattttaaaaaaaaatttacctgataatcagaaatctgggaacactggatagtcgatgctaaggaattaattatgtgagtgtgacaataatattgtggtcatcttatctttgagaggcacatatcaaagtattccgatgtgatgtctgagatttagttcaaaataa

SEQ ID NO: 259975 - DNA, 615 bp, Homo sapiens
gtgcggtcagtgtgggttaaaacaagccgtgcctctcgctccacgagctgggtgcctccttatcccctcagtcctaaagacagctgtagccagagatttttttgagaattcattttgctaagtctgataccctcttaaaggttaatccaaacctcccatcctaataattataataaattaatttctcaagaaattatttttctttggaagagaacaaccacccaaaaatcttcaataacagtatttctaaaatgtttcgatacttcatatgtgtttacagtcttacagtgtcaacttttgcagaracacagtagagttcacaaagatacatgaagcgcagttgatatggaaggaaggaaaatgcaagtgaggttggggtaaaagaagagaaaaataattaattaaataaaacaaaacaagaaaagggcctggcatagaccaacgatgtgaatgaactgagcaggataattagcacaaatgtctgtgattgcagttggaagggaagagaggaaggatggaagcaagggtagagtgatggatccaaaaataatagaatctcacctccatacaatgtgacttcatctctctgatcttgtttctccagaaaaaaatgga

SEQ ID NO: 259976 - DNA, 567 bp, Homo sapiens
tctgcaaattatgtatctgataaggagttgatattcaaaatatgtcagaaactcacacaacacacaaaaacctcagtattatttttaaataaaaaatatgcattaattaytcagtattatttttaaataaaaagtattgattactcaatattattaatcaaaaatagtcataattaacatatttaaaagaagcaaaggacctgagtagacatttttccaaagaagacatacaaatggccaacaagtatatgaaaaggtgctcaacatcattaatcaccagggaaatgcaaatcaaaccacagtgagatactacctcacacctgttaaggtggctgttatgaaaaagacaaacaatgacaagtgttggcaagtgtgtggagaaaatggaacccttgtacagtgtcagtggtaaagtaaattggtgcagccattatggaaaacaaaggttcctcaaaaaattgaggacctatcaatcccatgtctgggtatatatccaaagcaaataaaatcaatatacctgcacccccgcattcattgcagcattattcacaagagccaaaatacagc

SEQ ID NO: 259977 - DNA, 629 bp, Homo sapiens
tcaaaaaattgaggacctatcaatcccatgtctgggtatatatccaaagcaaataaaatcaatatacctgcacccccgcattcattgcagcattattcacaagagccaaaatacagcaacaacctaagtatcactcagtagatgaaaggataaagaaaatgtagtgtgtatatacgcaatataataatatttagccagaaaaaataagggaatcctgccatttgtgacgatataaatgaacctggaagacattatgctaagcaaaataaaatccagaaataggaagataaacactgtgtgatctcacttatatgtggagcctaaagtgtcaaactcatagaagaaaagaagagaacagtggttgtcagggactacaggggtggggaaatggggaagtcttggttaaatacaaaatgaacaagtcctagagatctaatgtacagcatgggtggtaatggatgtattgattaatttaattgakgtaatcattacacaatgtataagtagatataatcgtcacattgtacaccttgaatatacttaatctttatttgtcaattaatatttttaaatttttaaagttttttaaagagttattggctatctgtacctgatttagattatgtcca

SEQ ID NO: 259978 - DNA, 629 bp, Homo sapiens
tcaaaaaattgaggacctatcaatcccatgtctgggtatatatccaaagcaaataaaatcaatatacctgcacccccgcattcattgcagcattattcacaagagccaaaatacagcaacaacctaagtatcactcagtagatgaaaggataaagaaaatgtagtgtgtatatacgcaatataataatatttagccagaaaaaataagggaatcctgccatttgtgacgatataaatgaacctggaagacattatgctaagcaaaataaaatccagaaataggaagataaacactgtgtgatctcacttatatgtggagcctaaagtgtcaaactcatagaagaaaagaagagaacagtggttgtcagggactacaggggtggggaaatggggaagtcttggttaaatacaaaatgaacaagtcctagagatctaatgtacagcatgggtggtaatggatgtattgattaatttaattgaggtaatcattacacaatgtataagtagatataatcgtcacattgtacaccttgaatatactyaatctttatttgtcaattaatatttttaaatttttaaagttttttaaagagttattggctatctgtacctgatttagattatgtcca

SEQ ID NO: 259979 - DNA, 570 bp, Homo sapiens
aataagaaaatgtttgaaatacttaagtaaacaggatgtgtctgttccttgactggaaaactcaatgttgttaagatgtcagttctcccagaattggtctatagattcaatgcaattcaatgtaatcccactaaaactcccttggttttctgttgttgtgttgggggttgggcggggtgggggggtagaaactaacaagccgattcttctctttttcccccattggctaggctccctcaaagcagacaagctgtttctaaaattcatacggaaatgcagagagcytagaatgtccaaggacgtaaggaagtagaacaaagctcatatattttaaaccatgagatataaagcctattagaaaactacagaaattaagacagtgcagtactggtactagaatatggagcagaccaatccaataggaagaggagtccagaaacagacccacaagtctcccacaccctaatggggagagagggaactccactgcaattcagtgggaaaaggtacatggaaaacaaaaacaagaaaccttggccccctactttaggaaagctgagaaaatcaagt

SEQ ID NO: 259980 - DNA, 570 bp, Homo sapiens
gtcaacaactggtcctgtcttcatgtttattataaactattaggccattactgaaaaattggcccctcaaggataaaaaaaaaaaaaagaaaaagaaaatctctgggaatctcttacttcgcactcacccaaaacataaattagaatcatacttctccacttagagttgaggccacaatgcaaggccgtgctagccatgccttattcccttcagagtcatggctgttactaacagtaaccaaggcacacaattcacttcttagaacacatcatgctgggctcctgaggaacattcaatagaactttcatgtccatgacaggtcccaaatgactggtctcaataagagacatcatgatggtttaaacaactcsttttcaaacttcaataccacaaataaactaaagttctctagtttgcccctggccttaacctacttttttttaacaatttttttatcttgtccccatcccttaaggtctgtaggtcagatcaaggacatagactctcctgggactcattaaccatatattgtcccacaggcctggcagctgctcatcttatatgaaacc

SEQ ID NO: 259981 - DNA, 216 bp, Homo sapiens
agtcagcagagtaaacagacaagccacagagtgggagaaaatcttcagaatctatacatctgataaagaactaatatcaggaatctacaacaaactcaaacaaatcagtaagaaaaaaaacaaaaaatcccatcaaaaagtgggctaagracatgaataggacaatttccaaaagaagatatacaaatggccaacaaacacatgaaaaaatgctca

SEQ ID NO: 259982 - DNA, 530 bp, Homo sapiens
gggtgcagccctatcttcagcctcacgccctcctgcccctgctagggactcaggcctgcccccagagartgagtaagacttagagaggtgatcggtggacccccacccaccccactccaatgcaggactccagagcttctttctcctttccctcctgaggcacaaggccggggggcaagtgaattgagaagaatcattacaaagggacataagaggatgctagagaatcttctcccatccccaaggcatccctcacccccatcaaggtgctgaagttctcccttcattgaatgattcctttgattccgagacacgtgggtcttccagagacatcatcaaaatggagggacacatataccaaacagaaatctggcttcatgatcttcaaaacacatgcatgaaagtgttcttagcagtgctactcacagtagcccaaaactagaaatgactcgaacgcctgtcaatagcagaatggataaatggacagcgtgtcttcacacagtgggacgctgtccagcaatgagaaggaa

SEQ ID NO: 259983 - DNA, 530 bp, Homo sapiens
gggtgcagccctatcttcagcctcacgccctcctgcccctgctagggactcaggcctgcccccagagagtgagtaagacttagagaggtgatcggtggacccccacccaccccactccaatgcaggactccagagcttctttctcctttccctcctgaggcacaaggccggggggcaagtgaattgagaagaatcattacaaagggacataagaggatgctagagaatcttctcccatccccaaggcatccctcacccccatcaaggtgctgaagttctcccttcattgaatgattcctttgattccgagacacgtgggtcttccagagacatcatcaaaatggagggayacatataccaaacagaaatctggcttcatgatcttcaaaacacatgcatgaaagtgttcttagcagtgctactcacagtagcccaaaactagaaatgactcgaacgcctgtcaatagcagaatggataaatggacagcgtgtcttcacacagtgggacgctgtccagcaatgagaaggaa

SEQ ID NO: 259984 - DNA, 483 bp, Homo sapiens
ttagcaggggtcagccctcaaggcctgccaagctgtattctccacccaacgcagttcccacccagggaggctggggttgctctgggtcgggggtgaactccatttccggacccctggcccgcccagttgcagctgcaaaaggcattaagcttttttttggagaaagaatgggcttgggttgatgatgatgacagctggggagygttcctgagctcagcctggccctatcttgcttcccttccttggcccctgctcacctctgcccaatttctaggccatttctcatgtagaggtgggccttatctttaccccttgaccttgaccagacctggacaatcagctggtctccagccaccctgtatgggagcagtttttgtgttcagtcctgggcttggtgctgggttaggggataggggtggggaagagggcttcaggggaagcggaaagaggggctccaccctgggtccatctgggtgggagagc

SEQ ID NO: 259985 - DNA, 602 bp, Homo sapiens
tggcatggaggggcactcagtgggcattgttgagtgaacacgtggtctcgctccccacgcctgtcacctcstttcacaccagttccactagaaccatgaccacagaccacagccctttccttgagcagctcttctaggaacttcctagaagctctgttctctgtgctgccggccctgtcccccagcctccctgcttcagaataggtcagggagaaggggtggggttttcctgctttttgggttgctggagaaggcgactctgaagcctgcattccatattgcctgttcacacctcctcttctagcatggcggctggcttccccctagtcctccggccgcgtgcctcagcagctctgactgccccactttcctgcccctccatcttcttatgttcctcggatcccctctttaatctctctcctctgctccctgaccagctcagagcctcttccaggctggactctcgggctccagccctacacctcacccatggcttctcactggctctgggggcatgaggccactccagggtcctggacattggcctcagcctggccctccaggtcatgtgcagtgtggcatgggttgcctctctgaccgcc

SEQ ID NO: 259986 - DNA, 602 bp, Homo sapiens
tggcatggaggggcactcagtgggcattgttgagtgaacacgtggtctcgctccccacgcctgtcacctcctttcacaccagttccactagaaccatgaccacagaccacagccctttccttgagcagctcttctaggaacttcctagaagctctgttctctgtgctgccggccctgtcccccagcctccctgcttcagaataggtcagggagaaggggtggggttttcctgctttttgggttgctggagaaggcgactctgaagcctgcattccatattgcctgttcacacctcctcttctagcatggcggctggcttccccctagtcctccggccgcgtgcctcagcagctctgactgccccactttcctgcccctccatcttcttatgttcctcggatcccctctttaatctctctcctctgctccctgmccagctcagagcctcttccaggctggactctcgggctccagccctacacctcacccatggcttctcactggctctgggggcatgaggccactccagggtcctggacattggcctcagcctggccctccaggtcatgtgcagtgtggcatgggttgcctctctgaccgcc

SEQ ID NO: 259987 - DNA, 434 bp, Homo sapiens
tggttaatgtcagaagaaagaaaatcataaaatagaaggtgtccacaaaggtgcagagaaagtggaattctcgggcatcgtgagcgggaatgtaaaatgttgtggccactgcggaagacagtatggcatctttcctcaaaacatcagacatagaattaccacatgatcctgcaatyccacttgtagtaattgacccacaagaagtgaaagcagggacttgaacacatatttgtacaccaatattcatagctgcttattcataagacccaaaaggcagaaacaacccaaatgttcatcaatgaatgaatgaatgaatggctaaacaagatgtgatgtgtacaatgttcatcaatgaatgcatggctaagcaaaatgtgatatgtacataacgaagtatccttcagcctgaaagaggaatgaagtactcatacttg

SEQ ID NO: 259988 - DNA, 607 bp, Homo sapiens
agtaacaccaaatttagttttatcaggtttggcctgattatttatgtaagtgtagtaaaaacagtgattgcatcttagattgtattttttttttttttttgagacagggtctcaccctgttgcccaggctggagtgcagtggcacgatcttggctcactgcaacctccacttcctgggctcaagcaattctcctgtctcagcctcccgtgtagctgggactacaggtgcctgccatgacgcctggctaattcttgtatttttagtagagatggggtttcatcatgtttctcaggctgatckcgaactcctgagttcaggtgatctgcctgcctcagcctcccaaagtgatgggattacaggcatgagccaatgtgcttcgccttgtatcttcttcttattatttttttaattttgagactaggaagccaaattaaggcaggcttctgattttaactgcagtacccggaaataggttaaaatatgataacttcatctaaccctgataatataattaacattttaaattgcatcttcctataaagaaacagaattttattgaacttatgtgaataactatattgtcataaaataaaaagtactcacaga

SEQ ID NO: 259989 - DNA, 536 bp, Homo sapiens
tttagtaaaaacccaggaataagtacttttctgaactgttatatataaacatcccctgaatatatgttttatagtacttaaaaacatatttttacagaacaatttctaatgtggtataggacgttttcttaatagacccaaatatcttttgtgtttttataatatttaagaagtcaaaaataaataagcttaaagctatgtttaacaattaatgtttcagcattttatcttatttagaaatggctcaggactgtgatcctgcactttgggaggctgaggtgggaagattgcttgggcctagcagtctgagaccagactgggcaatatcataagacttcatctccacaaaaattaatttaaaaaatgaaaagaacttacctagatattttaaaaatatctatcacttactttaacataacttcaagattttaaattacatgaaaactttatgtataaatgtttattcyatttatatataccttgttttttatttacaataattttacctagattactcttgaaaactgagatattag

SEQ ID NO: 259990 - DNA, 536 bp, Homo sapiens
tttagtaaaaacccaggaataagtacttttctgaactgttatatataaacatcccctgaatatatgttttatagtacttaaaaacatatttttacagaacaatttctaatgtggtataggacgttttcttaatagacccaaatatcttttgtgtttttataatatttaagaagtcaaaaataaataagcttaaagctatgtttaacaattaatgtttcagcattttatcttatttagaaatggctcaggactgtgatcctgcactttgggaggctgaggtgggaagattgcttgggcctagcagtctgagaccagactgggcaatatcataagacttcatctccacaaaaattaatttaaaaaatgaaaagaacttacctagatattttaaaaatatctatcacttactttaacataacttcaagattttaaattacatgaaaactttatgtataaatgtttattccatttatrtataccttgttttttatttacaataattttacctagattactcttgaaaactgagatattag

SEQ ID NO: 259991 - DNA, 559 bp, Homo sapiens
ccaggctaagtgagattggagatttggggacagggccagcagggccagcctgttttcttgctaagttgagccagggcttttgatactgagattttatgctgtgtcatgggacagtgaagactcagacctcatttggagtttagaagaagagcatggggaacagtatgggaataatagggtgaaaagagaggcctctctggcmgtgtggtgcctcattggaagttctgcctgatgtctgacttgagtattttttgctttagtcctagcctgtttcctggtgtttgtcttgagttgggctgcgggggctcaggaaattgttgctgtgcttcctcctttctcttcttggactgagaggcattgtaccctccaattcctctcttttcttgggttccagcctcttcatatgcctccattctacctctcctctagcctgctaactggatctcctaacaaagctgttttggcctcaaccttctgggactcctggctcctctccctcaggcgttcattccctggacagtggtgtgaactgtgtgttccagacagtgtgctctggctg

SEQ ID NO: 259992 - DNA, 559 bp, Homo sapiens
ccaggctaagtgagattggagatttggggacagggccagcagggccagcctgttttcttgctaagttgagccagggcttttgatactgagattttatgctgtgtcatgggacagtgaagactcagacctcatttggagtttagaagaagagcatggggaacagtatgggaataatagggtgaaaagagaggcctctctggccgtgtggtgcctcattggaagttctgcctratgtctgacttgagtattttttgctttagtcctagcctgtttcctggtgtttgtcttgagttgggctgcgggggctcaggaaattgttgctgtgcttcctcctttctcttcttggactgagaggcattgtaccctccaattcctctcttttcttgggttccagcctcttcatatgcctccattctacctctcctctagcctgctaactggatctcctaacaaagctgttttggcctcaaccttctgggactcctggctcctctccctcaggcgttcattccctggacagtggtgtgaactgtgtgttccagacagtgtgctctggctg

SEQ ID NO: 259993 - DNA, 559 bp, Homo sapiens
ccaggctaagtgagattggagatttggggacagggccagcagggccagcctgttttcttgctaagttgagccagggcttttgatactgagattttatgctgtgtcatgggacagtgaagactcagacctcatttggagtttagaagaagagcatggggaacagtatgggaataatagggtgaaaagagaggcctctctggccgtgtggtgcctcattggaagttctgcctgatgtctgacttgagtattttttgctttagtcctagcstgtttcctggtgtttgtcttgagttgggctgcgggggctcaggaaattgttgctgtgcttcctcctttctcttcttggactgagaggcattgtaccctccaattcctctcttttcttgggttccagcctcttcatatgcctccattctacctctcctctagcctgctaactggatctcctaacaaagctgttttggcctcaaccttctgggactcctggctcctctccctcaggcgttcattccctggacagtggtgtgaactgtgtgttccagacagtgtgctctggctg

SEQ ID NO: 259994 - DNA, 626 bp, Homo sapiens
tagaaattccacaagtgattcctttggatgaaacttcattctacttgcgatgcattaaaccccatttccttctgtctcatgtcttatctatttccctttatctatttcctctgacaaggagtagggaagctatagagattgaaggcccctagaagaggaggaaggccccctctgcagacttggaacaggactcagcagtgctggggcttcccttgagattgtgggcatgaacaaaggcccggcctgttggagatgggctcactttagtgtggggatcacactacctctcctcctacctccctgatgccccctccagcttttatccagagcatgtgtggtggttgttgagtgatcccccttgctggagggcttgttagaggatgagggcccctaatgtctctctttccccygtctctatccactcgccagtaggaacctcttcttccttctccctccctggggtcctgctagtctcctccaaatgctggaccccactgccttgtctcgaggtggggagctgcaatggggacgggcagggcctgaggaatctgtcgcggggggcaggcggaggagagcttgggggcaggggtgagctagctgagaaactttcagggcctccgcccaca

SEQ ID NO: 259995 - DNA, 565 bp, Homo sapiens
gtgtgggtttcagatgcagatcctcagttttcagctcttcagagactgacaccaggtttgttacacggcttaaaatgatgagtatatccattgaatctcaaccttatctctctctagaccttcttggytaagaaaccatgtagtttgtatgaagtaggtactcaaaagatatttgatgatttaatttttactggagaagaaatattcatatatgttttcttatttttacatgttttaaatatgtaaagattaaataaacactcttagaagtatttaaatttcctaaagtaaatttatctcaaccagtaacaggaccctcccaatactggaaagttgagtgtgaccgcatttagtggtgatgagtgtgagcttgcttggggagagggcaggacatttaggatttcttaagcttagagtcaatacaataaagattattgagtgctcacttgggtgggctataatcactgctcacaggagttcatgaaccacaagtaaaagagtgaggagatatgattagctcacaaataactttaatacagagcagaaagtaatgaactactgcaat

SEQ ID NO: 259996 - DNA, 565 bp, Homo sapiens
gtgtgggtttcagatgcagatcctcagttttcagctcttcagagactgacaccaggtttgttacacggcttaaaatgatgagtatatccattgaatctcaaccttatctctctctagaccttcttggttaagaaaccatgtagtttgtatgaagtaggtactcaaaagatatttgatgatttaatttttactggagaagaaatattcatatatgttttcttatttttacatgttttaaatatgtaaagattaaataaacactcttagaagtatttaaatttcctaaagtaaatttatctcaaccagtaacaggaccctcccaatactggaaagttgagtgtgaccgcatttagtggtgatragtgtgagcttgcttggggagagggcaggacatttaggatttcttaagcttagagtcaatacaataaagattattgagtgctcacttgggtgggctataatcactgctcacaggagttcatgaaccacaagtaaaagagtgaggagatatgattagctcacaaataactttaatacagagcagaaagtaatgaactactgcaat

SEQ ID NO: 259997 - DNA, 548 bp, Homo sapiens
tgctcctaattctaatctcgtggagtctgaaatcaagtaaataggtgataatagttcagtgctgtaagtaccctgggaaaagagggaaagagagaactcttccaggttggagggcatattagtttcttgaggctgttgtaaccaattactacaaacttggtggcttaaagcaacaaaagtttattctctcaaggtcctggaggctagaaatctggcaggaccacactccatttggggactctaggggagaatcagtgccttgtttcttccagcttctggtggctccccagcatttctgrgtttgtggctgcatcattccagtctctgcctctgacttcacatcaccttctgccttgtatgtttctatatgatcttcaatttcctcttttttataaggacatttatgatggcatctacgatccacccaaataatccagggtaatcttctcatctcaagatccttaactcagttacaactgcaaagacactttctccaagtaaggtaacattttcaagttccagggattaggacatatctctgggtagcc

SEQ ID NO: 259998 - DNA, 564 bp, Homo sapiens
aaaattttccctactttctcccctaggaagtagaggaaaagttctttttttttttgtgacacagagtctccctctgttgcccaggctgtagtgcagtggcgcgatctctgctcaccgaaacctccgcatcctggattcaagcaattctcctgcctcagcctcctgagtagctgggattacaggcatgcaccaccatgcccggctaatttttttgtgtgtttttagtagagacagggtttcaccatattggccaggctggtctggaacttctgacctagtgatctggccgcctcggcctcccaaagtgctgggattacaggcatgagccactgaaccyggccaaggaaaagttcttgatgaacatcctcttgaagactattttgaataggtaatactccacattgtatacaattcgagtataaaagtacacagtgaaaagtgtaagtctccttttctcaccacccacgtctgtcttctgctgcactttcttgtatatcctttcagagacagtacaatggtgttgagtgtgcgtgtgtgtgtgtacatattgtacaggtaggtatt

SEQ ID NO: 259999 - DNA, 594 bp, Homo sapiens
tgacactttaagctcgtggatttctcctcttttgtttcatagctatacttggtttcacctctaataatttcaagcatgcatgtcttttctacctagttagatcaggaacttctccaagacagggataatcacaactttaggcacacagtagatgctccaataaatgaattgaggagttggggaactaggacatccaggaccgttttccatacagaacccatctgtgttttcttaggcagtcccagcttaatctctttcccatttgatcatcagaactttgtgcaggtctactcatcttttggcttaaaccttaaaggactctggactgtgagttccagctgctactctgtcccactcattctactttgatcttaatccagtcttacttccaatctttttctttctttgttgaattcttatttttattctttttctcttttgaattgttggttgttgctaaaattgactatatttttatacccagtctgagccttcttccgtatccayagttaatagttcattcaacttagttgggactgagctcgtgaaacattgatgtcactgtgttgttaactggagcaaagccagttgaga

SEQ ID NO: 260000 - DNA, 540 bp, Homo sapiens
tgcacaaatggatgtacattagctaaagcaattcccacagtaactctgtggaagaggttctgccatcatctccattttataaacgaggaaattaagttccgaaaggtttaattacttgcccaaagccaaacagctagtaagttgcagaatcaggattaggacacatgtttaattccaaagaccatgttcttttcgaatgaccatatctgacttctgggggttactggcaaawggaaaagagcaaaatggaaggtgaatggggattgaagtattggagaagtaatgcatgtattacaggggttacaaatgggtgttgatatatcagccaatgtttttttggacaaatattttaaaaagctttctgaaggtgcttattttgagattgtcaccagcagcagctctctcctgtaaccagagaggaaaacaggaagttgaagacattcaaagatggaccactggctccaatccacagttttagcagtaactagctgctttcccatttactgcgctgaagtcagcgctgcaatattgctggcttgc

SEQ ID NO: 260001 - DNA, 567 bp, Homo sapiens
cttggcagttctccctggctagaatatgtgttattcttttggcagccagatgatcattgtgctcatgtctggaataggatcaacagctggatttgcagcagccactggctataatttttytctctctctctctctgctttgcttctctttctctcaagccagaaggatagggtctgtggggccactgggccatctggccatgcagctggcctgagcttctgagtctgagaacacaatggtgattcactttgtgcaatccaagtccttagatgacatctaggaaataaactgccagggaatagttacatagacaaagggtttttgtctttgaaacctgttaaaatttgtcagtgggccagtcacggtggctcatgcctgtaatcccagcactttgggaggccaaggcaggcagatcacttgaggccaggagttcaagaccagcctggccaatatggcaaaaccccatctctactaaaaatacaaaaattagccaggtgtggtggtgcactcctgtaattccagctactgaggaggctgaggcatgagaatcaattgaacccagaaggt

SEQ ID NO: 260002 - DNA, 588 bp, Homo sapiens
gtgaatgcctatagaatctgtcaatatgaccgtatttttgcgtgtgtgttgtaaagtgcatataacataaaatcgacgattttaaccgtttcaaagtgtacaattcagtggcatttcgtatattcacagcatcatgtgacagttaccactatgctgctccagagcgttttcattacccgaaaaggaaatctcataccgccaagcagtcattccccattttcccctctcacattccctagcaatcaataatctgctttctggctctacagacttgcttattctagatatttcatataagtggaatcgtacaatacgtgtccttttgtgtctggcttatttcactcagcataatgttttcaaagtttacccatgttgtagcatgcaccttcattcctttttatggctraataatattccgtggtgtagatagagtacattttgcttatccattcatcagttgatggacacttgggatgtttccactttggctgttgtgattaatgctgctatgagaccatatgtatatgtttttttacttaaatgatttgctgatttgtgtttgtgggtacccaagacctagcaggaagt

SEQ ID NO: 260003 - DNA, 594 bp, Homo sapiens
caatgccttgatttccttctttataaaatgggaaaaatgrtaactcttgtcttgtagggttgttatggacttgaaagaaacaaaacttgctgggcgcggtggctcacgcctgtaatcccagcgctttgggaggccgaggcgggtagatcacctgaggtcaggaatttgagactagcctggtcaacatggcgaaaccccatctctactaaaataatacaaaaaattagctgggcgtggtggtgggtgcctgcaatcccagctacttgggaggctgaggcaggagaatcacttgaacccaggaggcagaggttgcagtgagccgagatcgcgccactgcactccaacctgggaaacaagagtgaaactctgtctcaaaaaaataaaaaagaaaagaaagaaaacttgacatttgaataatttctgcagcaccacagtacttctcaaaccataattctggtgtcattcattctaaacttctccttccactcactgattgtggactagtcccatagggacctcgtcttcacagctgtcattaccttagtttagaccaggggttggcaaaccatggcccacaggccaaatccagacttc

SEQ ID NO: 260004 - DNA, 554 bp, Homo sapiens
gcctcagtcatagcgaatggttcccagtaccagccaccatattggatattttgactgtgtgccctcaaactgcatacatagtatttgttatcatcaggaaatatatgccataggcatctccttctgcccggatcctttcctcccttagctgctgattcaaaccccatcctgaggtttacccagccctractttgatttggtcacatgctcaacttcattccttagagatgttgatgtagatgtcagatttgcctggtagttctactttgttaatcagcagggaatgttactcattgttcttgtaaaatagtattaggaactaaatatttatgtctccccaaaatttgtatgttgaaaccctaatccttaatgtgatggtattttgaggttgggcttttgggaggtaattagactgtgaggatgaagccatcatgataggattagtgcccttataagaagagacataagagcttactgcttctttctctctgctctctaccatgtgaggacatagcaagaagacggccatctgcaaaccaggaggagagctctca

SEQ ID NO: 260005 - DNA, 494 bp, Homo sapiens
gttggaggggtgggattgggagcatgtggaggttgtagggttggagaggtatttgagggtccagttacaagtggtaagctatgctaagaragattaaattgataatataggcaatagggagctgttgaaggttttctgagcatggagagatagaatcagatattacaaaacatttcattcattcaacacatgtttactaagcatctattatgtgccatacattgtgctggaggaatgaatgaataaatgcatgcatgcatggctatcacttaattttccaatcacagtgaggatccttgaaatccagggaccagctgatgtgacttgtgggcctatgatctctgtcagaaaatcattctgcaatgagcaaatctaagacagccagcattggctcccgccaccgcccccttatctgtttttctttttgcaaaagaccttgaggcctgtagtcggttccactacaaaacggttacacaatttccctgggagaaggc

SEQ ID NO: 260006 - DNA, 615 bp, Homo sapiens
aaatcaaggctgaaatgtgcagactgtggatgtcttttggagaattgagcactgtctgaagaatgtttctagctcagcagaggtctggcaataaactatccttatggatctcggtgtccagatggggtgctggattgcgtgggagtccccagaaggtgaagacaagagacaggaaatagaaattactgcctggcctgaggcctttcctgggatggggtctccaaagaatagaaccttctgccagagttccgtctgctttaataatctttgccagggttccacmtactatcatcaattcaggataacagtgagattatttttgagatttaaaaaagttttatttaaaagcccataattttaatttataccagtagatatgagaaagagaaaatgcaaataaaaatcacaactaaatctcaccttaactaaatgcaaaaccacatctacttattttttgtagtcttctttcaaatgtatgaattatacagtaaatttataatgtaaaaatttttattacttgtagaccttctgattggcatggtccattattacaactgtttactacaggtaagataatgtgcccaccaggcacacacacatgcccaagtgctcaca

SEQ ID NO: 260007 - DNA, 388 bp, Homo sapiens
ggataacagtgagattatttttgagatttaaaaaagttttatttaaaagcccataattttaatttataccagtagatatgagaaagagaaaatgcaaataaaaatcacaactaaatctcacyttaactaaatgcaaaaccacatctacttattttttgtagtcttctttcaaatgtatgaattatacagtaaatttataatgtaaaaatttttattacttgtagaccttctgattggcatggtccattattacaactgtttactacaggtaagataatgtgcccaccaggcacacacacatgcccaagtgctcacacatactcacacatactcattacccatgttacatgtatgagacgaaacataatggctgtctaagaaatagaaa

SEQ ID NO: 260008 - DNA, 643 bp, Homo sapiens
tatcattttcatctcattctgtcattcttacatctcaatctttcttcttatggctttttgttctgttccacaaaggctatgtctctagacattctaattagaatgacaattttaatagttttcttctagttttagtagttgccttcgtttgtgctgctgtaacaaaatatcccagactgggtaatttgtaagtaacagaaagagttctagatacttgatgtccaagatcaagatgccagcagattcagtgtctggtcagggctctctctctgcttccaagatgtcaccttgttgctggatcctccagatgaggggagcactgtgtcctcacatggcagaagggacagaaaagcaaaaaagggcctagctagttcactccagccctttcataaggtcgttaatcccattcatggggtcttcattctcatgacttaattgccccttaaatgtcccacctcttaatactgtcrtattggcaattaagtttcaacacatgaattttgggggatgttcagatcatagcagtagaaaatcatcttcagaggtgtttagtttttctccatgtgttactttttctggttctgtagtaattgttcataaataccatttcttacccttctgctttctcacctcaaacaaagag

SEQ ID NO: 260009 - DNA, 403 bp, Homo sapiens
ttacaaagtctgggaagagccataggcagaacacaacccctcaggcagcaagcttcctcatgacagggctcctgctcatctcttgagccatcgcctttcacctttctacattttkccatccaccctccatccaaactgaacttttcacttcccaaatgaccatgctctattttgcccctgggcagttacctggaacatttcccctcctgtttaactccttaagtcttggctaggattctgcctccttggggcagcctgccttagccctctaagtgggtgctccttccatgactttcggctgctttctgtaatctccccatcattcctcctgggtctgtgatgatctgatacttcacttctttccctttactctgatctcctaatggaaaagacccatgtctca

SEQ ID NO: 260010 - DNA, 383 bp, Homo sapiens
aacttttacattttacttttcttataatgatataaagtataatgatcttttttttttttttttttttttcaccaaactctaaatttcctttagcttacccagggtatgataccaatgctatctttttttttttgtatgctacaacataaaaaatgtttggaagtttttaaaaacagctttattgaggtatcatttacacagtgtgcagttcactcaagtgtacaattcaatgattttgagtacatttattgagttgtacaaccatcgccatctagtcttagaatgttttccagtaaaacaggaagcacattttgaagaagatgaraaaggatgagaaggctttcccgggagggcagagctttgggtcccaagcaaccaaaggg

SEQ ID NO: 260011 - DNA, 441 bp, Homo sapiens
ttttttttagagactttgttctgtaattaaagaattttaaaatggtttcctactgatcaataattcacttatatttatcatttaggcatatgcagtatacacccctttgtataggaacaaagttatagtttctatcatgtagtaagaaaaaaattgatgatgtaccacaatttcatcagagtttttgtcctgagtaatgaagcaaacaatggaactgcctatgtcagggtacaggtgggcacagctggaagctttcatcacttgygcctaacatttctggattgtcattggtccctcctagaaagacaaatggactatatccttaagaatatatgttaaatttaaaccctaagtattaagataagactacgaattgtctcatcacttctgtctcgtcattactttaaacttgtatctataacttttacacagaaattcagt

SEQ ID NO: 260012 - DNA, 612 bp, Homo sapiens
agtctttttgtatcttgacactgaacactgatggttttgaagaatgattgcgtaagggctcaccagatgtggtgtggttctctaacaaaacctaagtgtatgaaaactgtcaaaggagtattagaaatgtgctacccccgtgtctatgtaactagtgcataacgtaagcacagcatatataacraaggtatacgtgagatagtcagtgaggttctgattttattttccgtttcctcctcaggaaggaagaagtgggaatcattaggcatgtctaaggaaatggtctttgttttgtccattttttctactgtatagttaccatttttttcttttataaattagtaatttgtggggagagattttgagaccaaataaatatcctattccttattaaattttccttcctagatttagcattcattaatgacttttttgcctcaatttgtgctttgatggttgtaaaatagagttttactaatctatcattccctctatatttattagtcagcattctattaaaaggaaacatttttccttcttttgtgtttacttatttaatatctttagtatctgtatagactcctagattctttttttatttgataagttatg

SEQ ID NO: 260013 - DNA, 625 bp, Homo sapiens
tttcttctaaaaattctgaagttttgcttttcacacttcagtatttatttcacctggaattgattttgcgtgcgtgttaattgtgaggtagagtttttttctcatgtaactaaccaatgaattaatatcatcatagaatgatctgtgctttctcattgatccacagtgacagctgtgtcatttgttgggtttccatataagtgtgggctatttgtgggctctctattctgttccattggtctgtttgtctttcyctgggctattttagtatcttatttactatagctttctaataggtcttgatctctgataaggaagtactttgttcattttcagaagtatcattgctattctagtcctttgcttttccacttcagttttagaatcagcttgtcaacttaaaaaaaagttgagatttgtgacagagttatagtgaattgctggatcagtttggggaaagcagacatttttattatattgccttttaaccatgaacataatatatctttccatttatttaggccttctttaatggtaatttaatgcatttttataattttatccaaaaatgtctagtacaacttttattatatttagttctagcaattttatgcattattgttct

SEQ ID NO: 260014 - DNA, 533 bp, Homo sapiens
tgcaggtttatctccttcagggttgtgtactctaatttcttgtttgcagtttcctcttaagacttcctatgaatacacatgagccatttgttttcttctgctttttactcaactctttaagagcattgggagacatttgtctttgtcttcagatcgctcttcttcttttgcccttaatatcttcttttttttccttgtgtttatccttacagagggaagtccttgcttgtcaaatactgggasctcagttagattctttccataaattcatgggcccttctaatctcaaactcagacaaaaagaagaaggaaatagtttagatttgcagtagtttcactttgctggttagaaatccagcagggtgggagaagtaagaaggaaaccaggatcagaggcagctatgtggggctattcttctgggctgaagagtttatttcctatgtttgttatggtagtcaggggttagctagggtaggccagagggccagagctgctgcgcctaccaatgaactcctatgtaggaatttcttaa

SEQ ID NO: 260015 - DNA, 387 bp, Homo sapiens
tagggcttgtggacaggtagtcagatagctcagagtcttattatgaacctccaacgcatctattctttaaggtaatttaatttccctaccaaaaaactttaaaaaaatttaaaktatcctcacttataccatatggatgctgctagtgttctgaaactttgttgatttggtacattaaagatggccactgagcttttggaattctcctttaaaatggtggagttattttctctcttcttcaaactgggttggctttgtgactgctttactagtagaatatggtagaagtgatggataattgttctgagactaagccttaagaagacatggtagcatctacttttggaatctaatcttctaagccttaatttaatttaatggaattaa

SEQ ID NO: 260016 - DNA, 387 bp, Homo sapiens
tagggcttgtggacaggtagtcagatagctcagagtcttattatgaacctccaacgcatctattctttaaggtaatttaatttccctaccaaaaaactttaaaaaaatttaaagtatcctcacttataccatatggatgctgctagtgttctgaaactttgttgatttggtacattaaagatggccactgagcttttggaattctcctttaaaatggtggagttattttctctcttcttcaaactgggttggctttgtgactgctttactagtagaatatggtagaagtgatggataaytgttctgagactaagccttaagaagacatggtagcatctacttttggaatctaatcttctaagccttaatttaatttaatggaattaa

SEQ ID NO: 260017 - DNA, 583 bp, Homo sapiens
gtcaggaccatatttgtgttcccccttggccccagctcctcagccaagcactcctcctaccccaccgaacccaggctcaggcaggcccctggtctrcacttcctgctccacgtggcttggacccagattcctcctccaatcttttaattagatcctgcactcattagctgcccgaatgccttccagacactcacagctgctctggccctccccacacctgcccatccagctgggcctccccacacctggaagacatcgaagcctccagccagggcccccaaatagcagcccctccctgtggcctctaacagcaggggccagaagagacacagaaccttcctctgagggcggtgggggctgcaggagaggtgcctccccagccctggccatgttggcccttgcagggaaggctgggaagtgagttgtggccacagcacaggagacaagaagtcagatgccccctttgaccatggccagaagagccagtgtctccctatgcctaggccctccctgcaggacctcacttgagagaacctgctcagggcttagagtgtttgccatctgtgtgtgggaagaggacaag

SEQ ID NO: 260018 - DNA, 525 bp, Homo sapiens
tttagttgattcattccaatcaaagtgccaattatttgatttttttcaattcaattctataattttctcttttctaattttttctgcttttccttttccttttctctttttttgtcctgctgttttaagggcttttcattatcattattctagcttcttgaattgaagctttacttactccctttttccagataatgaaaatagttactcatatgaaattgcctctgctcactaatgtcttggcattgcctcatttgttttgatacatgttttcattttcattttcccggcattctgtaattacagttttatctttattatttgatcccagagttagatacttaattagttttcttttttgtaattaacataatttcttaaggccacaaattycctctgaacgctgctttaactataaccagtaagttctaatatgtagtgttttagcactgtttcctagatgttctgtgctttctgttagtattttctccttcacccaagaattgttaaaatagagggtttttt

SEQ ID NO: 260019 - DNA, 607 bp, Homo sapiens
ttgaattcaggctacaccgttttaaaaaattatttctcactaaatgagctgaattttgttcccaccacagaggcagactgcttcctgcaaatatggctcatttgtgtaattcttgtgtagctccacctctgcttctctgaatcaaatcaggtctaagaggcttctgtcatcagcttcaacctgtctccaaagtttccrtatccacggttgtaaacaaaggatgtaacatttatatttcatggtgaaacctcactttcaggaactgtattttgaaactattatgaaaattttcaaacacacacaaaagtaaagagaatagataataaacccccatgtaaccattatctgtcctaaataattatcaacattcttccattagaaagtatatttttgctaggctttctgagatctgctactactctgatctttcaacattctgcatgtatcttctcttcacttactgctgagtggcctctaaccaatttcagttgtctttgagcagcccttacatatattttgaagtctgtggcttctgtttgtttccaacttttctgaaaatggattttgtgggtttgaatgatttccaagagaaaaggggaaaaatgct

SEQ ID NO: 260020 - DNA, 477 bp, Homo sapiens
actcactcccagcctcaggcttctggcaggaagggccggtttggctggagagaggacttggctttggcactagactctgcactggggcaaggcagatgctgggggaacttacagagatgctgagyccagtgggagcccccatgttcaagggatgcacaaaaacacccagacatggctcaggaattccaaggccagatggtgcagggggcactgatgtgggacggaaatggtcagacatcaggcaggaagttaacactggtctgggtggagggaggacagcacagagatttgttagatttgggtccctgggatggagacaccaagccccagtgagacagggccactggacccattgcagggatggaaacaaggacaaaggccaaggtctaggcagaattacctgtacctgctcaaaggctcagaaacaagaggagatttatttctaatgaaccacctagtcagagttgggctggttgc

SEQ ID NO: 260021 - DNA, 531 bp, Homo sapiens
cttcaaccaggcacagtcctccatgactgtcccatcccgcaggtgagaggcggctttcaaaaacctagttctgaggggtgagtcctgcctatataaagrgcaatgctgcttctggcatgtcaggctccatgccatgctcctcacatgtattatgacctttgccatgggcagaatagtttcccctcaaaattcctaatccccaggacctcagaatgcagctgtatttggagacaggtcctttaaagaggtaaccaagttaaaatgaggtcataggggtgggccctagtccaatatgattggcgtacttataaaaagagaagcttaggatgaaaagacagtgggggttgtgtgaagacattggaacaagatggctatctaggcggggggcagtggctcattcctgtaattccagcacttttggaggctgaggcaggtggatcacttgcacccatgagctcgagaccagcctgggcaacatagtaaaacgctgtctctataaaaaaatacaaaaattagttgagcatgatggca

SEQ ID NO: 260022 - DNA, 414 bp, Homo sapiens
aggaggtactgatgacatgtgcccaaggacatyggagcacagcttctgagaaaccattaaaatggtgtcacctccccttttattgtcctaacccacacttttcacatactgggatttgcattcattagaaagtagccaccacctgatttgagtaaaggcaaaaatggaaatgttttcaaggtatttaagcatttcaattgaagctcagtacaacgaattatttcaacaacaaaattttcatgtagtctctacagagatatgagacatcaatcaatatatgcaagataaacattggtttaatactgaaattccaggtcataggtagataagagacaaatggttgcattcttctgagtttctgatgagcctttccaaaggaggccatcagatatgcatttatctcagtgaagagtg

SEQ ID NO: 260023 - DNA, 602 bp, Homo sapiens
caagaaaaacaataagaagtccaagtgccctgtgacatgttggagggccacacatggacctctccccattggacagtcccagctgagtgccgtcttccacccattctcgaaaaagcaccaaataccagtgaccctcattatttgcagattctgtatttgcaaatttatctgctcattaaaatttattcaaaacccccaaatcaatacttgcagcactgttgtagttattcatggatgtgtrtggggcagcaaaaggtttgagtctctcaatgtgcatgttcccagctgaggtcacacaagaagatactttgccttcttgttatagctctcaatactgcaatcaacggtccttttcaccgtctacctagcgccatgtgttttgtgctttttgctgttgatttcactgtttaaagtgacccccaaacatagggcttaagtgcagaccagtgttcctaagtgcaaaaaggctttgatgtgccttgcagaggaaatatgtgtgtccagtatgctttgttcaggcaggagttttaatgctgttggctctgagttcaaggttagaatcaacaacatggtacattgggaaaagagaagaggaaatttgc

SEQ ID NO: 260024 - DNA, 582 bp, Homo sapiens
cactcagcaggtccagctcgccctccatccgtctcggcctcaggctatggtgtctatttggtgaaatgcattcgtttctctctggtgtccccagagagtgggagtggtgacaactctaatccatattcaccctgtctgttagcttcctggggctgccaagacaaatgaccacaaaccaagggacatcaaacaacagacacctgtcctgtcaccattcaggaggccacaggtctcagtcaggggtcccagggtggcctccgtctggaagcagtgggggagaaggggttgcaggcctgcctctcctaagccccactggctcaaccctccttctkttccttggcttgttgccgcatctgtcccgtctctgcctccgtcttcacacggcctctcttctctctgcctctctgtctgctttctcttcttatgaagacgccagtccttggtgacttcctctaatccagagggacctcatcttaattctatctgcaaagaccccattttcaagtaaggtcacgttctgaggttctgggtggatgtgggctttggagggagacactggtgaacctggcacgctctgcacat

SEQ ID NO: 260025 - DNA, 593 bp, Homo sapiens
cttcacaaatctctctttctcttttatttatttatttttttttagacagagtttcgctctttgcccaggctggagtgcaatagtgcgatcttggctcactgcaaccccagcctcccgggttcaagtgattctcctgcttcagcctcctgagtagttgggattacaggtgtgcgccaccatgcccggctaattttgtatttttattagagatggggcttcaccacgttggccaggctggtctcgaactcctgacctcaggtgatccacctgcctcggcctcccaaagtgctgggattacaggggtgagccactgcgccaggtccttcacaaatcgctaaatgagttttcccagagccagtgaggagctgctgagttctgaaagcctcccctgttgacttactagacccggagcacttggagactggctcatgttggcagtgcagcctcacagccccccaaaaatccaggcttggccaggtgcagtggctcayatctatagtcccagcacttttggaagctgaggcaggaagatcccttgaccccaggagtttgagactagcctgggcaacatagggaaactctctacaaaaaca

SEQ ID NO: 260026 - DNA, 599 bp, Homo sapiens
gcctagggctgaggggaataggacagctggaggtgataactaaggagtatggcttctcttggagtgatgaaaatgttctgatattgtggtgatagttgcacaactccgtgattatcctaaaaaccactgaagtgcatactttaaatgggtgaattatatggcatgtcaattatatctcaacagttgcagtgagccgggatcacgccactgcgctccagcccaggtcacagaggcaggccttgtctcaaaataacattatacctcaataaggctgttaccaaaaatacttatgctatattctcatgatgaaatattacacaacaaataaagtgtggaattgtgacgatcctgtctatctcccccctcatggtggtctgtgctttgatctgcatgtttgggtcttgcctttcctatttaacacctggcttctacacttaccccttcatcttttggactcagcttctgttaccacttcttctgtcattggatcccactcttggctttygcaatgacttctgcactgaaatacttggtcttgaaatctatgaatatttggatttggtttctgttctggaccatttttttgacttgtgcaacca

SEQ ID NO: 260027 - DNA, 532 bp, Homo sapiens
ttagtttggaatgatgtatccagtgtggaagggatgttagctttgttgttgtgggattagctaggataacctggtgaggacccgtmcacttaggttggagaggggaggaggaagagtctgcgatccagacccagtcccctggttgtagggagagggaggggtatttcgaggatggactttcaggctagggcaagtaaacatttgcatactgtcttattagatgttgagtgaagtgtagtgctggccaagtatctggtacagaaggggaagaagagacagggagattctggaggataaaggagtgtttgtacctgagtttaaatgggcttaggatgaggggcttttggggaatggcttgcaagggcatgagggccaataggagaagtgaagtccagccattttaacctctagagaatctggttagttgttgtttcaaaagggcattggtccatttaacttctcctgaagattgggggcaataaggaatatggaacgctatttaatgtttagagccttcgccagctgttggtta

SEQ ID NO: 260028 - DNA, 532 bp, Homo sapiens
ttagtttggaatgatgtatccagtgtggaagggatgttagctttgttgttgtgggattagctaggataacctggtgaggacccgtacacttaggttggagaggggaggaggaagagtctgygatccagacccagtcccctggttgtagggagagggaggggtatttcgaggatggactttcaggctagggcaagtaaacatttgcatactgtcttattagatgttgagtgaagtgtagtgctggccaagtatctggtacagaaggggaagaagagacagggagattctggaggataaaggagtgtttgtacctgagtttaaatgggcttaggatgaggggcttttggggaatggcttgcaagggcatgagggccaataggagaagtgaagtccagccattttaacctctagagaatctggttagttgttgtttcaaaagggcattggtccatttaacttctcctgaagattgggggcaataaggaatatggaacgctatttaatgtttagagccttcgccagctgttggtta

SEQ ID NO: 260029 - DNA, 532 bp, Homo sapiens
ttagtttggaatgatgtatccagtgtggaagggatgttagctttgttgttgtgggattagctaggataacctggtgaggacccgtacacttaggttggagaggggaggaggaagagtctgcgatccagacccagtcccctggttgtagggagagggaggggtatttcgaggatggactttcaggctagggcaagtaaacatttgcatactgtcttattagatgttgagtgaagtgtagtgctggccaagtatctggtacagaaggggaagaagagacagggagattctggaggataaaggagtgtttgtacmtgagtttaaatgggcttaggatgaggggcttttggggaatggcttgcaagggcatgagggccaataggagaagtgaagtccagccattttaacctctagagaatctggttagttgttgtttcaaaagggcattggtccatttaacttctcctgaagattgggggcaataaggaatatggaacgctatttaatgtttagagccttcgccagctgttggtta

SEQ ID NO: 260030 - DNA, 633 bp, Homo sapiens
aaacctgtccaaatgatcgtttccaagcccagagacttcagacagagcctgtgaattgtgcctgctgttgtgaatcacaggaatgcctcagtgaactcatctagccctctgtattatatgttaaacatgtaagagggatatagaaaaggatactatacatagcctaatatcctgacagtgtgtatycctggggctcttcctcttattcagaaaacactccaggaatcagtgatggatgaaaaaaggaggacactaagaaacaggtcaaaggtgacaactgaataaaagttgctgcaggctttaaccttaaagtactgaagaaaaaaaattctgctgagatttggtagcaatacatataacagaaggctgaagtccaaaaatctctaaggtatttggagatatagaaaggccagattagaggtcttatcttttccttccttcagagtcaattctttgttaactctacagtgtctagtactaacatttgtggtaaaaatctttgaccgactaattgaaacatgttataggagattgcagcaaagcacaaacctaaatgcacattgtcttttccaaaaagctattctaaaaatctaactgtggctctagtttgaatacattcaaagcctacatctg

SEQ ID NO: 260031 - DNA, 633 bp, Homo sapiens
aaacctgtccaaatgatcgtttccaagcccagagacttcagacagagcctgtgaattgtgcctgctgttgtgaatcacaggaatgcctcagtgaactcatctagccctctgtattatatgttaaacatgtaagagggatatagaaaaggatactatacatagcctaatatcctgacagtgtgtattcctggggctcttcctcttattcagaaaacactccaggaatcagtgatggatgaaaaaakgaggacactaagaaacaggtcaaaggtgacaactgaataaaagttgctgcaggctttaaccttaaagtactgaagaaaaaaaattctgctgagatttggtagcaatacatataacagaaggctgaagtccaaaaatctctaaggtatttggagatatagaaaggccagattagaggtcttatcttttccttccttcagagtcaattctttgttaactctacagtgtctagtactaacatttgtggtaaaaatctttgaccgactaattgaaacatgttataggagattgcagcaaagcacaaacctaaatgcacattgtcttttccaaaaagctattctaaaaatctaactgtggctctagtttgaatacattcaaagcctacatctg

SEQ ID NO: 260032 - DNA, 600 bp, Homo sapiens
attagcattgcatagtatggaacattgcaatarcaatgatagctattgccagtggaatgtgtaaacttctatacccactacattaaccagtttgaaaatattccttgacgtcattccttaaaacatctttaataactagttctttgattaagacctcttattttcaaattaatgttttattgaattacactttttctcactaaacaaattttagtatgtgatgggtttttaatggccagaaaacacattcattgttcacttttatcctgtgatcaaactatatgccagtgataaaatactgatttataatttaaacttctcttgagggaggcaaatgtcagttcctaccttggtttatcataacactatctctgttgccttatatacaattcagaaattaaaatatgcttgtattttgggtagagaaggacaggataaatcaaatactatgtaacaattgaccttgtatagactctatttcaaaagatactttaccagcttgagcaacatagtgagacacagtctttacaatttttttaattattagctgggcatagtgtgacacatgtttgtactgccaactactcaggagactgaaca

SEQ ID NO: 260033 - DNA, 600 bp, Homo sapiens
attagcattgcatagtatggaacattgcaataacaatgatagctattgccagtggaatgtgtaaacttctatacccactacattaacyagtttgaaaatattccttgacgtcattccttaaaacatctttaataactagttctttgattaagacctcttattttcaaattaatgttttattgaattacactttttctcactaaacaaattttagtatgtgatgggtttttaatggccagaaaacacattcattgttcacttttatcctgtgatcaaactatatgccagtgataaaatactgatttataatttaaacttctcttgagggaggcaaatgtcagttcctaccttggtttatcataacactatctctgttgccttatatacaattcagaaattaaaatatgcttgtattttgggtagagaaggacaggataaatcaaatactatgtaacaattgaccttgtatagactctatttcaaaagatactttaccagcttgagcaacatagtgagacacagtctttacaatttttttaattattagctgggcatagtgtgacacatgtttgtactgccaactactcaggagactgaaca

SEQ ID NO: 260034 - DNA, 600 bp, Homo sapiens
attagcattgcatagtatggaacattgcaataacaatgatagctattgccagtggaatgtgtaaacttctatacccactacattaaccagtttgaaaatattccttgacgtcattccttaaaacatctttaataactagttctttgattaagamctcttattttcaaattaatgttttattgaattacactttttctcactaaacaaattttagtatgtgatgggtttttaatggccagaaaacacattcattgttcacttttatcctgtgatcaaactatatgccagtgataaaatactgatttataatttaaacttctcttgagggaggcaaatgtcagttcctaccttggtttatcataacactatctctgttgccttatatacaattcagaaattaaaatatgcttgtattttgggtagagaaggacaggataaatcaaatactatgtaacaattgaccttgtatagactctatttcaaaagatactttaccagcttgagcaacatagtgagacacagtctttacaatttttttaattattagctgggcatagtgtgacacatgtttgtactgccaactactcaggagactgaaca

SEQ ID NO: 260035 - DNA, 600 bp, Homo sapiens
attagcattgcatagtatggaacattgcaataacaatgatagctattgccagtggaatgtgtaaacttctatacccactacattaaccagtttgaaaatattccttgacgtcattccttaaaacatctttaataactagttctttgattaagacctcttattttcaaattaatgttttattgaattacactttttctcactaaacaaattttagtatgtgatgggtttttaatggccagaaaacacattcattgttcacttttatcctgtgatcaaactatatgccagtgataaaatactgatttataatttaaacttctcttgagggaggcaaatgtcagttcctaccttggtttatcataacactatctctgttgccttatawacaattcagaaattaaaatatgcttgtattttgggtagagaaggacaggataaatcaaatactatgtaacaattgaccttgtatagactctatttcaaaagatactttaccagcttgagcaacatagtgagacacagtctttacaatttttttaattattagctgggcatagtgtgacacatgtttgtactgccaactactcaggagactgaaca

SEQ ID NO: 260036 - DNA, 586 bp, Homo sapiens
gaatgatctgactttgatatatttgtcttattttttcaaaatatctggttagatcatgttttctactttatatactgcctttctaggccagactgacaaatatcctacattagacatggaggcagtctgaatttcaatgaaaaagtaatgaatgttttgcaacaaacctgtacgttaytgggtatgtagaaaggttaagaccactgagacgtacacatccataccctggtttattaaatgcaactaaattaaattgtttcaaaattttgctaatgattctaacaatataatccttatgttaatgttgaaaacaattgcattttttattttttggttgatcaattttgtggcatagttttgaatcccagacaccttgcagagcaatactttgcttttcactgtccaaagagatacaagtataaagtatactttcatcttaatcagaggcagtcatagatttttttttttaatatacagtgtcagatcaggaaaagaagctatcactgatagaattttttttaaacatcataatttttaaaaagttattttctatgacacatcatactgtaacattgagattcataat

SEQ ID NO: 260037 - DNA, 586 bp, Homo sapiens
gaatgatctgactttgatatatttgtcttattttttcaaaatatctggttagatcatgttttctactttatatactgcctttctaggccagactgacaaatatcctacattagacatggaggcagtctgaatttcaatgaaaaagtaatgaatgttttgcaacaaacctgtacgttattgggtatgtagaaaggttaagaccactgagacgtacacatccataccctggtttattawatgcaactaaattaaattgtttcaaaattttgctaatgattctaacaatataatccttatgttaatgttgaaaacaattgcattttttattttttggttgatcaattttgtggcatagttttgaatcccagacaccttgcagagcaatactttgcttttcactgtccaaagagatacaagtataaagtatactttcatcttaatcagaggcagtcatagatttttttttttaatatacagtgtcagatcaggaaaagaagctatcactgatagaattttttttaaacatcataatttttaaaaagttattttctatgacacatcatactgtaacattgagattcataat

SEQ ID NO: 260038 - DNA, 621 bp, Homo sapiens
catataattggagttaaaacactcctcagcaaatataaaagagctrtaatcctaacaaacagtcttttagaccacagcaccattaaatcagaaatcaagactaagaaatttactcaaatccctacaattacatggaaattgaataacctgctcctaaataacttttagataaataataaaattaaggcagaaatctttgaaatgatgaagaccaagctacaccataccaaaatctctgggacaaagcaaatgcagtggtgagagggaaatttatagtgttaaatctccacatcaaaaagttagaacgatttcacattaacaacctaacatcacaattaaaagagctagagagccaagagcaaacaaatctcaatgctagtggaagacaagaaataactgaaatcagagctgaactgaaagagccagagacacacagaaattccaaagatcaatgaatccacgtgctgttttttttaaataaaatatatagactgctagttagagtaataaagaacaaaaaagagagaagattcaaataaacacaatcagaaataacaagggacatattaccactgacctcacagaaatacaaccatcaaagaatattatgaagacctctat

SEQ ID NO: 260039 - DNA, 621 bp, Homo sapiens
catataattggagttaaaacactcctcagcaaatataaaagagctataatcctaacaaacagtcttttagaccacagcaccattaaatcagaaatcaagactaagaaatttactcaaatccctacaattacatggaaattgaataacctgctcctaaataacttttagataaataataaaattaaggcagaaatctttgaaatratgaagaccaagctacaccataccaaaatctctgggacaaagcaaatgcagtggtgagagggaaatttatagtgttaaatctccacatcaaaaagttagaacgatttcacattaacaacctaacatcacaattaaaagagctagagagccaagagcaaacaaatctcaatgctagtggaagacaagaaataactgaaatcagagctgaactgaaagagccagagacacacagaaattccaaagatcaatgaatccacgtgctgttttttttaaataaaatatatagactgctagttagagtaataaagaacaaaaaagagagaagattcaaataaacacaatcagaaataacaagggacatattaccactgacctcacagaaatacaaccatcaaagaatattatgaagacctctat

SEQ ID NO: 260040 - DNA, 621 bp, Homo sapiens
catataattggagttaaaacactcctcagcaaatataaaagagctataatcctaacaaacagtcttttagaccacagcaccattaaatcagaaatcaagactaagaaatttactcaaatccctacaattacatggaaattgaataacctgctcctaaataacttttagataaataataaaattaaggcagaaatctttgaaatgatgaagaccaagctacaccataccaaaatctctgggacaaagcaaatgcagtggtgagagggaaatttatagtgttaaatctccacatcaaaaagttagaacgatttcacattaacaacctaacatcacaattaaaagagctagagagccaagagcaaacaaatctcaatgctagyggaagacaagaaataactgaaatcagagctgaactgaaagagccagagacacacagaaattccaaagatcaatgaatccacgtgctgttttttttaaataaaatatatagactgctagttagagtaataaagaacaaaaaagagagaagattcaaataaacacaatcagaaataacaagggacatattaccactgacctcacagaaatacaaccatcaaagaatattatgaagacctctat

SEQ ID NO: 260041 - DNA, 632 bp, Homo sapiens
cataatagctaaaaattgccaggcgctgtggctcacgcctgtaatcccagcactctgggaggccaaggtggacagatcatgaggtcaggagatcaatactatcctggccaacatgatgaaacccaggctctactaaaaatacaaaaactagctgggtgtggtakaccacacctgtaatcccagctactcaggaagctgaggcaggagaatggcttgaacccgggaggcggtgattgcagtgagccgagatcacgccactgcactccagcctggcgacagagcaagactccatctcaaaaaaaaaaaaaaaaaaaaaaaaatctaaaaattggaaataatacaaatgcccattaacacatgaatggattaaactttgtgatacatttatacaatgaaatcttaacaataaaaagaaaacaaattctcatatgtaaaaaaatagagaatctaaaaccattaaattgaatacaagaagccaaacacaaataagtacatactatacaagtccatttatatgaatagacaaaactacattatgttaatagaaatcaacagtcattacctatgggtttcactgtctccctaggtgaggaaactttcaggcgtgttgtaaatgttctatgtctaatttt

SEQ ID NO: 260042 - DNA, 512 bp, Homo sapiens
aagcaagcgaaggaaaggaataacaaagatcagagcagaagtaaatgaaattcaaacaaacataaaatacaaaagatcaatgaaacaaaaagctattgttccttgaaaagataaacaaaattgatagaccattagcaaaattagctaagaaaagaagaaattcatataaactgaattataagtgaaactggggacattccaaatgacaccacaaaaacacaaaatatcatttgagactgctatgaacactattatatacacaaactggaaaacttagaggaaatggataaattcctggaaacgtgtattagtctgttctcacactgctgacaaagacatacccaagactgggtaatttatataggaaagaggttaaattgattcacagttccacatggctgtggaagccttacaatcatggtgaaaggtgaatgaggactaaagtcatgtcttacayggtgtcaggcaagagagcatgtgcaggggaactcccctttataaaaccatcaaat

SEQ ID NO: 260043 - DNA, 632 bp, Homo sapiens
cataatagctaaaaattgccaggcgctgtggctcacgcctgtaatcccagcactctgggaggccaaggtggacagatcatgaggtcaggagatcaatactatcctggccaacatgatgaaacccaggctctactaaaaatacaaaaactagctgggtgtggtataccacacctgtaatcccagctactcaggaagctgaggcaggagaatggcttgaacccgggaggcggtgattgcagtgagccgagatcacgccactgcactccagcctggcgacagagcaagactccatctcaaaaaaaaaaaaaaaaaaaaaaaaatctaaaaattggaaataatacaaatgcccattaacacatgaatggattaaactttgtgatacatttatacaatgaaatcttaacaataaaaagaaaacaaattctcatatgtaaaaaaatagagaatctaaaaccattaaattgaatacaagaagccaaacacaaataagtacatactrtacaagtccatttatatgaatagacaaaactacattatgttaatagaaatcaacagtcattacctatgggtttcactgtctccctaggtgaggaaactttcaggcgtgttgtaaatgttctatgtctaatttt

SEQ ID NO: 260044 - DNA, 632 bp, Homo sapiens
cataatagctaaaaattgccaggcgctgtggctcacgcctgtaatcccagcactctgggaggccaaggtggacagatcatgaggtcaggagatcaatactatcctggccaacatgatgaaacccaggctctactaaaaatacaaaaactagctgggtgtggtataccacacctgtaatcccagctactcaggaagctgaggcaggagaatggcttgaacccgggaggcggtgattgcagtgagccgagatcacgccactgcactccagcctggcgacagagcaagactccatctcaaaaaaaaaaaaaaaaaaaaaaaaatctaaaaattggaaataatacaaatgcccattaacacatgaatggattaaactttgtgatacatttatacaatgaaatcttaacaataaaaagaaaacaaattctcatatgtaaaaaaatagagaatctaaaaccattaaattgaatacaagaagccaaacacaaataagtacatactatacaagtccatttatatgaatagacaaaactacattatgttaatagaaatyaacagtcattacctatgggtttcactgtctccctaggtgaggaaactttcaggcgtgttgtaaatgttctatgtctaatttt

SEQ ID NO: 260045 - DNA, 467 bp, Homo sapiens
ttttttattttcttgtatgttaattttatctcrgtaaaaatgctacaagaattttaaccatttttttctagttacagtgctgattcatagatcctacaacagacctattgaaactggaattccaggtttgaggccctagaatgtgcaatattaaccagcatactgggcaactctaatacacattaaaatcttaaacccttatctgtaatattcaactttatgtatttttactactgtatttgcaaattttattacttcactgtgggcacgtaactgatttataaacctttaaataatggtgtatgcttagagaatctttttatctcttattgattctaacatttttcttgtcctctggatttaaaaaattttattatggtataccttggtgagatgtgcttcatgctttttgtgctagttaggattcactgagctgtgggtttataattttcaagtttggaaaattt

SEQ ID NO: 260046 - DNA, 567 bp, Homo sapiens
tcacataaacagaattaaaaacaaaaactatatgataatctcaacagatacagaataagcattcaaaaaaatccagcatccctttataataaaaatcctcaacaaactaggcrtagaagggactcaacttaattaataaaagtcatatgtgacaaacccacagccaacatactgaatgtagtgcagttgaaagaatcctttcgaaaactggaacaagacaaggatggccacttttactacttctattcaacatagtatttgaagtcctagccagagaattgaggcaagaggtataaataaaaggcatccaaattggaaaaaagaaagtcaaactatcactattagccaatgatataattatatacctagaaaactttatagcttcctccagaagactcctagatttcaaaaacgaattcagcaaagtctcaggttacaaagtcaatgtacacaaatcagtagcacttctatacaccaacaatgatcaagctgaaaataaaatgaagaactcaatcccttttacaataggtgcaaaaaataaaataaaatatctaagaatatatttaa

SEQ ID NO: 260047 - DNA, 567 bp, Homo sapiens
tcacataaacagaattaaaaacaaaaactatatgataatctcaacagatacagaataagcattcaaaaaaatccagcatccctttataataaaaatcctcaacaaactaggcgtagaagggactcaacttaattaataaaagtcatatgtgacaaacccacagccaacatactgaatgtagtgcagttgaaagaatcctttcgaaaactggaacaagacaaggatggccacttttactacttctattcaacatagtatttgaagtcctagccagagaattgaggcaagaggtataaataaaaggcatccaaattggaaaaragaaagtcaaactatcactattagccaatgatataattatatacctagaaaactttatagcttcctccagaagactcctagatttcaaaaacgaattcagcaaagtctcaggttacaaagtcaatgtacacaaatcagtagcacttctatacaccaacaatgatcaagctgaaaataaaatgaagaactcaatcccttttacaataggtgcaaaaaataaaataaaatatctaagaatatatttaa

SEQ ID NO: 260048 - DNA, 567 bp, Homo sapiens
tcacataaacagaattaaaaacaaaaactatatgataatctcaacagatacagaataagcattcaaaaaaatccagcatccctttataataaaaatcctcaacaaactaggcgtagaagggactcaacttaattaataaaagtcatatgtgacaaacccacagccaacatactgaatgtagtgcagttgaaagaatcctttcgaaaactggaacaagacaaggatggccacttttactacttctattcaacatagtatttgaagtcctagccagagaattgaggcaagaggtataaataaaaggcatccaaattggaaaaaagaaagtcaaactatcactattagccaatgatataattatatacctagaaaactttatagcttcctccagaagactcctagatttcaaaaacgaattcagyaaagtctcaggttacaaagtcaatgtacacaaatcagtagcacttctatacaccaacaatgatcaagctgaaaataaaatgaagaactcaatcccttttacaataggtgcaaaaaataaaataaaatatctaagaatatatttaa

SEQ ID NO: 260049 - DNA, 601 bp, Homo sapiens
tgttgttgtggaatcttgttatagtaccttatgtgactgcttagtaagttctttgtgcccatttgaaatcaataactacagttgaagataytctgtatggattttccttattagataagtatctgcatacaggggaaattttgcaatttattttttatctaatgtacatattttaaattctgcttgccttttctccttttatcagaacatgaaaatgaaaagaaacatatgatctgacagcttctccataagaggaaaatccttaatagctaaatacttgttcaaagtattccttgaagcaatctccattttttttcacggttatggtcatcaagataaaaaacaaaacaaaacagaaaacaagttattttgcctttaagtctccaaaactggctgtatcctcaacttctgtttgcatatgcagttacagtctcagaatttctccaacttaaagcaaaacgtagaagcaagataagactattggcttaagagattgaaaagaaaggatggagtttcccattttatttagaattcagattctttttgagccattactgtccatttctcttggtgtctacccaatggcctaatgtttaactat

SEQ ID NO: 260050 - DNA, 601 bp, Homo sapiens
tgttgttgtggaatcttgttatagtaccttatgtgactgcttagtaagttctttgtgcccatttgaaatcaataactacagttgaagatactctgtatggattttccttattagataagtatctgcatacaggggaaattttgcaatttattttttatctaatgtrcatattttaaattctgcttgccttttctccttttatcagaacatgaaaatgaaaagaaacatatgatctgacagcttctccataagaggaaaatccttaatagctaaatacttgttcaaagtattccttgaagcaatctccattttttttcacggttatggtcatcaagataaaaaacaaaacaaaacagaaaacaagttattttgcctttaagtctccaaaactggctgtatcctcaacttctgtttgcatatgcagttacagtctcagaatttctccaacttaaagcaaaacgtagaagcaagataagactattggcttaagagattgaaaagaaaggatggagtttcccattttatttagaattcagattctttttgagccattactgtccatttctcttggtgtctacccaatggcctaatgtttaactat

SEQ ID NO: 260051 - DNA, 601 bp, Homo sapiens
tgttgttgtggaatcttgttatagtaccttatgtgactgcttagtaagttctttgtgcccatttgaaatcaataactacagttgaagatactctgtatggattttccttattagataagtatctgcatacaggggaaattttgcaatttattttttatctaatgtacatattttaaattctgcttgccttttctccttttatcagaacatgaaaatgaaaagaaacatatgatctgacagcttctccataagaggaaaatccttaatagctaaatacttgttcaaagtattccttgaagcaatctccattttttttcacggttatggtcatcaagataaaaaacaaaacaaaacagaaaacaagttattttgcctttaagtctccaaaactggctgtatcctcaacttctgtttgcatatgcagttacagtctcagaatttctccaacttaaagcaaaaygtagaagcaagataagactattggcttaagagattgaaaagaaaggatggagtttcccattttatttagaattcagattctttttgagccattactgtccatttctcttggtgtctacccaatggcctaatgtttaactat

SEQ ID NO: 260052 - DNA, 590 bp, Homo sapiens
caatatcactagtcatcagataaatgcaaattaaaaccttaatgagatatcatcacaaaccagtcagaytggctgttattaaaaatgcaaaaaacaacagatgttggcaaggatgcagagaaaagggaacacttgtgcactgttggtgggagtgtaaattattacaacttctatggaaaacaatatggctatttctcaaataactaaaagttgagctaccattcaatccagcaattccaatactggatgtctacacaaaggaaaataaatcatttcatgaaaaagatattatgcttgcatatcactgcactattcacaatagcaaagacatggaatacttaaatgtcaatctacagatgattggataaagaaaacgtggtatatatacacacaaactacacatgcacacacatacacacacacacaaacactggaatactattcagccattaaaagaatgaaatcatgtcttttgtagaagtgtggatggagctggaggctatcatcttaagagaagtaactcagaaacagaaagtcaaatattacatgttcttgtttataaatgggagacaaattatgtgtacacatgg

SEQ ID NO: 260053 - DNA, 590 bp, Homo sapiens
caatatcactagtcatcagataaatgcaaattaaaaccttaatgagatatcatcacaaaccagtcagactggctgttattaaaaatgcaaaaaacaacagatgttggcaaggatgcagagaaaagggaacacttgtgcactgttggtgggagtgtaaattattacaacttctatggaaaacaatatggctatttctcaaataactaaaagtwgagctaccattcaatccagcaattccaatactggatgtctacacaaaggaaaataaatcatttcatgaaaaagatattatgcttgcatatcactgcactattcacaatagcaaagacatggaatacttaaatgtcaatctacagatgattggataaagaaaacgtggtatatatacacacaaactacacatgcacacacatacacacacacacaaacactggaatactattcagccattaaaagaatgaaatcatgtcttttgtagaagtgtggatggagctggaggctatcatcttaagagaagtaactcagaaacagaaagtcaaatattacatgttcttgtttataaatgggagacaaattatgtgtacacatgg

SEQ ID NO: 260054 - DNA, 531 bp, Homo sapiens
tatttctcaaataactaaaagttgagctaccattcaatccagcaattccaatactggatgtctacacaaaggaaaataaatcatttcatgaaaaagatattatgcttrcatatcactgcactattcacaatagcaaagacatggaatacttaaatgtcaatctacagatgattggataaagaaaacgtggtatatatacacacaaactacacatgcacacacatacacacacacacaaacactggaatactattcagccattaaaagaatgaaatcatgtcttttgtagaagtgtggatggagctggaggctatcatcttaagagaagtaactcagaaacagaaagtcaaatattacatgttcttgtttataaatgggagacaaattatgtgtacacatggatatagaatgtggaaataataaatattgaagacttggaagggtgggaggaggatgacaaataagaaattactcaatggctacgatgtacactattcaggtgatggttacactaaaagcccagacttcacc

SEQ ID NO: 260055 - DNA, 531 bp, Homo sapiens
tatttctcaaataactaaaagttgagctaccattcaatccagcaattccaatactggatgtctacacaaaggaaaataaatcatttcatgaaaaagatattatgcttgcrtatcactgcactattcacaatagcaaagacatggaatacttaaatgtcaatctacagatgattggataaagaaaacgtggtatatatacacacaaactacacatgcacacacatacacacacacacaaacactggaatactattcagccattaaaagaatgaaatcatgtcttttgtagaagtgtggatggagctggaggctatcatcttaagagaagtaactcagaaacagaaagtcaaatattacatgttcttgtttataaatgggagacaaattatgtgtacacatggatatagaatgtggaaataataaatattgaagacttggaagggtgggaggaggatgacaaataagaaattactcaatggctacgatgtacactattcaggtgatggttacactaaaagcccagacttcacc

SEQ ID NO: 260056 - DNA, 531 bp, Homo sapiens
tatttctcaaataactaaaagttgagctaccattcaatccagcaattccaatactggatgtctacacaaaggaaaataaatcatttcatgaaaaagatattatgcttgcatatcactgcactattcacaatagcaaagacatrgaatacttaaatgtcaatctacagatgattggataaagaaaacgtggtatatatacacacaaactacacatgcacacacatacacacacacacaaacactggaatactattcagccattaaaagaatgaaatcatgtcttttgtagaagtgtggatggagctggaggctatcatcttaagagaagtaactcagaaacagaaagtcaaatattacatgttcttgtttataaatgggagacaaattatgtgtacacatggatatagaatgtggaaataataaatattgaagacttggaagggtgggaggaggatgacaaataagaaattactcaatggctacgatgtacactattcaggtgatggttacactaaaagcccagacttcacc

SEQ ID NO: 260057 - DNA, 590 bp, Homo sapiens
ggtatggacaattaagtccaggctgagattatctcagatggagatgaggaatttactgggaactggagtaaatgtctctcatgctgtgctttagcaaagagactagcggcatcttgtctctgccctagagatctgtggaactttgaatttgagagagatgatttagggtatctggcagaagaaacttctaagcagcaaggcattcmagacgtgacctggctttttataaacgcgtacagtcatatgcactcacaatgagatggtctgaaattggaacttatctttaaaagggaagcaaagcataacattttggaaaatttgcagcctgtccatgtggtataaaaggaaaagccattttctggggagaaattcaagacaccaatgcagaaattagcataagaaaagaggagtctaatgttaatagccaagacaatgggaaaaatgtctccagggcattttagaggtcttcattgcagcccccaccaccctccccaccccatgacaggcccagaaacctaggagggaaaaaatggtttcttgggctgcattcaggaccacactgctctgtgtagtcttgggaaatggtgccc

SEQ ID NO: 260058 - DNA, 590 bp, Homo sapiens
ggtatggacaattaagtccaggctgagattatctcagatggagatgaggaatttactgggaactggagtaaatgtctctcatgctgtgctttagcaaagagactagcggcatcttgtctctgccctagagatctgtggaactttgaatttgagagagatgatttagggtatctggcagaagaaacttctaagcagcaaggcattcaagacgtgacctggctttttataaacgcktacagtcatatgcactcacaatgagatggtctgaaattggaacttatctttaaaagggaagcaaagcataacattttggaaaatttgcagcctgtccatgtggtataaaaggaaaagccattttctggggagaaattcaagacaccaatgcagaaattagcataagaaaagaggagtctaatgttaatagccaagacaatgggaaaaatgtctccagggcattttagaggtcttcattgcagcccccaccaccctccccaccccatgacaggcccagaaacctaggagggaaaaaatggtttcttgggctgcattcaggaccacactgctctgtgtagtcttgggaaatggtgccc

SEQ ID NO: 260059 - DNA, 590 bp, Homo sapiens
ggtatggacaattaagtccaggctgagattatctcagatggagatgaggaatttactgggaactggagtaaatgtctctcatgctgtgctttagcaaagagactagcggcatcttgtctctgccctagagatctgtggaactttgaatttgagagagatgatttagggtatctggcagaagaaacttctaagcagcaaggcattcaagacgtgacctggctttttataaacgcgtacagtcatatgcactcacaatgagatggtctgaaattggaacttatctttaaaagggaagcaaagcataacattttggaaaatttgcagcctgtccatgtggtataaaaggaaaagccattttctggggaraaattcaagacaccaatgcagaaattagcataagaaaagaggagtctaatgttaatagccaagacaatgggaaaaatgtctccagggcattttagaggtcttcattgcagcccccaccaccctccccaccccatgacaggcccagaaacctaggagggaaaaaatggtttcttgggctgcattcaggaccacactgctctgtgtagtcttgggaaatggtgccc

SEQ ID NO: 260060 - DNA, 587 bp, Homo sapiens
tagcaaatatcattccagtgcttcagtggagccctgtgatcccttagtttatttttctccaacagtcagatgacaattgtaaatacaatgtaaatacatagacagagtcatttacacatgtggaaaaattgacatcagcatcaatatcccaggtattttatttataaggtaatggattcttctggctgctaagaaagaaaataaaatattttcaaccatattataattggaacaaaaactcagtttacttwatttttttattttaactttctactgattctgaaaaacaaaaatctttcagacactatttgattgtgtattgcttaatcttccatttagaagtttactgttgggtatttttttttttttgaaaataagtaaacaagccactatattagtgacaactgcaagtctcctgtcacatgacaatttcatccaaacccctccactaagagacttaaccaaactgtagcatggcttctagtagcataatgtgtgcctagcatgaccccaggcctgaattaaaatgcctacctgggaaagcacaaggctgctaggaaaattttctgtttgttcaagccaacctg

SEQ ID NO: 260061 - DNA, 587 bp, Homo sapiens
tagcaaatatcattccagtgcttcagtggagccctgtgatcccttagtttatttttctccaacagtcagatgacaattgtaaatacaatgtaaatacatagacagagtcatttacacatgtggaaaaattgacatcagcatcaatatcccaggtattttatttataaggtaatggattcttctggctgctaagaaagaaaataaaatattttcaaccatattataattggaacaaaaactcagtttacttaatttttttattttaactttctactgattctgaaaaacaaaaatctttcagacactatttgattrtgtattgcttaatcttccatttagaagtttactgttgggtatttttttttttttgaaaataagtaaacaagccactatattagtgacaactgcaagtctcctgtcacatgacaatttcatccaaacccctccactaagagacttaaccaaactgtagcatggcttctagtagcataatgtgtgcctagcatgaccccaggcctgaattaaaatgcctacctgggaaagcacaaggctgctaggaaaattttctgtttgttcaagccaacctg

SEQ ID NO: 260062 - DNA, 587 bp, Homo sapiens
tagcaaatatcattccagtgcttcagtggagccctgtgatcccttagtttatttttctccaacagtcagatgacaattgtaaatacaatgtaaatacatagacagagtcatttacacatgtggaaaaattgacatcagcatcaatatcccaggtattttatttataaggtaatggattcttctggctgctaagaaagaaaataaaatattttcaaccatattataattggaacaaaaactcagtttacttaatttttttattttaactttctactgattctgaaaaacaaaaatctttcagacactatttgattgtgtattrcttaatcttccatttagaagtttactgttgggtatttttttttttttgaaaataagtaaacaagccactatattagtgacaactgcaagtctcctgtcacatgacaatttcatccaaacccctccactaagagacttaaccaaactgtagcatggcttctagtagcataatgtgtgcctagcatgaccccaggcctgaattaaaatgcctacctgggaaagcacaaggctgctaggaaaattttctgtttgttcaagccaacctg

SEQ ID NO: 260063 - DNA, 587 bp, Homo sapiens
tagcaaatatcattccagtgcttcagtggagccctgtgatcccttagtttatttttctccaacagtcagatgacaattgtaaatacaatgtaaatacatagacagagtcatttacacatgtggaaaaattgacatcagcatcaatatcccaggtattttatttataaggtaatggattcttctggctgctaagaaagaaaataaaatattttcaaccatattataattggaacaaaaactcagtttacttaatttttttattttaactttctactgattctgaaaaacaaaaatctttcagacactatttgattgtgtattgcttaatcttccatttagaagtttactgttgggtwtttttttttttttgaaaataagtaaacaagccactatattagtgacaactgcaagtctcctgtcacatgacaatttcatccaaacccctccactaagagacttaaccaaactgtagcatggcttctagtagcataatgtgtgcctagcatgaccccaggcctgaattaaaatgcctacctgggaaagcacaaggctgctaggaaaattttctgtttgttcaagccaacctg

SEQ ID NO: 260064 - DNA, 404 bp, Homo sapiens
tgtcacatgacaatttcatccaaacccctccactaagagacttaaccaaactgtagcatggcttctagtagcataatgtgtgcctagcatgaccccaggcctgaattaaaatgcctacctgggaaagcacaaggctgctaggaaaattttctgtttgttcaagccaacctgatgataggccctgagttccttatcttagagctgtaagagttaaagaaagagcaaataaacacgaaatgcagcttaacaggtaacggcacrtttattttagaaaaaaacctgagaggggcttctggccgattttggtcaggagcactttttcttacaggctaagagtatatattggttttagggtgaaggggcttatcataagcttggaatgtttctgtgtgaggaagaagttt

SEQ ID NO: 260065 - DNA, 501 bp, Homo sapiens
tgtagtagtgatacataggtattatataaagacatctcaacctgtttcttrtaatgcagtcaagtattctggtactagcatatacaataacagaaaggttaatattttgatatttatgagaaaaatgttaagggggaaagtgagggttcttaggaggcagcatacctagtacttaagagccaacctgcttgatacaattgatagctccaccacttattatcttagatatcttgtggagttatttaacttttgttagtcatacttttcttttgtacaacttgaataagcagggtaagtatctcagattgtcgctaggaggtgtgaaaggaaaatatcttgggcccctacaattacaatcacgaagctaaagggaaaattcaagtttggaactgcttagggcaacctgcctcccattctattctaataagtagggtaagtgtctcagattgttgctaggaggtgtgaaaggaaaatatcttgggcccccacaatcacaatcag

SEQ ID NO: 260066 - DNA, 501 bp, Homo sapiens
tgtagtagtgatacataggtattatataaagacatctcaacctgtttcttataatgcagtcaagtattctggtactagcatatacaataacagaaaggttaatattttgatatttatgagaaaaatgttaagggggaaagtgagggttcttaggaggcagcatacctagtacttaagagccaacctgcttgatasaattgatagctccaccacttattatcttagatatcttgtggagttatttaacttttgttagtcatacttttcttttgtacaacttgaataagcagggtaagtatctcagattgtcgctaggaggtgtgaaaggaaaatatcttgggcccctacaattacaatcacgaagctaaagggaaaattcaagtttggaactgcttagggcaacctgcctcccattctattctaataagtagggtaagtgtctcagattgttgctaggaggtgtgaaaggaaaatatcttgggcccccacaatcacaatcag

SEQ ID NO: 260067 - DNA, 501 bp, Homo sapiens
tgtagtagtgatacataggtattatataaagacatctcaacctgtttcttataatgcagtcaagtattctggtactagcatatacaataacagaaaggttaatattttgatatttatgagaaaaatgttaagggggaaagtgagggttcttaggaggcagcatacctagtacttaagagccaacctgcttgatacaattgatagctccaccacttattatcttagatatcttgtggagttatttaactttygttagtcatacttttcttttgtacaacttgaataagcagggtaagtatctcagattgtcgctaggaggtgtgaaaggaaaatatcttgggcccctacaattacaatcacgaagctaaagggaaaattcaagtttggaactgcttagggcaacctgcctcccattctattctaataagtagggtaagtgtctcagattgttgctaggaggtgtgaaaggaaaatatcttgggcccccacaatcacaatcag

SEQ ID NO: 260068 - DNA, 562 bp, Homo sapiens
ttcttataatgcagtcaagtattctggtactagcatatacaataacagaaaggttaatattttgatatttatgagaaaaatgttaagggggaaagtgagggttcttaggaggcagcatacctagtacttaagagccaacctgcttgatacaattgatagctccaccacttattatcttagatatcttgtggagttatttaacttttgttagtcatacttttcttttgtacaacttgaataagcagggtaagtatctcagattgtygctaggaggtgtgaaaggaaaatatcttgggcccctacaattacaatcacgaagctaaagggaaaattcaagtttggaactgcttagggcaacctgcctcccattctattctaataagtagggtaagtgtctcagattgttgctaggaggtgtgaaaggaaaatatcttgggcccccacaatcacaatcaggaagctaaagggaaaattcaagctgggaactgcttagggcaacctgcctccattctattcaaatttatctctatgctcactgagataaatgcatatctgattgcct

SEQ ID NO: 260069 - DNA, 562 bp, Homo sapiens
ttcttataatgcagtcaagtattctggtactagcatatacaataacagaaaggttaatattttgatatttatgagaaaaatgttaagggggaaagtgagggttcttaggaggcagcatacctagtacttaagagccaacctgcttgatacaattgatagctccaccacttattatcttagatatcttgtggagttatttaacttttgttagtcatacttttcttttgtacaacttgaataagcagggtaagtatctcagattgtcgctaggaggtgtgaaaggaaaatatcttgggcccctacaattacaatcacgaagctaaagggaaaattcaagttkggaactgcttagggcaacctgcctcccattctattctaataagtagggtaagtgtctcagattgttgctaggaggtgtgaaaggaaaatatcttgggcccccacaatcacaatcaggaagctaaagggaaaattcaagctgggaactgcttagggcaacctgcctccattctattcaaatttatctctatgctcactgagataaatgcatatctgattgcct

SEQ ID NO: 260070 - DNA, 562 bp, Homo sapiens
ttcttataatgcagtcaagtattctggtactagcatatacaataacagaaaggttaatattttgatatttatgagaaaaatgttaagggggaaagtgagggttcttaggaggcagcatacctagtacttaagagccaacctgcttgatacaattgatagctccaccacttattatcttagatatcttgtggagttatttaacttttgttagtcatacttttcttttgtacaacttgaataagcagggtaagtatctcagattgtcgctaggaggtgtgaaaggaaaatatcttgggcccctacaattacaatcacgaagctaaagggaaaattcaagtttggaactgcttagggcaacctgcctcccattctattctaataagtagggtaagtrtctcagattgttgctaggaggtgtgaaaggaaaatatcttgggcccccacaatcacaatcaggaagctaaagggaaaattcaagctgggaactgcttagggcaacctgcctccattctattcaaatttatctctatgctcactgagataaatgcatatctgattgcct

SEQ ID NO: 260071 - DNA, 553 bp, Homo sapiens
ggaaatatcctctctatttacatagggcatacaatgagtaaatgaatttgtaactttacttcatcctcttcattaacayagggcatataccaagtaaccaatggaaacctctagagggtatttaaaccccagaaaattctgtaacagtgctcgagcccactcccaccctgtggagcatactttcgttttcaagaaatctctgcttttgttgcttcattctttcctttttttgtttgtgtgttttgtccaattttttgttcaagacatcaagaatctggacactctccactggtaacactgtcatataagaatccagctattacaaaatccaggtaacaatatatgggcatcaaaactgggcttctagaagaggagtttgtgttcagcaagttaaatgtaagaacaaggggaataatagggcatggtgttggtggtggaggagttaaatggtagcatagctaaaaggatcagaacagacatagtcatttctatttttccccaaaatctgagctgtgttacatgtgagcttatatgtcttagaaggctagagata

SEQ ID NO: 260072 - DNA, 553 bp, Homo sapiens
ggaaatatcctctctatttacatagggcatacaatgagtaaatgaatttgtaactttacttcatcctcttcattaacatagggcrtataccaagtaaccaatggaaacctctagagggtatttaaaccccagaaaattctgtaacagtgctcgagcccactcccaccctgtggagcatactttcgttttcaagaaatctctgcttttgttgcttcattctttcctttttttgtttgtgtgttttgtccaattttttgttcaagacatcaagaatctggacactctccactggtaacactgtcatataagaatccagctattacaaaatccaggtaacaatatatgggcatcaaaactgggcttctagaagaggagtttgtgttcagcaagttaaatgtaagaacaaggggaataatagggcatggtgttggtggtggaggagttaaatggtagcatagctaaaaggatcagaacagacatagtcatttctatttttccccaaaatctgagctgtgttacatgtgagcttatatgtcttagaaggctagagata

SEQ ID NO: 260073 - DNA, 536 bp, Homo sapiens
ttacatagggcatacaatgagtaaatgaatttgtaactttacttcatcctcttcattaacatagggcatataccaagtaaccaatggaaacctctagagggtatttaaaccccagaaaattctgtaacagtgctcgagcccactcccaccctgtggagcatactttcrttttcaagaaatctctgcttttgttgcttcattctttcctttttttgtttgtgtgttttgtccaattttttgttcaagacatcaagaatctggacactctccactggtaacactgtcatataagaatccagctattacaaaatccaggtaacaatatatgggcatcaaaactgggcttctagaagaggagtttgtgttcagcaagttaaatgtaagaacaaggggaataatagggcatggtgttggtggtggaggagttaaatggtagcatagctaaaaggatcagaacagacatagtcatttctatttttccccaaaatctgagctgtgttacatgtgagcttatatgtcttagaaggctagagata

SEQ ID NO: 260074 - DNA, 536 bp, Homo sapiens
ttacatagggcatacaatgagtaaatgaatttgtaactttacttcatcctcttcattaacatagggcatataccaagtaaccaatggaaacctctagagggtatttaaaccccagaaaattctgtaacagtgctcgagcccactcccaccctgtggagcatactttcgttttcaagaaatctctgcttttgttgcttcattctttccttkttttgtttgtgtgttttgtccaattttttgttcaagacatcaagaatctggacactctccactggtaacactgtcatataagaatccagctattacaaaatccaggtaacaatatatgggcatcaaaactgggcttctagaagaggagtttgtgttcagcaagttaaatgtaagaacaaggggaataatagggcatggtgttggtggtggaggagttaaatggtagcatagctaaaaggatcagaacagacatagtcatttctatttttccccaaaatctgagctgtgttacatgtgagcttatatgtcttagaaggctagagata

SEQ ID NO: 260075 - DNA, 606 bp, Homo sapiens
acctatgtggcataatgagacctactcactcattcagctcaatgttctactgacatctgaataatagtatgccttctctgttacatttattaactaaaattgggagctatatctgaaaattatttttgtatgcagtgctcacacaccatctgacactgagttattgacttcaaaataatggatttkgggggcaagagtagaggaagtatttgtgaactgacttaatgctacttggttatgtataggttctttctggtagttaaaattagccactaaatatttcaattggaggggattattacattaacaaatcttagatcagacttttacaaacatgacaactacaaacaggggcatttattaacaaactatttttagttatataaaagaaacaattcccacaatctgttttttacttggaaaattttcaattacactggattttaagtactcttactattatttgttgtaagaggttattttgagacaaatgccaagattttttagaatgaattctattaaccatatcgatatcaaccaactatggcagcagttcacagctggccgtagaaatagccacttaggctacagtgtcattcctaagga

SEQ ID NO: 260076 - DNA, 606 bp, Homo sapiens
acctatgtggcataatgagacctactcactcattcagctcaatgttctactgacatctgaataatagtatgccttctctgttacatttattaactaaaattgggagctatatctgaaaattatttttgtatgcagtgctcacacaccatctgacactgagttattgacttcaaaataatggattttgggggcaagagtagaggaagtatttgtgaactgacttaatgctacttggtyatgtataggttctttctggtagttaaaattagccactaaatatttcaattggaggggattattacattaacaaatcttagatcagacttttacaaacatgacaactacaaacaggggcatttattaacaaactatttttagttatataaaagaaacaattcccacaatctgttttttacttggaaaattttcaattacactggattttaagtactcttactattatttgttgtaagaggttattttgagacaaatgccaagattttttagaatgaattctattaaccatatcgatatcaaccaactatggcagcagttcacagctggccgtagaaatagccacttaggctacagtgtcattcctaagga

SEQ ID NO: 260077 - DNA, 606 bp, Homo sapiens
acctatgtggcataatgagacctactcactcattcagctcaatgttctactgacatctgaataatagtatgccttctctgttacatttattaactaaaattgggagctatatctgaaaattatttttgtatgcagtgctcacacaccatctgacactgagttattgacttcaaaataatggattttgggggcaagagtagaggaagtatttgtgaactgacttaatgctacttggttatgtataggttctttctggtagttaaaattagccactaaatatttcaattggaggggattattacattaacaaatcttagatcagacttttacaaacatgrcaactacaaacaggggcatttattaacaaactatttttagttatataaaagaaacaattcccacaatctgttttttacttggaaaattttcaattacactggattttaagtactcttactattatttgttgtaagaggttattttgagacaaatgccaagattttttagaatgaattctattaaccatatcgatatcaaccaactatggcagcagttcacagctggccgtagaaatagccacttaggctacagtgtcattcctaagga

SEQ ID NO: 260078 - DNA, 606 bp, Homo sapiens
acctatgtggcataatgagacctactcactcattcagctcaatgttctactgacatctgaataatagtatgccttctctgttacatttattaactaaaattgggagctatatctgaaaattatttttgtatgcagtgctcacacaccatctgacactgagttattgacttcaaaataatggattttgggggcaagagtagaggaagtatttgtgaactgacttaatgctacttggttatgtataggttctttctggtagttaaaattagccactaaatatttcaattggaggggattattacattaacaaatcttagatcagacttttacaaacatgacaactacaaacaggggcatttattaacaaactatttttagttatataaaagaaacaattcccacaatctgttttttacttggaaaattttcaattacactggattttaagtactcttactattatttgttgtaagaggttattttgagacaaatgccaagattttttagaatgaattctattaaccatatcgatatcaaccaactatggcarcagttcacagctggccgtagaaatagccacttaggctacagtgtcattcctaagga

SEQ ID NO: 260079 - DNA, 440 bp, Homo sapiens
agacattatgattattttagagatttaaagatcagagtcttggccagttttaaggtcttaatatatcagctgtacattatgtgttttgcattatattctttccttactttgctctattttaaattgattttctattaaagaaaattatctcttatagataattaaaggaagtaatagcaaaacccataactcaccaaataaaagtgacacatgaaaatattagcatcatgaattgatttaagggaataaaaaattaacratgcagttgaagtcacttaattatctttcttcaagccactcccatccttcttatactaccagagaaaaccatcaccacacaattggtataaattttttatatcgacctttttatactttaatcatatatgcgtatgacccacatgaatttctgtaagattgaacagaaccaaatcaaaaat

SEQ ID NO: 260080 - DNA, 440 bp, Homo sapiens
agacattatgattattttagagatttaaagatcagagtcttggccagttttaaggtcttaatatatcagctgtacattatgtgttttgcattatattctttccttactttgctctattttaaattgattttctattaaagaaaattatctcttatagataattaaaggaagtaatagcaaaacccataactcaccaaataaaagtgacacatgaaaatattagcatcatgaattgatttaagggaataaaaaattaacgatgcagttgaagtcacttaattatctttcttcaagccactcccatccttcttatactaccagagaaaaccatcaccacacaattggtataaattttttayatcgacctttttatactttaatcatatatgcgtatgacccacatgaatttctgtaagattgaacagaaccaaatcaaaaat

SEQ ID NO: 260081 - DNA, 440 bp, Homo sapiens
agacattatgattattttagagatttaaagatcagagtcttggccagttttaaggtcttaatatatcagctgtacattatgtgttttgcattatattctttccttactttgctctattttaaattgattttctattaaagaaaattatctcttatagataattaaaggaagtaatagcaaaacccataactcaccaaataaaagtgacacatgaaaatattagcatcatgaattgatttaagggaataaaaaattaacgatgcagttgaagtcacttaattatctttcttcaagccactcccatccttcttatactaccagagaaaaccatcaccacacaattggtataaattttttatatcgacctttttatactttaatcatataygcgtatgacccacatgaatttctgtaagattgaacagaaccaaatcaaaaat

SEQ ID NO: 260082 - DNA, 341 bp, Homo sapiens
ttgccaaggactgggggaagggggaaatgggaaggtacrtaattatgaacaggcaaaaagtgttagttaagcaagatttataagctctagagatctggtatacaagattgtacctagagttgatactaatgcattatacacttcaaaaattgctaagacgctggatctaatgttaaatattctaaccacagtcacatcaaataaaaaaggttagcataaaagagacctactgaggaaatgaacagcatagcctagtggagagaaaagggaaaattccagttattgaaattacatattcttttttttgtaaacactgaaatcatttaatttgtgggataagg

SEQ ID NO: 260083 - DNA, 554 bp, Homo sapiens
atatcccattctcaatgatgtgattatttcacattgcatgcctgtatcaaaacatctcctgtaccccataaatatatgtacctactatgtacccacaaaaaaktttaaaaattaaaagaaaaaaagttggcacgtgttaatattgtattctttcaagcacctttgaatgtgatcaatgttagtaagattgttgtaacatttcccttgcgatcataatgagtaattcgagctgtttatagaatcagtctttctgtgcatctcgatagttaagaatagtaccatataaaaatttctttgtactattatattaacgatgctttaatatgcagattaacagcacaatatacaatcaattcaaatttggagccaaaatatgtattatgtttttaaaaaggaaaaacatgcatttctcaaaatttcaggctaaatattaatgaggtaggagtcattaaaataatgagcaactgaaatgcatcgaaaatgctatgaaatgcaaaagatccaataaacgattccattttattttcattactagtaaaagacttctgatttaa

SEQ ID NO: 260084 - DNA, 554 bp, Homo sapiens
atatcccattctcaatgatgtgattatttcacattgcatgcctgtatcaaaacatctcctgtaccccataaatatatgtacctactatgtacccacaaaaaagtttaaaaattaaargaaaaaaagttggcacgtgttaatattgtattctttcaagcacctttgaatgtgatcaatgttagtaagattgttgtaacatttcccttgcgatcataatgagtaattcgagctgtttatagaatcagtctttctgtgcatctcgatagttaagaatagtaccatataaaaatttctttgtactattatattaacgatgctttaatatgcagattaacagcacaatatacaatcaattcaaatttggagccaaaatatgtattatgtttttaaaaaggaaaaacatgcatttctcaaaatttcaggctaaatattaatgaggtaggagtcattaaaataatgagcaactgaaatgcatcgaaaatgctatgaaatgcaaaagatccaataaacgattccattttattttcattactagtaaaagacttctgatttaa

SEQ ID NO: 260085 - DNA, 554 bp, Homo sapiens
atatcccattctcaatgatgtgattatttcacattgcatgcctgtatcaaaacatctcctgtaccccataaatatatgtacctactatgtacccacaaaaaagtttaaaaattaaaagaaaaaaagttggcacgtgttaatattgtattctttcaagcacctttgaatgtgatcaatgttartaagattgttgtaacatttcccttgcgatcataatgagtaattcgagctgtttatagaatcagtctttctgtgcatctcgatagttaagaatagtaccatataaaaatttctttgtactattatattaacgatgctttaatatgcagattaacagcacaatatacaatcaattcaaatttggagccaaaatatgtattatgtttttaaaaaggaaaaacatgcatttctcaaaatttcaggctaaatattaatgaggtaggagtcattaaaataatgagcaactgaaatgcatcgaaaatgctatgaaatgcaaaagatccaataaacgattccattttattttcattactagtaaaagacttctgatttaa

SEQ ID NO: 260086 - DNA, 554 bp, Homo sapiens
atatcccattctcaatgatgtgattatttcacattgcatgcctgtatcaaaacatctcctgtaccccataaatatatgtacctactatgtacccacaaaaaagtttaaaaattaaaagaaaaaaagttggcacgtgttaatattgtattctttcaagcacctttgaatgtgatcaatgttagtaagattgttgtaacatttcccttgcgatcataatgagtaattcgagctgtttatagaatcagtctttctgtgcatctcgatagttaagaatagtaccatataaaaatttctttgtactattatattaaygatgctttaatatgcagattaacagcacaatatacaatcaattcaaatttggagccaaaatatgtattatgtttttaaaaaggaaaaacatgcatttctcaaaatttcaggctaaatattaatgaggtaggagtcattaaaataatgagcaactgaaatgcatcgaaaatgctatgaaatgcaaaagatccaataaacgattccattttattttcattactagtaaaagacttctgatttaa

SEQ ID NO: 260087 - DNA, 569 bp, Homo sapiens
agcaactgaaatgcatcgaaaatgctatgaaatgcaaaagatccaataaacgattccattttattttcattactagtaaaagacttctgatttaaattcacctatcttcaagacaacatttagacttggaaacttacactgtcaaagctgaaagcgtttctcttctctgtataacagtccacataatagtttagtgttcaaggaaaatgtcaggggtgttcaatcttgtgccttccctgaatgacattggaagaagaataattgtcttcggccacacataaaatacacaaatattaacaatagctgatgagttttttaaaattacaaaagaatttcataatcttttaagaaagtttactagtttgtgttgggctgctttcaaagccgtcctggtcygcatgcggcccgcaggtggcagattgggcaagcttgatttagaccattcccagttacagaacactcagaaaactcactgcaatattcatgccaaaaccagaagatgcctgtattaatagaagctgggaagactctgcttctctgacaatttgacaactgatatttaaaagtgt

SEQ ID NO: 260088 - DNA, 569 bp, Homo sapiens
agcaactgaaatgcatcgaaaatgctatgaaatgcaaaagatccaataaacgattccattttattttcattactagtaaaagacttctgatttaaattcacctatcttcaagacaacatttagacttggaaacttacactgtcaaagctgaaagcgtttctcttctctgtataacagtccacataatagtttagtgttcaaggaaaatgtcaggggtgttcaatcttgtgccttccctgaatgacattggaagaagaataattgtcttcggccacacataaaatacacaaatattaacaatagctgatgagttttttaaaattacaaaagaatttcataatcttttaagaaagtttactagtttgtgttgggctgctttcaaagccgtcctggtccgcatgcggcccgcaggtggcagattgggcaagcttgatttagaccattcccagttacagaacaytcagaaaactcactgcaatattcatgccaaaaccagaagatgcctgtattaatagaagctgggaagactctgcttctctgacaatttgacaactgatatttaaaagtgt

SEQ ID NO: 260089 - DNA, 594 bp, Homo sapiens
tacttgtcataactacaattcttcacaaatacttttggattgattagtgtcacattgttggtcttttgtactgatgaggaatgtttatagacagaagacagagagtattcttggtgaccttaggcaaacttcttagcatgtcaaggcctctattaatctgtaaagtcttctatacagtcaaaccacattcatcttgtgctccacctgttggcagcatattaaatttagaaacataagactaagagaaggctgaagtgtctgaggcacatgatctaatgaagaaaacaaatatattcaaaaatcattaccacacaaagtaatatataatggctcagaaaagaccrtagttagttggctgataatatttctaaaatatattctttgaaatattctctggtagtatttacaattgtgtggatcgagaaagggaaggagggggaaaagaaaggagaaaaaaagagagagcaattaagaggtaaattacttttgagattggatttttaaacattaatatggcgtgttacatttataaaaaaaccccaaagatgtccctgggtaggaagaataatggtcccccaaatatttccaagtcct

SEQ ID NO: 260090 - DNA, 594 bp, Homo sapiens
tacttgtcataactacaattcttcacaaatacttttggattgattagtgtcacattgttggtcttttgtactgatgaggaatgtttatagacagaagacagagagtattcttggtgaccttaggcaaacttcttagcatgtcaaggcctctattaatctgtaaagtcttctatacagtcaaaccacattcatcttgtgctccacctgttggcagcatattaaatttagaaacataagactaagagaaggctgaagtgtctgaggcacatgatctaatgaagaaaacaaatatattcaaaaatcattaccacacaaagtaatatataatggctcagaaaagaccgtagttagttggctgataatatttctaaaatatattctttgaaatatyctctggtagtatttacaattgtgtggatcgagaaagggaaggagggggaaaagaaaggagaaaaaaagagagagcaattaagaggtaaattacttttgagattggatttttaaacattaatatggcgtgttacatttataaaaaaaccccaaagatgtccctgggtaggaagaataatggtcccccaaatatttccaagtcct

SEQ ID NO: 260091 - DNA, 594 bp, Homo sapiens
tacttgtcataactacaattcttcacaaatacttttggattgattagtgtcacattgttggtcttttgtactgatgaggaatgtttatagacagaagacagagagtattcttggtgaccttaggcaaacttcttagcatgtcaaggcctctattaatctgtaaagtcttctatacagtcaaaccacattcatcttgtgctccacctgttggcagcatattaaatttagaaacataagactaagagaaggctgaagtgtctgaggcacatgatctaatgaagaaaacaaatatattcaaaaatcattaccacacaaagtaatatataatggctcagaaaagaccgtagttagttggctgataatatttctaaaatatattctttgaaatattctctggtagtatttacaattgtgtggatcgagaaagggaaggagggggaaaagaaaggagaaaaaragagagagcaattaagaggtaaattacttttgagattggatttttaaacattaatatggcgtgttacatttataaaaaaaccccaaagatgtccctgggtaggaagaataatggtcccccaaatatttccaagtcct

SEQ ID NO: 260092 - DNA, 594 bp, Homo sapiens
tacttgtcataactacaattcttcacaaatacttttggattgattagtgtcacattgttggtcttttgtactgatgaggaatgtttatagacagaagacagagagtattcttggtgaccttaggcaaacttcttagcatgtcaaggcctctattaatctgtaaagtcttctatacagtcaaaccacattcatcttgtgctccacctgttggcagcatattaaatttagaaacataagactaagagaaggctgaagtgtctgaggcacatgatctaatgaagaaaacaaatatattcaaaaatcattaccacacaaagtaatatataatggctcagaaaagaccgtagttagttggctgataatatttctaaaatatattctttgaaatattctctggtagtatttacaattgtgtggatcgagaaagggaaggagggggaaaagaaaggagaaaaaaagagagagcaattaagaggtaaattacttttgagattggatttttaaacattaatatggcrtgttacatttataaaaaaaccccaaagatgtccctgggtaggaagaataatggtcccccaaatatttccaagtcct

SEQ ID NO: 260093 - DNA, 528 bp, Homo sapiens
cctccccaggtcgttctatgagactagcatcatctagataccaaaaacaggcaaaacacaacaaaaaaggaaacttaaggccaacatttttctgtgaatatcaatgcaaaaatcctaaacaaaatacttgcaaaccaaatccagtagcacatctaaaagctaatctatcatgatcaagtaggcttcrtccccaggattcaaagttgataattaattataataaaccacaagataatcatgtagtttatctcaatagacacagaaaagacctttgataaaattcaacattccttcatattaaaaattctcaataacctaggtattaaaggaaagtacctgtgacggttaatactgagtgtcaacttgattggattgaaggatgcaaagtattgttactgggtgtgtctgtgagggtttgccaaaggagattaatattggagtcagtggtctaaaggaggcagacccacccttagtcttggtgggcaccatctaatgagctgctagcacagctaggataaaagcaggcag

SEQ ID NO: 260094 - DNA, 528 bp, Homo sapiens
cctccccaggtcgttctatgagactagcatcatctagataccaaaaacaggcaaaacacaacaaaaaaggaaacttaaggccaacatttttctgtgaatatcaatgcaaaaatcctaaacaaaatacttgcaaaccaaatccagtagcacatctaaaagctaatctatcatgatcaagtaggcttcgtccccaggattcaaagttgataattaattataataaaccacaagataatcatgtagtttatctcaatagacacagaaaagacctttgataaaattcaacattccttcatattaaaaattctcaataacctaggtattaaaggaaagtacctgtgayggttaatactgagtgtcaacttgattggattgaaggatgcaaagtattgttactgggtgtgtctgtgagggtttgccaaaggagattaatattggagtcagtggtctaaaggaggcagacccacccttagtcttggtgggcaccatctaatgagctgctagcacagctaggataaaagcaggcag

SEQ ID NO: 260095 - DNA, 457 bp, Homo sapiens
tggatgcatcactccaatctctgcctttgtctttacatggccatctttcgctgtctgtgtctctgtgtcccttattaagacatcagtcatattggattaagggctcatgcttatgtcctcaccttaactgatacatttgcaatgactctttkttttccaaattagtatgaattctgaggtactgaggttaagacttcaacatatgcatttgaaaacaaaaaattaatgtagaatgtagagctagtattgggaaaatacaaaatgagccaggaagatcttgtagtgccagaaactaagatggtgctaaaaattgaaagaatgggtcatgtcaaaataacacaggaaccaaacttaaaaagctcttgatggctgaaagttgaagaaattcgagaaacaaaataagtaaagtagtactggattctagcccaaagtataaaataaatatgagtccatactg

SEQ ID NO: 260096 - DNA, 457 bp, Homo sapiens
tggatgcatcactccaatctctgcctttgtctttacatggccatctttcgctgtctgtgtctctgtgtcccttattaagacatcagtcatattggattaagggctcatgcttatgtcctcaccttaactgatacatttgcaatgactctttgttttccaaattagtatgaattctgaggtactgaggttaagacttcaacayatgcatttgaaaacaaaaaattaatgtagaatgtagagctagtattgggaaaatacaaaatgagccaggaagatcttgtagtgccagaaactaagatggtgctaaaaattgaaagaatgggtcatgtcaaaataacacaggaaccaaacttaaaaagctcttgatggctgaaagttgaagaaattcgagaaacaaaataagtaaagtagtactggattctagcccaaagtataaaataaatatgagtccatactg

SEQ ID NO: 260097 - DNA, 457 bp, Homo sapiens
tggatgcatcactccaatctctgcctttgtctttacatggccatctttcgctgtctgtgtctctgtgtcccttattaagacatcagtcatattggattaagggctcatgcttatgtcctcaccttaactgatacatttgcaatgactctttgttttccaaattagtatgaattctgaggtactgaggttaagacttcaacatatgcatttgaaaacaaaaaattaatgtagaatgtagagctagtattgggaaaatacaaaatgagycaggaagatcttgtagtgccagaaactaagatggtgctaaaaattgaaagaatgggtcatgtcaaaataacacaggaaccaaacttaaaaagctcttgatggctgaaagttgaagaaattcgagaaacaaaataagtaaagtagtactggattctagcccaaagtataaaataaatatgagtccatactg

SEQ ID NO: 260098 - DNA, 617 bp, Homo sapiens
ttgctcatgaataatttcctctcagtttttgtcgttgttattcaccagcaagtgaaaagctgatattgaattgagtgatagtcaacattattgtgattttttctttttataaagtaaccagttacctttctcaattcttgcttcactttcatgggtagataaaatttgaacagattcttaccttctctttgtattgcatacagcatttctgtatctcactgttcatgaatatgaggactaaactctgttgttttttttttaatcttgcccaaattcctatttaaggggtctagggagtcatgccctayaaaccataaaccataaattctcatcagatgggttttatttgaccctgtatattgtgacttactttccaatctgactctggcataatattatgagacaaggaaaaaaatcaaaatatttcactccaaaatatatttccttgccataccttgaaattgccctgcaaattatcttgtgggaaaaatccacattctatagaaaatcccctttcccctttgttttccttccttcctttccagatccaggagataatcaactaagacctaggcaccattttaggtccaataagaaatattttacaacctgctttc

SEQ ID NO: 260099 - DNA, 577 bp, Homo sapiens
taagcaataggtcatgttgttccaaagatatgggattattgtctgaagaaaatgtttaaataaggaggaagaaacaaaataaacatatttttcaaaatatctatcagtcagaatagaagtaaagaaagctccctttccaatctgctcagaatgcaaaaattacaggatgcaaaatacatcacagatagttgtacttccagtatgtcccagacagtaaacactatgtatttcyaataattttattttatttttctggagcagagggaaagttaaaaggtgatagatgaagaaaaaatgatatttcacaaatacattgagtttagaatatggatccataataaacatataccttgtttgcttacaaaatccactgacagtttttagaataaggataatagatcagagcatccagtaaccaaaaactgttatctgtgacaaacacaatacacagacattagcatcttcagattattgaaccaaaggttttgtaacctattttttatttcagaattctggtggtttgtctgttttattagttaaataataatttactcattttttatatacttttataata

SEQ ID NO: 260100 - DNA, 577 bp, Homo sapiens
taagcaataggtcatgttgttccaaagatatgggattattgtctgaagaaaatgtttaaataaggaggaagaaacaaaataaacatatttttcaaaatatctatcagtcagaatagaagtaaagaaagctccctttccaatctgctcagaatgcaaaaattacaggatgcaaaatacatcacagatagttgtacttccagtatgtcccagacagtaaacactatgtatttctaataattttattttatttttctggagcagagggaaagttaaaaggtgatagatgaagaaaaaatgatatttcacaaatacattgagtttagaatatggatccataataaacatataccttgtttgcttacaaaatccactgacagtttttagaataaggataatagatcagagcatccagtaaccaaaaactgttatctgtgacaaacacaatacacagamattagcatcttcagattattgaaccaaaggttttgtaacctattttttatttcagaattctggtggtttgtctgttttattagttaaataataatttactcattttttatatacttttataata

SEQ ID NO: 260101 - DNA, 577 bp, Homo sapiens
taagcaataggtcatgttgttccaaagatatgggattattgtctgaagaaaatgtttaaataaggaggaagaaacaaaataaacatatttttcaaaatatctatcagtcagaatagaagtaaagaaagctccctttccaatctgctcagaatgcaaaaattacaggatgcaaaatacatcacagatagttgtacttccagtatgtcccagacagtaaacactatgtatttctaataattttattttatttttctggagcagagggaaagttaaaaggtgatagatgaagaaaaaatgatatttcacaaatacattgagtttagaatatggatccataataaacatataccttgtttgcttacaaaatccactgacagtttttagaataaggataatagatcagagcatccagtaaccaaaaactgttatctgtgacaaacacaatacacagacattagcatcttcagattattgaaccaaaggttttgtaacctattttttatttcagaattcyggtggtttgtctgttttattagttaaataataatttactcattttttatatacttttataata

SEQ ID NO: 260102 - DNA, 507 bp, Homo sapiens
tttgaaaatcactaagaaaaaatgatagtagttgagaagtagtatttcaatgactgtgtaactttggaaacaaaatacaaccttatcagttaggagctatattygcaatggcacaactcatgaggtgtgatgaactgttaattagattcaagttgcataaatatccacacaactgagtgcaaaactccatgatgatatgtagcattggttttataattgtgagacgactggagacaggaatggtctgagataagtaagctaatatgccttgagattgcctctgtatcgattttcactcatctctaacagccgtttttctagtttacatctaaacaggaatgtttgtaatctacatgtttaagctaaagacttgccttaaaaatcttcctgtctgtactgacagacagtacacacagatctaacagaactgtcaatttaatgttaatgctttgtttgacaggtggctagaatccttaaattttacttcatgctgaataagtgaaagag

SEQ ID NO: 260103 - DNA, 617 bp, Homo sapiens
tcactacagccaacaccattactcccctgtaagcctgttgatttagatgcatgaggagcccaaagtggccaggtggcagttttaacttccagtttggtagaattactgttgtctcccatggtggaggcattccttcctctgaaacaaagacctctgtgctagcagagcataaagtcacagaaataatacaaaattttttttttctagtgggttactaggatgaatgatggtggtgccattctatttccactccttgattcctggacctgtgaattctggcaattgggggaaayagtaccatatagtgaacttttattcagaacatgtaaagccttctagaagaccttgcccagtcctgcaaaatattgccacctatctggtgctgtaactgtgccttcaaaaggccattttatagtcttatcaagacaactgcttcaggatgatggggagcatggtaaatccagtgcattttatgaatataagtcaattaccacacttctttgtgaagtgaattacttttaagaagcaatgctgtgtggaatactataatgatggataaggcattctgtaagtccacaagtggtagttttgtcaaagcattgaatgagggaaggtaa

SEQ ID NO: 260104 - DNA, 526 bp, Homo sapiens
aatactctgggcaatggtgctacactgggggctcagtgttggtctctgctgcagatagattggacactaggtgatgaccatagccaggtcagccctgatgattttaactctatattgttgggcccaggcataacctccatctcagctaacatgctgactttgttcataagcccattggacaatggcagttggttaaagaaaaaggctgattggatttcacagaataggtcattctatcaatttgattattcarttcttcctctgctgaggtcaccttttggtgagcatttacatgggacacaattacctttaagttctttgcccactcggaaaggtctaccttttcccaaaatttctttgtcaccaattttccattcgtatttcttccaagtccctgatcattcaaccagactatctgagttcccctttcagcagaagatggatgtgctcactgcctcctgaagcatttagaataactaatgctttgccagatatttggggaatctttaattcagtcaacttaaca

SEQ ID NO: 260105 - DNA, 547 bp, Homo sapiens
taatagttaaatagtctatttgtttaaattacagaataatacagggttacatattaagaatgtttaattattgattctcctaaaattagttttctagaattaaaatttcctttggataacaaaataacaattaacttctatcatcttacaaaatacaattgtttaacatcttcatagatatttcttaacatttacgtagaaacttgaactagaaaatatatgaatttgaataaacaacttataataaagaatttgagcatataatactatcttatatacagtagattatcatttatttcaaatatttgctaggattactkttccaaatatcatccacatatagataaaatgtacttttcaccagtaataaataaggcacacctatttgttctgtcacattaaggaattaatatgttctcattaataatgtaataacaaaattcgtgatatttgcatatggtagactgatagcaaaaatttcccatacattcctctatccatgtcttttgaaatttgactttgcagttttccctgtcaagggatatag

SEQ ID NO: 260106 - DNA, 547 bp, Homo sapiens
taatagttaaatagtctatttgtttaaattacagaataatacagggttacatattaagaatgtttaattattgattctcctaaaattagttttctagaattaaaatttcctttggataacaaaataacaattaacttctatcatcttacaaaatacaattgtttaacatcttcatagatatttcttaacatttacgtagaaacttgaactagaaaatatatgaatttgaataaacaacttataataaagaatttgagcatataatactatcttatatacagtagattatcatttatttcaaatatttgctaggattacttttccaaatatcatccacatatagataaaatgtacttttcaccagtaataaataaggcacayctatttgttctgtcacattaaggaattaatatgttctcattaataatgtaataacaaaattcgtgatatttgcatatggtagactgatagcaaaaatttcccatacattcctctatccatgtcttttgaaatttgactttgcagttttccctgtcaagggatatag

SEQ ID NO: 260107 - DNA, 601 bp, Homo sapiens
tggataaatctgtttgggtatttatatagtccgaaagcaggatagttctgataggtgagaggtggaaaagcctgattagtgtagatgaatccccttgagagcaatattcatgcacaataatttcttcactgcagtgatttttgtttattttattgcaaatatattttttcttactatttttattcttcaatgcaagcctctaattttgaaagaagtgcttttcttcagcaacraaggtagtagaggagtgatttccttactttttcaacaaattttataaggttacactgtcgtgaagcacaagttaataaagcctaaggacacactgttgcatttcttttaaaataatggaaaattattaaattttttaaggcatgttttgtttgaatgtcttgtgttggttagataactgtacatcactaaagtagaacagtacttttaagaagcaatttctgtttaggagtagaagttgaaagcggtatattaatctgatgagcttaagcagcaaaatagacctcatacataagaatatgagctgatttactgtaagggacatgactaatccagggtccatctgtagggcttccactggtgctgaata

SEQ ID NO: 260108 - DNA, 601 bp, Homo sapiens
tggataaatctgtttgggtatttatatagtccgaaagcaggatagttctgataggtgagaggtggaaaagcctgattagtgtagatgaatccccttgagagcaatattcatgcacaataatttcttcactgcagtgatttttgtttattttattgcaaatatattttttcttactatttttattcttcaatgcaagcctctaattttgaaagaagtgcttttcttcagcaacgaaggtagtagaggagtgatttccttactttttcaacaaattttataaggttacactgtcgtgaagcacaagttaataaagcctaaggacacactgttgcatttcttttaaaataatggaaaattattaaattttttaaggcaygttttgtttgaatgtcttgtgttggttagataactgtacatcactaaagtagaacagtacttttaagaagcaatttctgtttaggagtagaagttgaaagcggtatattaatctgatgagcttaagcagcaaaatagacctcatacataagaatatgagctgatttactgtaagggacatgactaatccagggtccatctgtagggcttccactggtgctgaata

SEQ ID NO: 260109 - DNA, 601 bp, Homo sapiens
tggataaatctgtttgggtatttatatagtccgaaagcaggatagttctgataggtgagaggtggaaaagcctgattagtgtagatgaatccccttgagagcaatattcatgcacaataatttcttcactgcagtgatttttgtttattttattgcaaatatattttttcttactatttttattcttcaatgcaagcctctaattttgaaagaagtgcttttcttcagcaacgaaggtagtagaggagtgatttccttactttttcaacaaattttataaggttacactgtcgtgaagcacaagttaataaagcctaaggacacactgttgcatttcttttaaaataatggaaaattattaaattttttaaggcatrttttgtttgaatgtcttgtgttggttagataactgtacatcactaaagtagaacagtacttttaagaagcaatttctgtttaggagtagaagttgaaagcggtatattaatctgatgagcttaagcagcaaaatagacctcatacataagaatatgagctgatttactgtaagggacatgactaatccagggtccatctgtagggcttccactggtgctgaata

SEQ ID NO: 260110 - DNA, 601 bp, Homo sapiens
tggataaatctgtttgggtatttatatagtccgaaagcaggatagttctgataggtgagaggtggaaaagcctgattagtgtagatgaatccccttgagagcaatattcatgcacaataatttcttcactgcagtgatttttgtttattttattgcaaatatattttttcttactatttttattcttcaatgcaagcctctaattttgaaagaagtgcttttcttcagcaacgaaggtagtagaggagtgatttccttactttttcaacaaattttataaggttacactgtcgtgaagcacaagttaataaagcctaaggacacactgttgcatttcttttaaaataatggaaaattattaaattttttaaggcatgttttgtttgaatgtcttgtgttggttagataactgtacatcactaaagtagaacagtacttttaagaagcaatttctgtttaggagtagaagttgaaagyggtatattaatctgatgagcttaagcagcaaaatagacctcatacataagaatatgagctgatttactgtaagggacatgactaatccagggtccatctgtagggcttccactggtgctgaata

SEQ ID NO: 260111 - DNA, 327 bp, Homo sapiens
tctctctagtgtaagtcgcatgccaacatgggaaaagtaaggacaatgctatgtggttatgaygatagaggtcacactgaggtggctgatgtagtaggcttgccttgtgatgattaaaagctctgtcttataattttaagaaaaactaatgagcagaaaatagaaacagctgagcaattaagcctgagatttctggaaatgttttagttgaggagacattgacaggtctgatctgtaccctgttaataggttaggtttagaataaagcctatgaaaaatccctgatgattttgtattgctaactgctcattctcaaactaaatgatt

SEQ ID NO: 260112 - DNA, 327 bp, Homo sapiens
tctctctagtgtaagtcgcatgccaacatgggaaaagtaaggacaatgctatgtggttatgacgatagaggtcacactgaggtggctgatgtagtaggcttgccttgtgwtgattaaaagctctgtcttataattttaagaaaaactaatgagcagaaaatagaaacagctgagcaattaagcctgagatttctggaaatgttttagttgaggagacattgacaggtctgatctgtaccctgttaataggttaggtttagaataaagcctatgaaaaatccctgatgattttgtattgctaactgctcattctcaaactaaatgatt

SEQ ID NO: 260113 - DNA, 469 bp, Homo sapiens
atattttatccccaaattccagatcctccagtcaaagtgccctaatattttattgaagtgaaagatggatcaaaacagctttacattatttttaaaygcagtttatggggtgggggtgaaggtaggggaaatataaacaaaggatgagaagattggcaaagattttaattcaaataaatgagcttttgtttttcatgtattttatacaaagtagaagatggcaataagtggtttaacatgaaattctgtttgggaaagcagaggctttcccagtactagtctggaatttccctttgattttacacttgacaatgggttatcttcctggaaagtgttgaaggtggtgagctattggtacagaattgacaaaaggttgcttggagtttaccaagatcagttgaaggtttaggcaagactgatgaaaaatcttaaaaatcaatgctgctttgcctcagtcatgttcagataa

SEQ ID NO: 260114 - DNA, 453 bp, Homo sapiens
ttcaagttaagaattagggtgtagggtgtaggttagggtggtagggggaaatagaggaatctcaaactagagggyctttaatgtgtctgggggctgagcactggtaaccttatacaggatatttctttagccttggcctagttttcccacttcagcatgatggataattcttcatattggataattcttatagagaggagctgtcttgtgcattggaggatatcaagatctctgtattttaacctattatttgccagtggcacttcattttaccccaaaggagactctcaaacatgtcttcagacattgccaaatgtcctctgcagggtgataatcttctccattgggaacctttgtgttagggcaattttaatctgcaatgaaaggttacacataccttttgtttctcagctggttttgtgattgagaaacaatacaagacaattcaagcga

SEQ ID NO: 260115 - DNA, 453 bp, Homo sapiens
ttcaagttaagaattagggtgtagggtgtaggttagggtggtagggggaaatagaggaatctcaaactagagggtctttaatgtgtctgggggctgagcactggtaaccttatacaggatatttctttagccttggcctagttttcccacttcagcatgatggataattcttcatattggataattcttatagagaggagctgtcttgtgcattggaggatatcaagatctctgtattttaacctattatttgccagtggcacttcattttaccccaaaggagactctcamacatgtcttcagacattgccaaatgtcctctgcagggtgataatcttctccattgggaacctttgtgttagggcaattttaatctgcaatgaaaggttacacataccttttgtttctcagctggttttgtgattgagaaacaatacaagacaattcaagcga

SEQ ID NO: 260116 - DNA, 453 bp, Homo sapiens
ttcaagttaagaattagggtgtagggtgtaggttagggtggtagggggaaatagaggaatctcaaactagagggtctttaatgtgtctgggggctgagcactggtaaccttatacaggatatttctttagccttggcctagttttcccacttcagcatgatggataattcttcatattggataattcttatagagaggagctgtcttgtgcattggaggatatcaagatctctgtattttaacctattatttgccagtggcacttcattttaccccaaaggagactctcaaacatgtcttcagacattgccaaatgtcctctgcagggtgataatcttctccattgggaacctttgtgttagggcaattttaatctgcaatgaaaggttacacataccttttgtttctcagctggttttrtgattgagaaacaatacaagacaattcaagcga

SEQ ID NO: 260117 - DNA, 556 bp, Homo sapiens
cctccataatgactgtggacttgactgcctaaagccacaagatgcaaagttatggtaatcttactaaattcaagatgtagatattttttattaaaccagtatcaatgtcttatttattaagattacacaagaaaagatcactctgtcttgggctaggtttatagctttgtaacccctttgccaaaatttgacaccttatagtatttggcagggataaggatgaaattacttgattaataaatgtaaacaaaagtattgccaggcatggtggctcatgcctgtaatcccagcactttgggaggccaaggcaggtggatcacctgaggtcaggagttcaagaccagccttaccaacatagtgaaaccgtatctctamtaaaaatacaaaaaaattagccaggcgtgctggtgcacgcctgtaatccccgctacttcatggactgaggcaggataatcacttgaaccagtaaggtggaagttgcagtgagtagaggtcgcaccactgcactccagcctgggcaacaagagtgaaaccccatctcaaaaatagataaaaa

SEQ ID NO: 260118 - DNA, 556 bp, Homo sapiens
cctccataatgactgtggacttgactgcctaaagccacaagatgcaaagttatggtaatcttactaaattcaagatgtagatattttttattaaaccagtatcaatgtcttatttattaagattacacaagaaaagatcactctgtcttgggctaggtttatagctttgtaacccctttgccaaaatttgacaccttatagtatttggcagggataaggatgaaattacttgattaataaatgtaaacaaaagtattgccaggcatggtggctcatgcctgtaatcccagcactttgggaggccaaggcaggtggatcacctgaggtcaggagttcaagaccagccttaccaacatagtgaaaccgtatctctaataaaaatacaaaaaaattagccaggcktgctggtgcacgcctgtaatccccgctacttcatggactgaggcaggataatcacttgaaccagtaaggtggaagttgcagtgagtagaggtcgcaccactgcactccagcctgggcaacaagagtgaaaccccatctcaaaaatagataaaaa

SEQ ID NO: 260119 - DNA, 532 bp, Homo sapiens
gtgtcatgttttttctaagataatcatttttcttttattcacgttgttttaaatagagtgctttggatacaaagactattaggaactgttcataaattgttggttttgaagtttgaattgtgctgtaagtatatatttgttacatatatataattagtaatayatatcatcaattactgtgtaaaaaattacaaacttagcagcttgaaacaacaaatgtttattttacagtatctgtgggtcaggggtagggacatggcttagctagatctttgaaagcctcttatgaggttgcagtcaagtggttggccagacccatagtcatctcaaagttacattgagagtaggtcttcttccaaacttcctcacattgacctgtccacagggaggcttcaggaaatggcaattggcttcctccacagtgaaccatccaaagggacagagagagcactcctggagagaacaagagaatgcccgagacagaagctgcagtctttttgtaacctaaccatggcaatttccaccaggtgtg

SEQ ID NO: 260120 - DNA, 554 bp, Homo sapiens
aggtttcattattatttttgtgaaccctacatatgttgcctttgcaaacatcacttcattaaaaagtataaaaatcatgttttacaatggtattggtagaaagattaatatgatccaagctacacttattactgtaacttcatcttttttctcctacttaattaattgttattattatttttggagatagggtctcactctgttgcccaggctggagtgcagtggcatgatcttggctcactgcagccttgaccttctgggttcaagccatccttccacctcagcctcctgagtagctgggtctacaggtaagggccactgggcctggctaatttttacaccttttttttgtggagataaggtcccagtctcactatgttgcctaggctggtttcaaacatgtaggttaaaatgatcatcccacctcrgtctcccaaagtgccggaatgatagacatgagccaccacatctagcattttttctactttaaaataaattaatattaaaacacttttatgggcctctgaaagtactatggtccccagaaattttag

SEQ ID NO: 260121 - DNA, 634 bp, Homo sapiens
taatattagcaatactaatactgtgacattgtcaccaataaatatggtattttataccatattatgattatttctattatgtaaaaataytgagttcactagtaccccaaaattatagtagttattctatttccccagaccttgttaattcatgtgactattaagaaactcaggtattgtgatattacaatttttagcactttgacaactattctaatacatgggattcctttgttgtattgtttatttagtcattacaaatataaaatagtattttaaaaagataaaaagataattcatagacttcaacagagtgcccagagggcccagggcaccaaaaaagaggagaagagaaaaggaaaaaaaccttgaagagagcaatgaaatgctgaaggcaaaagctgtaacttactcttgtttgtatctccagagtttagtctagtacccagaacatatttgttctcaaaaatcattgttggattacaccctagtatgaaagcatcaagaataaattagtaaactgtgacttggtggaaggattcaccaagtagataatgtttgaacgggctcttgtaaaatgagtaataagagaacatagtgaatagcatatacacactgatcagtaaagaacatg

SEQ ID NO: 260122 - DNA, 634 bp, Homo sapiens
taatattagcaatactaatactgtgacattgtcaccaataaatatggtattttataccatattatgattatttctattatgtaaaaatactgagttcactagtaccccaaaattatagtagttattctatttccccagaccttgttaattcatgtgactattaagaaactcaggtattgtgatattacaatttttagcactttgacaactattctaatacatgggattcctttgttgtattgtttatttagtcattacaaatataaaatagtattttaaaaagataaaaagataattcatagacttcaacagagtgcccagagggcccagggcaccaaaaaagaggagaagagaaaaggaaaaaaaccttgaagagagcaatgaaatgctgaaggcaaaagctgtaacttactcttgtttgtatctccagartttagtctagtacccagaacatatttgttctcaaaaatcattgttggattacaccctagtatgaaagcatcaagaataaattagtaaactgtgacttggtggaaggattcaccaagtagataatgtttgaacgggctcttgtaaaatgagtaataagagaacatagtgaatagcatatacacactgatcagtaaagaacatg

SEQ ID NO: 260123 - DNA, 613 bp, Homo sapiens
agcaagagagggtggactccaatatacaagcatttttgagtcccctgtttgtgacaggctggctaatgccccactggacaagggaggccacttagccaactcaagctcaaggagtgagaaacagagttgaccttttcataggaggctctgcaatgacacataacacaaggggatgtaaggagggatttggagtcatctttataatctcacactgatgaaatcaaactgaagaaatcaagaagtattttctgtctaccatttatgggtagatctattttaatcttgtgttatagtctagtaattggcctctaataagttttcatctagtaattaataagatgctttgtaaggaragactactgtatatcttgggagtcatatcattcaccattagttgagtactaaggaattttcctgtgttcttgcttcagtgtttgggaaatgagttccagaataaaattgtttcattttgactaaacattttttttcttcgagctctgcttgttgaaaaccttaagctattaatttattcaaaaacatttgttaagtactaccatgtactggattttgtgctatctggtaaataaaatcagcactttacaaaatctaacac

SEQ ID NO: 260124 - DNA, 613 bp, Homo sapiens
agcaagagagggtggactccaatatacaagcatttttgagtcccctgtttgtgacaggctggctaatgccccactggacaagggaggccacttagccaactcaagctcaaggagtgagaaacagagttgaccttttcataggaggctctgcaatgacacataacacaaggggatgtaaggagggatttggagtcatctttataatctcacactgatgaaatcaaactgaagaaatcaagaagtattttctgtctaccatttatgggtagatctattttaatcttgtgttatagtctagtaattggcctctaataagttttcatctagtaattaataagatgctttgtaaggaaagactactgtatatcttgggagtcatatcattcaccattagttgagtactaaggaattttcctgtgttcttgcttcagtgtttgggaaatgagttcyagaataaaattgtttcattttgactaaacattttttttcttcgagctctgcttgttgaaaaccttaagctattaatttattcaaaaacatttgttaagtactaccatgtactggattttgtgctatctggtaaataaaatcagcactttacaaaatctaacac

SEQ ID NO: 260125 - DNA, 586 bp, Homo sapiens
aaggtgaaacatttaatccagaagctggctggtaattaaagatctaagcacattcagaaaaacacagaggtgagtttttaaattttggaccttcatccaaagcaaaggcactttaggcagtacagtgyagttgttaagagttttgatcttggagcttgacagcctcagtttgaaaccagcattgtcacttaatagctacatggaaaaattgctttttctatgtctccttttttttttcctaattccaaataggagataataaaactactgaattcaaacacttcttatgagaattgaatgattaaagggtttgtaaccgtgcctggaggatagtaaacactaagtgatttctaataaatactatgccagctaatgtgtaccaagatattcattgtagcacatttgtagaattaaagaatgagaaataatataaaatactttatactttatggaggattggttaaatagatcacattatacccacaccaaaaaacattacattgctgttaaagaatgtgaggtggctctataggtaccacttgtgctatatggagaagtaaatttcttaaattaatctaacaggatg

SEQ ID NO: 260126 - DNA, 560 bp, Homo sapiens
tttaaactaaatgcttctcaatcagggagacttattctgatctggttgagctagacatgatatttccctgtctctaagccmtaaaacatttgggtttcattttccatttttttttttcacttccacactcccccatacagtattatgttatgggcaatgcttggaaaaactctggaaaatccctgaatagaggttggtaatagatcgtggccatggttctctccaaagaagccacagagcggaatgataaataaacatgtgccaattctctccttaaattcatgcttctttatttagacagaagatattccttttgctcaaagactgatggaatttctcagggcaagaactgataacttcctgggaaatttctgagactagcattaagggagactgtgaacagatttcattttagccacttttagctcagggaaacttctatgactgggtcagaaccctctacccttttgctgggataaaaactgggccaagtcctcagtctcttctataagtgcccaggcatgattattgccttatctgtccccagttattatctttga

SEQ ID NO: 260127 - DNA, 584 bp, Homo sapiens
ggaaagagagacattttagaagtcttcaggaggtaagaaatagtaggagcttcttgaattttggaaatcagaacacaaaatagaggatacccctctgcagcagaattttaattcaacatcattaatatttttcacactcaagactttttttcccaatcaagactaccttgacttttgttctaccttgtaaatgtttttagtctatggttgactccaccctaatgtagcaggacgagctgctgacaaaactcctcagacaccgagttaaagaaggaaggggtttattcggccaggagcatcggcaagactcctgtctcaagagcygagctcccccagtgagcaattcctgccccttttaagggctcacaactctaagggggtccacatgagagggtcgtgatcgattgagcaagcaggtggtacgtgacaggggctgcatgcaccagtggtcagagtgaagcagaacagactgggaagtttcacaatgtctttctatacaatgtctggaatctatagataacatcagttgctaggtcaggggtcgaattttaactaccaggcttaggtcaggcaggcccaggcct

SEQ ID NO: 260128 - DNA, 584 bp, Homo sapiens
ggaaagagagacattttagaagtcttcaggaggtaagaaatagtaggagcttcttgaattttggaaatcagaacacaaaatagaggatacccctctgcagcagaattttaattcaacatcattaatatttttcacactcaagactttttttcccaatcaagactaccttgacttttgttctaccttgtaaatgtttttagtctatggttgactccaccctaatgtagcaggacgagctgctgacaaaactcctcagacaccgagttaaagaaggaaggggtttattcggccaggagcatcggcaagactcctgtctcaagagctgagctcccccagtgagcaattcctgycccttttaagggctcacaactctaagggggtccacatgagagggtcgtgatcgattgagcaagcaggtggtacgtgacaggggctgcatgcaccagtggtcagagtgaagcagaacagactgggaagtttcacaatgtctttctatacaatgtctggaatctatagataacatcagttgctaggtcaggggtcgaattttaactaccaggcttaggtcaggcaggcccaggcct

SEQ ID NO: 260129 - DNA, 603 bp, Homo sapiens
tttgctgtgctttctttacacactttgaacatcttcttcatgtatctggagcaatttgctaatatgtcctttttttgctaccttccaaaatttctttcctaggttacttttcaaggagagcttccttgacctctccctttgccctcagttggaacaaatcagcacccatttcactgtgtcgtcagtgtcttgcttatgtggctccttgactttgatacagattccttaaggacaagaactctgcstcatttatctttgtatttctattacttggcacagtaactggcactacaggccacccaataaaaacttatcaaataaacaaatagattatgacctggcaagaacctattttgaccaacagacagggccttctaaagcctacatgttttgagttaggaaaatccttaacaaccactttccctttcccagaatttgaattaagcctctattggaggactaagggaaggactgggagttaaatattacacttcctgcttctacctttaaaggtcccacatccaaatctcacaatgcaatctctcttctctaagctatttttgaaggcattgagtactttattcttatagaggtgataggttg

SEQ ID NO: 260130 - DNA, 568 bp, Homo sapiens
aactaaatgcatgaacatatcrtaaatccattaatgaaatgggtaatttgaccatagatatcacatgatgtaaatatttaatgttctgttttggttattaaatgaaaaaagaggataaaatgttgagatgagaaaatcccacattaatcattggggaatttggtcaggaattgattctctgggacttcttcaacctggaaaatcaaggaagagacaaaatgacatctgtgtcagaaaagagttaagcttggttatatttaatggacaaaacatgtaaaaccatatttctgtcatttgaaattaaccatagtgaaataattttacacctggaggagccctttgtgaagtttttctccaacccttgtcttacgggcttaagcagcagcaaagtcttggctcagtgtcccagtggttaggttaaactcatgctccctgttcagcccaatgctttttgtatgggatttctccatttttctttgctttcaaagtattgatttttcaaataaacatttacatatatacgtaccaattacagacaacttagagcattcaaggccctaagagaatt

SEQ ID NO: 260131 - DNA, 568 bp, Homo sapiens
aactaaatgcatgaacatatcataaatccattaatgaaatgggtaatttgaccatagatatcacatgatgtaaatatttaatgttctgttttggttattaaatgaaaaaagaggataaaatgttgagatgagaaaatcccacattaatcattggggaatttggtcaggaattgattctctgggacttcttcaacctggaaaatcaaggaagagacaaaatgacatctgtgtcagaaaagagttaagcttggttatatttaatggacaaaacatgtaaaaccatatttctgtcatttgaaattaaccatagtgaaataattttacacctggaggagccctttgtgaagtttttctccaaccyttgtcttacgggcttaagcagcagcaaagtcttggctcagtgtcccagtggttaggttaaactcatgctccctgttcagcccaatgctttttgtatgggatttctccatttttctttgctttcaaagtattgatttttcaaataaacatttacatatatacgtaccaattacagacaacttagagcattcaaggccctaagagaatt

SEQ ID NO: 260132 - DNA, 532 bp, Homo sapiens
ctattaaattagaattatatgctgcccagctttgtggttatagtcacagggctgttttttgtttgcctgcttgctttatcatggttattgtttgttccttcatgttgcagttcttacgtatacattcccagaatgttctcttctaaatttggatttgggcaaaaagggaaaacagaagacaatgtatttttacaatcccacaaatcacaggggcatcatcacctgtgcttcttattgactttgggtgcctattttccctctattcattatatcagcttgaagcctgagtagcagtgaatttatccaaatttatgatcagaatgtgggaacagcaataaggattctagaggcctaaaatagataagtggagtgtgtgggttttgggggtggaggggtgaataaactgcagtcatttaaagagaggaagaaaggagatggcattgagtgctrtggggcactctatcagcaagggcagggctgaggacatagaaaagcagctaggtatttcaaaaaggaagggtttactatagga

SEQ ID NO: 260133 - DNA, 589 bp, Homo sapiens
atgttttggaaaggctaggaataaatgagaggaaaagataaagactggaggagcaaaaggaagaaggggtgatactctaagatgaagaaacaaccaacagccctaggctggagcccacagggctgcccctgctgctgcactgctggaaatgcagaaactgcagaagttgttgctgcagcctaggctacagaagtctgcagttgtcctgccccgttgctgtgatggtaacttctaacagcttccattgttgtcaatcagmaactgaaagctcttctctcatcttctgttctcctgccaatgcctcacattaactggacttaggaagccaaacaacaagaagtctgtggaatgcagcttcagtcttccatcctcagttctacagagcagggtatggaaggggaagtgagtagctatacttgctcttgccataaactggaaaatcactatcaactcgagtgcagaatcttcagcatgcgaagggttccaaggaatagctagcatcggcattacttcaaaattttattttcatgtttggctaggagcatttcaatcttgtctactgcagggcttggtaaactttttcttaaag

SEQ ID NO: 260134 - DNA, 589 bp, Homo sapiens
atgttttggaaaggctaggaataaatgagaggaaaagataaagactggaggagcaaaaggaagaaggggtgatactctaagatgaagaaacaaccaacagccctaggctggagcccacagggctgcccctgctgctgcactgctggaaatgcagaaactgcagaagttgttgctgcagcctaggctacagaagtctgcagttgtcctgccccgttgctgtgatggtaacttctaacagcttccattgttgtcaatcagaaactgaaagctcttctctcatcttctgttctcctgccaatgcctcacattarctggacttaggaagccaaacaacaagaagtctgtggaatgcagcttcagtcttccatcctcagttctacagagcagggtatggaaggggaagtgagtagctatacttgctcttgccataaactggaaaatcactatcaactcgagtgcagaatcttcagcatgcgaagggttccaaggaatagctagcatcggcattacttcaaaattttattttcatgtttggctaggagcatttcaatcttgtctactgcagggcttggtaaactttttcttaaag

SEQ ID NO: 260135 - DNA, 589 bp, Homo sapiens
atgttttggaaaggctaggaataaatgagaggaaaagataaagactggaggagcaaaaggaagaaggggtgatactctaagatgaagaaacaaccaacagccctaggctggagcccacagggctgcccctgctgctgcactgctggaaatgcagaaactgcagaagttgttgctgcagcctaggctacagaagtctgcagttgtcctgccccgttgctgtgatggtaacttctaacagcttccattgttgtcaatcagaaactgaaagctcttctctcatcttctgttctcctgccaatgcctcacattaactggacttaggaagccaaacaacaagaagtctgtggaatgcagcttcagtcttccatccycagttctacagagcagggtatggaaggggaagtgagtagctatacttgctcttgccataaactggaaaatcactatcaactcgagtgcagaatcttcagcatgcgaagggttccaaggaatagctagcatcggcattacttcaaaattttattttcatgtttggctaggagcatttcaatcttgtctactgcagggcttggtaaactttttcttaaag

SEQ ID NO: 260136 - DNA, 573 bp, Homo sapiens
tgtgtgtaaaaagcccaaaagtttaagcttatggaaatctatctgaaactacaaaaacagtttaggttacactgagaaccctcctgatgagaattaattactataacataatctggaatatccaaactgatacattaaatgactaaattaatgttattgtggatattttcttaaatttgttctatataataaattctgttatttagtattaggtcaagtaaaagctgacctaatacttaactcttcactccaaatgaagtgtccacaatggaattcttyaagtctttctgcacctgacaaattcagggtgtatacgtagaatagcttttgtttaaggaatttcaagtaaatgttgggtatgttacatcatgttttaatcttttgcatctgaagcatgtaagcacatctcattattattcaaattctgagtactgctagtgacaggtatttattatataaacttaatgccttggaagaaagaataaggcttcataatcttcaatattaaacatctttatcaaaaaattatgctagataatgcctaatgcatacatttacattttcatacatgca

SEQ ID NO: 260137 - DNA, 612 bp, Homo sapiens
tttcatttggagttttcttatttactcaaggtcttggcaggctatttttctttggtggccaaagagtattccatatccttctttatagccttcctactgaaacaaacaaacaaacaaactcacctgacttaaaatgcaagggattttttttttttgcaggaatattctagttaaaaagatggcacataaatgttaataaatgcacataaatgtatatgtgagactatacatccaaaaaattcatactgcaaacatattttagttttaaaaaaggctctattattggttrcagaaccatgaacttgtacctcaacccttggcatctgttttagatatatatattctatgacaaaagaaatatcaagggcaagcattattatatattcaaataagacttagtaacaagctgctaaaattctggggaaaaaatataccaacaaccttggtgagaggctaacccaactttattttatctagttgcaaaagttcaaaatagaaaaaaagtactaactacactattaaagagaaattaatttatttccttaatacatgatgaaacattataaatacaaactggaaaactgaaaatcagtactggtattcttggaaaca

SEQ ID NO: 260138 - DNA, 573 bp, Homo sapiens
agccagtcaaaattgaggctccaaaatacatcgcaatatgcgatggccctaaggtcacagcaaagaagaaactgaagtccaagaaaaacagagcagccactcactgaggacgtggctctgaaaaggaaaaaaagaagaggaaagagagtggggtagcaggaaactcgtggaaagagaaaacagacagacacagaggttatgttggaaaagaaaggcaacatggacaaggggcacacagaccaggtgaggtggaaggccttgcaacagactgatctttagctgggcaaaagagaagcttctgaaaccaggaagtggacagtaacccagtttggccagtaggatactggttttaagaacaaggaacagaaatggaaatttctcaaacatgggtggattcaaaaatctgaccccttcattcagctgcccccctagcatgactgcaaggcccaacatgaccctcagcaagaaggcagcaaatagcytgcagcagaacctgcagcaggactacaactaggccatgagctggaagttcaacctaggagcaggctttggcttctccaatgcctcaaacaa

SEQ ID NO: 260139 - DNA, 622 bp, Homo sapiens
ggtaaaatatcaattctaagtagactaaaattttaagtatgtataattcttagagctaccactaaaaacattagtcaacgtcttgtgtcgttccaccttcatttcaagaagggtgagtaaagtacagtaagatattttsagagagcccacattcacataacttttattacagtatattgttataattgttctattatttgttattgttaatcttttctgcacctaatttataagttaaactttatcatgagtatgtacatataggaaaaaacatgatagacatagagtttggtactatctgtagtttcaggcatctacttgaaatatatcccacatggaaaaggggtaactactatacccagttcccttcaaatcagtccaagttggccagttaaaatggaatactaaaaaaatgttcaaataacccaaagaaggaagttacagaggaacaaaaacagagggaacaaacagaaaatagacttgaacccaaacatatccatatttaaaatatgtgagatgtagcaaaagcactatagtattaaatttcttctatcagaaaaggtctcaaatcagtaatttaaacttgcaccttaaactaaaaaaggagcaaagtatatacaaa

SEQ ID NO: 260140 - DNA, 582 bp, Homo sapiens
tcataaacaatgtcaaatgccaaataacaacctggaaaactatttgcaatatttatgctatgtactaatattccctgtatatgaagagcttaaaagaatctacaaaagaataagaaaaagaytaatattccaacatggaaaaatagttaaaataacagacaattcagaaaagaagaaatcttagtctctaatttaaaaatatgcaataggctgggcacagtggcacatgcctgtaatcccagcattttgggaggctgaggcgggcagatcacctgaggtcaggagtttgaaaccagcctggtcaacatggtgaaaccccgtctatactaaaaataaaaaaaaattagccaagcatggtggtggacacctgtaatcccagctactcgggaggctgaggcaggagaattgcttgagcccagaaagcagaggttgcagtgagctgagatcaggccactgcactccagcttgggtgacagagtgaggctctgtcccaaaacaacaacaataaatgcaacaaatgtgagtttgtataagtgtgatatcttttgttacctgtcagattggcaatgacaaagcaacatg

SEQ ID NO: 260141 - DNA, 517 bp, Homo sapiens
tttaccttctttcctattatctctttccaatgctgaggtctaatggtgattgagtgcgattataaacacactatctagctgccattcttttgaggtagcagatactaaaatagcatgatataatataatgggacatggagataatagctacacatttcctacttttcagcagtggcagaaaartaattgaggcaatatttgtgaatactaggaagaaatgtgctatattggaatctgaatgtcattattctcccatacgctgtatgaggaagaaaaatgtaaacatcattattgttcttctcactcctttcatttgagactgagtgagctttcagagccctttattctgaacaatctaattgggcatttctcaaatacctatggatggtagcttctataatcccattgctttcatgtgtgaaatgtgtacagtatttgtaaatttaacaagatagggaaaaaatcagtttcaaccccgggggaaaataactatcaaaggcaagcaagatgcattcct

SEQ ID NO: 260142 - DNA, 517 bp, Homo sapiens
tttaccttctttcctattatctctttccaatgctgaggtctaatggtgattgagtgcgattataaacacactatctagctgccattcttttgaggtagcagatactaaaatagcatgatataatataatgggacatggagataatagctacacatttcctacttttcagcagtggcagaaaagtaattgaggcratatttgtgaatactaggaagaaatgtgctatattggaatctgaatgtcattattctcccatacgctgtatgaggaagaaaaatgtaaacatcattattgttcttctcactcctttcatttgagactgagtgagctttcagagccctttattctgaacaatctaattgggcatttctcaaatacctatggatggtagcttctataatcccattgctttcatgtgtgaaatgtgtacagtatttgtaaatttaacaagatagggaaaaaatcagtttcaaccccgggggaaaataactatcaaaggcaagcaagatgcattcct

SEQ ID NO: 260143 - DNA, 517 bp, Homo sapiens
tttaccttctttcctattatctctttccaatgctgaggtctaatggtgattgagtgcgattataaacacactatctagctgccattcttttgaggtagcagatactaaaatagcatgatataatataatgggacatggagataatagctacacatttcctacttttcagcagtggcagaaaagtaattgaggcaatatttgtgaatactaggaagaaatgtgctataytggaatctgaatgtcattattctcccatacgctgtatgaggaagaaaaatgtaaacatcattattgttcttctcactcctttcatttgagactgagtgagctttcagagccctttattctgaacaatctaattgggcatttctcaaatacctatggatggtagcttctataatcccattgctttcatgtgtgaaatgtgtacagtatttgtaaatttaacaagatagggaaaaaatcagtttcaaccccgggggaaaataactatcaaaggcaagcaagatgcattcct

SEQ ID NO: 260144 - DNA, 517 bp, Homo sapiens
tttaccttctttcctattatctctttccaatgctgaggtctaatggtgattgagtgcgattataaacacactatctagctgccattcttttgaggtagcagatactaaaatagcatgatataatataatgggacatggagataatagctacacatttcctacttttcagcagtggcagaaaagtaattgaggcaatatttgtgaatactaggaagaaatgtgctatattgraatctgaatgtcattattctcccatacgctgtatgaggaagaaaaatgtaaacatcattattgttcttctcactcctttcatttgagactgagtgagctttcagagccctttattctgaacaatctaattgggcatttctcaaatacctatggatggtagcttctataatcccattgctttcatgtgtgaaatgtgtacagtatttgtaaatttaacaagatagggaaaaaatcagtttcaaccccgggggaaaataactatcaaaggcaagcaagatgcattcct

SEQ ID NO: 260145 - DNA, 610 bp, Homo sapiens
ttatctaatgtgtaggcttaggttactgattttaggtctttcttcttttctaatatgtaaattcagtattacaaatttccctctagacattgttcttgctgcattctgcacattttgataaattgtatttttattttcatttattttttaattttcttgaaacttcttctttgacccatgtgttatttaaaagtgtgttgtttaatctccaaatatttgasatccatctcgatatttttattgatttctattttaattcaattgtggtctaagagcatactttgtatgatttctattctttaaattattacagatgtttttatggcccagaatgtggtctatcttggtgaatgttccctgtgagtttgataagaatgtttattctgctgtggttggggaagtgttctaaaaatgtcaattaaatccagttgactgacagtgctgttcagttcaactatattcttacactgattttctgcttgctggatctgtgcattacagataaaatctccaactataattgtggattcatctactttgccttatacttctgtaagttttgcataatgtattctggttctctgaatacacattaattattatgtctttt

SEQ ID NO: 260146 - DNA, 555 bp, Homo sapiens
tgtgtttccaaggtctttttactgaggttctgttggtagytctcttttcatctgctgacttttctgttatatcaagtagttcctgcccatcctttcatccttttcatggaaagcgtaggtgagtcagtatcaacagctgccacttatcatttcaggctttgaataagtctcgtgctgtcattcagtttttgttcagggatagtgataacttcgggatggccatgttagaagtaatgagtagggggatgtgactggaaatcctaaagacaaactgcttgatcagttggatgaggggatcctgtgttgtacacataagaatctgttcctgcccttccagaatggtttgagaataaaaggggatttcaaaaagtttgtggaagaatataattacaatatgaaagtagacattatgtaaactttatttcttaacgtaagctccatcacattcaagaagtttagcaagtaatgatacaagtaatttagcctatctataaaaattgacgatcctgaaattagtttcagaatgcagtcttttcacatcattaactgaagaaa

SEQ ID NO: 260147 - DNA, 503 bp, Homo sapiens
caagcaagttcatagattcactcttttgatgcccttgcacacaatgtgctccaaattgtggcttagaagatgaagagaaaagaycatccttaggttgctgtgactcattgctgttgaatttgttcagggatatatttacacagatggtaactggaacatattctataatactgagaagctaaaaccaccctcagtgtccagtgacagggattggttaacgaaatcatggcacagctacacaatagagtagtataaaaatgtaaaagcaaacagaaaaccactgaagatatgtagtgaccttcataaactgatgtggaaattttaaaaaaatgtattttttaaatgactaacatatatacctgcatataagttatggcattagtggtagggtaaaagaatgctatatgtctatgcacacataaatatttcaaagaaaagatcccataaggttaacagtgggagctttttgaaggaaggaaggtgggtaggatgtgttatgcctt

SEQ ID NO: 260148 - DNA, 602 bp, Homo sapiens
ttacttacatctaaagaccaagttgagtttctttcatamattgtgtagatgttaatccacaagtcactaagtccacctgttaatgcaaggttgaaaaacagtaagagcaaggaccccagtgggagttcaagtagcgttctgctaattctccatctcagccagatgaagcatgggtgggaaaaataggctattttaaagaagtagaaaacactaaggcagcaagccaggtaactaagtgattggtcagtgcccaaaaaatatgaataaattttattagtttattgaaggcatatagatgtggccataatgctgttacaaatgaatcaagtagtattatccaaagttgactgattgtggagatagccaggctggtgaggatgcagttgtctaataagatcatttgactcctcaccagtcaatgcagttaactagtacaatgaacccattccctaacattcagattatgaattctcccatcattactatcagaaaggtatttccaattccaggtggcatttctggagaaacaaatccagaaagctaatactatgtttcactgatacttttgctgtcaaaacgttgcagaataatatccaacttga

SEQ ID NO: 260149 - DNA, 600 bp, Homo sapiens
tccccttaccctattccagagtatctgaatacaaatttttagaaatgggttctaggacaatacaatgtcaatgggttttagttgattcattggcacaataaagttggagaactgtagcaattagagtcctgatgaataataaagtggaatcatacctgtcattgaatcctagattactggggaggctgttgtccctgggcaggtctgggtggcctgcccccttgaggaggtggaggtggcccctggggctttccagcaggaggtgcctgaggctgctggggattgcctcctgstgggggtgggccttgtggctttccaggaggtgggggaccttgaggcttgttgccttcttgttggggtggtccttgtggctttcctggaggagatcgggcacttcgggacttgtttccttcctgtgggggtggtccttctggctttcctggatgaggtgggggaccttgggactggttacctccttgtgggggtggtctttctggctttcctggaggaggtgggggacggtgggactggttgcctccttgtgggggtggtctttctggctttcctggaggaggtggggtaccttgggactggtttcct

SEQ ID NO: 260150 - DNA, 600 bp, Homo sapiens
tccccttaccctattccagagtatctgaatacaaatttttagaaatgggttctaggacaatacaatgtcaatgggttttagttgattcattggcacaataaagttggagaactgtagcaattagagtcctgatgaataataaagtggaatcatacctgtcattgaatcctagattactggggaggctgttgtccctgggcaggtctgggtggcctgcccccttgaggaggtggaggtggcccctggggctttccagcaggaggtgcctgaggctgctggggattgcctcctgctgggggtgggccttgtggctttccaggaggtgggggaccttgaggcttgttgccttcttgttggggtggtccttgtggctttcctggaggagatcgggcacttcgggacttgtttccttcctgtgggggtggtccttctggctttcctggatgaggtgggggaccttgggactggttrcctccttgtgggggtggtctttctggctttcctggaggaggtgggggacggtgggactggttgcctccttgtgggggtggtctttctggctttcctggaggaggtggggtaccttgggactggtttcct

SEQ ID NO: 260151 - DNA, 542 bp, Homo sapiens
tttggtggcctgctcatggtccccagaatcaagtttgcatgaagattgcctatatcattaggggcaataacattaatcaattcctgaaaggaaagtgttgataagaagacactggagaaatgatccatttgtaagcagaaaaagggagtcaraacagattgagaatgaattgggatttacctgatattaggaagagagattcttcctggctgacatctagaagagaagcacaggatgatgggaaatgttacatctcaaatcttcaagactcacaagtgttctacagggaaaattgtcttctcaccacaccccatgcatcccctaggttaactcatcagccaccatctgtgaaggtgctggaaggggtggaaggtgtaagaggaggcagggttgttaccacacagagcaacagcaatgagttcaacatagaacagcccctttttttcctccctagcatccctcaagacttaatgcttatttagtttatgcatgccaggtacttcaatgtgatattttggtgttcttatgccctccatctcctg

SEQ ID NO: 260152 - DNA, 655 bp, Homo sapiens
caatcctgcttaggtggcttaagttagaccatcaggtaacaaaggaatgtcagagaaaaggagcagcagaggccaggctgacattgcctgatattgtcaccaactgaggttgctgcagcctgatgcaagacsgacttccccttggcaggaaggtacaggaagagaatgaaaacccccctaaagatcactcatttcaggccctttcctgaccttctccaatgtcagcaatgagtaaagtttatcaggaaagcataaatatcagctatgcactcaccagacaaaacaaaaaagaggtgatggaaatgcggaaagggacactctctgtgggtgagggtgggtggaagagagaagcaggactgcagcaggaacttgggcacctagacgtgagtggaagccctgagcactccacttgccttctaatatccatgttcatattctcaggtcctgaaggaacagccttcaacatatgaaattttaggaaacacaattcagctctcataacagctcccaaccttttctaagtcaagtgttcagtggttcaaaactcctcactcccttcaggcactgccctttagcaaatccagtttcctccactttcaacactcatcccaaatacaaccacttgcataatatttactagaaggtgatagttcag

SEQ ID NO: 260153 - DNA, 453 bp, Homo sapiens
tttcttgattgaaacatgcccatgtgcatttttgttcagcaattaaaggcttatttaactagtcatcccaacaagattgacatatggcttttgtcagattgggatgatttacaaagcttctgaagcttgaactttggggtccttcatgtgcacagaccctttacacgaccctgtttagagtgaacagaataaaaagagatgtaaactagcagtggtcttctttgtaccaactcctttactcaagcttttatgtatttttatgtcttgcacttacccatggggattataagatttcaagaccacctyctccctaaaacaaactccaattgtttgagggatatctgaatttttttctgaaaagaagacttgggaaatgctatagaagcaaatttctaaataatctgattcttatgtctacaaataatggctatcttccagcactgctataaatgt

SEQ ID NO: 260154 - DNA, 581 bp, Homo sapiens
cttcttactcctttcttttcattttttttttaaatttggatcaacatactgtgtttccaaggtcttcttactgagtttgttttagtagctctcttttcatctgctgacttttctgttatatcaagtagttcctgcccattctttcacccttttcatggaaggtataggtgagtcagtatcaacagctgccacttatcatttcaggccttgaataagtctcatactgtcattcagtttttgttcaaggatagtgataatttcagatgaccttgttagaggtattgtgtgtggggatgtgactggacatcctaaagacaggccacttgatcagttggatgagaggatcctgtgttgtacacataagaatctgttcctgctcttccagaagggtttgagaatacaaggggatttcaaaaaatttgtggaagaatgtaattacaatatgaaagtagacaatataaackttatttcttaacataagctccatcacattcaagaagtgttgcaagtaatgacacaagaaatttagcctatctacaaagaatagagggacctgggaatttcaccatattaatgcagtc

SEQ ID NO: 260155 - DNA, 628 bp, Homo sapiens
taaatggtcctgcctagtgacttacagtagaccttcaagtaggaaaggatgatcagagggaaggagcagacgggagtgctttgcagccttcsctcattgcataggttgctgtagaagtggtagtcctggtgaaagaaagactctgccttggcttggtgagtacaggaagacaggaggcattgccttcaaatatcactcagctcaggccctttctctgacattttcctaggtcagcaatgagtgaaagagattagtgtattagggaagaataaatatcagctatgaactcttcacatacaaataaacggaggtgacagaagagccgaaagagactctatcagtgagtgagggtgggtcaaagaaaggagcaggtctgcagcaagagctcaggcatgtttcagtcagctgaagctctcaacaatccacttgccttctagtatggatgcaaacatatattgtctcaaacaagagtcttgatttctgcgtcttaaaactgctctcccctgacataatttgttatgtctctcctgaaaaaataccacacattgtgtaatttaacaacagaaattgattttctcacagttctggggactcacagcccatgatcaaggtgttaacaggttcagtt

SEQ ID NO: 260156 - DNA, 628 bp, Homo sapiens
taaatggtcctgcctagtgacttacagtagaccttcaagtaggaaaggatgatcagagggaaggagcagacgggagtgctttgcagccttccctcattgcataggttgctgtagaagtggtagtcctggtgaaagaaagactctgccttggcttggtgagtacaggaagacaggaggcattgccttcaaatatcactcagctcaggccctttctctgacattttcctaggtcagcaatgagtgaaagagattagtgtattagggaagaataaatatcagctatgaactcttcacatacaaataaacggaggtgacagaagagccraaagagactctatcagtgagtgagggtgggtcaaagaaaggagcaggtctgcagcaagagctcaggcatgtttcagtcagctgaagctctcaacaatccacttgccttctagtatggatgcaaacatatattgtctcaaacaagagtcttgatttctgcgtcttaaaactgctctcccctgacataatttgttatgtctctcctgaaaaaataccacacattgtgtaatttaacaacagaaattgattttctcacagttctggggactcacagcccatgatcaaggtgttaacaggttcagtt

SEQ ID NO: 260157 - DNA, 628 bp, Homo sapiens
taaatggtcctgcctagtgacttacagtagaccttcaagtaggaaaggatgatcagagggaaggagcagacgggagtgctttgcagccttccctcattgcataggttgctgtagaagtggtagtcctggtgaaagaaagactctgccttggcttggtgagtacaggaagacaggaggcattgccttcaaatatcactcagctcaggccctttctctgacattttcctaggtcagcaatgagtgaaagagattagtgtattagggaagaataaatatcagctatgaactcttcacatacaaataaacggaggtgacagaagagccgaaagagactctatcagtgagtgarggtgggtcaaagaaaggagcaggtctgcagcaagagctcaggcatgtttcagtcagctgaagctctcaacaatccacttgccttctagtatggatgcaaacatatattgtctcaaacaagagtcttgatttctgcgtcttaaaactgctctcccctgacataatttgttatgtctctcctgaaaaaataccacacattgtgtaatttaacaacagaaattgattttctcacagttctggggactcacagcccatgatcaaggtgttaacaggttcagtt

SEQ ID NO: 260158 - DNA, 551 bp, Homo sapiens
ttgctgagctgaccaagactttatactgccttttcttgtcactccagtggttaaaaaaaaaaaagttcttacccgtatttctaatctactagtagttatcaytgaagtgtttataaagcgaattaaattcataattttcagtaaacatagcaaatttaacaagattgattataatactcctgctccaagaggacctcatttattataaaattattttctcccagagctcttcctagctcttagattttgttgaaaacatctagaatttacttccaaactactgctgatggttctttacattattagtcatataattcatttacttatatttttaaataaaattcaaaaccacataaacaaaaattgtttaaacaagtaaaagttttgctggtttgagtgctcactcaccactgctgcttatttgccatgctgtgccttttattggttgttttatcttgacttggctcaatttttttcaggaaagatgcaagtgtcgcagtatttctgagccatggcattgtccataaatgacttgattttaccctcacact

SEQ ID NO: 260159 - DNA, 536 bp, Homo sapiens
aaaagcaagtttctcttagaatattttcaaggttaaattttcctgagacgttaagagctgaggtgactgaaaatatattttcctgagtaaacatgtttgtttgaaatcataatcccatttaaacatattctagtattctgctttaccccttgtatttatataaagacactcagaggaattaattcctttttttttctaattacaaaaccctgtcaatgtagatcctctatgtacttccttaatccatgctacatgcatttttcttgggtggcatattagcattgacaaaatttgtgtatgcccttttaaattgactaaatttgatccttctaatcacaatggatctaaaattctagaaatccaagagggagtctgatcagagagttgtctaagaaaggataaactatataccacttacataactttcagtcttmtgcatgaagatgtcacctgtgtcctggccccagagccggtgtaccatcctcagtgattggggccatagaaggcattggtcatcagcctaaggtcaagtgtct

SEQ ID NO: 260160 - DNA, 303 bp, Homo sapiens
tgttagttctgaaatttctattttattattttctatagttcctttttctgctgagaagctttttcccatttattttgagagtgttcacatttacctcagaaaagttggctataagagctgctttaaagtctgatcatttccatmtccaagttgtttcaaggttgtcgtatcttgattatacccttcattaacagttggtcaattgtttacggtttgtaaaagtatattgagtaattttcaattttatgcctcacatgggcatttttctgtgtttacaatacacaaaaagttcaacaaggcaag

SEQ ID NO: 260161 - DNA, 422 bp, Homo sapiens
atcgactcttctaagtaagcatctataattcttcttactcctttcattttatgtttgtttttaaaatttggatcaatatactgtatttccaaagtatttttactgagtttgtgttggtagctctcttttcatccactgacttctctgttatatcaagtagtttctgcccatcatttcatctttttatggaaaatgcaggttagtcagtattaacagctgccacttatcatttcaggcctcgaataacttttgtgacatcattcagttttggctcagggatagtgataacttcaggatacctcgttaraggcattgtgtgtgggtctgccactggaaatcctaaacacaggccacttgatcattttgatgagaggatcctgtgttgtacacattagaatctgatcctgctcttccagatgggt

SEQ ID NO: 260162 - DNA, 448 bp, Homo sapiens
ttaacattatttttaatcagctactgacttacaaattaaatagtaaatgtagtaaatgtgcccactcatcattggcactgagagcaatttcccacttgtgaggacatctagaagggcgaagtcaggtatgcaaatatcaaacagatttctttacactgatttgtaattttctcctcaactgaaagtcaataccatttggatttgaatatcttaattttamaagaattatctaaaaataacctctacaatatatgtattactcattagtttcattaaataaactccataatatttccaattctactttagatgaattaagtgtaataaaaagaagcatcaaaaagctcacagagtagtgaaaagaagcaacattaaatgtgcttttactactgaatgtaaccacagtttgatcaaaatgcaattacaacacagaggagggtgttataaa

SEQ ID NO: 260163 - DNA, 608 bp, Homo sapiens
aaaattaccaacaacaaaaaaagtccaggaccagacagattcacagcagaattctaccagacattcaaagaagaattggtaccaattctattgatattattctacaagataaagaaagaggtaattttccctaaattattctctgaagccagtatcatcctaatactaggaaaggacataaccaaaaatgaaaacatagrtgctaaaatccttaacaaaatactagctaactaaatccaacaacatatcaaaaagataacccaccatgatcaagtggtttcataccagggatgcagggatggtttaacttacacaagtcaatatgtaatacaccacacaaacagaattaaaaacaaaatcgaaagatcatcttgatagatacagaaaaggcatttgacaaaatcattttatgaataaaactcagaaaaatcagcatacaaggatcgtacctcaatgtagtaaaagccatctatgacaaacccacaaccaagttaatactgaatgaggaaaaattgaaagcattctctctgagaactggaacaagacaaggatacccactttcaccacttttattcaatatagtactggaagttttagccagagcaatt

SEQ ID NO: 260164 - DNA, 499 bp, Homo sapiens
tatcagtatttaatagcacatttttgtttctgtaatctagcacaatataaagaacatatcaaaagtaaattctaaaaggaattctttgttattaaaaagtttcactatacagcttctgtacagtgttttaatctatgccatcatattcaaaatttttagtaaattttcccacccttagccttatttacaatctgtagtttgttaccttatctaatcttagattatcacagtcaaagcagcactatgtatacatatgcttgtctaaaatttacaataagcctgcaacattctataaacaacatcactttgctttctgtgccttgctggttaacattgtttctattttttcctctaagaaatacagtgatcagattgcaacaaartgcatgtcacataaacaaacacaaacacaaacatcctcagaatgtaattatgatctttttgtagtagcaatatgagtataattgtgaattaagacataaacttctataattttagt

SEQ ID NO: 260165 - DNA, 570 bp, Homo sapiens
cttggtccagtcatactcagaagttcctaagggtggcaggtgaatgggacatgtcctcatgagctagcaccattttctctcttctgcccaaatgtggactcagctaactcaacataatgcctgggaaacaaagatacaaaatgcgagcagaattttagagtttaacttattaaatctctcctggaatgtttcccaaggaaaaccaaagaccaggaataaagaaaaaatacaaaaatctatggccgtacctagtgtgctagtcatgagctcttcagaataaacagcagtaayatgtactagaaatcagtgaataaatgccttcctttaagggtaagcctcaagggaaattacactttctcttaaaaatcaaagaacctccctgtgttggtaattgtcacagtcagcatcatctctggatggtgtgaaaatgggtgtggccgggacacaagcagaaatgcccaaatggatttgggccatgaagctgccccttgctcttgtagtcaaatgtgagattttctctgactcccccactgattgtaaacgaaggaagacacagctaacattgactga

SEQ ID NO: 260166 - DNA, 555 bp, Homo sapiens
ctaccttgcatagtgatgtttcagatgccttagctcttctagtacttacaatagcactttgaggattttttgcatttatgttcacttttcaaaggtagaaataaaatcttaatatgattgaatgactttcccttggacatacacttcataggtaacagcataatgcaatgcaaggagagcgacagagtgagagagagagagagagagagagagagagaaatgagaaaatgaccttattcatgaaaacaatataaaatacctaggaacaaagagcaagaaatgcacagaattcagctgaagaagaatgatcaaactttaatgcagaatatgcactaaaatgtatatacatgtaaattkgtagggacatggatgaagctggaaaccatcattctcagcaaactatcgcaaggacaaaaaaccaaacaccacacgttctcactcgtaggtgggaattgaacaatgagaacacttggacacaggaaggggaacatcacacaccggggcctgttgtgtggtggagggaggggggagggatagtattaggagaaataccta

SEQ ID NO: 260167 - DNA, 555 bp, Homo sapiens
ctaccttgcatagtgatgtttcagatgccttagctcttctagtacttacaatagcactttgaggattttttgcatttatgttcacttttcaaaggtagaaataaaatcttaatatgattgaatgactttcccttggacatacacttcataggtaacagcataatgcaatgcaaggagagcgacagagtgagagagagagagagagagagagagagagaaatgagaaaatgaccttattcatgaaaacaatataaaatacctaggaacaaagagcaagaaatgcacagaattcagctgaagaagaatgatcaaactttaatgcagaatatgcactaaaatgtatatacatgtaaatttgtagggacatggatgaagctggaaaccatcattctcagcaaactatcgcaaggacaaaaaaccaaacaccacaygttctcactcgtaggtgggaattgaacaatgagaacacttggacacaggaaggggaacatcacacaccggggcctgttgtgtggtggagggaggggggagggatagtattaggagaaataccta

SEQ ID NO: 260168 - DNA, 555 bp, Homo sapiens
ctaccttgcatagtgatgtttcagatgccttagctcttctagtacttacaatagcactttgaggattttttgcatttatgttcacttttcaaaggtagaaataaaatcttaatatgattgaatgactttcccttggacatacacttcataggtaacagcataatgcaatgcaaggagagcgacagagtgagagagagagagagagagagagagagagaaatgagaaaatgaccttattcatgaaaacaatataaaatacctaggaacaaagagcaagaaatgcacagaattcagctgaagaagaatgatcaaactttaatgcagaatatgcactaaaatgtatatacatgtaaatttgtagggacatggatgaagctggaaaccatcattctcagcaaactatcgcaaggacaaaaaaccaaacaccacacgttctcactcgtaggtgggaattgaacaatgagaacacttggacacaggaaggggaacatcacacacyggggcctgttgtgtggtggagggaggggggagggatagtattaggagaaataccta

SEQ ID NO: 260169 - DNA, 582 bp, Homo sapiens
ggaggggggagggatagtattaggagaaatacctaatgtaaatgatgagttaatgggtgcagcacaccaacatggcacatgtatacatatataacaaacctgcacgttctgcacatctatcctagaaattaaagtataataaaacatatatatatttaaaataaaaataaaaagtaaaatcttaatgtgatcragtgattttccctaagacatacacttcacagggaacagcataagacaatgcaaggaaagagacagagagacacagagagagagagagagagaaatgagagaatgaccttattcatgagaacaatataaaatacctaagatcaaatagcaagaaatgcacaggattcagttgaagaagaatgatcaaactttgatgcagaatatgcactgaaatgtatatacatgtaaatttttgcacaggaaattgcaatattcaaataggactaattttccaggtgttctggtgaaaattgcaccacagtcccctcttcatgtctgatttcagctttgctcattcacaaactcttatttttctatttgtcattccatttccacagttttgttgtttat

SEQ ID NO: 260170 - DNA, 582 bp, Homo sapiens
ggaggggggagggatagtattaggagaaatacctaatgtaaatgatgagttaatgggtgcagcacaccaacatggcacatgtatacatatataacaaacctgcacgttctgcacatctatcctagaaattaaagtataataaaacatatatatatttaaaataaaaataaaaagtaaaatcttaatgtgatcgagtgattttccctaagacatacacttcacagggaacagcataagacaatgcaaggaaagagacagagagacacagagagagagagagagagaaatgagagaatgaccttattcatgagaacaatataaaatacctaagatcaaatagcaagaaatgcacaggattcagttgaagaagaatgatcaaactttgatgcagaatatgcactgaaatgtatatacatgtaaatttttgcacrggaaattgcaatattcaaataggactaattttccaggtgttctggtgaaaattgcaccacagtcccctcttcatgtctgatttcagctttgctcattcacaaactcttatttttctatttgtcattccatttccacagttttgttgtttat

SEQ ID NO: 260171 - DNA, 559 bp, Homo sapiens
aaggacagttttattggacataaacatctggtttgcaattttttttccttcagcactttaaatatttgagttacattcttcttcatttcctggtttctgatattaactctatggttatccacattgtgtttttcctataattatgatgccatttcttgcttgctttttaaaaaatattttatttgttttatttttcagaaatttgactatggtgttgctgggcatgtgtttccttgwgtatattatgattggaattttcccaccttcttgcatttgtaagtctatgtcctttgcaagtgtgagcattttttggccattatttctctaagtccttttttaatatcatcctcattgttctgttttctgaaattcagattgcatgattgtcgcatcatttgttgtggcctttcatatttgtgaaactatgttaaattttttcaattgttttaccctgtgttgttcagagtatagaatttctattattgcaacccctaaacactgactgagtctttcctcaatcatttgctttctgataattttcacagccaatatggttttt

SEQ ID NO: 260172 - DNA, 249 bp, Homo sapiens
tgctgggcttaacacctaagtgatgggttgataggwgcagcaaaccaccatggcgaacgtttgcctatgtaacaaacccacacatcctgaacatgtaccccggaacttaaaaaataaaattagataaataaataaataaaacgtactatggtttaagaagatccttttcaaacagctggggacactggtcactcaagtgactttcccggtgtctcacacaaatcctcagtggtggttatgtgggtgttg

SEQ ID NO: 260173 - DNA, 333 bp, Homo sapiens
gctcattgcagcctcgacctcctgggctcaggtgtttctcccacctcagcctcccgagcagctgaaattacaggtgcacgccaccatgcctggctaatgttttagcagaaatggggttttgctgtgttacccaggttggtatcacactcctggactcaagcattcygcccaccttggcctcctcgagtgctgggattacaggcatgagccactgcacctggcccttcgtttttttttaaatatagaaaacattaaataaggcaaaacctattttgttgcaacttgcttttttttcttcttccatataacaatatatcagggacctcttaccat

SEQ ID NO: 260174 - DNA, 572 bp, Homo sapiens
tacttctaataccagttatcaggagcttataagtatggctgatgctgtgttaagtgtgccacttgcatcagcttgtgtagtgggtgacataataatctcaacgatccataggggttatgcatcattaataagtccactttcctgaggttcagagaggttgagcttctcacctaaagtcacagagctgtcccatcttaaagatattgtttacaaacaccaagctacatccactttcccctccacattgatcctgtctttgtagcaaatttgactttgagtctgtcaggttcactactcgtctgtaagctttttgggagcacaggtcatgtcttacttatctatgaatttccatgaagcacctaacactttagtggatgttcagttggtatctgcgtgataattccatgagggtgcattgagagtatacagggttctccagagaaacagaactcatatgatatagatagatayataacaggggatttgccatgtgattatgaaggccgagaaatcacacaatatgctgtctgcaagctggagaaccaggaaagctggtggtgaaattcagtcca

SEQ ID NO: 260175 - DNA, 552 bp, Homo sapiens
ttcctctacctgctctactcaaacacagtgcaacactgccatgttcatatgtactttaaaaaagtgattaccaaccctcttctggcagacaaaagttttggaatagcaagagcattgcttaatgttcgaactgcatctgtctcctgtttctttttcaggagagacgcatgggcattggtagccatgcccaaagccagcttcttctcattgtttcttcagtctgttctggcaccttttgccagaagcaactggacaatatctgcataacccttccaggcagcagcatgtaaagctgtgtctcccaacttgttctgttggctcagttaaatactcygttgagtaaatagcatttccactatatctctgagatccccatgacaagcctagtctaaggcagtgcttccagccttgtctaagccattaacacccactcggttgtccaaacactctcgcaaccaactcaagttgcctctttttgctacttcatgcaatagattgtcaatggattctgcctgctcggccacatagttgcttggagttagtccagtcctg

SEQ ID NO: 260176 - DNA, 542 bp, Homo sapiens
tcttctggtgttatttcttcttccatttcttgaaataaccttgtctctgaggtggggcaaagaggtcaaaacagaaagaggggactgcagtctgtgagcactacctcttggttcctcccagaatggggggaggggagtrgtgaaggtggaggatgggggaaatgcaagctacctgttttgcaaagatcaaggaagagaggatacataaatgaaagaaacgccaagtgtttgcctctgcctttgctaagctgctcttttgccgccatctgctggtgccataggaaagtgcatggggcttttccaatacttctggaaggctgagtcacatactcatttacgttatcattcatttattcagcaattaatcatcactgggacatggtctctgttctcatggaattgcattccagtgaagcaaaccccatggccatttcctggaaactaagagatagagagaatggtggcaaggcaaataactagaatttggaggcagaaaaatgggactggagtcctggctttgccacctactttttgagtgtcct

SEQ ID NO: 260177 - DNA, 576 bp, Homo sapiens
attatgttatttataccatcaaagtgacatagctctgttataataaccaccaccaacaacaaaaatgcctgttagaagagttctttctcttatgcaaagcatcattgcattttagcccctgaagtcctcttgaggaaggtggtggtattatcattgttactgatgcttatccctattttgcaggggataaaaatgaaattccaagaagtgcttttatgttaaggaatcggtataactttacttagcacctcttttgaattgttggtattaaattgtattaaaaygttctgagaagaacagggttatgttacttacaaagctaaaatggagggggctttaacttattcatttatttgataattcattcacttatcaacatgtatctgtgatgtgtgttttatacgctttttacacactaaacagcaggctcattattcagttgtctaggcttttatttctttccttttttttttttttttgatggattctcactctgttgcccaggctggagtgcagtggtgagatctgggctcactgcaacttccatctcctggttcaagtgattctcctgcctca

SEQ ID NO: 260178 - DNA, 544 bp, Homo sapiens
agcctcaggaaacttacgatcatggtggaaggcaaaggggaatcaagcatcttcttcataagggagaaggagagagaagaatggaggaacttccaaacacttatacaaccatcagatcttgtgagaactcaytatcacaagaacagcatgggggaaccacccctatgatccaatcatctccctccctcaacacatggagattacaggtccctcactcaaaatgtggggattgcaatttaagatgagatttgggtggggacacagagctaaaccatatcagccgacttgggtgactaaaagtgagtggttgggggtatggaaggaagcaatagtgcctgctacactcaccaaggtctgtttctagacactccaaaagtctatgtggatatagggtcttcctgactatagtcagatagatccatgcagctatgaagtccttctgttctagatcctgccctcagaatttccctgaactgctgtccatagatgtcctctgtgcttcaatgtcccctgaactcctccaccacactgctgatgctcactg

SEQ ID NO: 260179 - DNA, 549 bp, Homo sapiens
gtatagtaagtgtatgcttaacctaataagaaactgcctgtttcctaaagtggacatacaatttgcattgcttccagcaacagatgagagttccagttgctctacatcctcttcattctaatggtgtatgctgtgcgttgtagttttaatttgcattgtcataatgacaatcgacrtatatgttttcatgaactatttcccatccacatatcttctttttaaaaatttttttattttttgagacagagtcttctctatcacccaggctggagttccgccggggttttgccatgctgcccagctggtatcaaactcttggactcaagcaattcacccacctcagcctctcaaagtgctggggctacaggcatgagccactgcacttggccatatatcttttttagtaaagtgactattcaagttttttactcattttagatcaggttatttatcttcttattattgagttgtaagtttttaaacctcttctcaatgcatcttgtttcttacatatctgttttgtcagtatttcttacagtttgtgccttg

SEQ ID NO: 260180 - DNA, 592 bp, Homo sapiens
tattcatttcttctatgaatgcctaaaaaaatttaaagtgttttgacagttggtttgttcacatgaggatctagacaagatccacactrtgcatttaattgtttgtccctgaagtcttttttatcctagagtagtgttctttttcagacatatagtttttaggatgaaaacatcttcaagtcaaagtgggacttttatatactgattaagggaaacataggtcaagatgctgtaaagatcattaactatatactcacaaccttataaaaactgacagaactctgaggagttagtgatcactgataattgcctaattagatattttaacatacccttttcagaatttgcaaccacagaaatacagaaagtaaacaaaaatatgtaaatattgaatacaaaaattataatggacatctagaaagctgaacactgaacaaatagaaagtagatattatttttaagtagatatggagcagaaaagtcatctatgtcccagatacacagaaagctataataaaaatctaagaatctataccatatatctcatgttccttaaagataagttagtgctatcatatatcaatgacaaaag

SEQ ID NO: 260181 - DNA, 594 bp, Homo sapiens
tcacatgaggatctagacaagatccacactatgcatttaattgtttgtccctgaagtcttttttatcctagagtagtgttctttttcagacatatagtttttaggatgaaaacatcttcaagtcaaagtgggacttttatatactgattaagggaaacataggtcaagatgctgtaaagatcattaactatatactcacaaccttataaaaactgacagaactctgaggagttagtgatcactgataattgcctaattagatattttaacatacccttttcagaatttgcaaccacagaaatacagaaagtaaacaaaaatatgtaaatattgaatacaaaaattataatggacatctagaaagctgaacactgaacaaatagaaagtagatattatttttaagtagatatggagcagaaaagtcatctatgtcccagatacacagaaagctayaataaaaatctaagaatctataccatatatctcatgttccttaaagataagttagtgctatcatatatcaatgacaaaagaaccacagatttatatattagataatagaagaaaaaaactcataaagaaaattatgaaat

SEQ ID NO: 260182 - DNA, 541 bp, Homo sapiens
aattaatcataaaaataaaaaatgataaaggaattgcatgaactactgataatagtgtgtggcgacttgaggaatatgatgaactcaacttcacaaagctgaagtcccaaaatactgagataaaatggagccttaaaaaatcagaaacatcccttgctgattcatattcaaattcataaagcatcccttataaccatgacttygtatgacattcaactttgctggactccatttgctgtcctggtaaaatgagaatcataacatctctaagatacacaatggggatataactacctaggagctactgaaacatggaagcaagctgccctaggaagcaaagtgggcctctccttccctgcttttctctaatcatgaaagctgagcctgcagtgaagatgacagaggaataaaatgccctccttaggagaatgatgcagaagatggcttaggattttgaaatctgaagctataactcattacagaaatgcaaaaccttgcttatttgaagatgatccattaggcctgattggatggatctggt

SEQ ID NO: 260183 - DNA, 573 bp, Homo sapiens
  misc_feature (1)...(573): n = A,T,C or G
tataacatatgtgaattggctaacctcacagtggcaatttagcaaatacttttaccaatcaagtcatcagttcctctcctaaaactttaacctaggaagaatcaaagacacacaggatttatgtctaagatcatcattgcagaattacaggtaaaatagaaagaacttaaacatccaacaacaaakatccaattaaataaagttatatgtaattttacaatggattattcttcaactgtgaatgtcatgtctttgaaaaatttgtaaaatatttcaagatcagagaagttagaaaataatatgttgctaaatgaaaaaaaaatatggatggtattaattataattccatgttggtgtgtatgtatgtgtgcatgtgtgtgtgtaaatgtgtgtgtccaaagaaagaaaaactaaaatgatataaagtcaacattaccantataacancnacttattctctaaaagctgcgattaggtgtttattcgtcttcgtgcttttctacatttgccaaattttcttcaatgaacatgtaggtagttgtcattcctactgaccatatatttttagctccc

SEQ ID NO: 260184 - DNA, 516 bp, Homo sapiens
tacactaggtcatatggcgaaagagattttgcagatrtgattaagtcaaggatcttaaaatggggcaattaccctggattatccccatgaaattgcaagggtccatcaaaaagtcagagaaggaggtgtgaccataaaaccagagagagaggtgaggatgctgcgctgctggccttgaaggtggaggacggggccacaagcagaggcatgcaggctgcctctagaaactggaaaaggcaaggaatggattctcctctagagcttccagaaggaaagcggccctgctgacaccttggttttaacccagtgacacccattttagacttctgtcctctagaaccgcaagataatcattgcatgttgctttgagccactaaatttgtagaaaattgttattaataacagcagccacaggaaattaacgcaccaggtcacactcttaacagcccgaagtgcaatgcccctgcttgcattttattggcactgagtcatttaaaaccctggagcaccagacaa

SEQ ID NO: 260185 - DNA, 596 bp, Homo sapiens
tcttaaaatggggcaattaccctggattatccccatgaaattgcaagggtccatcaaaaagtcagagaaggaggtgtgaccataaaaccagagagagaggtgaggatgctgcrctgctggccttgaaggtggaggacggggccacaagcagaggcatgcaggctgcctctagaaactggaaaaggcaaggaatggattctcctctagagcttccagaaggaaagcggccctgctgacaccttggttttaacccagtgacacccattttagacttctgtcctctagaaccgcaagataatcattgcatgttgctttgagccactaaatttgtagaaaattgttattaataacagcagccacaggaaattaacgcaccaggtcacactcttaacagcccgaagtgcaatgcccctgcttgcattttattggcactgagtcatttaaaaccctggagcaccagacaagttcttttttccctgctagagcaagatactagaaggcatcctcaatatccatcacctccattgagaggtggggttaagtggcgtcagtagctttggatgtaggaacagctggggtaagaaaagtaataatcc

SEQ ID NO: 260186 - DNA, 516 bp, Homo sapiens
tacactaggtcatatggcgaaagagattttgcagatatgattaagtcaaggatcttaaaatggggcaattaccctggattatccccatgaaattgcaagggtccatcaaaaagtcagagaaggaggtgtgaccataaaaccagagagagaggtgaggatgctgcgctgctggccttgaaggtggaggacggggccacaagcagaggcatgcaggctgcctctagaaactggaaaaggcaaggaatggattctcctctagagcttccagaaggaaagcggccctgctgacaccttggttttaacccagtgacacccattttagacttctgtcctctagaaccrcaagataatcattgcatgttgctttgagccactaaatttgtagaaaattgttattaataacagcagccacaggaaattaacgcaccaggtcacactcttaacagcccgaagtgcaatgcccctgcttgcattttattggcactgagtcatttaaaaccctggagcaccagacaa

SEQ ID NO: 260187 - DNA, 596 bp, Homo sapiens
tcttaaaatggggcaattaccctggattatccccatgaaattgcaagggtccatcaaaaagtcagagaaggaggtgtgaccataaaaccagagagagaggtgaggatgctgcgctgctggccttgaaggtggaggacggggccacaagcagaggcatgcaggctgcctctagaaactggaaaaggcaaggaatggattctcctctagagcttccagaaggaaagcggccctgctgacaccttggttttaacccagtgacacccattttagacttctgtcctctagaaccgcaagataatcattgcatgttgctttgagccactaaatttgtagaaaattgttattaataacagcagccacaggaaattaacgcaccaggtcacactcttaacagcccgaagtgcaatgcccctgcttgcattttattgkcactgagtcatttaaaaccctggagcaccagacaagttcttttttccctgctagagcaagatactagaaggcatcctcaatatccatcacctccattgagaggtggggttaagtggcgtcagtagctttggatgtaggaacagctggggtaagaaaagtaataatcc

SEQ ID NO: 260188 - DNA, 596 bp, Homo sapiens
tcttaaaatggggcaattaccctggattatccccatgaaattgcaagggtccatcaaaaagtcagagaaggaggtgtgaccataaaaccagagagagaggtgaggatgctgcgctgctggccttgaaggtggaggacggggccacaagcagaggcatgcaggctgcctctagaaactggaaaaggcaaggaatggattctcctctagagcttccagaaggaaagcggccctgctgacaccttggttttaacccagtgacacccattttagacttctgtcctctagaaccgcaagataatcattgcatgttgctttgagccactaaatttgtagaaaattgttattaataacagcagccacaggaaattaacgcaccaggtcacactcttaacagcccgaagtgcaatgcccctgcttgcattttattggcactgagtcatttaaaaccctggagcaccagacaagttcttttttccctgctagagcaagatactagaaggcatyctcaatatccatcacctccattgagaggtggggttaagtggcgtcagtagctttggatgtaggaacagctggggtaagaaaagtaataatcc

SEQ ID NO: 260189 - DNA, 560 bp, Homo sapiens
tatatttattttgtgtaagtaaactcattctgagtgtatatatttgtgcattctgctttcataacaagtgtatttttctattaagcaagtgcagtgtctccattagtcatttatttcttcattcactcaatcagcatatacttttggagcacccactgtgtaatcgtcctagatgctggggacacagaagtgaatggcatgaacccaaatacctgccttctcagatcttactttctagttcagagaaatagtacacaaaacaaatgcaaaaaatatataggtgtgagatggtaatactagatgtgatgaagaaaaataaagcaggaaaggaggaaagagtkcctgtgtgtgtgtgtgtgtgtgtgtgtgtgtgtgtgtgtgtgtgtatgtgtttaaattgtaaacagggtagctggagaaggccttaatgagaaactggcacctgggcctagaactgaaggaggtgagggagtcagcaaaaagaacatccaggcagagggaaccactgtgcaaaggccccggggtgagtgtgtgcgggtgcatttgaggcacctcatgga

SEQ ID NO: 260190 - DNA, 661 bp, Homo sapiens
ggtgtaaatattgccaccatagtagatgtcaggctgccactgtgatgtcacaaaaggcagagtttggaagaaatgtggattagcaaattattatatagtatttccaccacacaaacacamtagatgaaaataacctcaagtgtagtgataatagaataatataaaataatcaggaagcagtgagttttaagtatttatcattttttctttggaataacttaattgtaagttcatataatttaatttttcatgatggctgcagttaataaacagctaccaaaagttctgaaaacttgacagtggctttcctgtgcctgtacaggccagacccagcacctcattgtgtgtgcgtgtgtgtgtgtatgtgtgtgtgtgtgtgtgtgtgtgtgtgtgtgtgtgtgtagcacagtacccatgaatgccatgttatatcagagggaggcatagacaaactcagtttaaaaagaattcaacttaaaatcaatacaaaaaagaatattgaatagaaaatggcgtaggtgatttgtacatatagtaaatatcatgaagttgttactcaaaagactagatagttgacctttgaaaaacatggatttgaacatcatgggtccatttatacactgattattttcaataagtatattgaaaaacattttggaaa

SEQ ID NO: 260191 - DNA, 661 bp, Homo sapiens
ggtgtaaatattgccaccatagtagatgtcaggctgccactgtgatgtcacaaaaggcagagtttggaagaaatgtggattagcaaattattatatagtatttccaccacacaaacacaatagatgaaaataacctcaagtgtagtgataatagaataatataaaataatcaggaagcagtgagttttaagtatttatcattttttctttggaataacttaattgtaagttcatataatttaatttttcatgatggctgcagttaataaacagctaccaaaagttctgaaaacttgacagtggctttcctgtgcctgtacaggccagacccagcacctcattgtgtgtgcgtgtgtgtgtgtrtgtgtgtgtgtgtgtgtgtgtgtgtgtgtgtgtgtgtgtagcacagtacccatgaatgccatgttatatcagagggaggcatagacaaactcagtttaaaaagaattcaacttaaaatcaatacaaaaaagaatattgaatagaaaatggcgtaggtgatttgtacatatagtaaatatcatgaagttgttactcaaaagactagatagttgacctttgaaaaacatggatttgaacatcatgggtccatttatacactgattattttcaataagtatattgaaaaacattttggaaa

SEQ ID NO: 260192 - DNA, 545 bp, Homo sapiens
tctgcttctgtaagttggattattttaaatacctcttgtaagtggaatcatgccatatttgtccttctgtgaccggaacttaatattttttaaaagattcttcaggtgattctagaactagtcccacatgtgtgcaggggaaactgagacccagagaggggaaagtactttttgaggatcacaccattgtgagaagcagcctgggtccagaaagcacccattcttgacattgattattaattccattaccttttgctgctttccctcaaattattttccccataacatcgctgaggcctttagacataatgcatattccaaacttcacacctcctgcattttaaaggacattcaatctgtgcgattctamtgcatccactcacacacagctctgaatgtccagggctggaggggcagtcccacagaggggccaagggcctgaggacaacagatatttctgattcagtccgagggtctgccacatccaagctcccaagctccatgacctactaagactcagctcccttgtctggaaattgaagatg

SEQ ID NO: 260193 - DNA, 583 bp, Homo sapiens
  misc_feature (1)...(583): n = A,T,C or G
tttggggaatggtttttcatgcatctctttatgcgttttacgctgcttttaaaaatccaacctcatgtttggatcagctgtaaattggtggaatttggtcccagctatggcacttggatatgtgatttaacctttctgggccttggtaccttcatctataaaagagtacattcactttctggggctgctataagaaattgccacaaactgggtggcttaaaacaacagaaatctgttctctttcagttctggaagccaaaanagtcctaaatcaagttgaaagtcggggcttttccagaggaggaggctccagaggctctgaaggrggatctgttttgcacctctctcctagcttctggtgaccgctggcaacccctagagttccttagcttctagacacatcactccagtctctgcctctgtcttcgcatggccttcacctccatgtctgtgtcttctcttcttataaagacactcatcattggatttagagcttgttcagataatccagaatgatctcatctcaagatccctaatttaattacatctgcaaagactcttttaaaataagcaaacattcaca

SEQ ID NO: 260194 - DNA, 577 bp, Homo sapiens
aattaaatgagataatgaataataagagcttagcatagcatctggcatataataagtgcttgttagtttattatttctatcatgcattattaattattataattacctgggaatctgatcttccacctacaaattctttgtttctaaaatgaaaatcaggrcattacctgtgacagagtctaacaacaaaaggcaataaggaaaataagacaaattcacccttaatttcccttgatggtctgccataccggggaagctacaagctgacctgtatatgcgtctttatggaaggggagaaggatgtgtgtggaagcctacagccatctggccaggcccctctgttgcctgatgtcaacgtttgacttgttatggccctgtgatggccctgcttttctccttgcccccataaattctgttctcaaggcagcagccaccagagtagtcctgttaaaacattaaggcagatcctatcacacttctgttcaaaataaaacaatggtttcctttcctcccagagaacagctaagccttgacgacggccacaaaagcctccatgctgcagagtctgaacacttcc

SEQ ID NO: 260195 - DNA, 550 bp, Homo sapiens
agccagtctcataacctggtctcaaaacaaataaatagattaaaatttaaaaataaaattaaaagtttttttttttaaagagccccagtcattgtcccaacttcctctatcatctgaaggatactttctctaaygcagtatttgccccagctcattagtgtctagcactctttgcaagacgattaacatttttgatctctaaacatcatcctttaggttctaaatatagaacaaaaaattaacaacagaccagtccacttttatacttcctacagtttgcaaccaattctttttcttagatcataatacacaagtctctttaattcaattttggctgcatttgccaaactttatgaaaacaatgagattaagttgtgaaccaccaggaaaatatgaaacatcctgactcgatattaggtattagagattttatgcttcatgccctcatgaaaagagatcatcttttgtcactgaaacattcctttacacaatgctccttgagcacacaccatgtgctggagatccaacagaaatggacatggccccaacc

SEQ ID NO: 260196 - DNA, 527 bp, Homo sapiens
ggggtggacacctcggctcacactgcccctggagtccagaagggctgaagacaacaggaggtgccacactgcctctaaaacaagccaaaccccctctctggctcaaagacaccaacatccacagatcttcccacacagctagagagaggctagtcagttctggctataaattctacaactaagtcattgaaaacatcagccgcagcaaggacagagagggttccttccagaaagctctggagggttcttctgaagcactttcacattctgaggcctcatgtcccatcaaggtctttttgcgggtgttctgactcattcaccttgttctttctcctcaataattttatcccatttccctcattggttcctggaccgaaagatattgccacatgctrttgctcatttggttcctgtcacaaaactgagaaggagccactatcagcaaggctgttttacaaattagaagcccagagaaattcagtggcttgtttgagatcacatagtacaagcctaagttggtcatcaaa

SEQ ID NO: 260197 - DNA, 602 bp, Homo sapiens
atcagcttttctaatcctacagtttccaaggacaagcagaaatccctatctgaccattttgatggaatcctcactcccaagaatacatgttcactgccctttctccacctcttttcctctctcctgtttcttctttccctctggctgcaaggtgccccacactcctgtggtctggaaggaatggagccatgtgcacacttaacttatttttcatgcattccagagagagggagttggagcaagagtgctataggcaagatacttctagttattttctaactaccttccatgcattcaaatcaccgattttaatggatgctaaagctactgctgggaagagggtaggagatggaaggaggaagaatcttggctaaatatcttgaagatggagcaattaatttagttttcccttagccagacatwttttttttcttccagtctcatttcacttgtgggcatggtaatcttcactgttggcctgccattcattcttgtttttaaaatcatgcacaatatgttacgttagcaacactttgcacaaacagaaaataaggtttattgccgatatttttagctattgtcatttttgctgctctctctcc

SEQ ID NO: 260198 - DNA, 641 bp, Homo sapiens
ggtagcattcgaggcaagtccttggctggaaaagtcattgcatgtctgaaatgctggtgaataataaagactgggaatggatggggttagaaggtgagtccacaataggataagggccattatcatgcatggtgaggagcttgaaacttctcagaaccatcattagkcatgtggatttcaaccagtgtttgggttgaattgtgtcccccacaaaagatacactgaagccctaatcctcagtcctagaagggttgttgcagatgtaattagctgccttaagatgaagtcacactggagtaggttggacccctaacgcaatatgactggtgtctttagaaaagatgaccaggtgaagatagacacacagaatgccacgtgaagacagaggacaggaattatacatctgcaagccagagaacaccaaagattgcaggaaaaccaccaaaactaggagcaggccaaaaaagattcctctacaggtttcaggggaagcttggctctgctgacaatttgattttcagactgtcagcctccagaactgtgagacaatacatttctgctgttttaagccacctactttgtggtacttcatcacagcagcccttgcgaactactccagcagtacggccttcatgagatgt

SEQ ID NO: 260199 - DNA, 641 bp, Homo sapiens
ggtagcattcgaggcaagtccttggctggaaaagtcattgcatgtctgaaatgctggtgaataataaagactgggaatggatggggttagaaggtgagtccacaataggataagggccattatcatgcatggtgaggagcttgaaacttctcagaaccatcattaggcatgtggrtttcaaccagtgtttgggttgaattgtgtcccccacaaaagatacactgaagccctaatcctcagtcctagaagggttgttgcagatgtaattagctgccttaagatgaagtcacactggagtaggttggacccctaacgcaatatgactggtgtctttagaaaagatgaccaggtgaagatagacacacagaatgccacgtgaagacagaggacaggaattatacatctgcaagccagagaacaccaaagattgcaggaaaaccaccaaaactaggagcaggccaaaaaagattcctctacaggtttcaggggaagcttggctctgctgacaatttgattttcagactgtcagcctccagaactgtgagacaatacatttctgctgttttaagccacctactttgtggtacttcatcacagcagcccttgcgaactactccagcagtacggccttcatgagatgt

SEQ ID NO: 260200 - DNA, 641 bp, Homo sapiens
ggtagcattcgaggcaagtccttggctggaaaagtcattgcatgtctgaaatgctggtgaataataaagactgggaatggatggggttagaaggtgagtccacaataggataagggccattatcatgcatggtgaggagcttgaaacttctcagaaccatcattaggcatgtggatttcaaccagtgtttgggttgaattgtgtcccccacaaaagatacactgaagccctaatcctcagtcctagaagggttgttgcagatgtaattagctgccttaagatgaagtcacactggagtaggttggacccctaaygcaatatgactggtgtctttagaaaagatgaccaggtgaagatagacacacagaatgccacgtgaagacagaggacaggaattatacatctgcaagccagagaacaccaaagattgcaggaaaaccaccaaaactaggagcaggccaaaaaagattcctctacaggtttcaggggaagcttggctctgctgacaatttgattttcagactgtcagcctccagaactgtgagacaatacatttctgctgttttaagccacctactttgtggtacttcatcacagcagcccttgcgaactactccagcagtacggccttcatgagatgt

SEQ ID NO: 260201 - DNA, 590 bp, Homo sapiens
tatcactagtccctttgtatagggctggaaaactacttgcccaagtctcaaaactgttcagtgaaaaaacgaagacctaacaccaattcattagactccagagctataggcttagccattgaaccacctccctctgagagtcccagcatattctcaaaaagtaagagccatcagtaattattctaaaagcasaggctgcagaattctctgttctaaatttaaatggaactgggccatattggatgaaagaaatcaggttcttttcatgagtgcttgtcaagtgcctctgattcctaaaagaaaccaatttggccactgatctgaagtttctttctaggctttacaagtcatctctaatcctataatttgtctttatttctaccaactaagatgtgtgcactccaccaaaaaagatcatctaatgtttgaaagtggatcagaagcaaattatatgagaaactggtttgtgtcattaaagctttgaaaactagtgatcttaatgaaagtaaaatcaaccctaccatgtacaggaagcctaatagttgtttgtaaggaatttcaaggagtctactgagatttccccctccatc

SEQ ID NO: 260202 - DNA, 604 bp, Homo sapiens
atttttaactggtaattagaatattaattgttagccacattgagtgtartgggaatacattacattttaagtatgtttagagaccttacaaccattactatagatttgctaccagttaggaggatattacttagaatatttaattaaatctccttacctacaattgaaaatgttaaaaagtcagaggcccagctgaggaggcaatttaattacaatctgggtaaactgaacaaccagtgtcactgtcattcatctgtggctatgtagcatattttgatagaaggtaattgaacttttgccatcaaataacaaacaggggagaggctgtttgattggtgagcaaaggccaaactttggactcacagagggctgaactcttatcctaattgtgccataaaataacgtgatttttctcaagccagcttacctctctgagccagctttctctcgcataaaaaaggagagtaatagccactgttcactgggtaccatgtacgtaagactgtgcctcagcgctccacattgccttactaaatgacataaagtgaacagcacacacacaaaagacctattgcaccagttaggataagccaacttcaaacat

SEQ ID NO: 260203 - DNA, 575 bp, Homo sapiens
acctttggtcttttatgttggtgaccttcggatggggtctttgaggggatgtgctattcctttctgtttgttagttttccttctgacagtcaggccgctcagctgccgccctgctggagtttgctggaggtccactcccgaccctgtttgcctgggtatcactagcagaggctgcagaacagcaaagattgctgcctggtctttcctctggaggcttcgtcccagaggggcacctgccagatgccagccagagctctcctgtatgaggtgtctgtcagcccctactgagaggtgtctcccagtcaggatacatgggggtcagggaccgacttgaggaggcagtctgacccttagcagagctcgaacgcygtactgggaggtctgctgctctcttcagagccatcaggcagggacactaaagtctgctgaagctgcacccatagccgccccctccgccaggtactctgtcccagagagatgggagttttatctataagtccctgactgaggctgctgcctttttttcagagatgccctgcccagagaggagaaatctggcagtctggccagagcag

SEQ ID NO: 260204 - DNA, 530 bp, Homo sapiens
gctctcctgtatgaggtgtctgtcagcccctactgagaggtgtctcccagtcaggatacatgggggtcagggaccgacttgaggaggcagtctgacccttagcagagctcgaacgccgtactgggaggtctgctgctctcttcagagccatcaggcagggacactaaagtctgctgaagctgcacccatagccgccccctycgccaggtactctgtcccagagagatgggagttttatctataagtccctgactgaggctgctgcctttttttcagagatgccctgcccagagaggagaaatctggcagtctggccagagcagccttgctgagcagcagtgggctacacctagttcaaacttcccagtggctttgtttacactgtgagtgtaaaaccacctactcaagcctcagcaatggcggacgtccctcctcccaccaagctagagcatcccatttggatctcagactgctgctgtgctggcagtgagaatttcaagccagtggatcttagtttgttggctccatgg

SEQ ID NO: 260205 - DNA, 530 bp, Homo sapiens
gctctcctgtatgaggtgtctgtcagcccctactgagaggtgtctcccagtcaggatacatgggggtcagggaccgacttgaggaggcagtctgacccttagcagagctcgaacgccgtactgggaggtctgctgctctcttcagagccatcaggcagggacactaaagtctgctgaagctgcacccatagccgccccctccgccaggtrctctgtcccagagagatgggagttttatctataagtccctgactgaggctgctgcctttttttcagagatgccctgcccagagaggagaaatctggcagtctggccagagcagccttgctgagcagcagtgggctacacctagttcaaacttcccagtggctttgtttacactgtgagtgtaaaaccacctactcaagcctcagcaatggcggacgtccctcctcccaccaagctagagcatcccatttggatctcagactgctgctgtgctggcagtgagaatttcaagccagtggatcttagtttgttggctccatgg

SEQ ID NO: 260206 - DNA, 576 bp, Homo sapiens
ttcaagtgttaactaaccatttctccttattctctctctcacatatgtacgatgctatttataatgaagtaaatttgaagaaattatcactttaattatgtaacaatctgtctagttagtttttaactacaggatttctttggagtagttaatttagttttaaactatcactgttttctttatgcctactataaatcttttaccatctaaatgcacaaaaacatacagtttttttttttttaccatttctgggggttaaaactctcatcttatagtaaattaaacctattaaaaaactaaagaaggtgggaggtctggttttctttcttctacctgcctcgctccctctctccctccctctctctctccctctctctccatctatccctccctttctccttccctctttccttctctctctcactctctggtgtgttagtcaaaataagagccttggaaatttggagctctatgattttggggatgtttttaaggtgtacaatkttgtctaaagcagaatatcgcatttgagggaaatatttttttatcccagagaacataaaggctctatagcca

SEQ ID NO: 260207 - DNA, 564 bp, Homo sapiens
tatagaatgatttaggtcttgctaaggttaatatatattatatataatttataaaattatataacgtattattacaatatatacaataccaaacatatataattttatatagttatataaaatataggtgtatatatatatatctcaataaccttagcaagtcctaattktatgtaagcacataatatgtaagtatggaattatatatggttatgtacaatgattagttagatttatgtaatgatttagatattaaccaccttagcaagtcctaagcttctcgtcatcagtgaggcccagccacacctcagctcttgtcacttttgggttatgagagcgaaaaatacatatccttttgcttagatttgtccaatttgccaccaaaaagaatcctgatgaacacaggcagtttctacaggggccccgccctccaccgagctgtccacatttccagcttggctttaaatagggcagtactgagtctagagaagattataaaattcacaacaaattccaaaaggagagcaaacaggagcactaggggttgggcctcttttgaaaatt

SEQ ID NO: 260208 - DNA, 564 bp, Homo sapiens
tatagaatgatttaggtcttgctaaggttaatatatattatatataatttataaaattatataacgtattattacaatatatacaataccaaacatatataattttatatagttatataaaatataggtgtatatatatatatctcaataaccttagcaagtcctaattttatgtaagcacataatatgtaagtatggaattatatatggttatgtacaatgattagttagatttatgtaatgatttagatattaaccaccttagcaagtcctaagcttytcgtcatcagtgaggcccagccacacctcagctcttgtcacttttgggttatgagagcgaaaaatacatatccttttgcttagatttgtccaatttgccaccaaaaagaatcctgatgaacacaggcagtttctacaggggccccgccctccaccgagctgtccacatttccagcttggctttaaatagggcagtactgagtctagagaagattataaaattcacaacaaattccaaaaggagagcaaacaggagcactaggggttgggcctcttttgaaaatt

SEQ ID NO: 260209 - DNA, 445 bp, Homo sapiens
tgaagctgaggtacagcaagccctctgcacttgccatgcatttttcttttcaccctagtcccactcaggcagctgtattcacttatgctacctgccttacytctgcaggtgtttgagtttggtttagagcaacatgttctatgtcttgttctccccacctgccactagaaggaacttaacaataagacaggacatggtccgggggtgcatagaatggtaggattacattccactggggaaatcaagcatggcctcactgataaatagctctgcaactctgaagtgagacctccagttagggataagattttcattgtgtaagacatgtaaggagggatgacattccaggtatcaggagtagcaggaacaaaagcgttggagatgggagtctccatgtgctttgggactgccatgtgctttgagaatgccaagacctaggatttgt

SEQ ID NO: 260210 - DNA, 605 bp, Homo sapiens
taagtaagtcaattaaatctctttcctttataaattatccagtctcaggcagttcattatagtagcatgagaaaagactaatacaattctccaaggtccaaatgaaagaaaaataatgttaacagcagtcagagagaaaggccaggtcacctacaaagggaaacccatcagactaacagtggtcctctcagcagaaaccctacaagccagaagatactgggggacaatattcaacattctttaggaatttccaacccagaatttcagaaccagcaaaagttagcttcataagtgaaggagaaataagatccttttcaggcaagcaaatgctgagggaatttgtcaccatcaggccagccttgcaagagctcctgaaggaagcactaaatatcaaaagaaaaaaccattaccagccactacaaaaaacactgaagtacacaaaccagtgacactataaagcaaccacataaacgagtctacaaaataaccagctagcatcatgatgacaggataaaattcatacacaacactagccttaaatgtaagtgagctaaatgttccaatttaaagacasagaatggcaagctggataaagagccaagacc

SEQ ID NO: 260211 - DNA, 493 bp, Homo sapiens
ggaattgctgagcaggtgctcctcaggaaaaaagagaccagacaggatccaagcttgccagaaaaaggggagaaatgtagaatcattagcatctttgatttgttgagatttaacagtgatataaccttagactccaagtcaggatgagaaagcaggggaagtgggtragacggcagcagggaaagaatggcatccctgtagctctcttcactgagagtgtggattcttctttagaataggctcttcagaagaaaaataaagaaaatccaagtaataatgaaaacccaagaaaactttgagaaatcagctcttcaaggaaatggctcaggatgtaatgttaaataagctatggaaaccatcagtgtgtttgtggagactatgtctacaatagggcacatatggaattatctgcttatcagatttttctattagttaggtatgcaatatgctccatcaacattgggcaacactgatctgcactttgttaaacttc

SEQ ID NO: 260212 - DNA, 576 bp, Homo sapiens
gtttatttagaaggtgattctaggttaggaggacagattaagtgaggagaatgagttaaggaaggaggaaaagccaatccaagagggtgttaaggttatcattgcgtgtagtgggggcttctttccactgaggcccctgagaaagtgcagggtgctgcccagaattgctcctaacttccaggactgactgcttctgcacccctttgggtgaggggtgctcctaggggtgataacactgctgtggttcaggactgkgctcgccggagcccagcagactcctgcagccttggaaaaggccctgaggagaaaaacagaacggtccagtagtgcagggtgtgcactgcagagcagattggctgggtaaagtgggtttctgtgctgctttaggggaaaggcaggtatggtctagagaatctaattctcatatcaactttgttaactttaagcttccaagtgaagcactgtcaagagaaagaggatttcatgaatttgctttactacttacagaaccaagcacagaggactcagacaaaaggtttcttttccacttcttgtagcaggtaaggcgatttggca

SEQ ID NO: 260213 - DNA, 565 bp, Homo sapiens
ggtaacacacaatctcccaagattgaactaggaagcaygtgaaaacctgaacagacaaataatgaattctgagattttaaaaacctactaaccaaaaagagccctagaccagatggattcacagcccattatcagatctgcaaagaactgataccaatcctactgaaactattccaaaaaattgaagagaaggagctcctccctaactcatcctgtgaaactagcatcattctgatacaaaaatctggcagagacacaacataaaaagaaagcttcaggccaatatccatgatgaacatagatgtaaaaatccccaatgaaatactagcaaactgaatacagcagcacatcacaaagttaagtcgccacattcaagaaggttttattcctgggatgcaaggttgattcaacacatgcaaatctataaatgtgattcaccatgtgaacagaatcaaaaaccacacaattatcttaatagatgcagaaaaagcctttgataaaatccaacatcccttcatgataaaaaccttcaacaaactaggcatcaaaggatcatatctcaaaa

SEQ ID NO: 260214 - DNA, 543 bp, Homo sapiens
tccgtgaaggtccctggggccccaggcagctgaggattcactctggtcttgtatacagcagctgcagcttgagtgctgggggactgaaaccagggatgagatctgatttgaygtccctgggccctagcagggtggggaagccactctgagccagaaaatagatacagacacaatgaatgaggcagatttcagggcacactgtgatacaaaagcccaaatggggcctagggatggcagttactgtctgaacttcttaattgatgaatttgcattcttctctagatggccttggtgaggccagaggttccttagcacttcagggagcctatggcaagagtgactgacatggggccaccagttgtgcctcctcagggtccacctctgggcatgagaaagggcagggataagtggggaatctcagggagaggatccagtataatcaaggacacaggcctcactctgtaagatattctcacaattggcaatatcaactccatattatgccaatagacatttatgtaatatctaagttatgacaggcac

SEQ ID NO: 260215 - DNA, 543 bp, Homo sapiens
tccgtgaaggtccctggggccccaggcagctgaggattcactctggtcttgtatacagcagctgcagcttgagtgctgggggactgaaaccagggatgagatctgatttgacgtccctgggccctagcagggtggggaagccactctgagccagaaaatagatacagacacaatgaatgaggcagatttcagggcacactgtgrtacaaaagcccaaatggggcctagggatggcagttactgtctgaacttcttaattgatgaatttgcattcttctctagatggccttggtgaggccagaggttccttagcacttcagggagcctatggcaagagtgactgacatggggccaccagttgtgcctcctcagggtccacctctgggcatgagaaagggcagggataagtggggaatctcagggagaggatccagtataatcaaggacacaggcctcactctgtaagatattctcacaattggcaatatcaactccatattatgccaatagacatttatgtaatatctaagttatgacaggcac

SEQ ID NO: 260216 - DNA, 252 bp, Homo sapiens
tggttcaccatgcatcttttccatctaccaggaaatcaacaatgttttagatcaaagctgttccattttcctggatcctagtggggagctaacatggcrcagagccacagccaatccaaggacatgtggtaagaatgataaataaacctttgttattttaacacagtgaaagtttgcggtcagttgttactacagcataacctgtcttaccccgactgataatctatatcagtgattgtcatcagcagttaa

SEQ ID NO: 260217 - DNA, 582 bp, Homo sapiens
gtggttcaccatgcatcttttccatctaccaggaaatcaacaatgttttagatcaaagctgttccattttcctggatcctagtggggagctaacatggcgcagagccacagccaatccaaggacatgtggtaagaatgataaataaacctttgttattttaacacagtgaaagtttgcggtcagttgttactacagcataacctgtcttaccccgactgataatctatatcagtgattgtcatcagcagttaaaattcccatttctctatccrtgtaccttaagcataggcacagaggactttttgatgtcctttcaggagctcacacactattgatcccacaataaaactatcatttcacttctagaatcctagaaaagaggagttcctccaaggccctggaatcagaaacttggattgccaggtgaaggaaactaggttttgcttcatctgggtggttggccaggatcctgagtgagagccatggatacctagttgctttccagcttggtatgtttttgtcactgcaggcaaaaacctcctccccaacatagtgggccatgttgtattgtagttgcttaa

SEQ ID NO: 260218 - DNA, 579 bp, Homo sapiens
tctaccatccactgaagacacacagaaacttgtctctggaactgaaagtaccctacaggagtcaggcattacaacccagcttccattttagaagtgatccagcctacatttcccttatagttggagagaacctgagtccctacatggaagctgaccccaggatcggatttgcatctgggcctcactcatttgctttcaccctttttatctgagctctcctccagtgcagttcaaaagccaggcttctaatgtagaggcaggactgaycctgctcagcagggttattgggacaggattaccataggtgtggggggcagtgccatggagagaaacacaggcttctctccttcaaagggcagctcccaactccaaataagtccacaccttgggggaaacggccttgctggctgaattaacctgcccttctgcaaggcaaggttggcagtacagatggaatgagctgtgttaacatatgagatgcaattttgttcgaaaatttcttccttcaggaaatccttattacactccatatctccccatctctccccagcaacattcaaaagcaaatcacaagtgcat

SEQ ID NO: 260219 - DNA, 548 bp, Homo sapiens
agctcccaactccaaataagtccacaccttgggggaaacggccttgctggctgaattaacctgcccttctgcaaggcaaggttggcagtacagatggaatgagctgtgttaacatatgagatgcaattttgttcgaaaatttcttccttcaggaaatccttattacactccatatctccccatctctccccagcaacattcaaaagcaaatcacaagtgcatgcccttgggcccatctgatctttaacaagctgatcccatcatctcttcctaacctggaggagtttaggaaacgatgctaactaacccacagtggcctggggttccgttgacttataattcaggtgcatggggagcaaagtagggtattccttcaaagtaagatgtcatcttagatggcttctctgctgcagaatggaggagaggactggaggtggttttctgaatagtgcagatcccttatarccatttttgcaagagctgtatggaatattgaagttgtggtgatttttctgatctactgcatcattctggagaggtgtgcagcc

SEQ ID NO: 260220 - DNA, 548 bp, Homo sapiens
agctcccaactccaaataagtccacaccttgggggaaacggccttgctggctgaattaacctgcccttctgcaaggcaaggttggcagtacagatggaatgagctgtgttaacatatgagatgcaattttgttcgaaaatttcttccttcaggaaatccttattacactccatatctccccatctctccccagcaacattcaaaagcaaatcacaagtgcatgcccttgggcccatctgatctttaacaagctgatcccatcatctcttcctaacctggaggagtttaggaaacgatgctaactaacccacagtggcctggggttccgttgacttataattcaggtgcatggggagcaaagtagggtattccttcaaagtaagatgtcatcttagatggcttctctgctgcagaatggaggagaggactggaggtggttttctgaatagtgcagatcccttataaccatttttgcaagagctgtatggaataytgaagttgtggtgatttttctgatctactgcatcattctggagaggtgtgcagcc

SEQ ID NO: 260221 - DNA, 484 bp, Homo sapiens
aattaaacacttaaatataagacctcaaactatgaaaacagctaycagaaaacattgggaaaaatctctaggacactgattagtctgggcaaagatttcttgagcaacaccccacaagcacaggcaacatgttcacaaggtgaacatggacaaatgggatcacatcaagttaaaaagcttctgcacagcaaaggaaacaatcaacaaagtgaagagacaactcacagaatggaagaagatctatgccaactacccctctgacaagggattaatgaccagaccatatgaggaattcaaacaactctacaggaaaaaaattctaggaattcgatcgaaggataggcaaaatatttgaatagacatttcttaaaagaagacctacaaatgggaaacaggcatatgaaaaggggctcaacatcactgatcatcagagaaatgcaaatcataactgcaatgagatatcatgtcaccccagttaaaatgg

SEQ ID NO: 260222 - DNA, 484 bp, Homo sapiens
aattaaacacttaaatataagacctcaaactatgaaaacagctatcagaaaacattgggaaaaatctctaggacactgattagtctgggcaaagatttcttgagcaacaccccacaagcacaggcaacatgttcacaaggtgaacatggacaaatgggatcacatcaagttaaaaagcttctgcacagcaaaggaaacaatcaacaaagtgaagagacaactcacagaatggaagaagatctatgccaactacccctctgacaagggattaatgaccagaccatatgaggaattcaaacaactctacaggaaaaaaattctaggaattcgatcgaaggataggcaaaatatttgaatagacatttcttaaaagaagacctacaaatgggaaacaggcatatgaaaaggggctcaacatcactgatcatcagagaaatgcaaatcmtaactgcaatgagatatcatgtcaccccagttaaaatgg

SEQ ID NO: 260223 - DNA, 533 bp, Homo sapiens
atggttagggtggggtcaatgctccaagcccctaagttggtacttcatgggtcacaccacacttaacagagctcctggggccaacctcggccagctcgtggctctccatccagttcctccctccaccaggatctctgggaggtagatgtggggagaagggggcactgttctgcccactttagagatgaggacaactgtggcagggagagggggtgactttctgtggtcacacacattatgagaatccaagtatggcttgtgggcagatggcagcataggtacccaggctggctggggctgccctccactgggtcatgcagagagcaggaaggaagccaccatttaacaggcactttgccrggcctcttacacatgttatcaacctgcacagcatccatctgaggaagggattagcagggtaattttaccatggagacaattgaggctgagatatcaaatgacctgcctaaggtcacacagacagcaaataatgctgacaggctggccagactcccaaaagcactttagtcact

SEQ ID NO: 260224 - DNA, 438 bp, Homo sapiens
aggaaatgaaagttgtggcacctcttaggtgctatgtagacattgtcccattgaactccagctaccatttccaggtaagtctcatcaccatcttatagataaggtaactgaaaagttaaatacattgcttaaggacatgcaggctatgtctctcttctaaaatgttttctgatatacccttttataaagctcataacatccccctttggaaattctcartcccctttttctatcctctttcttctgacacagtaagatgccctctggaataggctgatacgaatttgaattccatatttaccatttaccgctgtgagattttgggcaagacagtcaatctctctaagttttccttatctattaaatgggctagaattgcttatctcacaggatgttcctgccctttgtgcagtgaactttgctttggactgttacact

SEQ ID NO: 260225 - DNA, 549 bp, Homo sapiens
ggggtactatgaattaaagaataaaggattgattaggctctttgaagagaaacctcatcatatcccacacagctaaggcagggaagccactatgaagtagttgattctgatgttacatgtgtttaaatcactgtgcccgacactatgaatggatgcagggaattgcctcttccctgctttctttattccacagaaaggtacatttttttaaccaaagttttgctgaccatttctccatcattaaacacttgctaaatgcctgcctcatgtctggttctgtgctgggcactggagtgtgctgggcactggagacataatagsagatgggcaccggccttgcccaacaaggtttgtccagagctgcaaacagcagtgtgcgctataaggtggtgctcaatacattcttcactcgtagagttaaacactgtgaccaggtttttccttgcatacatttaataagtacaaattctgttaggaaattatatttaaatttaggaataaaaatgtaatcacacatctgtaggtgcctcatttgtcaaagtcaaagaa

SEQ ID NO: 260226 - DNA, 549 bp, Homo sapiens
ggggtactatgaattaaagaataaaggattgattaggctctttgaagagaaacctcatcatatcccacacagctaaggcagggaagccactatgaagtagttgattctgatgttacatgtgtttaaatcactgtgcccgacactatgaatggatgcagggaattgcctcttccctgctttctttattccacagaaaggtacatttttttaaccaaagttttgctgaccatttctccatcattaaacacttgctaaatgcctgcctcatgtctggttctgtgctgggcactggagtgtgctgggcactggagacataataggagatgggcaccggccttgcccaacaagrtttgtccagagctgcaaacagcagtgtgcgctataaggtggtgctcaatacattcttcactcgtagagttaaacactgtgaccaggtttttccttgcatacatttaataagtacaaattctgttaggaaattatatttaaatttaggaataaaaatgtaatcacacatctgtaggtgcctcatttgtcaaagtcaaagaa

SEQ ID NO: 260227 - DNA, 549 bp, Homo sapiens
ggggtactatgaattaaagaataaaggattgattaggctctttgaagagaaacctcatcatatcccacacagctaaggcagggaagccactatgaagtagttgattctgatgttacatgtgtttaaatcactgtgcccgacactatgaatggatgcagggaattgcctcttccctgctttctttattccacagaaaggtacatttttttaaccaaagttttgctgaccatttctccatcattaaacacttgctaaatgcctgcctcatgtctggttctgtgctgggcactggagtgtgctgggcactggagacataataggagatgggcaccggccttgcccaacaaggtttgtccagagctgcaaacagcagtgtgcgctataaggtggtgctcaatacattcttcactcgtagagttaaacaytgtgaccaggtttttccttgcatacatttaataagtacaaattctgttaggaaattatatttaaatttaggaataaaaatgtaatcacacatctgtaggtgcctcatttgtcaaagtcaaagaa

SEQ ID NO: 260228 - DNA, 547 bp, Homo sapiens
aagcatggaattgtagggagggctttgatgccctcaccttggggtcaccttcattcagaactcatctgtctcctctgccacagatggcagagtcgatggagacaagaggatgcagatgagagacatttcagaggggtcctccacagggtgtggggggattagagggagcgtgaaggagagtccagcatgactcccaaggcacttgcttagggataggaccgggggtggcatcgttctctagtcttgccacctttcatgcctcccatctccctttccaagacatgcccatcttggtttctatcttgtctcatgctgtatgagttcattcccttgaggttaagaattgtgactctcttctagcccccctgcatctccactaatccactaagctgccttctgtagccctgggcacttgtggtttcccagaacagagggtttggggattaaacaasttgtgtgggtataaagtgagatccttggttcctgatcagcctagcaataatcagagccaactggaaattttgacacaagattcccagccctgaga

SEQ ID NO: 260229 - DNA, 560 bp, Homo sapiens
aagccacatctcattgtctggcatgtaggccaaaggcttggaagcaagcttaggagtttgaatcttggcttcactcayttctggttatgtggctttggtcaagttacctaactttgaaaacctcatctattaaagttttaagtgtggcagataagaatctcaatacacaaatttaaaaattgtctttctcacatccagccttgtttcagttcaagtccccagtccacctgagtgggggagatttaagtgctgctaatttacaattattcattttctgtagggtgcttggctgattgcagggagatttgtaaagtgctagagttttcagcggagcctccaggaacttttccatgcattgtggaaattgtgctcaccagttctgattctcggtcactaatggtctgtcagaactggcagctgtcgggattgccttacttagggggcacacaaatatttctgctgcttctcatgttttctctgtaggaacatccgtggtccatctgcctagatgtaccaggccagcattccttgtcggcatcacccctgccagggctcagccc

SEQ ID NO: 260230 - DNA, 560 bp, Homo sapiens
aagccacatctcattgtctggcatgtaggccaaaggcttggaagcaagcttaggagtttgaatcttggcttcactcatttctggttatgtggctttggtcaagttacctaactttgaaaacctcatctattaaagttttaagtgtggcagataagaatctcaatacacaaatttaaaaattgtctttctcacatccagccttgtttcagttcaagtccccagtccacctgagtgggggagatttaagtgctgctaatttacaattattcattttctgtagggtgcttggctgattgcagggagatttgyaaagtgctagagttttcagcggagcctccaggaacttttccatgcattgtggaaattgtgctcaccagttctgattctcggtcactaatggtctgtcagaactggcagctgtcgggattgccttacttagggggcacacaaatatttctgctgcttctcatgttttctctgtaggaacatccgtggtccatctgcctagatgtaccaggccagcattccttgtcggcatcacccctgccagggctcagccc

SEQ ID NO: 260231 - DNA, 565 bp, Homo sapiens
tgtccacagagcccactataactgaatattttcccccagcattgagtcagtcccaacccatccccctccaagaaattcccccttgaaccttccaagccacatctcattgtctggcatgtaggccaaaggcttggaagcaagcttaggagtttgaatcttggcttcactcatttctggttatgtggctttggtcaagttacctaactttgaaaacctcatctattaaagttttaagtgtggcagataagaatctcaatacacaaatttaaaaattgtctttctcacatccagccttgtttcagttcaagtccccagtccacctgagtgggggagatttaagtgctgctaatttacaattattcattttctgtagggtgcttggctgattgcagggagatttgtaaagtgctagagttttcagcggagcctccaggaacttttccatgcattgtggaaattgtgctcaccagttctgattctcggtcactaatggtctgtcagaactggcagctgtcgggattrccttacttagggggcacacaaatatttctgctgcttctcatgt

SEQ ID NO: 260232 - DNA, 608 bp, Homo sapiens
caaatcagccattgggggagtttggaaaataaatacagatgttacttgttggcagaacygacaataaccaaaacaaagcttggaaatgcccccttgtcatgtctttcatacacagcaaaaacacccttctcctggcaacagaaaacatcaggtttgacagcctgggatttgtgatggtggttttgtttttgtttttgttttgttttgtttttgttttttcataaagcagaggctgcttaacatggccagagtcgtttactcgaagaaccctgatgctttgaaaaaagaaaaaaaggcaagttcagtttacagggtactgatgattaaacatggttaggtgaaattggtaccactcagttccactgtgcagctgccacagcagtggctataaaaaatcattactgcctggccaacctcgaggccagctctgcctcaagcctcggcttttaagactccaggctatgctgtgtttacgcaagggctcagaagcgaattccttcctacatccttcctcttgcccaagccaccttcaatagcacatggtatgaccagagggctcttctggagacaaatcagggtaaaacaaaggtagtgacagctcatctccc

SEQ ID NO: 260233 - DNA, 608 bp, Homo sapiens
caaatcagccattgggggagtttggaaaataaatacagatgttacttgttggcagaactgacaataaccaaaacaaagcttggaaatgcccccttgtcatgtctttcatacacagcaaaaacacccttctcctggcaacagaaaacatcaggtttgacagcctgggatttgtgatggtggttttgtttttgtttttgttttgttttgtttttgttttttcataaagcagaggctgcttaacatggccagagtcrtttactcgaagaaccctgatgctttgaaaaaagaaaaaaaggcaagttcagtttacagggtactgatgattaaacatggttaggtgaaattggtaccactcagttccactgtgcagctgccacagcagtggctataaaaaatcattactgcctggccaacctcgaggccagctctgcctcaagcctcggcttttaagactccaggctatgctgtgtttacgcaagggctcagaagcgaattccttcctacatccttcctcttgcccaagccaccttcaatagcacatggtatgaccagagggctcttctggagacaaatcagggtaaaacaaaggtagtgacagctcatctccc

SEQ ID NO: 260234 - DNA, 596 bp, Homo sapiens
agtggttcctcacctgacttgtgcatcagatttatctaggaaaccctaaatactacagattttgggacctactctagacactgaatcagatggatgggagtacgcccaggaatcggtgtttacagagtttcccatatgattctcatatacagctctgtttggaatccacttaccaatccaactgacctcttcagttttccagaccaaaacactgaagcacaggcaattctattaacgtgcccaaygtaaccagcctattggcagcagagcctggactagaacctggggcttgctgtgtggtgctctcgccatcggatcatgcatcttccactggaatcctaaatggggtaaaggtgtggtttctctctctctcacactaaattgctagacatggcatcgcattcacccaattcttgcccaaacccttcaactcaactcagtgcaattaaacaaatatctattgagcagctactatgagctacacacggtgcttggtgctgagaatcatggtttcttaccctcatagagcttaaagtccagcagaaaagaagaacattttaaagactgtaaccagcttactgaatgaactgggatca

SEQ ID NO: 260235 - DNA, 596 bp, Homo sapiens
agtggttcctcacctgacttgtgcatcagatttatctaggaaaccctaaatactacagattttgggacctactctagacactgaatcagatggatgggagtacgcccaggaatcggtgtttacagagtttcccatatgattctcatatacagctctgtttggaatccacttaccaatccaactgacctcttcagttttccagaccaaaacactgaagcacaggcaattctattaacgtgcccaacgtaaccagcctattggcagcagagcctggactagaacctggggcttgctgtgtggtgctctcgccatcggatcatgcatcttccactggaatcctaaatggggtaaaggtgtggtttctctctctctcacactaaattgctagacatggcatcgcattcacccaattctkgcccaaacccttcaactcaactcagtgcaattaaacaaatatctattgagcagctactatgagctacacacggtgcttggtgctgagaatcatggtttcttaccctcatagagcttaaagtccagcagaaaagaagaacattttaaagactgtaaccagcttactgaatgaactgggatca

SEQ ID NO: 260236 - DNA, 631 bp, Homo sapiens
ctgcgattccctgacataggccatgcctcctccagctgacctagcccctcccttccagcattctatcctacacttgatctcagccagaaggccaggaagagacccagcagtctgtcctagacactgttggggtcaccttgcccctcaacgaagattccctccttggccaaactttaaccaagctcctctgaatcctctcttcaattagacctcagccttggcccattgaactacagattctcagcwcaaatgattttggacacccctctttccccccacccacattaaaaggcttaaacaccaacatagtttctaacagctcaaggctgagtcctaggatgatcttagccccccataaagtgtctgcctgagaaagcgcaaggctgccaggagaattttcagtctctctccttcagatccttcaggcatgagtcgtgcaccagtcactaagcacttcagtgccaggcatttttccaaatgattctcagaagccttcctcatctggcttggaggaagggcagagaaatacacccctctcttcccccatgaggtgggaaagggaagcacacacacacacacacaaacgcacacacaaacacacacgcacacaatgctgcgacaactttcacag

SEQ ID NO: 260237 - DNA, 631 bp, Homo sapiens
ctgcgattccctgacataggccatgcctcctccagctgacctagcccctcccttccagcattctatcctacacttgatctcagccagaaggccaggaagagacccagcagtctgtcctagacactgttggggtcaccttgcccctcaacgaagattccctccttggccaaactttaaccaagctcctctgaatcctctcttcaattagacctcagccttggcccattgaactacagattctcagcacaaatgattttggacacccctctttccccccacccacattaaaaggcttaaacaccaacatagtttctaacagctcaaggctgagtcctaggatgatcttagccccccataaagtgtctgcctgagaaagcgcaaggctgccaggagaattttcagtctctctccttcagatccttcaggcatgagtcstgcaccagtcactaagcacttcagtgccaggcatttttccaaatgattctcagaagccttcctcatctggcttggaggaagggcagagaaatacacccctctcttcccccatgaggtgggaaagggaagcacacacacacacacacaaacgcacacacaaacacacacgcacacaatgctgcgacaactttcacag

SEQ ID NO: 260238 - DNA, 631 bp, Homo sapiens
ctgcgattccctgacataggccatgcctcctccagctgacctagcccctcccttccagcattctatcctacacttgatctcagccagaaggccaggaagagacccagcagtctgtcctagacactgttggggtcaccttgcccctcaacgaagattccctccttggccaaactttaaccaagctcctctgaatcctctcttcaattagacctcagccttggcccattgaactacagattctcagcacaaatgattttggacacccctctttccccccacccacattaaaaggcttaaacaccaacatagtttctaacagctcaaggctgagtcctaggatgatcttagccccccataaagtgtctgcctgagaaagcgcaaggctgccaggagaattttcagtctctctccttcagatccttcaggcatgagtcgtgcaccagtcactaagcacttcagtgccaggcatttttccaaatgattctcagaagccttcctcatctggcttggaggaagggcagagaaatacacccctctcttcccccatgaggtgggaaagggaarcacacacacacacacacaaacgcacacacaaacacacacgcacacaatgctgcgacaactttcacag

SEQ ID NO: 260239 - DNA, 590 bp, Homo sapiens
cacagcagaactactcacctgctctccgctctctctcaatctgtcccctggcctctcccattaatrtcctccatgtggatgacaacctaaaaactttttaaaacaagaactgatttcacaatctcttagcatgtactgcacagatggtctcaaccttggatactttgccaaaacaccaaaagtcaaatttaacatcccgttacataagaaattacaaattcagggtggcaagagaatgtacaacaaggacatttggggcagccatagtttataggattcatccctcacattcctctggtaaggaaccaagacactccttgtttaggccgccatagaaactggatttccagagggcgaatgagagaaatgactggtttagatatcctgtcttttctaactattaaaatattgtccagacttctatatccaattcaaaaagctatcatttccatcaattccattccaaagacatgaaatatcttatgagtaccttctatgtgctaaagagtgtatcgtagtaaccagcctccacgatagtccccgatgatcctcaccttctgagattcactcctttgtgtagtccccttcca

SEQ ID NO: 260240 - DNA, 604 bp, Homo sapiens
catgtctcagccattattgttattcatcactttggccatgaatttcatctcattcagactttctccagatctgtcacaccctaaacagtcatttactttgaggataacgtgacttgagtccaacagggcatccaaaacagagtcaacttcttcatataaatgatctcaacatggggcctcctggtttgttaaatattatgtttaattgagagtggctctgtaagtaattagagaacagttactcaaatctaaaacccttaactcatgtgaacattatttgacctctctttgttgactcaaaatgtgctcatgatttgaatygtataatattttgtatttcatcatgaggtatcattgtaaatcaccacagaggtgatatttttgatattggaagtgtgtgaacacttggattctgtatgaatgaggctttattagactcattccatcttattacaaaaaccaggaatgcagcaatgtaaaccaaactgctcctgatgtttaaaattaatggaatcaggtgtcttgtagtccacatctttcttctaacagactcggttttgtgcatttctgaattcagaagacctcattgcaggcttgaattaga

SEQ ID NO: 260241 - DNA, 605 bp, Homo sapiens
gaaagtcagtctactcccttcttcctccccccaaacacgtgttctcttttgtcaggaaactcagccagtggrctgtggcagagaaagtcctccactcagaggcagagactgagttaagtcataggtggccttaggcatctgcattgtttgcaggggttaagttttccttccagtgagggctggagggatgaattagctggtacctgaagccccgcttagctctgacactctgccaacatcctctgattctaggtgtggtgttgactgtcctttcaaggaaaaacttgcaatagagggaaaagccattaaagcagctccctgcttcatcattaagtcctgtcatccctaccagccaatcccagtcaaagaagttatgctttattcacttctgtggaattacaagtgagagacacttttaggacctgatggacaaagcaggagattcactgtcagctttcctggtcctctccttacttctgtgggccttgcaccgtcttagtttacacatctgccaaaggggtagaattacacttctttttacaggtaaatgtcaaggcacaatcagttttcaggaagtgcttcaagaccccaggtgaaatgaaaat

SEQ ID NO: 260242 - DNA, 605 bp, Homo sapiens
gaaagtcagtctactcccttcttcctccccccaaacacgtgttctcttttgtcaggaaactcagccagtggactgtggcagagaaagtcctccactcagaggcagagactgagttaagtcataggtggccttaggcatctgcattgtttgcaggggttaagttttccttccagtgagggctggagggatgaattagctggtacctgaagccccgcttagctctgacactctgccaacatcctctgattctaggtgtggtgttgactgtcctttcaaggaaaaacttgcaatagagggaaaagccattaaagcagctccctgcttcatcattaagtcctgtcatccctaccagccaatcccagtcaaagaagttatgctttattcacwtctgtggaattacaagtgagagacacttttaggacctgatggacaaagcaggagattcactgtcagctttcctggtcctctccttacttctgtgggccttgcaccgtcttagtttacacatctgccaaaggggtagaattacacttctttttacaggtaaatgtcaaggcacaatcagttttcaggaagtgcttcaagaccccaggtgaaatgaaaat

SEQ ID NO: 260243 - DNA, 557 bp, Homo sapiens
cagggaaggcatctctgaagaggtgacttttgggcagagatctgaagatgaagactagtcatatgtaaagtgagcattctgggcagaaagaacagtatctgcaagggccctggggtcttcacattagagctttacaggattagtttctggttccattggcataggacagccatgatccagggaacgtgatgttttgttaaacatgtgtggccacgttctaatatggactgaatgtgatcrtttgtgactttgtgtacagatggctgcttccttcaacaggtggtccccagacaaatatacatggctagatgtgtagttttaaatgagaattgtttccgctgcagaaattcactgccaatttattgaaatttatggagaggatgtttttaatctacagaatcatgcaaagtttggggtatggaagtggaacagcagcgttgctatatgaagaccagaaagtgcagacaaaggggttttcacgtcacaagccttgtctcctcctggcacaactgtctggttccagtagggggttgcctgggaaatttgcaatcaacttt

SEQ ID NO: 260244 - DNA, 497 bp, Homo sapiens
gctaatcaaaaaggaggtcaccaaataacagcatgaagcctgaagatacataaaggaggaagccccaatccctcttttctgtttgaatacggttttttttttttttttttttttgaggggaggagggagcatgcaaatgtgtttcaggtgttctagcatacttgctactcgctacacaggagtgcagaccgaagaatggagtcgagtacacccctaatttcctttatcaagggttcatatgacaaccttaggatatcaaacaaccaaactcacctcttgaaaaagtttaaggaagcagacaattcagaactgtcatggtttcctagcgcaaactgcagcaaatccagggttgctgacartattttgtcttatagatggatctcgaattccctgggttcgtttgagcgcatataaaacacctgaaacatatttgcatgtcccttcttccctcctccccagccccccggcaaaaaaaaaaaaaaaagtacactcaagca

SEQ ID NO: 260245 - DNA, 604 bp, Homo sapiens
tgtacagtaggttgtaccatccaagtttgtgtaaatgcactctgtgatgctcagacagtgatgaaatcacctaaggacacatttctcagaacatatccctatccttaagcaatgctttcctgtaactatatgggtatagatttatgtaacaccagcttcacaatcaagatacagaacaatttcatcacaccctgacactccatagatctaggctaatgtaaacatatatatatatatatatgttaacatatgtttgtgtgtatatatatgtttacatatatatgctatatactattatatatatagccattctaatagattccaatggcatctcattggggctttattttattttgaattttgtgaacttatttgccacctgtgtatattctctagggaggagtctgttcaaattacttgcycactttttttttattatggtgtattccttcttctgttgagttttgagagttgtttgtatattctggattcaagtcctttatacaatatgtggtttataagtattttctctcaggctgtagtttgtttttcattttcttaacagtcgttttcaaaaggaaaatctttttaattttgatgaagt

SEQ ID NO: 260246 - DNA, 542 bp, Homo sapiens
ctttgcccattttttagtggacttggttttattattgctgtggkttagttgttacccatgtcctatttcaacatcagatgaaccactcaaccatcttcccactggtaacagaaatgtgtgaatgagcatgtgtagcaatgggtagaaaacaagcatttatgaaacacttatttaatcctcacaataatttcatgaagagctatgatgcttatacatgggaaagctgaggttcaaagagattaagcagcttgcctaaggtcacgcagctggtacgcaggagaaaggtgtttggatcttagccctcaccatagcctatctctaagatgatgccactctgtctcccaggctgcctctctgaagaagcccaggctcctaaaacagagcaggaggacagccacagcaatgtcgaatccattattgtaatctgcaccaaagagacatccctaggtgaatgatgtcaccagaaggttcggaccaaggcccaccattaatctcatggttacaaacaatataggaagattatgctggcctccagcccagtt

SEQ ID NO: 260247 - DNA, 631 bp, Homo sapiens
aagactccatctcaaaaaaaaaaaaaaaaaaaaggtaaacatggccaagccaataaaaaaatcttattcagccatttaaatgatgtctgcaaaaccagtattaatatggaaaaatgtttatggtgtgttgaacaaaattttaaaagacaaatcctacttgaagtaatgttagtagtggctatgttaatgtgataggttgatttttttctctgtttcttttttaaaatatggttttattcatttcataatggaaaaatgcatacaattatttagtatttaaaagagtaaaagaacaataggatggtacatctatagtgcttcaagatgttacttggtttttatggctaatattttgcctttcaagcaaagtatgtgactacaaggcaggctggggtcaattagcaatcactaagaccctgtacctctctacaaaaactttgtaaaatcctaaaagctgtgatttctgcactttatgcttgccggttgtacatacakataagaaggagacatctgaaaataaatagaaatggaactggagtgaatgttagttgattctagatgaaaaatcattctgtttgaagattgttgtaagtctccaagtgaaccaaaaattgttcatttagtttgagac

SEQ ID NO: 260248 - DNA, 566 bp, Homo sapiens
caccattagctgggtgcctgctctgcctggggttggttccatgacacctgagctcccttctgagaggcagcatggttttacagtaagattgcagactccagagtcagatttcctggcttccattcccagctttattctatttcagttctgagacttactccctctgcagggttgccagatttagcaaataataatacagggcacccagttctatttgaatttcagataactaactaatctgcaaacaatattagggatgtacttatgctaaaacaatattcattgcctatctgaaatttaaatctaactgggtatcctgtattttacctggtaaccctattctttggtactatcttcctcatgatgctaacacacccaccttccaaagactgcactgaggtgagctagtatgtggaaagcacttargatgtgcctggtggatggtaagcctccagaacatgttggttagcatttctgtcttttgtgtttctcagatcaccagtgggcctctttatttcagggagtgtttactgacttgattttatattctaaagtgctgacctgtt

SEQ ID NO: 260249 - DNA, 551 bp, Homo sapiens
agttaggaaaaagttttccagtctccgaaagcaagtaggtgggtgatgcattgctgtctctctgactaaagtgttgtgggaagagaaggtggtggcttgttggcactgcttcttaagcaagaaaacatgaaaacacaatgttggttgccggaatgccaggtggcaaaatccaataattatactttaaagtagtactccatgaaaagaacatttctttagaataycaacttaagtttgcaagaattgtagagtaaaccaggtaaaaatgtccttccagcaccgtacattgactcaactgaactttggtttctattgatttatagtctgctttggtccaggaaaggattaaggctgcatacaaagattataatatacaagattaaattaaacctcaaatgagaacatctgtatggttgttatagattaaaatttatcataaattaaaaattatcatatatttagtaaaaactattatgctgttgaaggtacatgagtattctttgtaatgtaatcagaagtatcttttacaataaatagcaacaagaaacatg

SEQ ID NO: 260250 - DNA, 646 bp, Homo sapiens
atgaaaatcttggggaaaatgtataagcaaaaggaagagcaagccaggggtcctgggaagaggaagagcttggcatgttctgggaactgaagagagagccagtgtgaatgcagtaaagggaataaaagggaggtggtgagaggggccagatcaccttaccccatgtaggctatgctgtggagcttatatttttttccagttgtgactaggaagccactggatgatcatgtaggtcaatgtcaatgtctggcttggctctcaaatctcattctggctgctgtgatgactatgcaggataggggttctaaagcagaagcaagaagaccatgtaaaagactaatgatgctgaccaagaaagaccagggtggtatgactagagctatagcagtgggtgtaataagaagtcgcttgggccaggtggacatrgtggctcatgcctataatcccagcactttggggcactgaggcaggaagttcacttgagctcaggagtttgagaccagcttggagagagagggagataaatcactggacaggggatgtattttggagataaccaataagacctgctgatagactggatatgggaaatacaaggaaaaggaatcaaggacactatctagattttttgttgagacatgttggt

SEQ ID NO: 260251 - DNA, 608 bp, Homo sapiens
cacctggttaattatcctgagattcccaaaaggactgtagtgctccttcctcagtgasctcagaattccttcatatagctaatattttaggattttatagcctaggaaagtctcattgctctcttcttgagcaacagcctaagatgaagggataagcttgacatcaacaattatctaaaacaaaatttgaaccagagactaaattctcgtgacaaaacttgaaatcagcattattgtctcatcaatattttcttgatattttataaattaggcagctgaggcccacagaggctacatgactgtgatcctaaagtctgtacgtgataagacccattctctagaccttatacttactatcagtgtttcttggaaaaaatgatttaacctgtctgggcctgtttccttatctataaaaaatggcatgaaaaacatccacatagaattgaagattgatgaactcatctgtgcaatgtgtctggcccataaaatgttctcagtaaacatgagttctagataattatgagtgggcattgttggttagaatggaaggatgcatataaatctgccccactcctaagagaaaaactcagactatcacaattttggtt

SEQ ID NO: 260252 - DNA, 467 bp, Homo sapiens
tgacagtgtggtgtttgtgaaaagaacctcagtctgagctgggtttcaattgcagcactccctgctttgaaacttaccaggtgtgtgactgtgggcaagttacttaacctctctgaacctcactttcctcaacagtacagtgaggatgatgatacctaccaagcagggcagttgtggagattagcagaactcaatgcagaatcacctagcaccggggctagcacatcaragatgttccattatggaaaagataattattatcaccacatatgaaagaaatgaagatttgtccaccaactttctaacctttgaagacacctttactttttaaggctgttaataattgctcccctgttaaaggcatcttgcaggaaattgggtctttaatcagtaggttgccatttgtttccttaatactgtctagcattctgcagtgggtttgagggggaaaatgccagaggaaattt

SEQ ID NO: 260253 - DNA, 438 bp, Homo sapiens
cagggaatgggagagactgctcggagatcaacaactgcctgctgcccagtgcaggcggctgccacgacaacgcatcctgtttgtatgtgggtcccgggcaggtaggttggatgtcatgagagcaaagagaaagcaggaatcctgcagtgactttgctttcccctcaggacacagaagtactttggctagaacttactgcagcttttttcagtcattcgtggcagtgaacatgggytcattgccacaacaaacctatgatgtattattatcccatcttatagaaaaggaaattgaggcaatgagaagctatttgcataaatcacatagaaaataaataatagtgcaagatttgcatccagtctgactccagggccgccctcttagtcaccaccctggatcaaccttatatttctatagctctgcagtgtattgatcact

SEQ ID NO: 260254 - DNA, 557 bp, Homo sapiens
ccagcttccctgaggaggtgggactggacatgatgagtggayagggataatttaggaggtggtgaggaagaagagcagccttccttatttccttattaaataagaaaaatccctatttgctgaaaattcaaacaccgttttcagttcaatcgtgtcatttcacttttccatcaaaaccttctcgtccatagccacatacttaatacagcctcacacagagactctcccatatacaatcctcccccatagcagagctgctgtgtgttttatgcatacccctggaattacacacttgagctcataggaacaagcatgcaggtgtcccaggaagctggaagaatcctcatgatcacccctcctctcctccccccgtccctggcctttccttggttccagtagctaagatgtcagcagcagggacctagaggggtggattatctctttcttcctcctcttctccccttctctattttccctgattcctaacatctaggggtaaatagtcaaagtttgtcaaaggattttgtgaattaattcaaaagcttcaatcatgccac

SEQ ID NO: 260255 - DNA, 580 bp, Homo sapiens
tccttctgaaaaggattgagctcaactgtcttcagaaatgcaaaactgaggttgggcaggtggctcacgcctgtaatcccagtactttgggaggccaaggtgagcagatcacttgaggccaggagttcgagaccaacctggccaacatggtgaaacctgtctctactaaaaatacaaaaattatccgggtgtggtggtgtgcacctgtaatcccagctactcgggaggctgaagcaggagaacctgggaggcggagktttcagtgagccgagatcgtgccactgcacttcagcctgggtgacggagcgagactcagtctcaaaacaaaaatgcaaaactgaaagcattttcctttcccccttgggcaaagttgggatatggctgctagcacttgctatctatttatatctttggactgacaaagcagctttctcctgcagagcttcagacccttagtacaaaatgacatggggattaatgcatgcaatgataacacaaataaacagaaagaagaagctccaggataggcacagagggaaaatatatttgaaaaacaaatgctgagttggaaatccaaggc

SEQ ID NO: 260256 - DNA, 615 bp, Homo sapiens
acagtatcactccaatctcggcctccctcttcacatgcctcttcacctaatgtctgtggcatctccccttcttatgaggacaccagtcaaattgaattatgggctcaccttactccagtatgacctcatcttaactcattacatctgcaatgaccctatttcccaataggggcattctgaagtactggggatgaggactccaccatattattttgggagacaaaactcaacccatgacaataatactttaaaaattattgaacaaaacatcaaaawgataaataacagcaggatgcagctctgcacttgcacaaccctgtttcactctcctcaccctaatcctggccctgccagacaatgtctttatctaaaatttagttgtgtagttgttggtattgttacagggcaccgtaaaagatgtggggaaatacagaggtggggaggtcattccaagcagttccaatctaataggggagaaaaaatacacagattgagaaagaaaacagcagccctgacagctgtcccctggctgctggcctagttgctaccagagaggctgtggtgttctgctgctgagcataaacgatgtcacagaatatcaccatcagaaaaaag

SEQ ID NO: 260257 - DNA, 615 bp, Homo sapiens
acagtatcactccaatctcggcctccctcttcacatgcctcttcacctaatgtctgtggcatctccccttcttatgaggacaccagtcaaattgaattatgggctcaccttactccagtatgacctcatcttaactcattacatctgcaatgaccctatttcccaataggggcattctgaagtactggggatgaggactccaccatattattttgggagacaaaactcaacccatgacaataatactttaaaaattattgaacaaaacatcaaaaagmtaaataacagcaggatgcagctctgcacttgcacaaccctgtttcactctcctcaccctaatcctggccctgccagacaatgtctttatctaaaatttagttgtgtagttgttggtattgttacagggcaccgtaaaagatgtggggaaatacagaggtggggaggtcattccaagcagttccaatctaataggggagaaaaaatacacagattgagaaagaaaacagcagccctgacagctgtcccctggctgctggcctagttgctaccagagaggctgtggtgttctgctgctgagcataaacgatgtcacagaatatcaccatcagaaaaaag

SEQ ID NO: 260258 - DNA, 611 bp, Homo sapiens
ctgttctttaagaaattgctttagtggaacttttttctacagtaaagacacaaaaaaaataccaaagtaataaaatgtatgagctaaaactataaaacttaggcataacataacagaaaagtcttgtgacattagatttggcaatgatttcttgaatacaatgccaaaagcagaggcaacaaaagwaaaaataaattgtacttcatcaaaattaaatacttctgtgcaacacggaacactgtcagcagagtgaaaaagcaacccacaaaatgggagaaaatatttgtaaatcatatgcctgatgagggattaattcacagaatatataaagaattcccataacaaaaaacaaccagattaaaaaatgggcaaaggattttattagacattttgctgaagaagatatacaataagcacataaaaagatgttcagtatcattgatcattagggaaatgcaaatcaaaaccacagtgaaataccacttcacatccattaggatggctactttcaaaatacaaaaggttggcaaggatgtggagaaattggaacccttgtgcactgttggtgagaatgtaaaatggtacagccactgtggaaaacagtacagtgg

SEQ ID NO: 260259 - DNA, 611 bp, Homo sapiens
ctgttctttaagaaattgctttagtggaacttttttctacagtaaagacacaaaaaaaataccaaagtaataaaatgtatgagctaaaactataaaacttaggcataacataacagaaaagtcttgtgacattagatttggcaatgatttcttgaatacaatgccaaaagcagaggcaacaaaagtaaaaataaattgtacttcatcaaaattaaatacttctgtgcaacacggaacactgtcagcagagtgaaaaagcaacccacaaaatgggagaaaatatttgtaaatcatatgcctgatgagggattaattcacagaatatataaagaattcccataacaaaaaacaaccagattaaaaaatgggcaaaggattttattagacattttgctgaagaagatayacaataagcacataaaaagatgttcagtatcattgatcattagggaaatgcaaatcaaaaccacagtgaaataccacttcacatccattaggatggctactttcaaaatacaaaaggttggcaaggatgtggagaaattggaacccttgtgcactgttggtgagaatgtaaaatggtacagccactgtggaaaacagtacagtgg

SEQ ID NO: 260260 - DNA, 590 bp, Homo sapiens
cttaatgagcatatattctaactggggaggtagacaacaaacaataaacataaaacacaagtgaattgtatggtcacttagaaagtgatatgtaccgagggaaataaaagatcaggatactgggaagctggagccgtgrgcaaggagggatgcatgttgaggtttttagtagtgtagtctgggcaggtctctttgagagagtggatttgaataagggcttgaagaaaatgaaggctgtttaggggaagagcgttcgagatcttgacaggtcactaaggcagagatgtggcgggcaggtgtgtgtgttaccacctgctctgtagagctggtgtcatcccagtttctacagcatggccaagtcttttacatataataagaagccttgagtgatccaatgtgtccacgttatgttacgccagagacgacaaatccatataatggaactttgagaatttggttgtggtccaagtatgctgtggttgtgtgaatctcagctgtggcctttatattcactcttcagagcttctgtggccatggccacctctcagtgtaacaacaaagagcccccagctcaggtaagggttttaatg

SEQ ID NO: 260261 - DNA, 590 bp, Homo sapiens
cttaatgagcatatattctaactggggaggtagacaacaaacaataaacataaaacacaagtgaattgtatggtcacttagaaagtgatatgtaccgagggaaataaaagatcaggatactgggaagctggagccgtgagcaaggagggatgcatgttgaggtttttagtagtgtagtctgggcaggtctctttgagagagtggatttgaataagggcttgaagaaaatgaaggctgtttaggggaagagcgttcgagatcttgacaggtcactaaggcagagatgtggcgggcaggtgtgtgtgttaccacctgctctgtagagctggtgtcatcccagtttctacagcatggccaagtcttttacatataataagaagccttgagtgatccaatgtgtccasgttatgttacgccagagacgacaaatccatataatggaactttgagaatttggttgtggtccaagtatgctgtggttgtgtgaatctcagctgtggcctttatattcactcttcagagcttctgtggccatggccacctctcagtgtaacaacaaagagcccccagctcaggtaagggttttaatg

SEQ ID NO: 260262 - DNA, 570 bp, Homo sapiens
cccatttttattttaaaagatatttgcaaaagaaaggaagtcaaaacctgggctattaggacccccaaatacaattttctttaagaagaaattttgttacaatgtctcaaagactgtagttattgtttggcaaccaaaataataattaaatattctaaaaatttgtcttaggatggaatatcaaactttmaagtggtagatttaagacacatcagggtaaagaaactgtgtaaagttaattgtgtagagatgcaaatacacatatacataaaaattaattctgaccaggttttactgtaagcaaaactactagcaaagtctgaatcaatggtatagttagatttctgcaatcaagcatagcatttgatagctgaaattgaacttttatccttagtatagatactaacactcaaatagtgactgagtcatttctacctgtggaaattatgtaaagtcttctttttttggtaggaaaaaatcaggtattttaatttatgaatttgcaattcattccccatcttcttagatgtaatgaaaacatctccttaggatccacataaaaggagagat

SEQ ID NO: 260263 - DNA, 544 bp, Homo sapiens
tcggcctcccaaagtgctggaattacaagagtgagccaccgtgcccaactgagaacaattttaattaaaacacaattaattgttatttttttctgatcttccatcttacaaaagttcccaatgtaccctaaattccaacttgcaactttcattttaaatgaagatcctaatatggtaactgaaaattgcagggtagcttacaatcccatttctcattattctttttttcctatgtcatacctttgttatactgggtattagaagaaaataaaaatgtcaccatgctttttatattcttttccacttttttccttagggccttccctacctcatctttttaggatgcattaatgcagataggagagtggaaaaatgataygtaatcacatgcctctcctccagttcttgattatatcccatctggttgtacagacttcacagtgccagggtgcttaagctcaagtgtgttttttttttgtttttgtgagacagtctcgctctgttgcccaggctggagtgcagtggcttgaacacagctcattgc

SEQ ID NO: 260264 - DNA, 524 bp, Homo sapiens
atcattgctaagaatgtcaattttaccatagttttctctaatgggggcctgagatgatagaagatgatatgaaaagcaggaaataaattacactttttcgttaaaaattttgtttaaaaaccatatgagctgttttcataaattgttaaaacaatctatccaggccataaaatgaggattcctcatacccccacattcctgctaccttttctcccaagttccttccagcgttggccagctcataaaaaatcaagcatttattaagcacctactatatgctgcgtacaatcagatatatgatagaccccattcccaatcacatgtatgataagtccctatccccaaggarctcacagactaatgagggaaattgacatgggagcagaggagtaaaaacaattgtacctgtgagcccaggtgaggacactgggactttgaggagttttgcagcctgcccaaagagaaccagctaacaagtgtggagccacacaccaggaaacagggactgtctcactgcagacccc

SEQ ID NO: 260265 - DNA, 515 bp, Homo sapiens
agagcgtggcttaagagcaacacccactggctcactcatgctattactaccttgtatcttcttatatatctatttgctatcacctgcgtcctctcaaccagaaagtatgccccttgagaacaaggattacacagccttatgcactgctgtatccctggggcctagcccaaaacccctgcacacagcaggagtccagttgatgcttggtgagtcgatgaatgctcagaggttcaagtcactctaaagaaagcagaccagttggtggggctttgcaaattataaggtggtccagcagataaccctgattcctggggcagtaaaaaaacaaaccaacaacaaaaacaaaccagaggggttttgttgtggggagrcctcttcctctggacagtcagggccgccaccctttgacaagagtcagagatgctgtgaggagcctgccatgattctggcagccctgtggggagctaattaggattttccatggggcggggctccattgcgtctttctctgtgct

SEQ ID NO: 260266 - DNA, 589 bp, Homo sapiens
tccttaggaaaggaggcagggaggcygggtgcagtggctcatgcctgtaatcccaacactttgggaggccgatcacaaggtcaggagatcgagaccatcctggccaacatggggaaaccccatctctactaaaaatacaaaaattagccaggcgtggtggcacatgtctgtagtcccggctacttgggaggctggggcagaataatcccttgaacccgggaggcggaggttgcagtgagccgagattgcgccactgcactccagcctggtgacagagcgagactctgtctcaaaagaaaaggaggcagtgactcggagtcagaaaagatgtgacaatggaagcagagttgaggagatgcggccatgagccaaaaaattcagaaggcatctaatagctaaaaaaggcaagggacagattctccactggaacctctggaaggaactcatttctgcggacaccttgattcttgccccaggagacccatttcagactcctgacctccagaacagtaaaataacacatttatattgtttcagcctctactttgtagcattttgttacagcagcaattggaaaccaatacggtgc

SEQ ID NO: 260267 - DNA, 589 bp, Homo sapiens
tccttaggaaaggaggcagggaggctgggtgcagtggctcatgcctgtaatcccaacactttgggaggccgatcacaaggtcaggagatcgagaccatcctggccaacatggggaaaccccatctctactaaaaatacaaaaattagccaggcgtggtggcacatgtctgyagtcccggctacttgggaggctggggcagaataatcccttgaacccgggaggcggaggttgcagtgagccgagattgcgccactgcactccagcctggtgacagagcgagactctgtctcaaaagaaaaggaggcagtgactcggagtcagaaaagatgtgacaatggaagcagagttgaggagatgcggccatgagccaaaaaattcagaaggcatctaatagctaaaaaaggcaagggacagattctccactggaacctctggaaggaactcatttctgcggacaccttgattcttgccccaggagacccatttcagactcctgacctccagaacagtaaaataacacatttatattgtttcagcctctactttgtagcattttgttacagcagcaattggaaaccaatacggtgc

SEQ ID NO: 260268 - DNA, 533 bp, Homo sapiens
ttaagttctttctgtgcatttcacgtcccctctgcacgcccttctcatggggccaatcactgttgggaacactcagagataataaacatttccctgctgtatcatcctagaggatctgtcatttattaactgtgtaccgttggcaagaacctctctgcacttgtttcctcatctgtatgatagaaataatacatctcgggatggtagtgaggaagggagggttatataaaatgacttcyactgaagtgcctgcctggcattcagcattgtatagagccggaactccaaatgtcttctgcttgtacctgttttccttctccccaagtcacccagctcacaggtggccgcaagctctgaactggaactgtttctaacacatctggctgcttcccctagagacagacatgcaaatagcttcatatcctcttgtagctgtaaccatttgcagacaccttattgtcttacagctttttaatttgcctgcacaaatagacctgcctggccaacttggagggaattttaatatctaagtg

SEQ ID NO: 260269 - DNA, 484 bp, Homo sapiens
cctccatacctccaattctgatactccagtagrtccccatttttatttctctatgtccattgctaacccttgttcatatgtatacataattgaatcataacagataaactgttacgtgttgttttcttttcattactattatcttaagcatcctccctttcccccaattctgtataccctataattactgtttgtgatgacccttctttattacccttgtgagtacgcttctttattccctttccaaactgtgaattgttttagggtagaaactgtgtccttttttttttttttttttttttaagacagagtctcgctctttcacccaggctggagttggagtgcagtggcatgatctcagctcactgcagcctcgacctcccaggctcaagcagtcatcccacttcagcctctccagtagctgggactacaggcatgcaccaccacacctggcttaatttttgtatttgttgcagagatgaga

SEQ ID NO: 260270 - DNA, 340 bp, Homo sapiens
ttttgcaaacaactcagtcctatcatgatttatttttaacaaaaatgagaactggagagaaattatgtttcaagacttatatatttgtcattagattttagactcattcgttgtttttaagttttkgcccacattttaaactaacactgcttattcctgtgaaccaaccagcaatctctggctgcagctcagaagcagcaaaagggatgagtaatgtaaaaatctggatcaatattctagttctgggcaattaccctgcaaatcctgccagatgattagactaaataaggtgcccataacctggaggtttcttttttgggaaaataagaccaagggagct

SEQ ID NO: 260271 - DNA, 579 bp, Homo sapiens
aactatggcattaagatcacatcatttacacttgcaaatgcattggtcccctcgtacctgcaatttcactttytgtggtttcagttacccacaatcagccatggcctgaaaatattaaatggaaaattccaaaaataattcatgttttaagttgcacgctgttctgagtagtattataaaatttcacaccactctgctccatcccactgtacaccaaaagtatctgagaaaggacttaatcaattttgaagtttattttgccaaggttaaggacataacccaggagacaggtatgtgtctttttccaaagatgatgttgaagtcttcaatatttaaaagggaaaagcaggctgcaggggaaagacagaggttatggtcattactgaatccacatgtaagagaaaaggagcaggtaggggaatatttaattatgtattcatctcatgctaagtaaatctgcaggttacataagataaggtgaacatagagtagctacctgtggagattttttaccttttatctgtaactatctgcttaggaacaaaaggaaaggcaacttcttgcatgactcagctttta

SEQ ID NO: 260272 - DNA, 579 bp, Homo sapiens
aactatggcattaagatcacatcatttacacttgcaaatgcattggtcccctcgtacctgcaatttcactttttgtggtttcagttacccacaatcagccatggcctgaaaatattaaatggaaaattccaaaaataattcatgttttaagttgcacgctgttctgagtagtrttataaaatttcacaccactctgctccatcccactgtacaccaaaagtatctgagaaaggacttaatcaattttgaagtttattttgccaaggttaaggacataacccaggagacaggtatgtgtctttttccaaagatgatgttgaagtcttcaatatttaaaagggaaaagcaggctgcaggggaaagacagaggttatggtcattactgaatccacatgtaagagaaaaggagcaggtaggggaatatttaattatgtattcatctcatgctaagtaaatctgcaggttacataagataaggtgaacatagagtagctacctgtggagattttttaccttttatctgtaactatctgcttaggaacaaaaggaaaggcaacttcttgcatgactcagctttta

SEQ ID NO: 260273 - DNA, 316 bp, Homo sapiens
caaaggccttagcacattcttgacattcatagggtttcaccccactgtgaattctctgatgtgcratgcaatgtgatcgaaaactgaaagccttcccacattccttacatccatagaccttctctccattatgagttttctggtgttgatcaaagtcctcattttgatcaaaacacttgccgcattcctcacatatatagaatatttgctcatttagaattttgtgatgtataccaaggaggttattgacatcagtattccctgaactctcttctactgagatcatctcatccttgacaatcacttctataatatc

SEQ ID NO: 260274 - DNA, 509 bp, Homo sapiens
ctgcctgagttgtacctgcattgacatatcagatgaactggactttcttcttcaagcacatctcaccacctctttagatgcctttctccacagagttgatagaaatgagacagccaaatgctgctcaggtcattgtgcacagggggcttgcctaacatgcccacrgcgaagaattctgtcccttaacacatgtgcagtaagggaaataaatcaatgtggagtggctcagactaagggcccacctgtgcactgggagactggggtgtagccaccgggaattcacaccttatgcggtggggagaagcctggcctcttcagctggtgtgtggtggcctggtattcaatctgtgaggtgggagcctgttggcaagaccctcttttttttctctgagcttcttatcaataaattccactctcctcacctttcaatgtgtccatgtgcctaatttttcccagtcgtgagaccagaaaccagattttagctgaactaaggagcaaaaaatcctcat

SEQ ID NO: 260275 - DNA, 606 bp, Homo sapiens
atttcgtggcgttcagcacaggcagcagccctgcccacaggcaaagcaacttctacacttctccctaggttggcccatgggaagagtccaccttgcctcagagcctgagggtcagaggaattctgattgctttcctgagacccctgggaaaggtttgagcagtgcagtcagggagccagactttgtcaggcctctgggaagacagagagcaacaggagggaccaaggcccaaacccggaagtaaggctggggtggagagggctttatcctggcctgggctgtgagagctgctgagctgctctcaaactatattgcacctaagacagtgacagagaaccaggtacctgcagctagctcttgccctctcctttggacataggcttcagggcactacttgttatattcctgccttttgcggcaagtacacactcacacatacacagagaaaggcatgaaagacaaataggactgggcgaagtggctcatgcctgtaatcccagcactttgggaggccgaggtgkgcagatcactttagctcagaagtttgagaccagcctggccaacatggcgaaaccctgtctctattaaaaatacaaaaatacaaaa

SEQ ID NO: 260276 - DNA, 546 bp, Homo sapiens
gttttctgagacttattattctcctagtgcctacctgtctgtgaatgttctgggaaggtctgaggatgagatttggagatatggagatttggagcggcgaatttatctcacatgccagttagacactttattctgtctaattcaggacaaagactgatgatttggggggctaatcaggggattcttttcaagaatacagtgtgatgaagaaggttatcaagacagactgcaaactcttttctctagtaacctctgaaaatagaatcataatgtgaagtacaatacctgcaattatggtagcacacattaaatgaaataggaggataatataagagcaggcccatagttgtatatattagtggactaaatgagtgatatctttattgtgatcatcatggtcacatttattgacagtcagtttagggcaaaacactcctgggagaggggagcatcaagccatctgaaattggacggaattaaagagttagaaaaggaacagagcaggtgtcctsgtatagagtggacttgaacagggtgaaagaatgg

SEQ ID NO: 260277 - DNA, 562 bp, Homo sapiens
tcaggatggaggctgaaggccagacaggatcctccctgtcctgtggcataaattcctctcagaactcacagatgatcagtcagtaccgcaggcagctcctgtcattccactgtgtacatctccaagcacttctcattgccctgacctatgagctccmctgggcaccggttcgtgtagtccacaggggcctcatctaggtagcagaagtctccagggctgggacccttggccagggccatgtaggcatacatgttgtacttcttcaaaaatcttgcaatggcctcgttttcctctggactcctagggacagcaatgcagctgcctgctctggcacatgcctcactaatggcatctaaatagaccaactgcctgtttgtgaagaagaccttctctcccactgccggtatggagccctgaagactgagggctgagagcagaggagtctgggtcaggcctctgatcactttgtctctaagccacctccctcacctgggctgtctgccatcaggctctctgcagcctctccatctctgcctctgtgtcgtttgtccctcccccaatc

SEQ ID NO: 260278 - DNA, 562 bp, Homo sapiens
tcaggatggaggctgaaggccagacaggatcctccctgtcctgtggcataaattcctctcagaactcacagatgatcagtcagtaccgcaggcagctcctgtcattccactgtgtacatctccaagcacttctcattgccctgacctatgagctcccctgggcaccggttcgtgtagtccacaggggcctcatctaggtagcagaagtctccagggctgggacccttggccagggccatgtaggcatacatgttgtacttcttcaaaaatcttgcaatggcctcgttttcctctggactcctagggacagcaatgcagctgcctgctctggcacatgcctcactaatggcatctaaatagaccaactgcctgttkgtgaagaagaccttctctcccactgccggtatggagccctgaagactgagggctgagagcagaggagtctgggtcaggcctctgatcactttgtctctaagccacctccctcacctgggctgtctgccatcaggctctctgcagcctctccatctctgcctctgtgtcgtttgtccctcccccaatc

SEQ ID NO: 260279 - DNA, 562 bp, Homo sapiens
tcaggatggaggctgaaggccagacaggatcctccctgtcctgtggcataaattcctctcagaactcacagatgatcagtcagtaccgcaggcagctcctgtcattccactgtgtacatctccaagcacttctcattgccctgacctatgagctcccctgggcaccggttcgtgtagtccacaggggcctcatctaggtagcagaagtctccagggctgggacccttggccagggccatgtaggcatacatgttgtacttcttcaaaaatcttgcaatggcctcgttttcctctggactcctagggacagcaatgcagctgcctgctctggcacatgcctcactaatggcatctaaatagaccaactgcctgtttgtgaagaagaccttctctcccactgccrgtatggagccctgaagactgagggctgagagcagaggagtctgggtcaggcctctgatcactttgtctctaagccacctccctcacctgggctgtctgccatcaggctctctgcagcctctccatctctgcctctgtgtcgtttgtccctcccccaatc

SEQ ID NO: 260280 - DNA, 593 bp, Homo sapiens
ggctctcatccatttattcattaatctatttaacaattacttattgccagaaatggtgcaattttctgggattcaatagaaagcaagattaggcagagaccttgctttcytaagtcattaggagtggatcgtgtatacttctgtcatctctgggccattcagaaacatcagaaaaggcaaccatcattcctttccgaagacctgaatgtccacactcttctcttcatcaaaaggatatgacaactgtaaatatatatgcacccaacaccagaacaccaagataaaaacaaatattattagatgtaaaaggagagacagactccaatacaataataattggggacttcaacagtttactctctgcagtgttagatcatttagacagaacatcaacaaaaaaaagttggtttaaactgtgttgcagaccaaacggacctaacagacatttgcagaatatttcatctgacagctacagaatacccattcttcttatcagcacatggaacattctccaggatacattgttttaggctacaaagtaagaatcaatgaatgaaaatattaaaatgatatcaagaacttttttgaccaca

SEQ ID NO: 260281 - DNA, 640 bp, Homo sapiens
tccctcccaaccagggcatattgagagagaaaggtaaggaagtacctttaccagtactaggtcccctgggttgaatagaggtgggcctggttcgtgggattgggccttcaacagttgtttcagttcctgttggaaatggaccaaagaggttatgtgcttaattaaaacaaaggtttcttggtctagcaagaaatcattcatragaaaatgtcatccatacatagtctcaaagagactcaaacccagacttgaaggagtgtttctgatatatagcaggactatggaaagaagagtagtccaggggagatgagtctcctgagacagtttcttgaggtgccttttgataatatcatttttgtcttttctacctttcctgaggattgtggtctccaaacacaatgaagatggtactgtatgcctagtgcctttgagaccccctgggtgacagctgccttgaacgaggggccattattgctctggaggtacttagggagtccaaagtgaggaattatctcattgattagtactattatcacctcagaggctttctctgtctgacatggaaatgcttctactcagttagtgaaggtatctatccacactaggaggtactggatgccccttacctttggcatatggg

SEQ ID NO: 260282 - DNA, 640 bp, Homo sapiens
tccctcccaaccagggcatattgagagagaaaggtaaggaagtacctttaccagtactaggtcccctgggttgaatagaggtgggcctggttcgtgggattgggccttcaacagttgtttcagttcctgttggaaatggaccaaagaggttatgtgcttaattaaaacaaaggtttcttggtctagcaagaaatcattcatgagaaaatgtcatccatacatagtctcaaagagactcaaacccagacttgaaggagtgtttctgatatatagcaggactatggaaagaagagtagtccaggggagatgagtctcctgagacagtttcttgaggtgccttttgataatatcatttttgtcttttctacctttcctgaggattgtggtctccaaacacaatgaagatggtactgtatgcctagtgcctttgagaccccctgggtgacagctgccttgaacgaggggccattattgctctggaggtacttagggrgtccaaagtgaggaattatctcattgattagtactattatcacctcagaggctttctctgtctgacatggaaatgcttctactcagttagtgaaggtatctatccacactaggaggtactggatgccccttacctttggcatatggg

SEQ ID NO: 260283 - DNA, 580 bp, Homo sapiens
ggcacatgtcccctttggttgatgatatccactctctcatttcctataaagctccctgattgacatggtggggctctgtcctcagagcagcccttgtttccccagytgcttcttgaccatcttgcataatgtctattttgtgacaggcacttgctgtaggattgggacctagagtgccctgaggcaggattctgaccctcaaaatgggaccttttttggtgattgatcctgtccagatgagacttctcttggtttgagatcttccactgagaggccgtttcaccaaccaggctctgaaatttctgctcagcctgagtctggagggattcagctcctactccccctcctggaggctgcccagatgccccccagctctgtgcccctacccagccatcagagtcccttccagcctttgtccaggctggcctgtcctccaggacacttggcagctgggaccccacaggactctccctctgctctgctccatcctcgaatcctaatgtcccggctcttgccgtccaacactgtgtctgcccttgctatcccagccgcagtcccttaactcttcccttcctccaag

SEQ ID NO: 260284 - DNA, 580 bp, Homo sapiens
ggcacatgtcccctttggttgatgatatccactctctcatttcctataaagctccctgattgacatggtggggctctgtcctcagagcagcccttgtttccccagttgcttcttgaccatcttgcataatgtctattttgtgacaggcacttgctgtaggattgggacctagagtgccctgaggcaggattctgaccctcaaaatgggaccttttttggtgattgatcctgtccagatgagacttctcttggtttgagatcttccactgagaggccgtttcaccaaccaggctctgaaatttctgctcagcctgagtctggagggattcagctcctactccccctcctggagrctgcccagatgccccccagctctgtgcccctacccagccatcagagtcccttccagcctttgtccaggctggcctgtcctccaggacacttggcagctgggaccccacaggactctccctctgctctgctccatcctcgaatcctaatgtcccggctcttgccgtccaacactgtgtctgcccttgctatcccagccgcagtcccttaactcttcccttcctccaag

SEQ ID NO: 260285 - DNA, 580 bp, Homo sapiens
ggcacatgtcccctttggttgatgatatccactctctcatttcctataaagctccctgattgacatggtggggctctgtcctcagagcagcccttgtttccccagttgcttcttgaccatcttgcataatgtctattttgtgacaggcacttgctgtaggattgggacctagagtgccctgaggcaggattctgaccctcaaaatgggaccttttttggtgattgatcctgtccagatgagacttctcttggtttgagatcttccactgagaggccgtttcaccaaccaggctctgaaatttctgctcagcctgagtctggagggattcagctcctactccccctcctggaggctgcccagatgccccccagctctgtgcccctacccagcyatcagagtcccttccagcctttgtccaggctggcctgtcctccaggacacttggcagctgggaccccacaggactctccctctgctctgctccatcctcgaatcctaatgtcccggctcttgccgtccaacactgtgtctgcccttgctatcccagccgcagtcccttaactcttcccttcctccaag

SEQ ID NO: 260286 - DNA, 580 bp, Homo sapiens
ggcacatgtcccctttggttgatgatatccactctctcatttcctataaagctccctgattgacatggtggggctctgtcctcagagcagcccttgtttccccagttgcttcttgaccatcttgcataatgtctattttgtgacaggcacttgctgtaggattgggacctagagtgccctgaggcaggattctgaccctcaaaatgggaccttttttggtgattgatcctgtccagatgagacttctcttggtttgagatcttccactgagaggccgtttcaccaaccaggctctgaaatttctgctcagcctgagtctggagggattcagctcctactccccctcctggaggctgcccagatgccccccagctctgtgcccctacccagccatcagagtcccttccagcytttgtccaggctggcctgtcctccaggacacttggcagctgggaccccacaggactctccctctgctctgctccatcctcgaatcctaatgtcccggctcttgccgtccaacactgtgtctgcccttgctatcccagccgcagtcccttaactcttcccttcctccaag

SEQ ID NO: 260287 - DNA, 645 bp, Homo sapiens
ttattgttgtaagccctgagagggagatttactattgtgttagctgactgatacaatatcaatgattaatagaaaaggtataagaaattaacaaatcaggaaagaaaagagattattatactaaaatagatagtactaacattataaaattataccatctacagtagattttatagcaatayattagaaaactagttaaaatacataatattataagaaagtttataattacttacattggccctagaagtgttagaataataaatatattattttatcacataaaatattaaaatggaagtaaaaaattatcaaccatttctccatcaacaaaatggttttgtggcgagttgtatcaagtcttcagagaagagataatttctctgctttagaaatggtttgtgtctacagctacttagctaaaatgattagccaaatatgtaacacagaatgcacaaggacagaaaaaaagaaaggaactctcagccaaccccatctgtaagtacagatgcaaaaatacaatgtaaaaaatagctattaagaccagcaatgtagtcatggttaatagaagtctctggaatctgatttcctacattcattagcccatgaattaactgcataatatttggcaaatcactttgacct

SEQ ID NO: 260288 - DNA, 543 bp, Homo sapiens
aggtataagaaattaacaaatcaggaaagaaaagagattattatactaaaatagatagtactaacattataaaattataccatctacagtagattttatagcaatacattagaaaactagttaaaatacataatattataagaaagtttataattacttacattggccctagaagtgttagaataataaatatattattttatcacataaaatattaaaatggaagtmaaaaattatcaaccatttctccatcaacaaaatggttttgtggcgagttgtatcaagtcttcagagaagagataatttctctgctttagaaatggtttgtgtctacagctacttagctaaaatgattagccaaatatgtaacacagaatgcacaaggacagaaaaaaagaaaggaactctcagccaaccccatctgtaagtacagatgcaaaaatacaatgtaaaaaatagctattaagaccagcaatgtagtcatggttaatagaagtctctggaatctgatttcctacattcattagcccatgaattaactgc

SEQ ID NO: 260289 - DNA, 645 bp, Homo sapiens
ttattgttgtaagccctgagagggagatttactattgtgttagctgactgatacaatatcaatgattaatagaaaaggtataagaaattaacaaatcaggaaagaaaagagattattatactaaaatagatagtactaacattataaaattataccatctacagtagattttatagcaatacattagaaaactagttaaaatacataatattataagaaagtttataattacttacattggccctagaagtgttagaataataaatatattattttatcacataaaatattaaaatggaagtaaaaaattatcaaccatttctccatcaacaaaatggttttgtggcgagttgtatcaartcttcagagaagagataatttctctgctttagaaatggtttgtgtctacagctacttagctaaaatgattagccaaatatgtaacacagaatgcacaaggacagaaaaaaagaaaggaactctcagccaaccccatctgtaagtacagatgcaaaaatacaatgtaaaaaatagctattaagaccagcaatgtagtcatggttaatagaagtctctggaatctgatttcctacattcattagcccatgaattaactgcataatatttggcaaatcactttgacct

SEQ ID NO: 260290 - DNA, 645 bp, Homo sapiens
ttattgttgtaagccctgagagggagatttactattgtgttagctgactgatacaatatcaatgattaatagaaaaggtataagaaattaacaaatcaggaaagaaaagagattattatactaaaatagatagtactaacattataaaattataccatctacagtagattttatagcaatacattagaaaactagttaaaatacataatattataagaaagtttataattacttacattggccctagaagtgttagaataataaatatattattttatcacataaaatattaaaatggaagtaaaaaattatcaaccatttctccatcaacaaaatggttttgtggcgagttgtatcaagtcttcagagaagagataatttctctgctttagaaatggtttgtgtctacagctacttagctaaaatgattagccaaatatgtaacacagaatgcacaaggacagaaaaaaagaaaggaactctcagccaaccccrtctgtaagtacagatgcaaaaatacaatgtaaaaaatagctattaagaccagcaatgtagtcatggttaatagaagtctctggaatctgatttcctacattcattagcccatgaattaactgcataatatttggcaaatcactttgacct

SEQ ID NO: 260291 - DNA, 408 bp, Homo sapiens
tgctggtttgtttttgttttagcgttgttgaaaatcagatggttgtagtagtgcagccttatttctgggatctctgttccattcccttggtctatgggtctatttttgtattagtaccatgctgttttggttactgcagccctgtggtacaggttgaggtttgggtaacgtgatgcctccagctttattgtcttttggtwccatatgaattttaaaatagtgttttacagttctgtgaagaatgtcattggagtttgatatgaataccattgaatctgtaaaacgctttgggcagtatggctattttaatggtattgattctttctaccatgagcatgggatgttttctcatttgtttgtgatttatttgagcagtgttttgtaattctcattgtggagatctttcac

SEQ ID NO: 260292 - DNA, 408 bp, Homo sapiens
tgctggtttgtttttgttttagcgttgttgaaaatcagatggttgtagtagtgcagccttatttctgggatctctgttccattcccttggtctatgggtctatttttgtattagtaccatgctgttttggttactgcagccctgtggtacaggttgaggtttgggtaacgtgatgcctccagctttattgtcttttggtaccatatgaattttaaaatagtgttttacagttctgtgaagaatgtcattggagtttgatatgaatascattgaatctgtaaaacgctttgggcagtatggctattttaatggtattgattctttctaccatgagcatgggatgttttctcatttgtttgtgatttatttgagcagtgttttgtaattctcattgtggagatctttcac

SEQ ID NO: 260293 - DNA, 476 bp, Homo sapiens
ttcttacaaactagcaataattaatttagaatataaaatagtatagtaacaacagaaaattaaaccacaaagtaagtaaaaataaatctaaaaagaaatgagaagatggccgattagaagcagctgtagttcgcggcactcacaaagaggaatgaaaggggcgagtgaacacagcacctgaaattgaaatatccagatagtcacattgggactgttcagggaaataacttgaccyacagacaatgaaggaaagcaggattggacaatggcccacccaggagtgacacagagctaagggaacccccacccccagccaagggaaggggtgtgtgattgtattaccccaggaaaccactgttctcccacagagctttgtaacccactgatcaggagatcccctcatgagcccatgccaggtctgacacacagagctgtgtgcagtcttggcagagcagctactcatgcacacacagaga

SEQ ID NO: 260294 - DNA, 382 bp, Homo sapiens
ttggaactctggatcctaatcagataaataacaaccattagtagactgcttgatgctattggcctttagtaagaaaatggctgtatgcacacaccagatactatcactcattcttattcacaagagtcaaaaagtgaaaacaaacctgtatgtgtagataaacaaaatgtggcatgtacatacaagggaagattatttagccataaaaagggaatgatgttctgatacatgtttacaacatggataaaccttgaaaacattatgctaaacaaaataagccagacacaaaaggacaaacagtatatgattctacttayatgaaagatcatgaatagtcaaattaatgtagagggaatgcagattgcatgtttccagggcatgg

SEQ ID NO: 260295 - DNA, 382 bp, Homo sapiens
ttggaactctggatcctaatcagataaataacaaccattagtagactgcttgatgctattggcctttagtaagaaaatggctgtatgcacacaccagatactatcactcattcttattcacaagagtcaaaaagtgaaaacaaacctgtatgtgtagataaacaaaatgtggcatgtacatacaagggaagattatttagccataaaaagggaatgatgttctgatacatgtttacaacatggataaaccttgaaaacattatgctaaacaaaataagccagacacaaaaggacaaacagtatatgattctacttacatgaaagatcatgaatagtcaaattmatgtagagggaatgcagattgcatgtttccagggcatgg

SEQ ID NO: 260296 - DNA, 382 bp, Homo sapiens
ttggaactctggatcctaatcagataaataacaaccattagtagactgcttgatgctattggcctttagtaagaaaatggctgtatgcacacaccagatactatcactcattcttattcacaagagtcaaaaagtgaaaacaaacctgtatgtgtagataaacaaaatgtggcatgtacatacaagggaagattatttagccataaaaagggaatgatgttctgatacatgtttacaacatggataaaccttgaaaacattatgctaaacaaaataagccagacacaaaaggacaaacagtatatgattctacttacatgaaagatcatgaatagtcaaattaatgtagwgggaatgcagattgcatgtttccagggcatgg

SEQ ID NO: 260297 - DNA, 547 bp, Homo sapiens
atcgggaaactgccacctaaacactgtgcttttccaatggtcttatcaaatggcacaccaggagattatatcccgcacatggctcagtgggtcccatgcccatggagccttgccactgctagtcccagacagaactgcgaggcagcaagcctggctgggggaggggcgtctacaattgctgagacttgagtaggtaaacaaagcagccaggaagctcgaactgggtggagcccactgcagctcaacagcctacctctgtagactccgcctctgggggcatgacacagctgaacaaaaggcagcagaaacctctgcagacttaaacatccctgtctgacagctctgaaggagcagtggttctctcaatgtggtgtttgagctctgaaaatggacagasagcctcctcaagtgggtccctgacccccacatagcctaacttggagacacctcccagtaggggccaactgacacctcatacagccaggtgccctctgagacgaagcttccagaggaaggatcaggcagcaatatttgctgttctgcaata

SEQ ID NO: 260298 - DNA, 547 bp, Homo sapiens
tttaactcatgcaatgaatttgaacatagaaatgagaggaaagcttggataattttataatgaaaggctaagcatgttttcccctcaagaggaaaaatttaaatttcaaactgartattactcaaacattaatcatttaactgtatagcatgggacattttgggcatggcaaattctaatggaggagactgctagaaattctcagccacacagaaatctgactgcttaattttgaaagctgcagagctgttagagctgcagagctgcttcaatctttaagggaactgtggaagtaaaccaggggtgacatggattatcaaatattgtggatcaggtgagctctaggcttctcaatgcaaggtaattaccctgcactttcatctattttataatattgcctttatttttttccatgaaagagttaggtttggaaaaacaagaaaaacacggttaaaattatttctctagtgaattggttgtgtttataaatctttagcttagcttgagtccccctttgtgaaatgtataaatccttttgatacattaa

SEQ ID NO: 260299 - DNA, 520 bp, Homo sapiens
gatagctctgagtgcaccatgagtccagcagcccagggccatggactgtggtgactgtgaggcagcaacgtcagcatctgggagagtttgtggtttcattcccagtccctgcctctctccaccctgcggtgcctctgtgaccctgtgtttcccgctgatgagcaaacgggagcttgagcacatccaccgtgcaacacactggccgttcccctagggaagtcccctgcctggggtgtaggtgraaggtggccccattttcatcccccaaaatctcgctgttcccgcaccctggaactggttgcattcctccttggagcggagtcccggtgcactggggaccctgattcttggggtggagctgccccaggctcacaggcctttgccatggctcctgtgggaatgtgggatctggacctgctgcttgcagtggcgtggacaccgctctgctttggttctggacgtgtgctcctgctcctcatgctccagggccctgaggctacgtccccaggggctgccttgc

SEQ ID NO: 260300 - DNA, 547 bp, Homo sapiens
tttaactcatgcaatgaatttgaacatagaaatgagaggaaagcttggataattttataatgaaaggctaagcatgttttcccctcaagaggaaaaatttaaatttcaaactgagtattactcaaacattaatcatttaactgtatagcatgggacattttgggcatggcaaattctaatggaggagactgctagaaattctcagccacacagaaatctgactgcttaattttgaaagctgcagagctgttagagctgcagagctgcttcaatcttyaagggaactgtggaagtaaaccaggggtgacatggattatcaaatattgtggatcaggtgagctctaggcttctcaatgcaaggtaattaccctgcactttcatctattttataatattgcctttatttttttccatgaaagagttaggtttggaaaaacaagaaaaacacggttaaaattatttctctagtgaattggttgtgtttataaatctttagcttagcttgagtccccctttgtgaaatgtataaatccttttgatacattaa

SEQ ID NO: 260301 - DNA, 595 bp, Homo sapiens
aataactcattatatacattcaaagaggtaaaagagaagactgtgaatgttcttatcactaaatattgatacacttttggggtgatgggtatacaacttaccctgatttgatcattgattattgcatacatgtatcaaaatagctcactatatcccatgtatatataaaattatgtgtccattaaaaataagaaattttttaaaattaaaaagagtaaagaataagtcacccaaattaaaaacaagcaaaccccaagaaaagactatagttaacaattatatccctgtgtgtcaatctgaaaatatggctggggtatgtaagagaaaacacttattgtagaagagtatctgcagtatggtcttattgatgcaaagtcagtgtgtgtgtgtgcgtgtgtgtgtgtgtgtgtgtatgtgcacgtgtgttttcctgagcctrtttcattggagatagttgctgccatctgccagtttcaattcctccaaggcgcagaatgggaaaaactgtctccctcacctcaaagccttaataaaacatgacgtgtttctctggggtttggaagactcaaaatgctcagggtagtgaggtgagagg

SEQ ID NO: 260302 - DNA, 550 bp, Homo sapiens
cagtgaggcatttctcttcttacagacctggtatttttctttaccaggttctgtgctcccctcaagggtcctaagtattcctscagcctgagtgttctgcagggaaatgtgctgtgtaaacactatgcctatttcctgcttggagaacaggttttgtggtagagctctcaggggtggggaagaagcctggcagcccacatgctataaattctgttgtccacctttatgctctaacttggaggcagagacccaagcagctggaggctctgtgtgtgggtgagtttagccacatcccctaggtgttctccagcttgaggatcgcaggcagagaggaccagcccagcagccacaggcctgaccaaggcccaggttgggaaggagggcaactccccattttccactgggaggtgtttcacagcatggtcaacatggatgacctacaaagaccctcatgctttgatatcttccttggccagatccatccctaccagggactcagcagggcctaagcagggggagtgggagaacagaccccaagaggaaggaagac

SEQ ID NO: 260303 - DNA, 527 bp, Homo sapiens
ctatttaactttgtaagaaacagtccatttttttttcccagagtggctgtatcattttactttcctaccatcagtatttgagaattacagttgttctaaatcatcaccaacacacaagatgatgagtatttttaattgtatttattctagtaggtgtggaatggcatctcatttaatttgtatttctctaatggctaaagatattgaacatcttttgatgtgattatttgctgtctctgaatttcctctggcaaagtatgtgttcaagtatattcttttccttattgtttattattggtctgtaattttccttataattgagtttacatattttggatacacattctttatcagatataatttggaaatgtytattcctagtttgaggcatatagggtagaaatacagaattttttgtttttatgaagtcatatctattgttgttgtaactggtttttttgtttgttctctaggttgttcttttgggccacatctaagaaatctttgtctagccaaaagccacaaat

SEQ ID NO: 260304 - DNA, 527 bp, Homo sapiens
ctatttaactttgtaagaaacagtccatttttttttcccagagtggctgtatcattttactttcctaccatcagtatttgagaattacagttgttctaaatcatcaccaacacacaagatgatgagtatttttaattgtatttattctagtaggtgtggaatggcatctcatttaatttgtatttctctaatggctaaagatattgaacatcttttgatgtgattatttgctgtctctgaatttcctctggcaaagtatgtgttcaagtatattcttttccttattgtttattattggtctgtaattttccttataattgagtttacatattttggatacacattctttatcagatataatttggaaatgtctattcctagtttgaggcatatagggtagaaatayagaattttttgtttttatgaagtcatatctattgttgttgtaactggtttttttgtttgttctctaggttgttcttttgggccacatctaagaaatctttgtctagccaaaagccacaaat

SEQ ID NO: 260305 - DNA, 530 bp, Homo sapiens
atagagctaataaaatagaatactggttctttgtaagagacataaacttagcagatatggccatggtagtttgggttgtttcctccatgttgtaaaattacatctcaggccctttgccataggacttcacaaaggctcccactggagtgtgaggagtaaacactccagcccctttgctgtttggtgtggccatgtgaccctgagctgaaacgaagggagcagcagcttaacgtgtgcttacaggtttgctatggcctttgtgtttctttcccaatcatgagaagtatgtatccctggaaagtgatatggaacagtcatgaattcacctgaaagtctggagtccagctgactgctgctgartccaggcccactcagctgaaatcagccaaagctcaacaaactggaagatccagagcagaaaataaaacgtttactgttgtaagctcttgagagggaaatttactgttgtgttagctgactgatacaatatcaatgattaatagaaaaggtataagaaattaacaaatcag

SEQ ID NO: 260306 - DNA, 589 bp, Homo sapiens
agtgaagtgcctagccaagaggcttgcacatagcaaataattaaccaatgtttgttaggaagagagaaagaacgatgtgcataaaaggatgagtaagtgaaaaatttgcagaatgaagtatttaaaattcctcaatatgatgatgaccttctctctttattatgatctattcaacagtcagtctaccaatgaacctgtaaagtgtttgtttttggaggaactgaccacacattgacaagcccccactgagtctaaacctaaacataggcccatccatgtggcttaagggaagatgtacccaggctgtctaccagcccacagggcacctttctaataactagagaaaggcaccaaacyccccaacataagcaggcttagtgagcctagctagagttcatcctcttggcctggtgtcaaccaatacaaccacacgtggtggctctggatttattaaagacttcagactattaaaaggctgagcaataccatctcccccagagttccatgtcactctttctccttatgatagcactaggcagagactgcttcctaggagagggtgggggtgtatatgtgcacatgtgagtgc

SEQ ID NO: 260307 - DNA, 559 bp, Homo sapiens
tgataaatttttaaattagcttgtaagtttccagattcagccactttttgccacatgagaatatgagactatttttttctgagtcttctgatttttaaagagaagccaacattttggatttttttaaacataaaatgtcctggtttgaaagcactattcrggccaaacaaaacaaccttagcaggccaaatctcagggccactagtttgcaaccccagctctaatccaaagccccagaatttacaaatggcaaactaagatctaaagaggacaggttcatttcccgaggaaggtcacagagcaaataagttggggaactgggctaggacctagaagtctggttacgagacaagtgctccccagcttcccctcctccaagcaatgttgagcagcatacactaaacccagagtggagacccatcacgtgtgcctagtgaggtttagagcccgagcccctatccatcccttccagcccagggatgctgggctcccgagatgctggtggccccttggtctcaaggctgaggcccaagtcttagccttgccaatgatctctaaa

SEQ ID NO: 260308 - DNA, 608 bp, Homo sapiens
attcttttgttgattcattcactcagcaaaactttgttgatgtcccactaggtgctgggcaaacagatgaacaagtctcacccatctgccctcatagagcttacactccagtggaggggacatcacattacacaaataacaagaaatgaccaggggagatcaaagtgaggatgaaaatataacagggtgataggactgggagcaactaaactggggaccagtttaggtgaggtggtcaagggagcttccctcaggaggtgacatttaagctgagacttggaagatgaggaaaagccagccatgcaaatctctacagggagagcattctgagaggaggaggcagcagggagaggccggggctgaggaagagactggtagtttcatgggtcagaaagagtgccggtgtggctgragcacggggagggagagggtgtgggagaggatggagagggagaggttggtggaggcagctcactgagggctttggggaccaggctgagacgtttggactttgttctaagtggaaaggaaattcagtggagggccctaggcagtgtgatccatgattttagaaggccatgccggttgccttgaggaaggggcattgt

SEQ ID NO: 260309 - DNA, 586 bp, Homo sapiens
agctttggtggaacactggtgtgtgccccgtcctgggctgggtgacggggagtcaaccactcctcatcattggggttgcaagaaacaaaaacccactcaaactatcttgggtaaaagtgggggcagcattaatttgaagatacccaggtgtcacgggaatggaagtccatcagggccccattctctctgcttctgtcacatgcagggatgcaggtctgttgccttgctccckctctctacacagacaggcttctcatctccctgcactcagccttcccagccacccaaacatggcagccccaggccctgagtctaatgaccttccaactcagcaccacctgccaactgtccttgaccttgggcaacaagcatgccctccacttttagagtgttccactctggtcctcctgtggccacacccctctctccccgaggtgaggaatctgtgaatccaaggggatatgcccatgcagacaccatgggccccttctagaccagcactgtcttgcacaactttctgcaaggatggggaagttctgcagttgcactgtccagtggtagccacggcctgcatgtgaccatagag

SEQ ID NO: 260310 - DNA, 585 bp, Homo sapiens
ctaccagctaaacaatgacagcagaagacagagtacccttttcctgaagtccccagcagaggccctggagctggttcttactgcccagctggtattcccagcccatcagtgatcaaattagtaaggccaggcctcttttgggttcctttattggttggctaaatcttatcactaggaagggtttgattggtgctatatttcctgagaaattcccatttgtttttatacatggtgacactttgacagggtttataaaaatcatggatcatatcctgcccacttccaacccttgaattctgtgagttttcctttcatcttttgacattgactattgcagrgaggaacattgaggcaagctcacctgtgtcccctcatagctgacttgatttctttgctgggttgcccattggagtttttatttcttgagtaaattagtctgagagcacaaactgtagctttgcaaatcttatctgcagtttcagatctttctttattttaggatgttgtcttctgtctctgtccattttctgctgctgtaacagaataccacagaccgggtagtttataaggcaaaaagtttatttg

SEQ ID NO: 260311 - DNA, 655 bp, Homo sapiens
tttaggcagaaacatccctcaagagaaaggcatgtcagggttggtggagacagtgggagaaggttccagatgcagcaggacagaccctggaaggcagggaggcaggggggtggcatagggcagcagaaagaatgcatctctggctcatggcagatcttgttcagttctcagcttagtctctgtgaataaaagttatctgaaaataaatttggaggaaagagactttattccagtcaacgtttgcaaaccagggagaagcagccttcagtgtaaaacgaasgtgcattccagagaacaaagagagggtctgagcatttgttttttcttttgagacaaggtcttgctctgtcacctgggctggagtgcagtggcgtgatcatggctcactgcagcctcgaacttctgtgctcaagtgattctcccacttcagcctcctgagtagctgggactacaggcacatgtcaccatgcctggttaatttttgtattttttgtagagatggggtgttgctatattgcccaggctggtctcaaactgctgagctcaagcgatccatctgcctcagcctcccaaagtgctgggactataggtgtgagccactgcaccaggccagggtttgagttttatagcaaaatttccagcccaggtttcttta

SEQ ID NO: 260312 - DNA, 525 bp, Homo sapiens
gtctaatcaagggagagcgtgtggtacaaccatggcttcctacttcctagagctgcacctaagacaaagatgctttaacacatctgcctggaccaggggctagctgaggacatttgcttcactccagaccatcagcgggagggcagaacctggagcatggcttcccgggctcagtgtctcgtgctctgatcttttcagagtgggcagctgcctctgaaggctctgagccgggagactgtgcttttggggaggaccacgaaacagccattggctggtgggtttccatttgaagtcaagtcattgggagcccatgaagaagacagagtgctgtgggagacccacgtccacaaactcaggagtctaataataccctgctctgagcatctcccacatgccaggcactgtgctcaacattttacgcagggaatctcctttcattctcataagcctgccagtagaaaaggacctgattactgccwttacccaaatggagtcacatccattcgttcatcaagtacttactga

SEQ ID NO: 260313 - DNA, 594 bp, Homo sapiens
tgtaggctttgggaagacctcgggtcctcgaacccctctgcttacttcagaaacaatcactgttcccagccttagtctttttaggtgccctgcactctrcttttgtcccacactggggctggaaaccttcagggttactggaaatcaccgagccattcctcctggtttgctgcagggaaagctggggtcccactacttacgaaacctgcacccattggagacatctccaggggccaggaagcaccttttctccctattcctgtttcccttggagctctccctctccccttcctccttctcccacttccagcatcatcccctcaggggtggctttagaaaggaaagccagggaaaaaattgacttacgacaactcctctttcctcttgggcaccagctacccctaggtgagaaaactgggagctgctgcctgatttaaaaaaaaatatatatatatatatatacacacacacacacatatatatacatatatatatacacacacacacatatatatatgtatatgtatatctgggattcaaaaaacatgcagcctcaagctgagaagatttctctttggtaaaggcgttaagtat

SEQ ID NO: 260314 - DNA, 554 bp, Homo sapiens
catctagtgcaactaaagaactgagtgtttaaattttttaagtttttattcatttaaatttaaatagccacatgtgtctcatggctactgcatcagacagggcagccttaaagtttctagaagaataagagtgagaaatgctgccaacacgcagtagtcacttggctgtcaccagaggaagagatttctgaggattgaggctagtcaaagatagaatgttagcackgaggaacttctagacatcaagccaagattggggtcaagctgacctcacccacccaggacaatcatggaccatctgatttccccagaagcccaggacagcggttacccctgaaatcaccactgaaccaagtttggggtggcctgaattgtctttgtttggggctgtttgttttgagtggtgtcattattttatttttaaattacctataatgcgccctttaaaaattccctaattacagataggataaatacataattgcagacttttaaaaagcacatattatttactcaatactccgtaattacggtcttttccatgaaatgtatta

SEQ ID NO: 260315 - DNA, 546 bp, Homo sapiens
gggaatgagcttgctgcatggaaatgtgtggttcacttgtccagcatccactttcccttctggcaagagtgccccgatttttccacagggcatctacccctaccctattcttggcccatgagttttgggtaggatgacactatcatcagctctggggacgacacatgacccrggactgaaccatcagtatatcccatctccctggacattgattggttcagggatgggcttgtgactcagtttggctctcggagtcaggcccaggattttgaattacaaaggagtagccagtttgccaccataaaaggaatggttgtctgagaatagagacaaacatagaggaaacagaactgggagatggagagaatgggccctgataatattgtttgctctgggatctatccctgcttatgagaatcaatcaattctcatgtttctttatcaagtatgtcatttttaacagaaaggctcctaactgatgagtttgtctctgggagttatcctagaaagtctctagggcctttgggatctgctgtttatttggag

SEQ ID NO: 260316 - DNA, 527 bp, Homo sapiens
ccatttccaaataagcccagccactgaaggccctcctgacaatgaggggtgtgggctctggtgtaagaggctgaggtgctgccagaggggccagcgtggggcatcaggggacctgggttcatgcaccacagccactcgctcactcactgtgaccttgaacccctattagggcctccaaacacctcagtgttggaccaaatgggtgtcgacgtttagtataatatgagattggtctccacaaacccccacgtagaagtacagtgaacatagcagaacccaagctgaagctgggggtaggggcagcagagcctcagggtccatcctcagtccctccactcccctgaaacccctcatgttcctggggagactttggaggaatacatcacctctgccctgtgtgcatggcacggcagagtgccagggagttgacacaccccaggaacagcctttaccaagcragagacaggaactggtaagtgcctgcctgggctccctcaccccacagtgggggcgatggcgaggtgtgt

SEQ ID NO: 260317 - DNA, 588 bp, Homo sapiens
tgccataggcacaagtaggagtggaggtggcatgtgtgctactccatcctttatcttctgagtcttgacaccatgtgggtctctgacctgactccttgggtttacactggactccaacctgcggtgtgctggaggcagctcacacccactcctgagagtcaagtgtgctcatctcttcccaactctgcatttggtgatgtcacattggtattgtggaatcggtcacgatggggaygtttacagggaaccgttaaacatttttgagcacactagctctatccctcccacagcaggccagggcggggggagaggggaatccaggcagcccccaacagtcctgagctctatgggaatccgtgtcccctggagagtggccagtgccagcagatgctggaatccagactgttctatcacagactcacaacccctgcagcccactttattcacaatcctcatcactgctcttgctgcacagagccccattcagacactctaccccatctaccctggcaccactcatcccttcttcctccaggaagccttctgagactgcattcacaattattcctcccccactgagctcccatt

SEQ ID NO: 260318 - DNA, 588 bp, Homo sapiens
tgccataggcacaagtaggagtggaggtggcatgtgtgctactccatcctttatcttctgagtcttgacaccatgtgggtctctgacctgactccttgggtttacactggactccaacctgcggtgtgctggaggcagctcacacccactcctgagagtcaagtgtgctcatctcttcccaactctgcatttggtgatgtcacattggtattgtggaatcggtcacgatggggacgtttacagggaaccgttaaacatttttgagcacactagctctatccctcccacagcaggccagggcggggggagaggggaatccaggcagcccccaacagtcctgagctctatgggaatccgtgtcccctggagagtggccagtgccagcagatgctggaatccagactgttctatcacagactcacaacccctgcagcccactttattcacaatcctcatcactgctcttgctgcacagagccccattcagacactctaccccatctaccytggcaccactcatcccttcttcctccaggaagccttctgagactgcattcacaattattcctcccccactgagctcccatt

SEQ ID NO: 260319 - DNA, 507 bp, Homo sapiens
tttgaacaccaaggatggagggcacagggccggatgttcagagaggcccagaatgaaagggaggatcagacagggccatgccagctgccgtagctgggcctggccrtgctctctggggccgtgctctctggggcaaggctcacttggaggtacagaggcctcaaactaggcccacatacagaatcaggcctgggaaatgagagttaacatctcactgtgtgtcctagggaccacctgcccagctctgtcgttcaagattctatagggagaggctccacagatcctgagagcagggccttccactcccactcccacgcccacccacatcctgacacccaggaaattgccctggtctgaaagtccagaaatcactcccattgtctcatcttagagtagttccataggcagtgaggctgctctgccaggctctatgctgtggttggggtgaggcccctcagaccaggcctggtactagagtaggtgagacacaggtgccttaagagagga

SEQ ID NO: 260320 - DNA, 483 bp, Homo sapiens
ttcataaaatgctgaggtttatgcaaaagctgttaatatactctaatatamatattagtcatgtaatagtctcatgagcatcagaaatgttatggtaggcagttaataccatgtttttaatatttttatatttgaactgccccaccacctaacacaaaccagcacaaaatagggtatgaaaaatgctcactgaatttttgtcagttaaagagcactgccatggatgcaactggctggggctggtgtggcaggcactaaaggaattcaccaagacagtcataggtaaagaaaggcaaatttattagagaaagggttgcaagggtgcaaagggcagcacagcagagaaggggctgcctgcaaaggggctggagggaagttttataaggttgtgctggaaaggttacatgtggaacagggttttgggaacaggatgttgtgctagcaggttgtttttgatgagctgtctcccagagcaattgttct

SEQ ID NO: 260321 - DNA, 433 bp, Homo sapiens
gtaatagtctcatgagcatcagaaatgttatggtaggcagttaataccatgtttttaatatttttatatttgaactgccccaccacctaacacaaaccagcacaaaatagggtaygaaaaatgctcactgaatttttgtcagttaaagagcactgccatggatgcaactggctggggctggtgtggcaggcactaaaggaattcaccaagacagtcataggtaaagaaaggcaaatttattagagaaagggttgcaagggtgcaaagggcagcacagcagagaaggggctgcctgcaaaggggctggagggaagttttataaggttgtgctggaaaggttacatgtggaacagggttttgggaacaggatgttgtgctagcaggttgtttttgatgagctgtctcccagagcaattgttctcccccacctaga

SEQ ID NO: 260322 - DNA, 483 bp, Homo sapiens
ttcataaaatgctgaggtttatgcaaaagctgttaatatactctaatataaatattagtcatgtaatagtctcatgagcatcagaaatgttatggtaggcagttaataccatgtttttaatatttttatatttgaactgccccaccacctaacacaaaccagcacaaaatagggtatgaaaaatgctcactgaatttttgtcagttaaagagcactgccatggatgcaactggctggggctggtgtggcaggcactaaaggaattcaccaagacagtcataggtaaagaaaggcaaatttattagagaaagggttgcaagggtgcaaagggcagcacrgcagagaaggggctgcctgcaaaggggctggagggaagttttataaggttgtgctggaaaggttacatgtggaacagggttttgggaacaggatgttgtgctagcaggttgtttttgatgagctgtctcccagagcaattgttct

SEQ ID NO: 260323 - DNA, 560 bp, Homo sapiens
tggggctttgggaagatcacatctcacctgttgcaacaggaacctcagtggctacagacatgggtctcacctgatgggactctgtacctcataccttaatggctgctctcctcccacctcttccaggcagtttagtgggatgtggaatctggcttacccaacggctcccttaaatcagagttaaattttsaatcaagggactagaggtcaagaagataaattcctctttctccccccattgctcctcccactgccctccccacctgatggactgtttcaaggtgacatgcaggacccagcaacaggctttgttctttgtgaagttatgtccagctccttaacacaccgtctagtatttgcattccttcctttcctgcctcacctttttctcattcccttttatagccctgaaattgcaccacccaacatagacttagcaagtaatctttgcctcaggttttatgttctagagaatttggcaaagacgatgagttaaaaaaaaaatctcgttatatcttcaatttggcctacaaatttggccttgaatctattttcttcta

SEQ ID NO: 260324 - DNA, 592 bp, Homo sapiens
acaggtgtgagccactacacctagcccaggcaagatagcatcttcctatggaggggttgggataaggataaaggcttttgaatatttaatagtatcactctctctcctctgctcatgcagaaggcagggaatgtggtgctagatgagtataytaacgctgctatttaatgagttaaaatttatcagagagtttgtataaataatctattgctaaaacagagcttcagacaagcaactctcctggggttcaaataaaacaaataaaacccaggactctttgaccctgactgggcctaaggagtgaggacagttcccattaaaatttgagattaaaactagttgagaaggaaaagtcaggcatcaatgaattatgtttcaaactgtgcgttaggattattaagtggctccactttttttttatttggactaatgattgacaaatggtatttgagttcagaggctaaaatgaacttaacattatggttgcaaaataaggtataaaaataaaataggatcaacaatctactcaaaaaatgagtaaaggatatgaatagacagttcacagaaaaaaattcaaacagcctttaaacat

SEQ ID NO: 260325 - DNA, 536 bp, Homo sapiens
taggtgaaattgcactaaaagaagaaaatatttttwaaaataatgtaagaaataactgcaatgtctttttttttttttttaaacagtggctgtgtggagtggtgtgaatgtggcaggtgtttctctccaggaattgaatccagaaatgggaactgacaatgatagtgaaaattggaaggaagtgcataagatggtggttgaaaggtaagtgaaagggaacttgattttagatgattaatttcaactctacttaaataaaattataaacattttccatggctgtctgctcagataaactcttaatgtagtaattatgcagctgttatcttttgaaactgataagacttttacactggtcaaacttgctatgccagtctccctagggaaagtaaatattttctctagagaaactctattgtagaggtaacaggagcaaaatgtggaattaacaagtgagaagagtcttcaaattgccacctctcaacaaataaggttgatttatttagaaaagtatacttagaaactattgggttcat

SEQ ID NO: 260326 - DNA, 528 bp, Homo sapiens
cacactatgtacctgcaggccacagtgctttgctcctcctggctccctcatgaagacagcttgccttccctcttcgcacctgacaaatatgccrctgcctcctcttccccttctctcccctcagctctgggactgaaacggctttcttgacttttcctcacacaaatcttgttcaattctcacttatttattactcccttatcatcttttgtgccactttttcccttaggacacaccattttataactatttagtatcatgtttccccactgaagtaactgtcggctccctgaggccaagactgtgtctttcatctctacatacttaatatagctatatggtacagggcagtgactatacttattaaagtaatattttgaagaccaaatttcacattattgggacttttcataaattgtcttacattacgattaccctttgataaaagacttatatatagatgattcaatacaacgacaacgaataaagtatctcctataatttacttccataaaaaattttccctta

SEQ ID NO: 260327 - DNA, 567 bp, Homo sapiens
agcgatgaattactgataattaaattggctatcttctattcctttaagtaaagttttgatctctattatttggaatataagaattccataattgttatatctttaatgttgatcacactcttgatcaattaaaaggtctctctttaacttattttctttaaaaatgagaaatgttgggaactgttacagcagattataaagaaagatcaaaagcctcaaataaatgactatgcaggaatggattttctatataagaccagaaaacccacaaacgaactatatttctcaggaggcctgaggaatactcctgctcttaagataataaggaatgcagtggtgatggggccacaggcaccactgatgctcagaagctgctgtcctctkctggctgaggctcacagtagaaggtgctgctccagaaccagtggcaattgggatgattgggagcacttaaccatcataggtaagggcagaaaattcagaactacagttagggaatcagcccataggaatctcagagatgactcacagaacatggtgctccaaggaacaaaaataaaatgggca

SEQ ID NO: 260328 - DNA, 552 bp, Homo sapiens
gacctggtgaggttatgttaaccagggatttagacctctcagggatgaagatctggggcaacccatcagacaagcaaacagaagtgagggaaatcaaaaaggggtggagaggagggaccagtcatcacagtggggcctggagtctgtcttaataactcttctttggaaggctcctcaggaattacaaccatagagtcttggagaagctgtacctggatggagtgaacttcatgtgagaagcaagttgatctgagcggtgcagtgggtgggctgtcatagacaccatagcacactccccagttccccttgatgggcaagcacacttctacttccagagctgctagcaggtcayggttgctgtattttcccatttgcagttaaaactaggcagggtgcggtggctcatgcctgtaattctagcactttgggaggccaaggcaggaagatctcctgagcccaggagtttaagaccagcctaatcaacatggtgagacccccatctctattattttaaaaattaaaataaaaaaataaataaaactagcccaggca

SEQ ID NO: 260329 - DNA, 539 bp, Homo sapiens
ctctgcctggtaatccagtgaatctttccagatcttatctaagaacaccaaggcagtacctctacaagtctgcaaaagccacagcattactgggcttggggtgccccctcatacagatatggctgctatgaccaaaaatttagatcacaatgcccaagtccctctgaatacctggaaagtcttctgaagaaggatgagtacaaacaagcctagatttcraagactacaataaatacccaactcttcaatgcccagataccaacaaactccacaagcatcaagaccatccaagaaaacattacttcaccaattgagctaaataaggcaccagtgaccaatcaagaagagacagaaatatgtgacctttcagacaagagaatttagaatttttgagtaaactcaatgaaattcaaaataacacaggaaaggaattcaaaatcctatcagataaagttaacaaagaaattgaaataattaaaaagaatcaagcagaaattctagagttaaaaagggcaaggaacatactgaagaataatata

SEQ ID NO: 260330 - DNA, 543 bp, Homo sapiens
gccggtcttgaacttctgacctcaggtgatccacctgcctcagcctcccaaagtgttgggattacaagcctgagccactatgcctggcctcataagccttttaggtcctctcatcaatgcaggactctaaacttctaattagggcaaccagcatgtagcaggcacrtagagtgtgcaggtgctgggttaggctcattgcgggcaggatcaaatttactcttcacagcaaccctacgggaggtactaatattatccccattttacagatagggaagcaggtggccagaggaggttaagatggttattcatgttaagatgccaagctgtagcacgcaccccagtagtcaaatacatcacccgtgccctattctacccaccccacatcagcctgaaaggaggaaaagggaaccaacaggtacccagtgccccctctggtgccagctactcacatatgtaatccccacctgagcaagccccagtgagcctttgagggcagctctgaagtgagaactctgatgtgaaagctccgtcatgtcaaagggc

SEQ ID NO: 260331 - DNA, 543 bp, Homo sapiens
gccggtcttgaacttctgacctcaggtgatccacctgcctcagcctcccaaagtgttgggattacaagcctgagccactatgcctggcctcataagccttttaggtcctctcatcaatgcaggactctaaacttctaattagggcaaccagcatgtagcaggcacatagagtgtgcaggtgctgggttaggctcattgcgggcaggatcaaatttactcttcacagcaaccctacgggaggtactaatattatccccattttacagatagggaagcaggtggccagaggaggttaagatggttattcatgttaagatgccaagctgtagcaygcaccccagtagtcaaatacatcacccgtgccctattctacccaccccacatcagcctgaaaggaggaaaagggaaccaacaggtacccagtgccccctctggtgccagctactcacatatgtaatccccacctgagcaagccccagtgagcctttgagggcagctctgaagtgagaactctgatgtgaaagctccgtcatgtcaaagggc

SEQ ID NO: 260332 - DNA, 460 bp, Homo sapiens
tcatttataagcaacccaacctataacagtttgttatggcagcccaaatggctaccagctgaaaggactgttgggaacattaaatgagctggtatgagtaccaatgtagatagcacttgacatctactgaatattcagatacaytgttgctgcttttggtgttattgttgctactgttgctaatttaaactcaacacagaagtcctttttggtcagaacagacattggtggaccaagtgagcccgtggtttcaaagactgtagatttttcccaatcttggacttacatcggcttcctaggactccttctggcaaaaaggaaggttgggataaaacattttattctgctttggttgatcgccaaatccacttggctaaaaggatttgcagttcagagaactcggtggctcagcgtaaagcagagctcctttcttctgaaatccatcacctgtgacttctct

SEQ ID NO: 260333 - DNA, 582 bp, Homo sapiens
ctagaactgctgcacctgacatgggatgccttcctggggacttcttactacctgaaaaaaagtaaacacctaatttataagagccactgcttttagggattctgttatttgtaggcaagcagaatttcttgttgatttaacatctagaatgaatggaatctagaacagatgctcctaacctagagttcactcattttccatgttgcttcagaggtcctaagatcccctgtggttggtagactaatagtccccctcctaatccctggaacctgtgaatatgtcaccttatatggcaaaaaaggactgmaaatgtgattaaggttaagggtcttgagatggaaagattttccaggattatctggctgggcacagtctaattatgtgaatccttaaaagcagagaacctttccttggctgtagcacgagaaagagatgtgaagtggaagtggggtcagagagatgccacattgttggctttggagataaaagaagggacccatgagccaagtaatacaggcagcttctagaagatggaagagacaataaaatggattatctcctagagcctccagaaaggcaaca

SEQ ID NO: 260334 - DNA, 578 bp, Homo sapiens
gttttttaaaaacaaaaaactttctcttttttttttttttaagagatagagtcttgctctgttgcccaggctagaatgcaatggcacaatcatagcacactgcagcctcaaactcctgggcttaagtgatcctcccgccttagcctcccaagtagctgggactataggcatgctccaatatacccagctgttttactttttttgtcagacggggtctcgccatgttgcccaaggtggtttcaaactccaagcctcaaacgatgttcctgcctcagcctcccaaggaactgggattacagccaccactcctggctgtgctcacttcttattcatcattaagttcatcacatatccacacaggcagcactgattcaacaatatttattgtacaaacagcctttgtcacactgaagctgcgcatcaacattcgtgtggcgcagttcctcacaaagatactgaacttcttgaatcagaaaagtcccatcttctggggtctgacctactccttctgcctttatctgcatggtcccccaggggaggctyacttcctgatgtcctcactgtggaggacaagagaa

SEQ ID NO: 260335 - DNA, 534 bp, Homo sapiens
tttgttattagccttactatatattgcattttatgtaaaaggggattaaataaatgtctctcagataactctaatgagttaagccctgctcagcaaaatgtgctacacatatgcatcaactggcaacttgattttcaaatccttttgacaaagagttcgggaacaaatatattttcaaatgaaatagactttcagtctctcaaaggcaaagactattctatttctctctccactttayagcagtaagcactattctctgcaaacgcagtggctcagtaaaggatactgaaggcaacaagagttaacacttgtttattgagggtttggtttatatttcttgaaagttgatataacttgggaggctatttttaatcccaaaataggaggtacaggatacgaagaaaggtggaggacttctagtttctcattttccatgaaagtcacttagaaggcatcactccctcctaataagtaaaaggctgaacagagttttaaaaaaatcaacaactcttttaggatccattagagaggtga

SEQ ID NO: 260336 - DNA, 467 bp, Homo sapiens
ttactaacttgttttcagtggtgctgtgcttcctgcatgatgcactcttttagaccagtgattcccacatttgagcatgcattcgaatcacctggagtgcttgttgaagcatagattggtggattccatcaccagcatttctgattcaagagatcacggtttctaacatrtttccaggtggtgccagtgccactggtaccacacagaacaattgttcaagacctttctttctgttgtctctcttctccccctccctctttttggaacagtgttttggctgctcttaattgggggcttaattaatctcacatcttggaaggtggtatgaggacttccaagaagggtccaaagacttcaaatgcttcacagtgaatataagcaagtagtgactggggtggagtggtaggtgagtcagtgtgaataacttgagagaacttaatgggcttattttaaggacaaaggggcat

SEQ ID NO: 260337 - DNA, 430 bp, Homo sapiens
tatgttctcttgcatctccctcatcaccagccagcctatcataggaggatgacagagatggaacagagccacaccagccaacccacagagtgacgcaaagtcatctcagccactgcaggcaaagcagagccgctccaggggacrtaaaactcccaggcaagagatacatatttcttgctgcatgctattcaggatttgtggttggttgttatgtggcattattatgtcaataagctaaccaacatgtcttccttctcctgacatcactctttattcctcctccaacacttttttttttttatcaaatccttgggcttgtaaaaaatttttttggcattgatttttataaatctggaggaagtttgtctccaactatattattctgtggcttcttagacaaaatatggataccctttttcaatatggccca

SEQ ID NO: 260338 - DNA, 432 bp, Homo sapiens
tatgttctcttgcatctccctcatcaccagccagcctatcataggaggatgacagagatggaacagagccacaccagccaacccacagagtgacgcaaagtcatctcagccactgcaggcaaagcagagccgctccaggggacataaaactcccaggcaagagatacatatttcttgctgcatgctattcaggatttgtggttggttgttatgtggcattattatgtcaataagctaaccaacatgtcttccttctcctgacatcactctttattcctcctccaacacttttttttttttatcaaatccttgggcttktaaaaaatttttttggcattgatttttataaatctggaggaagtttgtctccaactatattattctgtggcttcttagacaaaatatggataccctttttcaatatggcccagg

SEQ ID NO: 260339 - DNA, 618 bp, Homo sapiens
ccctggcaggttctcagagcctacctcttccttgtayatttgcatacagcctggtaacccccaggcatgcatatgtacaatgtgaccacacacagcctgacatctttcacctgtcaagtccaatttaaccaggaattggcatttgttaccataccctgcctcttgctttgcagagagcttctacagcaaggctgagtccttcccacagtcctccatgcctgctctttagggtctaccccagcccatgttttttgggaaggatagagaagcagaggaccctctttgctttcctgaaagtagccatgcccttgctggagggttcaccacagcaattggtgggaaagggtcttaaccaatctccaacacttttcttctcctgaaactgagaaggggtaaggaagtagctaggtccccttggacggagcatggacatgagacctgtgagtactggtgtctctccttcagagctttcatctttggttcgctgtagactctgggactatcagaagagaactgacccatacctgtctagccctgcccttccaaaaaaagagcctcccattaaagaggagttagagctgggccttgaggctcttcacttctttcaacagatattta

SEQ ID NO: 260340 - DNA, 618 bp, Homo sapiens
ccctggcaggttctcagagcctacctcttccttgtatatttgcatacagcctggtaacccccaggcatgcatatgtacaatgtgaccacacacagcctgacrtctttcacctgtcaagtccaatttaaccaggaattggcatttgttaccataccctgcctcttgctttgcagagagcttctacagcaaggctgagtccttcccacagtcctccatgcctgctctttagggtctaccccagcccatgttttttgggaaggatagagaagcagaggaccctctttgctttcctgaaagtagccatgcccttgctggagggttcaccacagcaattggtgggaaagggtcttaaccaatctccaacacttttcttctcctgaaactgagaaggggtaaggaagtagctaggtccccttggacggagcatggacatgagacctgtgagtactggtgtctctccttcagagctttcatctttggttcgctgtagactctgggactatcagaagagaactgacccatacctgtctagccctgcccttccaaaaaaagagcctcccattaaagaggagttagagctgggccttgaggctcttcacttctttcaacagatattta

SEQ ID NO: 260341 - DNA, 618 bp, Homo sapiens
ccctggcaggttctcagagcctacctcttccttgtatatttgcatacagcctggtaacccccaggcatgcatatgtacaatgtgaccacacacagcctgacatctttcacctgtcaagtccaatttaaccaggaattggcatttgttaccataccctgcctcttgctttgcagagagcttctacagcaaggctgagtccttcccacagtcctccatgsctgctctttagggtctaccccagcccatgttttttgggaaggatagagaagcagaggaccctctttgctttcctgaaagtagccatgcccttgctggagggttcaccacagcaattggtgggaaagggtcttaaccaatctccaacacttttcttctcctgaaactgagaaggggtaaggaagtagctaggtccccttggacggagcatggacatgagacctgtgagtactggtgtctctccttcagagctttcatctttggttcgctgtagactctgggactatcagaagagaactgacccatacctgtctagccctgcccttccaaaaaaagagcctcccattaaagaggagttagagctgggccttgaggctcttcacttctttcaacagatattta

SEQ ID NO: 260342 - DNA, 585 bp, Homo sapiens
ttatgtttagagacagactcttgctatgttgcccaggctgactttgaactcctaggctcaagtgattctcccacctcagcctcccaatagctgggactacaggtgcacatccctgtattcagctttctattgcttctgagtcagtttcagtgatttttgtctttctagaaatttgtccatttcatctaatttatctgatttgttggtatactgttgttcgtagtatacctttacaatcctttttatttctttaaggttagtagtaatgtcccctctttcatttctgatgtattaatttgaatcttctcttttattttgttggtcaatatttgttgatctttacaaagaacctatttttttttgtttcactgacatcctttattgtttttccattctttattttgcttatttccactctgatttttgtaattttctcccttcaatttgctttggctttaatttgctcatctttttccagttttttaagccatatattttatatgctyaataggtgggagttaaatcaaaagcaatataaatagtagctgtgattcttaacctataaaaatcttgcagtcaattaag

SEQ ID NO: 260343 - DNA, 633 bp, Homo sapiens
tgtcaaccctgtggcatcagcggtgtcaatgccaaaccacattaggatgctggagtagaaaagcacaggaggaaaaggaagaagatggtctaggagagaacaacctcaaatgctttccagtaggaagggagctggggcatattaggacaagtatgtgagctggcttagaggacttgggtttgaatcttgattctgtgatgtttggaaaggtaaaaatctgtgactcagttgcctcattgatacaaaaaaaagaatcctatcttctatggctctagtaaagcttaaatgtatattaaacttatatataaaggtrcattattgctacaaaagacccaaggcaaatttacactacctccccatgatgtccaccacaatgctttgcatggagcagcttctcagtgtatcaataggactccactgcctacaccaaaattaaatagttgggaaaaagtggatcaacttgggaaaagcaaacttgctacttataggaaatatgataaataccagaagatagaaaataaaatatttttattatggttatttcacactgcaaatattcacctgaattttatagatgattaaaaacaacaagagttaaggagtttggaaattcttgtttccttttgaatacac

SEQ ID NO: 260344 - DNA, 526 bp, Homo sapiens
agatgtttccacaagacaccgcaagggccatctctcctttcacatctctagttattcctaaaattctatccttacaacagtggagctcattaatatagtaaatatttgttatttttggccttacattctcatttyccttgtaaggggaatcttttactttgtgagacagagcctggctcccattaaagccatgaatgccgaagactaacttaccagtctcccatgtaattagggtgtagaaatatgaccagcctctgccagtaagatgaatttggctggacatggtagttcacatctgtaatcccagcactttgggaggctgagtcaggtgaaccacttgagcccaggggttcaagaccagcctgagcaacatggcaaaaccccatctctacaaaaaatacaaaaaaaaaaaaaaattagccaggcatagtggcacatgcctgtagtccctgctgcatgagaggctgaagcgggaggattaccctgagcccaggaggtcaaggctgcagtgagccatgattgtgcc

SEQ ID NO: 260345 - DNA, 526 bp, Homo sapiens
agatgtttccacaagacaccgcaagggccatctctcctttcacatctctagttattcctaaaattctatccttacaacagtggagctcattaatatagtaaatatttgttatttttggccttacattctcatttcycttgtaaggggaatcttttactttgtgagacagagcctggctcccattaaagccatgaatgccgaagactaacttaccagtctcccatgtaattagggtgtagaaatatgaccagcctctgccagtaagatgaatttggctggacatggtagttcacatctgtaatcccagcactttgggaggctgagtcaggtgaaccacttgagcccaggggttcaagaccagcctgagcaacatggcaaaaccccatctctacaaaaaatacaaaaaaaaaaaaaaattagccaggcatagtggcacatgcctgtagtccctgctgcatgagaggctgaagcgggaggattaccctgagcccaggaggtcaaggctgcagtgagccatgattgtgcc

SEQ ID NO: 260346 - DNA, 583 bp, Homo sapiens
gtgaagataattttggttgaaactggtaaaagaacagggtctgcatctaatttctcctaaaaatatttttaaatatttcacatggaaaaagcaaaatagtgcacagagattcacactataatcttttattcaagaaagaacagaggaattcactggaaaaggaaagatcccagtgaagagaggatgggtagacagyctgcatgccaacaactgactgagaactgtgagtaaagccctaatatgggagagtgagagagactgtttctctgtgatccagctttccacggggggaccatgcaatccaggccatggaagagcaccttgtccctcaccagccctggtgctaacttggagaaaggctggcaggctgtaagaaagaaaggctccaggaagtgccccaagcatttttccagacccaaacctcagcttccatgatatgattattatgtattgtatgcctatttaaaaaatctcatgtactccataaacacaaacacctactatgtacccacataaattttttaagaaccatatgatcatctatatagatgcagaaaaagcatttgaaaaaagtcagcattct

SEQ ID NO: 260347 - DNA, 510 bp, Homo sapiens
  misc_feature (1)...(510): n = A,T,C or G
cccaccgggatgacctgtgccagcccaagagccttgatgtgcctgacctgccctccatgcttcctccccagccagcttaggaacggcagcygaggccgactccagaggagtctcatcattcatggcagttacattccatgaagtcgccccgagcaccaaattcttgaatagggagccattaccccagggggcaccagggtgaggttcctgtgagcctctgtctcaacatttttgttacccgatcaatatataaccttgttttatgtgtgagtctgtttatttttttgtttgtttttgtttgtttttgagatggagtttcgctcttgtagacccaggctggagtgtatgtgcgcacgagantnctcggggctttacancgtcgcaacctctcgcgccttcccaggttcaagcgattctcctgcctcagcctcctgagtagctgggattacaggcgcccgccaccacgcctggctaatttttgtatttttagtagagacagggcttccccat

SEQ ID NO: 260348 - DNA, 591 bp, Homo sapiens
ggtttctaggccctttcagtggactgagcaaggaaacaactgcacttgtatgcaaagataacaaaccttatgagatcatattgattccaattcaaaatcaggactacagagcctttattttacctcttctcaatgacatctaagcatccttcctttcatagcaagaatcctggttctcaaggatacacataactgcttgctggttttaagcctatattacacatgccagttgcaaaataatcacattaatgctattattaatataattataaaaacatgaataactkttgcatttattttccctgttcttccgtcatttaaaaacaattatcctatatttaaaagggtacatgaccagggcctactatgctcactccttcttaaaccgcatttagttttcatttcagatctttgcgctcatttatgtattgatgtctctctagttgttttggttatataaagtatatgttctcgtcaatcacttaggaagtcctcaaggaacaacattctctaattctttcatgttattaataacaacagtttttctgtgttcttaatactcaaaagtcggtttttctgaatataaaatta

SEQ ID NO: 260349 - DNA, 591 bp, Homo sapiens
ggtttctaggccctttcagtggactgagcaaggaaacaactgcacttgtatgcaaagataacaaaccttatgagatcatattgattccaattcaaaatcaggactacagagcctttattttacctcttctcaatgacatctaagcatccttcctttcatagcaagaatcctggttctcaaggatacacataactgcttgctggttttaagcctatattacacatgccagttgcaaaataatcacattaatgctattattaatataattataaaaacatgaataacttttgcatttattttccctgttcttccgtcatttaaaaacaattatcctatatttaaaagrgtacatgaccagggcctactatgctcactccttcttaaaccgcatttagttttcatttcagatctttgcgctcatttatgtattgatgtctctctagttgttttggttatataaagtatatgttctcgtcaatcacttaggaagtcctcaaggaacaacattctctaattctttcatgttattaataacaacagtttttctgtgttcttaatactcaaaagtcggtttttctgaatataaaatta

SEQ ID NO: 260350 - DNA, 588 bp, Homo sapiens
cagatgtgaagaaatatattgcgtataaggagaataactatatatcaaaacattctatgtcactctaacacacaccatccagttcctttcttttgctgtgttttctactatgttacattatgacactatttatagagcttttaaaaacttgttaatgaagatctttcttatcatttagactataagttctttgaagtcagggtccatgtctgcttkggtttattactaaatctaattaagaaccacttcactctctgcaattggagtaacaaaaaaactaccagtttaatgaattaatatgctttcaatattgctttcaaagtagaaggagacagtttgattaaatcatatagcaaccatgaaatacaccaaatacatgtttgcttttaatatctagaaatgttaaactgagaatttctttataaaaattcttatattcttattaggaaaagtaagttaaaaaaaagctatttgtaccacagaaaatagtgtatataatactaaaaatataaaaaaatacatttagaatttcagatattagcaatatttttccagaatctatcctgatactctttgattaaaaaaagt

SEQ ID NO: 260351 - DNA, 591 bp, Homo sapiens
gaactatataaaattttattacagattggcattaacagataagcatttgcaataggttgtttacaayaaactttattgagatagaactcacacaccatgcaattcgcccatataaagtgtacagtccaaaagccttgtagtatatattcagagttgcgcgataattagcatgattttagaaaattttcatcattccaaaaagaaactccacatccattagcagtcaccccacattttctccaactctctaaagccctgggagatcaataatttactttctgtctctacagatttgcttattctgaaaatcacacataaatggaaccatacgatatgtggtcctttgttactggcttccttcacccagcacgttttcaaggttgatccatgttgtagcatttatcagtgttttatttctttttattgacaaacaacatttcattatacaaatgtgccacattttgcctactcactcatcagctgatgaacactgggttgtctccactttctattatgaataatgctgctatgaacattcatgtacatatataaatgcttgttttcatttctcttgggtataaatttaggagt

SEQ ID NO: 260352 - DNA, 591 bp, Homo sapiens
gaactatataaaattttattacagattggcattaacagataagcatttgcaataggttgtttacaataaactttattgagatagaactcacacaccatgcaattcgcccatataaagtgtacagtccaaaagccttgtagtatatattcagagttgcrcgataattagcatgattttagaaaattttcatcattccaaaaagaaactccacatccattagcagtcaccccacattttctccaactctctaaagccctgggagatcaataatttactttctgtctctacagatttgcttattctgaaaatcacacataaatggaaccatacgatatgtggtcctttgttactggcttccttcacccagcacgttttcaaggttgatccatgttgtagcatttatcagtgttttatttctttttattgacaaacaacatttcattatacaaatgtgccacattttgcctactcactcatcagctgatgaacactgggttgtctccactttctattatgaataatgctgctatgaacattcatgtacatatataaatgcttgttttcatttctcttgggtataaatttaggagt

SEQ ID NO: 260353 - DNA, 591 bp, Homo sapiens
gaactatataaaattttattacagattggcattaacagataagcatttgcaataggttgtttacaataaactttattgagatagaactcacacaccatgcaattcgcccatataaagtgtacagtccaaaagccttgtagtatatattcagagttgcgcgataattagcatgattttagaaaattttcatcattccaaaaagaaactccacatccattagcagtcaccccacattttctccaactctctaaagccctkggagatcaataatttactttctgtctctacagatttgcttattctgaaaatcacacataaatggaaccatacgatatgtggtcctttgttactggcttccttcacccagcacgttttcaaggttgatccatgttgtagcatttatcagtgttttatttctttttattgacaaacaacatttcattatacaaatgtgccacattttgcctactcactcatcagctgatgaacactgggttgtctccactttctattatgaataatgctgctatgaacattcatgtacatatataaatgcttgttttcatttctcttgggtataaatttaggagt

SEQ ID NO: 260354 - DNA, 598 bp, Homo sapiens
gacacaggccctttttgttttttgcttgcacattctgtaattagaaaatgttattttatagacacacatatcaaataataggagaaaaaagatatttcatgtaagattagtttattctcaatattctgaattagaatattggattaaaacaatatttagaatgatagaagctggattaaaacaactttaaaacaagcatttgtactgcattgacatctctatacaagttgctgtcatactagttgagaagagcttggggacctggacttgggagatttaatggaccgataaaattactcagaggggtaaccttataaagaattctgaaaccaagaatttggaagtctaagaaaagaagggacaacaatgcaagttgtccaaccaaaacctctcttccctactttcttgtttctgaatgccatttttgtttgaaagagcaatgtgtcctgccaaataactacaatgcccagtctccttgcccttgtggctggtgacatgttatagtcctgtagaaasatacgtgggctgaagttcttgaaaaggacactttgttcttcaacttctcccttcctgccctgatataaaaacatgataacac

SEQ ID NO: 260355 - DNA, 385 bp, Homo sapiens
tggccaggctggtcacaaactcctgacctcaggtgattggcccgcatcagcctcccaaagtgctgggattacaggcgtaagtcatcgtgcccagctaagattactaatatttataagctctaccttctttcttggagaaatgactttataatttcactttctaattcagttacctgttgaaactaaattaaaatatattcatatgcaaaatgcaagtaaataaaaacagcagctttctctatgctaaaaggaagttcctttggagctcatttccttgacaaygcaagaaagtacttcactgcactatcttcattatgcaaataaaggtgcattttagctctttgaagaagaagaggaagaacatgtctctcaaatggcaggaaag

SEQ ID NO: 260356 - DNA, 536 bp, Homo sapiens
tgcaaaaaataagggcacaaaaagaaatgagtaattttgatcagaaatgtattaaaattaataaactggaaatttgacatttaaaaaaaagcattgtcrtccaagtagatgtgtctattaaatagttgttctcatatccagtaatgtaattcttattccccctcatgcagttcagattctggggtaatctttagacatcagttttatcttttatattatttattctgtttactacattttattttgctaatgatatttttaatttctgacattctggagtattgctcgtaaaaggtatttttaaaaatattttatggttatttttgtgattcctattcctgtatggacaccaaggctattgacattttctttagtttcttctgttaattctattttcttagtgtttatatcatttcatagataggatattctttattttttatttttatttaaatatttggtgattcttggttttctcagccatctattgtcaagtgttcttattaagcattattattaaataaagattatttcct

SEQ ID NO: 260357 - DNA, 536 bp, Homo sapiens
tgcaaaaaataagggcacaaaaagaaatgagtaattttgatcagaaatgtattaaaattaataaactggaaatttgacatttaaaaaaaagcattgtcatccaagtagatgtgtctattaaatagttgttctcatatccagtaatgtaattmttattccccctcatgcagttcagattctggggtaatctttagacatcagttttatcttttatattatttattctgtttactacattttattttgctaatgatatttttaatttctgacattctggagtattgctcgtaaaaggtatttttaaaaatattttatggttatttttgtgattcctattcctgtatggacaccaaggctattgacattttctttagtttcttctgttaattctattttcttagtgtttatatcatttcatagataggatattctttattttttatttttatttaaatatttggtgattcttggttttctcagccatctattgtcaagtgttcttattaagcattattattaaataaagattatttcct

SEQ ID NO: 260358 - DNA, 412 bp, Homo sapiens
ctgaagttttttttattagcagaaggagctttggggctgagactatggggttttctagatatagaatcatgtcagcttcaaatagggataattttacttcctctcttcctatttggatgccctttatttctttctcttgcctgattactctggctgggatttcctatgttgaataggagtcatgagrgagggcatcaaatctacacatatcaaatactaaccttgaatgtaagtgggctaaatgccccacttaaaaggtaaaggggggcaagctgaataaaaaagcaagactcaatggtatgctgtctttgagacctatctcacatgtgatgacacccatcggctcaaaataaaggaatggaggaaaatctaccaagcatgtagaaaacagaaaaaagcaggggttgcatcc

SEQ ID NO: 260359 - DNA, 613 bp, Homo sapiens
gtatgtttttttcaatgttgtcaaacatccattgactgtaggtaggtccctttataaatatccactaataaagtgacaaagtgcctttgtcactttattcctggaatttctattttgctctattgagtattgtgtccatttttatatcastatcatattgtttttgttactatagccttatagtataattagaaggaatgtaaatttgtcccacctctattaaaacagtatgaaaattttttcaagtattaaagagccacaattcactctatcaatcctatactgggtgtatacccaaaagaaaaaatatcattataccagaaaagatatttgcactcatttatttatagcagcaatattcataataccaaagatattgaatcaacatgtgtccatcaacaaataactggataaagaaaatgatgtgatatacatatatacatatatacacacacatacacgcacaatgaatactacacagctataaaaaataaaatcatttcacttgcagcaatatggaaggataattttacactttatgtcttagtctgttttgtgctgctgtaacaaaatacctgagactgggtaatttataaaaaatagaaaattattt

SEQ ID NO: 260360 - DNA, 613 bp, Homo sapiens
gtatgtttttttcaatgttgtcaaacatccattgactgtaggtaggtccctttataaatatccactaataaagtgacaaagtgcctttgtcactttattcctggaatttctattttgctctattgagtattgtgtccatttttatatcactatcatattgtttttgttactatagccttatagtataattagaaggaatgtaaatttgtcccacctctattaaaacagtatgaaaattttttcaagtattaaagagccacaattcactctatcaatcctatactgggtgtatacccaaaagaaaaaatatcattataccaraaaagatatttgcactcatttatttatagcagcaatattcataataccaaagatattgaatcaacatgtgtccatcaacaaataactggataaagaaaatgatgtgatatacatatatacatatatacacacacatacacgcacaatgaatactacacagctataaaaaataaaatcatttcacttgcagcaatatggaaggataattttacactttatgtcttagtctgttttgtgctgctgtaacaaaatacctgagactgggtaatttataaaaaatagaaaattattt

SEQ ID NO: 260361 - DNA, 549 bp, Homo sapiens
atctgggctctatggagtgacaaaattatgcaaaaaaaaaatgaagtatgtcatttttgcacaaagctcaggatttctcaaaggaatattacataaaataatgaagtctcctttatctccaagacagtccagtcttagaacgcaatggaacatgccatttgaaataaaaaacaaattttgtttttgttttgtttwgttatgtttggtgctattttaagtatttaacattcataaagagagaattagcaattaatgagataaagtttaaaaaaaatcgagatcaggacaaggtaaaaaaaaatcattcagtcttgcaaatctgttatttaataggtcatgttttaagaactgggaatacagatactacgtgtattttaaatagaaaatttgaaatgtacaagaagtcatttttaaatatagtcactctgctataaagtcaatctctaaaactcaatctttgtgtctaactgaaactgtaccctgtgaacaacatctccccattccctatcccttgcctccagcattaactagcattctactctctacttt

SEQ ID NO: 260362 - DNA, 330 bp, Homo sapiens
atgttttaagaactgggaatacagatactacgtgtattttaaatagaaaatttgaaatgtacaagaagtcatttttaaatatagtcactctgctataaagtcaatctctaaaaytcaatctttgtgtctaactgaaactgtaccctgtgaacaacatctccccattccctatcccttgcctccagcattaactagcattctactctctacttttaagggtttgccttttttcgattgctaaaaagtctattttcagtgttctcacaacaaaaagataaatatgtgacataagagatgtgttaagcagcttgatttaatcattccacaata

SEQ ID NO: 260363 - DNA, 330 bp, Homo sapiens
atgttttaagaactgggaatacagatactacgtgtattttaaatagaaaatttgaaatgtacaagaagtcatttttaaatatagtcactctgctataaagtcaatctctaaaactcartctttgtgtctaactgaaactgtaccctgtgaacaacatctccccattccctatcccttgcctccagcattaactagcattctactctctacttttaagggtttgccttttttcgattgctaaaaagtctattttcagtgttctcacaacaaaaagataaatatgtgacataagagatgtgttaagcagcttgatttaatcattccacaata

SEQ ID NO: 260364 - DNA, 602 bp, Homo sapiens
taaagcttaaagctctcattttgtaggttgtctgcttatttgttgataatttcttttgctatgcagaagctcttagtttaattaggttccaaaaagaggtaggggtagagggacaagagccaaggaacttcctgttaggtattcagttcactacctgggtgacaggatcagtggaagcccaaacagtagcagcaagcaatataactttgtaacaaacctgcacatataccccctgaatctaaaattacaattaaatctctatctatatcatctctctctctmtctatctatctatctatcgatatttgtaaatagcttacacttgcttaagtggttgttatttaagagctgctgaagtggctgaaatttgtataggaaaggaaaaagaggcatggggtaggcctacagaagccagaataagtatttggcaccaatttcgtcaaaagctgctctatacctgagcagggttaacatctgcaagacctgctgaaagcagatactgtgggaataagatatcagtagtaacaggacaaggagatgtttgggttactgactagccacagggaagatattttacggaatattccaggcattaagaacaa

SEQ ID NO: 260365 - DNA, 563 bp, Homo sapiens
aattaatcaaattaaatggtatcaatcaaatcaaagcaagtgtatagcatgctgctttgcgggccccatcttgggragcaagaatcagaccaaagctctagtttggttgatgtgggttaattcctatctccccataccatgacacttactgaagcagcatagaaaaacaggatcattaggtgggaaagaaagaggctgtcccttagcaatgtattcagctggcttcaaataaggggggaaggtgatctggggaggatgaagtccctttttcaataccacaatatcaataacagcaatacatattttctgaagcaccatgttaggagttggggagttactgattagtaaatgcagcaatggtccctgccctcttggaatttcaggtccagtgtgtcaggaggggaacccaatgtttgtagagctctccagatgtgctagtatgtgatgtggattatcttattaaatactcctaatgaccctgtggggggcatattatgatccctgttttgtagttgggaaactgagggtgcaaatggtttagctttgcttatattcacaaatca

SEQ ID NO: 260366 - DNA, 606 bp, Homo sapiens
tgtacttcagtttcatctttaaattctcctcttcagcagaaagatacttgtagaaagaatttcaaataggaggtaaatagacatacaacgcaagccttgacttgttgctgagcacagtaaaacaagctgcagtctcccccagggctattaaaactaaatgcttgaaagtagcacaataaatgtacaatttaatatagtataaatttgctttatattatagaactagaaccttgaaaattcattgcaattaataaccaatttttatggaaagttaaaattacatttgtctctccaattttaaatgcaaatatttcaaataatgcttggaaactggcaaatgggtcatttataaagttactagtttttagctgatgtgtctgcttcttgatcagtagacttgacttcagtgaaaagcagctaatacacaataatctgttraaagaccaatggcctacctctttatagctgaatgaatgctacagagagcaggttatttccacttgctttcatctccttagtgaatgcagaatctgaaataggtgtttgaatacacagggtttggttgaccagggccacattttgagggcagggctatctgaatgagaa

SEQ ID NO: 260367 - DNA, 611 bp, Homo sapiens
atcccttttcctctgttactcttaaggtgaatgggataaaactgctgatacgcaactattttgagctagaaagarcaatttcatgattccacctaatacatagttttgagaatcaccatagtaaaggaacaaataatattctttggagttgatgtaccatgatttatgcaagaacttcttattgttgaccattttggttatttttcatttttccctattaaaaatagttctgtaataacaatcttcacatatgtaaattattttctttctttgaattatttttctgggatagatttccaaaagaagctccacttttattttgaggcccaaggtactgtattcattttgcccatattaatcacttccataatctgttccttaggtctggctgggagttaaatgtgttgacagaaccaactcagaaaacaatgggaattctagaaaccagaacctggtgcttgtcacagctgaggcagaggggcaaagagcaaagatatggcaggaattcttctctggaggcctgttaaatttcagcaagaattaaaaaaaaaaagacatttcattcatattgacctgtcaaggaagtcacaaaaaaagaaatgcacagaaag

SEQ ID NO: 260368 - DNA, 673 bp, Homo sapiens
gcgtgcagtgtgcatctgtaatcccagcactttgggaagctgagttgggaggatcacttgagtacaggagttcacggccacagtgagctgagatgacaccactgcactgcagagcaggacctcatttcataaaacaaaaacaaaaacaaaaaaacgaaaaagaaaaaatgtgtgaaaaaggaaaatttaagaaaatgcacagatgatgatttaaaaaacaaagaacagaaatctaatatttatggatccctcaatgtgtagtaaaggtatacaaacatggagggggagagcacctcccaaattgtgctactgatacggaagtgctgggtagagaagggcatggtccctttaaatgctacggaagagaggaagggaagtgctgagtagaggagggcatggtccctggactaggtctccacctccaggcctgtgtcccagggacctakgtgaggacaggcatttttgttttcctgcccaaatgttgcatttcccaagaacaccctggcttgccatgcccctatcctgtgcctatataaaacccctgagagcctagtagtcagacacacagacagctggatgttgacaggaatgcaccggcataggagcacagcggcatgctggcagaccaccaactggcagaatgacatggaggttggccaaggcagtcaaagga

SEQ ID NO: 260369 - DNA, 533 bp, Homo sapiens
tcttctctatgctgtttattctagttagccattcgtctcatcttttttcaaggttttaacttctgtgggatgggttcgaacatcctcctttagctcggagaactttgttattactgatcttctgaggcctacttctgtcaacgtgtcaaagtcactctctgtccagctttgttccattgctatcaaggagctgcattcctttggaggagaagaggggctctgatttttgaaattttcagcttttctgctctggtttctccccacctttgtggttttatctacctttggtctttgataatggtgacctagagatggggttttggtgtggatgtccttcaagtttgttaattttccttctaatagtcaggaccctcagctgcaggtctgttggagcttgctggaggtgcactccagaccctgtttgcctgggtatcaccagtggasgcagcaaaacagcaaatattgcagaacagcaaatgttgccgcctgatcctctggaagcttcatctcagaggggcacctggctgtatgag

SEQ ID NO: 260370 - DNA, 533 bp, Homo sapiens
tcttctctatgctgtttattctagttagccattcgtctcatcttttttcaaggttttaacttctgtgggatgggttcgaacatcctcctttagctcggagaactttgttattactgatcttctgaggcctacttctgtcaacgtgtcaaagtcactctctgtccagctttgttccattgctatcaaggagctgcattcctttggaggagaagaggggctctgatttttgaaattttcagcttttctgctctggtttctccccacctttgtggttttatctacctttggtctttgataatggtgacctagagatggggttttggtgtggatgtccttcaagtttgttaattttccttctaatagtcaggaccctcagctgcaggtctgttggagcttgctggaggtgcactccagaccctgtttgcctgggtatcaccagtggacgcagcaaaacagcaaatattgcagaacagcaaatgttgcygcctgatcctctggaagcttcatctcagaggggcacctggctgtatgag

SEQ ID NO: 260371 - DNA, 564 bp, Homo sapiens
ggggcagtctaataactattacaacttcaaagcggacatgagcataaatcatgtttcaagatttctgtaacttataacgttacatgaaagtatctrtgacttctattgatgacaaagtcactgatattgccaatattgctgtggtttgtaacctatatttataattgaaggaaatgctgtatttcagttaaagggtaatgaaaataaagatgtgattttccccatccaaattcccagagcccctgaattctacctatggaccccaagttaaaaacctctgctgtaaagtcaggaaaaatcagtgaaagaaagtactacccaagtattttgctaatttgcttttttaagagaagccagaaactaaagtttattgaacatgtactatttgccagttctctctctccctctctctctctctctccatataattataacatatataatatatacatacacattatatatttaataattatgtacataacatcatatacatatttattcaatatacatataatttttatagcacttaatcctcacaaaacccagtgaatttaacagagg

SEQ ID NO: 260372 - DNA, 575 bp, Homo sapiens
tgtctctcctagatatagctgattctgcatctactctgtctttttwttcctctgttttgttttaatcccccaaaatatcattcttaggcattcactctgtcttgcaggtatagtcacatttctgctcaaagctcttgttccagaagtgaatacctgatataaatttctcacctaagtaatcaagatggtacaatactaaatggtgaagtaccaccttttaccaagaaatagccacaatatcccctttcgagctagtttgctaaacctaatgttgataatccactgggtcattaagcaccaaaatgatcacttactttgcaaaacccctggtcatcattttttcattgcttacaaaatgtttgcataaccagtatttttcagactgcttcatttcatatttgaattttttaagcccgtggcgtgcttagcttgggaaaatctttttgtgccaggctgattatgtatccagattgaactgcagcctgttgatttaggtctttgtgtccgataaagggaaaactctagaaaaaaaaaaagcatagttctgtccattggcccagtcaaaatgagcagtc

SEQ ID NO: 260373 - DNA, 592 bp, Homo sapiens
agagattgtaaaacctgctttcaggaagggtattgagactttgggaattctacaaagtgtgattgacttagaggtgtgtttacatataaggtgctaattcacaaactctttaaagtattggtcatcttcagctgtagcttcaaatcctcataaacctttccagatactagataggrctatagggtttgggattcctctgggggtcagttaatttaaaaagactgaggcaaatgccagcccgggtgtttatcaccaacgctcatcattgtttcccactttcctctttcttatcagaagtcaaaagcaacatgtaagatatgtggctatcagagggttatcgcttgttgccaagtgaaaaagcacagctgagttcggtttagcttgatggcccctctgttgaaattcaggatctcttatctttgcttccacttctcctgtctagacacttgacaatgatttgcaggaaattgaggcacttacccctgctgagaagccagagctaaaacatttctaaatataattttactgtgtatgtgtgcgtgtgtttaatgtgagttaatgttaattcaaaaggaaaacatgtttttttttc

SEQ ID NO: 260374 - DNA, 603 bp, Homo sapiens
tgagaaaatgctctgataaattcactttaagatctcagggccttggtattatcatctggtatccaagttctaaaagagtaaaagagaggctttgctactaaacagaggagaggaggactggggatttaactttcctgggggcagccagaagggatgccttcagggtgaagcctgctggggaaagagaagagtaatgactttcaaagttgccaaatttaagaaaaaaaatggagagagaagaaaaaggctttaagattttctctgcaagatgactagtgtaaagtacttccagttcattccccatctctcctgtgaaaccttccaattcaggggctggggggagagaaaggggagctaagtcatatgttcatgttgatgaccaaaaatgcttccctagtttcaagagccagagtgtggagtgggggaagcagctgcttggaccatgttttagggctatttaaaggattgatttttgcacaacrtacccaaatggcctcaggttgatctgattcagttaagatatttggggcctcaatgacattagctttcattccaaaacacactcaggaaggaggaattaagggcaagccagccatttgtaaa

SEQ ID NO: 260375 - DNA, 555 bp, Homo sapiens
gatgaaatgacttccaggaaagtagtggtgatcaacaatgtcatatggcatttaagttcaagtaagacaatgactttargctttggacttggcaaaatgaaggtcattggtgaccttgacaagaaaggttttagaagatgatgcagtagatggagtttaggacacaacaccccaaaatatggtaccttgacacttgaagaaacagcagaaacaagaaggtcattgtcttcttgacagttgaagaaacagcagaaaaaaggtcattgtcttcttacattttgtgctgctacagcagaatactacagactggataatttataaaaagtagaagtttacttggctcatggttctggaggctgggaagtccaagattgagaagctgcgtcttgtaagggccttctcactccatcataacatggtggaagacatcacatggtgagagagagcaagaaatgtcctaactagattctatacaaacctactcttggaataatgagccaatttctgtgaaaatgacataaattcattcatgagggcagagcctcaagacttagt

SEQ ID NO: 260376 - DNA, 555 bp, Homo sapiens
gatgaaatgacttccaggaaagtagtggtgatcaacaatgtcatatggcatttaagttcaagtaagacaatgactttaggctttggacttggcaaaatgaaggtcattggtgaccttgacaagaaaggttttagaagatgatgcagtagatggagtttargacacaacaccccaaaatatggtaccttgacacttgaagaaacagcagaaacaagaaggtcattgtcttcttgacagttgaagaaacagcagaaaaaaggtcattgtcttcttacattttgtgctgctacagcagaatactacagactggataatttataaaaagtagaagtttacttggctcatggttctggaggctgggaagtccaagattgagaagctgcgtcttgtaagggccttctcactccatcataacatggtggaagacatcacatggtgagagagagcaagaaatgtcctaactagattctatacaaacctactcttggaataatgagccaatttctgtgaaaatgacataaattcattcatgagggcagagcctcaagacttagt

SEQ ID NO: 260377 - DNA, 556 bp, Homo sapiens
ctaactatgtacttttatccagttatttgtctttatgttgaataaaaagtgtcattaccatggaaattgctttgttgcatcaggctttgtttgagataaagcaaaagaacacatgcttttttcacaatgcctgtttatattcatggataaaatgaaaactagagctataacattgttattaactagttcttttaaagcaacataaaaattataargagctaaactgaagagatccataggttactactggattcacaaaaaaacattcagagctgctgctgattcctttgtgttcttaaacattttcacaaatcttctgtgccccccacactttttaagatttgttttttatttatatacagcaaaattcacttttgggtatgtgtacagttctgtgagttttgacaaatgcataaaattgtgtaaccaaaggatacaaaacagtttgatcatcctcccctgaagttccctcatggtgatcccctcaaccttaactcttgacaaccacttatctgttctccatccctctcattgtgccttttcctgaatatcatat

SEQ ID NO: 260378 - DNA, 582 bp, Homo sapiens
tagtttgttatgtaggaactcaaagtatggagagagcctctggctaatggcctcctgcttatttaatttaacacttaacagataacatttayaggttctagaaattacaatttgatatctttgttggggcattatctggcctacctcaagctccaaaaggcctgttttataaagtatctctttgatgggagttaacttcaagggggcctgtctacccgcaaggggcatgtttatgtttggtggtaaatttgaggaagaaagaccaggtgatctcttaatcccatgagtctacttcctagaaacattactggatcttcatgtttccatgatgtatttaacaacccagccaagaattttatatatattacctaatgtacttttcaagtttcaagctattctaagctttgtctcagatttgtggtaaacatggtgtgcatttgtgactggctgaaatgcctcattttggcttggttcatacaaagtgctgatatttcccagaaaccttattgggtcaggaaacttcctttttgttcattttattagttcctgtgttaaactggtggaactttttctatttaaaac

SEQ ID NO: 260379 - DNA, 479 bp, Homo sapiens
gggtgggtggtggggcttgggttttgagaatctatttgttcatttaataaaaatattagacaccctgtaaaggttagttwtattcgttagaggaaaggtacatttatggccatagactatgacctgaatttaaggccagataaattaaaagggcttgttactaagcctaggaagagcccaggtgaacacatttggaaggattaggaaaactcatcatctcaacaagggaaaaataatttgacaaaacatgcatgcacaggttcactagcatgatctcaagttaaagggaatttgcttggaggctgagacgagcatttttaacaaaattcaggaacaattttgaagacagagtagaattttttatttggaagacttctattttgaattatatcagaaggtaatttctttttttttgagatagagtctcactgtatcacccaggctggagtgcagtggtgtgatctcgggtcactgcaacc

SEQ ID NO: 260380 - DNA, 479 bp, Homo sapiens
gggtgggtggtggggcttgggttttgagaatctatttgttcatttaataaaaatattagacaccctgtaaaggttagttttattcgttagaggaaaggtacatttatggccatagactatgacctgaatttaaggccagataaattaaaagggcttgttactaagcctaggaagagcccaggtgaacrcatttggaaggattaggaaaactcatcatctcaacaagggaaaaataatttgacaaaacatgcatgcacaggttcactagcatgatctcaagttaaagggaatttgcttggaggctgagacgagcatttttaacaaaattcaggaacaattttgaagacagagtagaattttttatttggaagacttctattttgaattatatcagaaggtaatttctttttttttgagatagagtctcactgtatcacccaggctggagtgcagtggtgtgatctcgggtcactgcaacc

SEQ ID NO: 260381 - DNA, 630 bp, Homo sapiens
aagtgaaaccttcctacctattctatttaaaatttcaccctctcctcccagatactccctcatcccctctctgctctgtttctctcatggcatttatcaccacctgacatatgattgattgattgatatcatctacaaactctaaatttaagctatatcagagcaaaagtttttgtttgttttgatcattgctctattctatatctggaacattgccaaacaattaatatccctcaaatatttgctgaatgtataaattaaccctttttggaaaaggatctggcgatatttattcatactaaaaatgtgcacgataattttactcagcaatcttacttatagattaaagttggctgcatatgaatttgctactcctcctayggataggtttatgtccaatcctcttgaatctaggtgggctctatgactgactgaccaataaaatatggttgaaaggacactgccagtttccaggaccaggccttaggagattagcagtttccattttctctctcttgaacatttgcttctagaaccagctgccatgctgtgaggaagcctaagcagtccatggagaggcctaggtggaaaggaattgaagtcctttgttaacagctcccaccaatagcc

SEQ ID NO: 260382 - DNA, 550 bp, Homo sapiens
gaaagattatgtttctgctttagtgtagtcagtcctcctacgtgttagcagggaggaaatcttcaatactggtatgacagggccaagctttgtggtggttttggaacctggttatagggatttccaagtggaaaacaaaactgtctagttactaattttggaagttttcagatacctttgactcctttttaggggatcttcttagaaatagrttttcagagggtgactagtaaatcattttccttcacgtggaagaaggggagaatacttctgtaatgtagtgatttatttgctgtgtggagaggcgatgtgaaagcagaacttgctttgaagattagggacctgtctttcattagtggtgaggaagtggaaagaggaatcaaaagaaccaggctctgatcctggttctactactgactagctgactagctgactgacctctctgagcctctgtttacttttctacaaggagatattacacagaaagaaagattatgcctttcattgcctatagaaaacgatcagaatatgtgctttcctacaggagttt

SEQ ID NO: 260383 - DNA, 550 bp, Homo sapiens
gaaagattatgtttctgctttagtgtagtcagtcctcctacgtgttagcagggaggaaatcttcaatactggtatgacagggccaagctttgtggtggttttggaacctggttatagggatttccaagtggaaaacaaaactgtctagttactaattttggaagttttcagatacctttgactcctttttaggggatcttcttagaaataggttttcagagggtgactagtaaatcattttccttcaygtggaagaaggggagaatacttctgtaatgtagtgatttatttgctgtgtggagaggcgatgtgaaagcagaacttgctttgaagattagggacctgtctttcattagtggtgaggaagtggaaagaggaatcaaaagaaccaggctctgatcctggttctactactgactagctgactagctgactgacctctctgagcctctgtttacttttctacaaggagatattacacagaaagaaagattatgcctttcattgcctatagaaaacgatcagaatatgtgctttcctacaggagttt

SEQ ID NO: 260384 - DNA, 605 bp, Homo sapiens
tatttccttcaaaagctctccaactagtagaagacataaggcatgtgcaaacagaaaatgcatggcaacatttgatgggagcaaaacacacaaggaccaacccatttgtcaccagttagtagtgagagtttacgaaataggttggaagaggaggaaaacatgatgcactggttctgctacagacttcattcactggcttgctcagagcaagaaatgatcattatttcaattttaaagacctatttggaagaagatgcttgcctgatcatgaaccgttgcttaatatataacttgtcttctccaggtatatgtcaatgccattttattttatttttctcaatggccatggagaatacaggtttacttcttcaaggactctcaataatacactctttaaaggtttaatacattcrtgttaattttttgttttgtgctgggtttctttttcagtgtgtttatttcctttcctcttcctagaaaacgtgattatattccttagttccaagttctatcagccctaattcttcatgtctcgcttctggagttgatgaaataatcactctctttttagcatagaacaccagcataagaaaggcaagaaaagg

SEQ ID NO: 260385 - DNA, 599 bp, Homo sapiens
attgattttgtccagattcatcagaggaatcactatctatggcatttttagccctacaaattgtatttctttcttttttttttttctgagatggagtctcactctgttgcccaggctggagtgtaatgccacaatctcagctcactgcaacctctgcctcctgggttcaagtgatccccctgcctcagcctcctgagtagctgggattacaggtgtatgtcaccacacccagctgatttttgtatttttagtagagatggggcttcaccatgttgttcaggctggtcttgaactcttgacctcgtgatccacctgcctcagcctcccaaagtgctggkattacaagcttgagccactgtgcctggcctacaaaatgtatttcttagataataagacttgaaagtcaaaattattccttgatccatgggctgcagaatgatgttgtgatatcaggcatgaaaataacattaatcacattgtacatctccatcagaattcttggatgactaggtgcattgtcaatgatcagtaataccttgaaagcaatttttttttttttttgcagcaggtctcaacaatgggcttaaaatattcagtaa

SEQ ID NO: 260386 - DNA, 617 bp, Homo sapiens
caagtgatgtcttagaaattccctctaatttaaagtactctacagttcagcatctgtgaatgtccccttgtgagctagaaagactaatgatcaaaaaggaaccagtgagatataaagatatttaacttctctcatgtaagtttagtgatttagaaaagactgatatgacagtttttgtcttattttaatgacctttcccgcatgcagctccctgattcccataataacactttgtttatacagataattttctttccagcagagctcttacatgctttcataacctttttcataaatcaagtcaatgcctgtgaagtttgatggggccacgggtcagagtcttccccttgagtctgtcccatctgggggacacctggaatttgcgttttgttgcccttcctggacttgtaagtgggctgatgctggtgcagggacctgggggaatggcttgattgggcaggaaggccaccccacagtggcctaggggtaagtgcaaactctatgagaaacagaatgtctgagaagatcccccatgaagaaaccaaactccgaatgtgtgtccagattttrgaaagcttaagtcagagattcttgggttgagctttggttatctctta

SEQ ID NO: 260387 - DNA, 629 bp, Homo sapiens
gctttctgtgtccctctgcttgaaccacacttcagagttaccagcacacatcctgtgttctccactgctttccgatccatctcctcatcaagtacagatagcaaggctggcattgcttttaagctagacagaccttagagattccatgcaaggaatttgacacatagtggactctcaatatgggttcattccttccacctgtaccctattttttccagctaatattaactttgctcatttatttatttatttatttatttatttattcattcattcttctctctagctttaatcttggaaaatgagtaggctattgcatcccatttgaaaaaggcaacaccttgagctttgagcagtcaggaagagctttgtattctattttttcaacttttaagttcaatggtacatgtgcaggatgtgcagatttattacgtaagtaaatgtgtgccatagtggcttgctcacagatccgcacagatcatcccrtcacctaggtattaagcccagcatcccttagctatttttcctgatgctctccctcccgtcatccaagtgctttgtattcttagagaaatacaaatgcctcttttcttgggatctgctatcctattgaccacttactcagacag

SEQ ID NO: 260388 - DNA, 480 bp, Homo sapiens
tgtgtgaagcaccaagaaggaaagggttgggatttctgtctccaacctgttcaccagtatgggttttcttaagcctagagctatggaaaccattcctcctttaagaatgggtctatatatccgtagttattttgccaggaataacgtagacacccttctgtggtaacagaactcctgttcaaggtctcaaccagtgaattttttctgaagattcctaggagaaatatttctgtacacagttgcaaatgcattcacctacagcctgagaaatatttctatctttgcactttgattttgacatccaattcctccaccttgttcatctacacagaagaccctctttaaattctgtctgcttttgcttaattcactagcacattggaagcatcagggagaacatgaggctgttggatctggagtaatgggttctgaggaaggcaggatgtacaatatgaratggccccgggcagcctctgggac

SEQ ID NO: 260389 - DNA, 465 bp, Homo sapiens
ccttttatatgttcttatacaatgcacagctgtgcactaagcacacagagaggcgcacaacacaaaaccagtcacctgrtgagcaaagaagaatcaagggcaggggaaaagttgcagcgagatttttggctctttcttcttaggacactgtttttgtctgactataatgtaagactggagaattgttggctctagtttacaagtctggccacacttagagaatcctttccatgtggggaatcattttgatctgataggcagccacatacttgtcttatttgtctgggagtccagtcatgtcacctctttaatttccactcagactttcccacaatatggttaggagtttgaaaatattcgatatggtcagacctccaaggtttctaccatatgaatgtttaattggctctgaaattctcagccctgggaatcagttgctatcaccagaatctcctgagtcacttc

SEQ ID NO: 260390 - DNA, 465 bp, Homo sapiens
ccttttatatgttcttatacaatgcacagctgtgcactaagcacacagagaggcgcacaacacaaaaccagtcacctgatgagcaaagaagaatcaagggcaggggaaaagttgcagcgagatttttggctctttcttcttaggacactgtttttgtctgactataatgtaagactggagaattgttggctctagtttacaagtctggccacacttagagaatcctttccatgtggggaatcattttgatctgataggcagccacatacttgtcttatttgtctgggagtccagtcatgtcacctctttaatttccactcagactttcccacmatatggttaggagtttgaaaatattcgatatggtcagacctccaaggtttctaccatatgaatgtttaattggctctgaaattctcagccctgggaatcagttgctatcaccagaatctcctgagtcacttc

SEQ ID NO: 260391 - DNA, 465 bp, Homo sapiens
ccttttatatgttcttatacaatgcacagctgtgcactaagcacacagagaggcgcacaacacaaaaccagtcacctgatgagcaaagaagaatcaagggcaggggaaaagttgcagcgagatttttggctctttcttcttaggacactgtttttgtctgactataatgtaagactggagaattgttggctctagtttacaagtctggccacacttagagaatcctttccatgtggggaatcattttgatctgataggcagccacatacttgtcttatttgtctgggagtccagtcatgtcacctctttaatttccactcagactttcccacaatatggttaggagyttgaaaatattcgatatggtcagacctccaaggtttctaccatatgaatgtttaattggctctgaaattctcagccctgggaatcagttgctatcaccagaatctcctgagtcacttc

SEQ ID NO: 260392 - DNA, 513 bp, Homo sapiens
tagttttctctggaggtattaactattcagcactctgcacagggaaacttttgaagtgatgggaacaatgggcccatccttgctttgttccagccagttagtctgctgtgcttcagaaaaaacactgagagagacatgaaactaaacaaaaataagaattcacataaaattttcctaaaagaaatcttgagcattgacattgtaaaaatgattatccactcagtatgaaacagtgtgttttcttgtgtatatttctcttatctactttttccayatattttgagaaacaaatatttagttattagtaacacataccagttctctgagaatttgaagagagaatgagtgactccagttgtcaaaggtaactatacataaccacttttactctttttctctgaccatccaattttagttcagattctattgttacatacacttactgaatgacattttcttcatagcatttactactcattcaagtaaaatctgttttacaaatgtaaacacggg

SEQ ID NO: 260393 - DNA, 523 bp, Homo sapiens
gtccctgtgctatgcttctaatgaaactttattttgtcttgttttatgtaacacatttgaaaattctatcttttaaaatacattatttttattgctacaggggtattatgttatgatgctttcttttacagtttattcttgtattgactttagttccaaaaataaattaattcatatattacttttggtaatacctgaaaaaaattaagttattcacaaaatatttgtgaatcctgaatcagtgtaagttctattcaattacagaaatagtaattgcatacctactagcactatctgaagttatataaaatgagatttttgttttcttatttttgcttttgccttcttccagagagtattgagttccacgagagaaaggcctttgttggttcactgctggattgctggtttctataatatttcatggcacatagtaaactgccaataaatatttgctgaatgaattcacttattcagaaaatatttattgagtgtctcttktatgccacatatctaggcactg

SEQ ID NO: 260394 - DNA, 532 bp, Homo sapiens
agataagcccacaaagatgggaatcaatgcaaacatgctgaaaactcaaaaatccagagtgccccttttcctccaaatgacagcagygtctctccagcaaggtctcagaactgggctgaggctgagatggctgaaatgacagaagttggcttcagaatgtggataataatgaattttgctgagctaaaggagcatgttgtagcccaatgcaaagaaactaagaattagataaaacaatacaggagctgaaaaccaaaataacagtttagagaggaacacagtcgacctgttagagctgaaaaacacactataaaaacttcacaatgcaatcacaaatattaatagcagaatagaccaagcagaggaaagaatctcagagcttgaagactggctttctgaattaagacaggcacacaagaatagagaaaaaaagactgaaaaggaatgaacaaaacctctgaggaatatgggataatgtaaagagactgaatctacaactgattggggtacctgaaagagagagagagaatgg

SEQ ID NO: 260395 - DNA, 562 bp, Homo sapiens
tggtaggtatgagcttatgatattattgtctgacattgctgcatatgaaatattacataattacaacataatacmaaaagtctattaaggacacttatatggagaaaggagaagacatatgcaagatacaaataggaaacctaatacctcttgattggaattagaagaaacttgctacttaatgatgcccagactttctcctttgatgggaaaataattcatattaggattcccattagagttttgggagtggggtaagggtcaagaggagagagccccagatactttttaccccttgatctataatgcagcatgctttgtatgatttgaaagcccttttacttgattttttttttttttttgagacagagtctctctctgttgcccaggctggagtacaccggcacgatctcagctcactgcaacctccgcctccggggttcaagcaattctcgtgcctcagcctcctgagtagctgggattacaggcatgtgccaccatgcccggctaattacttgattctaatctttcacccagtctcattccctaccatttctcccac

SEQ ID NO: 260396 - DNA, 578 bp, Homo sapiens
ttgttttgacagagttctcttgtttcctccccattcttcagttccgaaggtctgtcatcttggatctcttactgaccagctgtgcgacctcagggacaccactcagcctagctgggcctggattgtttgagatttaaatgaggagtatgaaataaatagcatctcagggcctttctagctctagaattctcttcactgtcgtcatctggtattctgyaatggcaatttcattcattctttcttgaatacattctacgtctaatataaagataaatatctcacttatttgtgaagattttggtacagaggaatctttcagctatcgcgactaaccaacctatgtaatccactccatccctggccctctgctctgcttgatttttccttatacgccttatcattatattatatatgtttatgctttggctatccagcaaaagtcagattcattttgtctctggtagttagaagtagagggtgaagggggtggggaatatatgcttcctgctcccacaaccttgccatcaggcaatatattacaatggaagcaaatcctgccaagtgtactagcacaaaaa

SEQ ID NO: 260397 - DNA, 529 bp, Homo sapiens
tgctgacagcagggccaccagacttgtgggccagctaaacaagggaatgcccctttaattgtggggtgcaggataagggggctctagaatctggagtctagaccaggagtaccatttcaccaacttgaggctgcagggcttggaggacgcttgtatgttcattaggctaagggcagaacattctttccaatcattgcttatacagaacagcactcacatcatcagtgaaaaaatcayctccgtggtcattaacaaaccttctcatgcagatttctaaaatgatctttaaagcactaagtaaccatctctggcctgttgattcttgattaatgtgctttaaattatatgggtatgcattagagacaatttatctatcaatcatattgtttatactgaagtacttaaaggaaattatcacccagaccttatgatgagaggatgttaggttgcatgtgtacttgtttaactcactagaatgttagctccttgagggcaagacattgtcttccttatttactgccataactct

SEQ ID NO: 260398 - DNA, 616 bp, Homo sapiens
gggtaccatgagggaagttagggagatgtgagagtacggggagaggcagagaacacccctatccacatgccatccttctcctggcaagctcctactattcctttcagcacactcctagtcttgtccagcccccctgagaagctttccttcaactgccactaccctcagctcgatatcactttctatgctcctggctgcataatactttgtgggtatcttcaacattgcactcagcatgtatgttaccatgatctcgtctcacccatcttagtgcaaatggaggtttcatcttattaattttggggtctctggagcttagtgcagtgtttgacacttagcagatatttaatgaatgattatatgaatatgaaaaaaacgcawagaatatgtaaattaggagtgtattaaggacaaatctgcgtattagacaaatatttaagggtttcttgtacttttagcattgtaatgtgatagcttagatggattcagtgttacaaaagttcttttaggctaacctgatgacctagccatcatttttaatattttttctctaagataaatgaaattcattgtgtatttcaaataaccaacttccagatgaatctttagatcacaa

SEQ ID NO: 260399 - DNA, 581 bp, Homo sapiens
tacactatacgtttaaaatgaacccctcaattgcttgagcccattgtgccactgcactccagcctgagcagcagagagaacctgtctcaaaaaataaataataaaataaaataacctcctcaatgttaaagcaaggctaggtcatagcctccttcctttttcttgtatactataagagtgtgatactgttttaggagaatcagctgcttatccctctgccataaggaatagaaggatgagtattcacctaggacaaaaatctggcttaaaaaaaaaagaccctcataaattgaaattggtcaggtccttcctgtgagaagtacagacctacggtgtttctgttgtcagaaaggttaaatatcaattgaaataaaaacaaatgttgcttatttgtattaattcaggtmctccatgaagcagatgtcaggatgggattaaacatgcaaaaatgttattagaggaaatgactgtgagagaagatggagagggagtgaagtatgggagagctgcaatgcaactctaagcctgagcgaaggagggaggaaggagtatttgggtggaatctcccagactatccagta

SEQ ID NO: 260400 - DNA, 594 bp, Homo sapiens
tgcaatgcaactctaagcctgagcgaaggagggaggaaggagtatttgggtggaatctcccagactatccagtaatctaaggaaggtttggcaaggctgttggagacccagggatcatgacaacatcagcctcagaggagtcctgtgtgactcaggaagcagcctgcagtaatagtcctgtcaggtccagtcattgtctgggagcagcatgtgggaaaacacctctgtgcacaccagcacgataacacaaaggtctgccaggtgcattctcaccgcggtcacgctgttgctggcagacgctctccagcacttaagtagatgtcatcagataatcacaggaagtcatttcctttggtgatctagaagatgacttgtgctccagagcagcgtgaccatggccatggtaaattcgctagtatgagctaattagtgagtatctgaaaatrtttcaggctaaaacctcttccaccatttccatgtttctctgggttgcattaggaggtctccactgatctctaactcagctattagaggaaaatcccaaccagttgagacactctatagcttcatctccccatggaggcaggatagaat

SEQ ID NO: 260401 - DNA, 562 bp, Homo sapiens
gaatttccactggcttagttgtttatagggaaaactgatgctctgaacaactgaccaacccacttttaaatgttccaactggactgaaacaacgagcagggtctgatcaactatgctcacagaaaaccagagcccctagtccagatttctggcctgattaaactctcaaggatttgttcagctctagggtgggggagggccttcccagtcatgactgatattggttgtcttgctaacctatttgaacagaggcttagatttaatttgacttagaaaaataaagcaatatgacrtgtcttacacttgagtgttatgaaacaaatacatctctgcctcaatcatagtcaacacaagctctccctcagcaaaaatgtattgtgctcaaataacatcactgcattaaatgcaactgttacccagagtttttagtctactgtcattctcttcacactttgcccataacatggctgttacacagatttaaatgaagttaagaaatattatctaatagcaattaacagatgaaattgatgtgaggatgggacagaattctaaattcaag

SEQ ID NO: 260402 - DNA, 579 bp, Homo sapiens
aaatattttctccattgaaaatccagtgagtgctgaaaccaggccaggacccccacaatgtggctataagtggggaaaaaaaagttctacagggccaagcagtgtgtcaaagtttgggcccacaatagggtcaaccaaagcacaacgcaaaaagaatagagcaaacttagttgtggttgggacaagtatcaatgtcaggagagtccagtcttctggctaagacacagcaacaggtaaaatcctggctatattcaaaaacaggcatttaagaggccttacaattgttccttggtcttcagctaccactgcacaattcactattactagagataaatgagcaagaaagaggtgaagttgagaattcccataaatctcagcttaccactttcctgtatatcacctttttacagatggacacatacctgtgttatacatgacaatrtcatccaatatgtgttttccaattgtaatgggttgaataggcccccaaaatatatgtccacccagaacttgtgaatgtgatcttgtttgaaaagagggtctttgtggatataattaaggatcttaagatgagatctt

SEQ ID NO: 260403 - DNA, 526 bp, Homo sapiens
gaaaatgtttcctttcttgagtctatggctgggctgaactgattaggccactccttggcacccatgcaagactctggcttggggtctaaaggggaagttaggccattttatttaaatgagttataaattatagacaataaaatgcatrtctctcaagggtttcatttgtgaaggttttttggtgtttttttatttttttgtttgtttgttttgttttgttttgtttttttgacagggtctcactcttgccctggctggagtgcagtggtgtggtcgtagctcactattaacttgaactcctaggctcaagtgatccttctgcctcagcttcccaagtagttaggacttgtggtggttagcacatgccaccacatctggcaaattttttattttttgtagccattgggtgttgctatgttgtccatgctggtctcaaactcttgtctttacgaaatcctctggccttggcctcccaaaggctgaaattacaggtgtgagccactgcacccagccagtttgttacttt

SEQ ID NO: 260404 - DNA, 512 bp, Homo sapiens
tcactgtactatccctgcaacttttctataaatctaaaaacattccaaaataaaaactttatttgaaaaaacaaaaagcaatatatgcttaagaaagtgacctatatgcttatctatgygtagaatatctctggaaggatacccaaggaattagcaatcatggctgccgccagcgagggaacacaggtgactgggagaaagtggagagagacaggtaaaagacggtggattccttctcactgtgaggcatgatttgtttttggcatgcacatatattaccttcctgcttaaagaatgagtaaaaagctgagatggtagagagtagtgagtgggtgtgctcgtgtgtgtctgggtgtgcccccaggtgtcagggcacagttcaaccaacaactgcaatgggaagcaaagaagaatgagcccccacagccatggcagggccttgggctgagcccccagagttacactctgcctgacttgatccacctctacaagttgaaagagatccagctgtc

SEQ ID NO: 260405 - DNA, 467 bp, Homo sapiens
gcatgccaccgtacccagctaatttcactccagctcttcccttctttggactgctaagagtgtcctattgcctaatacaagacactcttctagacataaatggtagaaaaaaaatcccaaagaggtttaagccaaaaataagaaatagttggctcagagaagccaaacctgtggttgaatggtcaaatcccacggatgcagctagactccaagaacagctggagtctgggtctcacttctctctccccctcttttgctttcagttgcttgctgcattcaccctccctcacaaactgtcttactccacactcagggaacattcatactaatgcttcctatttcacagtttagacctaaacccacgggaaagaatgactgactgccctcccttcccaagtccraaaatcccaaggtggggattcattggcctagtgtagaccagttgccaactccatgaccaatcagcc

SEQ ID NO: 260406 - DNA, 551 bp, Homo sapiens
gtcagtgaggatcctcttgatctgccataaaggctactacgagagacaagacattagcaagactggggtgtagagggagaaaaaactagggtggaaaggagaggctggagaggagacagaggaaattcaacaccagacgccttgagccgagtgtagatctcaaatgagaccaatgcccaggaaatgccaggtgagaggtcaagagagcgcagacaggaactcctggcatgccccgggtctctgctacaccaaaggctctcctggtgaaaaccactccttctcaattgagggaagaggctctaccccatggtcaaggtctgcattcccaccattgtacggatgctccaagagcacataacctccctcaacaacaacacgccycccaccccagacaaccataagacccaagacaacctctgaacaccaagtagggcagtgaggaagatgcccacccctatataggggggtaaaggggttcctacgcaggcatcctgagctaggacagtgagagaaggagatgctactattctattagctatcactgttgtcat

SEQ ID NO: 260407 - DNA, 603 bp, Homo sapiens
ttgcgttagatgatgttgcccaactgcaggcaaatataagtgttctgagcatgtttaaggcagacgaggctaagctatgacattcagtaggtaaggtgtattaaatgcattttcaacttaatgatattttcaatttatgatgggttcatcaggacataatcccattatgactcaaggagcatctgtaatcccagaagtggtattgctggatcatatattaattctactttttttttttgagacagagtctcactctgtagcccaggctggagtacagtggcgtgatctcggctcactgcaacctccgcctccggrgttcaggtgattctcctgcctaggcctctcgagtacctgggactacaggttcacaccaccatgcccagctaattttgtatttttagtagagacggggtttcaccatgttggccaggctggtcttgaactcctgacctcatgatctgcctgcctcggctcccaaagtcctgggattacaggcgtgagccaccgcgcctggcctattaattctacttttaatcttttgaaaagcctctgtacttttttcatagtggctgcaccattttacaatcccaccaacagtgcacc

SEQ ID NO: 260408 - DNA, 603 bp, Homo sapiens
ttgcgttagatgatgttgcccaactgcaggcaaatataagtgttctgagcatgtttaaggcagacgaggctaagctatgacattcagtaggtaaggtgtattaaatgcattttcaacttaatgatattttcaatttatgatgggttcatcaggacataatcccattatgactcaaggagcatctgtaatcccagaagtggtattgctggatcatatattaattctactttttttttttgagacagagtctcactctgtagcccaggctggagtacagtggcgtgatctcggctcactgcaacctccgcctccggagttcaggtgattctcctgcctaggcctctcgagtacctgggactacaggttcacaccaccatgcccagctaattttgtatttttagtagagacggggtttcaccatgttggccaggctggtcttgaactcctgacctcatgatctgcctgcctcggctcccaaagtcctgggattacaggcgtgagccaccgcgcctggcctattaattcyacttttaatcttttgaaaagcctctgtacttttttcatagtggctgcaccattttacaatcccaccaacagtgcacc

SEQ ID NO: 260409 - DNA, 374 bp, Homo sapiens
cgtctaacttgctcagtgattataggcaattcatcttcaggctgaggctccactgccctgccgtcacctccatgagatgtgggttaggtccccatggctccaccttctcctccttaagaagcaggggccagagcccatgagccctgaagattctacagtctggatgtcaagaggaaactgccaggaactagagccgagcatcaagagaggttgcagcaatyatgctgggtcagatcatcaaaaggactcacaagactccaacaaagtaaaaggtctgaaaggtttttcttttcaatttttttttttttatatttcaaagagagacagagtctcgccatgttgcccaggctggttctgaactcctgggctgaagc

SEQ ID NO: 260410 - DNA, 489 bp, Homo sapiens
ggacctggtgggaggtaatttaatcatgagaatggttacccccatgctgttctcatgatagtgagtgagttctcacaagatctgatggtcttattaggggcttttcccccttttgctcacacttctccttgctgctgccatatgaagaagtacatgttggcttccccttctgccatgattgtaaatttccggaggcctcccagccacactgaactgtgagtcaattaaacctttttcctttataaattacccagtcttgggtaygtcttcattagcagtgtgagaacgaactaatacaacttaactatttgatgaagggaaaaatggacacacttatcttttaagtcattttaaattatttcgccttagtaccaacatagttacattatgaggtaggaaccaaaatctgcatgaatttttaagatcaaattcagagaaaaggccacaaagggcacagcctgatgtgcagagcgtgtgtttatcagacgc

SEQ ID NO: 260411 - DNA, 403 bp, Homo sapiens
ctacgtatgcgacgccactgagatccctggaaggagtctgactggggcagtcaaggcatgtcttacatagtggcaggaggagtaggggactgccaaaatctttaaagccatcagatcttgtgagaactcattatcctgagaacagcatggaggaagcaccctgtgatccaatcacctcccaccaggtccctccctctcatgtgatgattacaatttgagatggggtttgggtggggacacaaagccaaaacatatcatttcaccctggcccctcccaaatctcatgtccttctcacattttaaaacacaatcatgccttcccaacagtcctacaagtctaaactaattccagcattaactcaaaagtccgattccaaagtmtcatttgggacaaagcaagtcc

SEQ ID NO: 260412 - DNA, 569 bp, Homo sapiens
atggtaatagcatcttaatgtacagataataagtcataaatgaacttcagttgtgtttcagttctagaaatatttgaatgccacgtggccagttgaaaactgataataaaccatgtagacacaagtgtagggataaaaagagctgcaataagtttctggattactagctgaaaaataaaactacacaggaaaaagtcaaggagacacaataaaagtattttagtaaatgacatttctgaaaaaaaaaaattaaggtaatacttagatgataaatggaaccactgacccaagctaggcacaaaactctcagtgctttatgatatacccaggrtgataagcaagatgagcaacatttggaggctgttgctcccctccatgtgtcctgatagacagggctctagtgtgaaaacagagggagctctatctaggctaatgacttgtttctgtggatctcaagatgcttatcagtagaaggtaaaggtgaaaatgcttgctgggttctcaaactttattgcatatcaaaatgacccagaggatgtactaagatacagcttgctgagccccacccc

SEQ ID NO: 260413 - DNA, 605 bp, Homo sapiens
ttttttcaagctaagttttctctaagaatagttaagtgtcatcaataagaaaaagccaaccagatatcactttggtagtcaatttcttaatataaaatggatcttaatatgaaagggatccctaagacttaatctaggtaaaatgtccagcacatggaagactctttggaggaattttgggagtggcatttaaatcatgcacacttggataccgcttctatgtaaagctatcttggacaaagtcataagaaggctgacatgaccaaagagagaaagaaaagactacagttaacaataatttattgcatttatcaaaatagctagaagaaaagaactataatattctcaatacaaataaatgatraatgtttgtggtgatgaatatcccaattaccctgatttaatcattacacattttatagatatatcaaaatatcatatgtaccccccaaattttgtacagctatttatatatcaattaaaagagagagagagagaaaatctttaatgaattatggcagacacgggggcaaaggtaaagacgacctggtacttgaagcctagaacatagttaggtgtctgattttgattcagagggaatcttt

SEQ ID NO: 260414 - DNA, 491 bp, Homo sapiens
gcaagctgaaagaaatacttctattggttgttactgaaaagtagttagttttcagcatctcttaagaaagaatgcgacttgcttagtccagtcagagaggaaaattctatacacaaaatccatcaaagccattgtgagaggacttgtttgcctggagactgcagggtttttctttgaatagcctccttcaggaagctgtacatttcattagttaagattctgcttttgagggaagagtaatcyagtcatctacagtctctaaaattatgtccaattaaccactggtaagcattaactaagaagaaagatttgctgtcaaaatttactctattaaaattggaattgaaaactgtaacaataaaaactctaagctttcttagagccatgttgtattatttgaaagcaccagaaaatctgttcagaatctctagtgtaggaatgctgagctttttctctggaggagagcacatttatgagtgttggctgagggc

SEQ ID NO: 260415 - DNA, 491 bp, Homo sapiens
gcaagctgaaagaaatacttctattggttgttactgaaaagtagttagttttcagcatctcttaagaaagaatgcgacttgcttagtccagtcagagaggaaaattctatacacaaaatccatcaaagccattgtgagaggacttgtttgcctggagactgcagggtttttctttgaatagcctccttcaggaagctgtacatttcattagttaagattctgcttttgagggaagagtaatccagtcatctacagtctctaaaattatgtccaattaaccactggtaagcattaactaagaagaaagatttgctgtcaaaatttactctattaaaattggaattgaaaactgtaacaataaaaactctaagctttcttagagccatgttgtattmtttgaaagcaccagaaaatctgttcagaatctctagtgtaggaatgctgagctttttctctggaggagagcacatttatgagtgttggctgagggc

SEQ ID NO: 260416 - DNA, 482 bp, Homo sapiens
cagcctgcacacagaggctccacagaagacaatgattcctcagaaaagctctatttgtattacctgtactgaatgaacaygggctttgctagattattttattcttctctcaaatttaaacttaaacccattgagtgaatcttctaaaacttgtaatctagcaaaaactttgaatctgcaatttagcaaagactttgaatatgttgatgcataatatagaaccatcttacaggcactaatttgaacagaaaatgtaagtgtaacactaagggaaacctatatgaagatcctgtgagcaggtgagatttaaaaaaaaatgttgagacagatttttttttttaatactggtcaattattgctattagggcaatttgggttgcaagtgcagacatctaaaacaaactagtttaagcaaaaaagcaattgattatgggtccagccatggctggatccagggccttaacaatattgttagcaatcag

SEQ ID NO: 260417 - DNA, 587 bp, Homo sapiens
ctatcagtcaacacttatactttcaccaaaaatataatatttttattttaattggatttttaaaacagccttattgagataaaattcacaaaaccacttaaagtgtatacaattcaatggcttttcagtatgttcacggggttatacaaccatcacaactatcagcttttcatcacccccggaaaaaatctcatatccattaagagtcactccctcctatccctcctcattcccctgaaactgcactagtcttaggcaaccagtaatctcytttctgtcttaagtttgcctgttctggacatttaatttaaatggaatcacataatatgtagtcttttgtgagttgtcttgttacttagtgtaatgttttcaaggttcatccattttgtagcatgtatgagtgcttttctttttattgcagaataatattccattgaaatagatatatcacttttattcattcagcagttgatgggcatttgggttgtttatactttttagctattcatggataaattcttctgtggatatatgttttcatttctctcaggcacatacctaggagtggcattattgggttgtatggt

SEQ ID NO: 260418 - DNA, 536 bp, Homo sapiens
caacccttataatcagatcctaagcttagttctcaactacctcctcctgcagttattggaaataagatgtgcttttaaagttgcattcagggctctctgattttccacataaattctcatctggcaatttcatttctctttgtccctacttattctccctagggcctttagaacaacccagatgacactatagttcytaagatctgtagaactcgtagcaatcaagttttaccgctacttgatttcccaaaaccttgacctcctgtgtcatcaccagtgacagtttgagtaactgtgatactactatatgtcaaggattgtccataccccattccccctgtactcttcaaatattgcacaatccagtccaggattttaaggattttactttgttttctgggaccagtcacagtatcaattactgtgccaattaagttcccagtgggaaaaagatggtgcagtcaaattgggtaatttgaagggactatttataaaagtgcaatcagagtaggacaaaccatgagaaatagtgcaat

SEQ ID NO: 260419 - DNA, 536 bp, Homo sapiens
caacccttataatcagatcctaagcttagttctcaactacctcctcctgcagttattggaaataagatgtgcttttaaagttgcattcagggctctctgattttccacataaattctcatctggcaatttcatttctctttgtccctacttattctccctagggcctttagaacaacccagatgacactatagttcctaagatctgtaraactcgtagcaatcaagttttaccgctacttgatttcccaaaaccttgacctcctgtgtcatcaccagtgacagtttgagtaactgtgatactactatatgtcaaggattgtccataccccattccccctgtactcttcaaatattgcacaatccagtccaggattttaaggattttactttgttttctgggaccagtcacagtatcaattactgtgccaattaagttcccagtgggaaaaagatggtgcagtcaaattgggtaatttgaagggactatttataaaagtgcaatcagagtaggacaaaccatgagaaatagtgcaat

SEQ ID NO: 260420 - DNA, 603 bp, Homo sapiens
tgtttttgtttttaatttttaattttatttgtatttatttttatttttgggtacataatgggtgtatatatttatggggtacatgagatgctttgatataggyatgcaatgcataataatcacatcacataaaacaggggtatccatcatgtcaaacatttattcttgtgttacaaacaatccaattatacccttttagttgctttaaaatgtacaattaaattattgttgactatactcaccctgttgtgctagcaaatactaggttttattcatcctttctgttttttgtacccattagctatcctcacatcccctccactacccttcccagcctcttgtaaccatccttctactccctatctccatgagttcagttgttttgatttttagcttgcaaaaataagtgagaacatgtgatgtttttctttctgtgcctggtttatttcacttagcataatggcttccagtttcatccatgttgttgcaaataacaggatcgcattcttttttgtggctgtaatagtacttcactgtgtataagtatcacatttttctttatccattcatctgttgatgaacactttagctgcttccaaatct

SEQ ID NO: 260421 - DNA, 603 bp, Homo sapiens
tgtttttgtttttaatttttaattttatttgtatttatttttatttttgggtacataatgggtgtatatatttatggggtacatgagatgctttgatataggtatgcaatgcataataatcacatcacataaaacaggggtatccatcatgtcaaacatttattcttgtgttacaaacaatccaattatacycttttagttgctttaaaatgtacaattaaattattgttgactatactcaccctgttgtgctagcaaatactaggttttattcatcctttctgttttttgtacccattagctatcctcacatcccctccactacccttcccagcctcttgtaaccatccttctactccctatctccatgagttcagttgttttgatttttagcttgcaaaaataagtgagaacatgtgatgtttttctttctgtgcctggtttatttcacttagcataatggcttccagtttcatccatgttgttgcaaataacaggatcgcattcttttttgtggctgtaatagtacttcactgtgtataagtatcacatttttctttatccattcatctgttgatgaacactttagctgcttccaaatct

SEQ ID NO: 260422 - DNA, 603 bp, Homo sapiens
tgtttttgtttttaatttttaattttatttgtatttatttttatttttgggtacataatgggtgtatatatttatggggtacatgagatgctttgatataggtatgcaatgcataataatcacatcacataaaacaggggtatccatcatgtcaaacatttattcttgtgttacaaacaatccaattatacccttttagttgctttaaaatgtacaattaaattattgttgactatactcaccctgttgtgctagcaaatactaggttttattcatcctttctgttttttgtacccattagctatcctcacatcccctccactacccttcccagcctcttgtaaccatccttctactccctatctccatgagttcagttgttttgatttttagcttgcaraaataagtgagaacatgtgatgtttttctttctgtgcctggtttatttcacttagcataatggcttccagtttcatccatgttgttgcaaataacaggatcgcattcttttttgtggctgtaatagtacttcactgtgtataagtatcacatttttctttatccattcatctgttgatgaacactttagctgcttccaaatct

SEQ ID NO: 260423 - DNA, 614 bp, Homo sapiens
ttggtttgctctcactttctagttctttaagatgcattattaggttgtttatttgaattttttgctttttgatgaaggcacttatagctataaagttctttttagtactgctttcactgtatccctcaggttttggtatgtgtgtttccattattatttgtttcaagaaatttttcaaattctttctcaatttctttattgaccaactggtcattcaggaacatattrtttgatttccatgtgtttgtataatttccaaaattcctcttgctattgatttctagttttattccattgtggtcagagaagatgtgtgatattatttcaaatcttttaaatgttttgtgatctaacatatagtctatccttgagaatggttcatgtactgagaaaaaaatttattctggagctgttgggtaaaatgttctgtaaatatttattaggtccttttggtttatagtgcagattatgtttgatgcttctttgttgatttttggtctggaaggtctatccaattatgcaagtggggtgttaaaatctccagctgttattgtatttgggtctatctcttttttaactctaataatatttgctttatatatctgggtgctcca

SEQ ID NO: 260424 - DNA, 614 bp, Homo sapiens
ttggtttgctctcactttctagttctttaagatgcattattaggttgtttatttgaattttttgctttttgatgaaggcacttatagctataaagttctttttagtactgctttcactgtatccctcaggttttggtatgtgtgtttccattattatttgtttcaagaaatttttcaaattctttctcaatttctttattgaccaactggtcattcaggaacatattgtttgatttccatgtgtttgtataatttccaaaattcctcttgctattgatttctagttttattccattgtggtcagagaagatgtgtgatattatttcaaatcttttaaatgttttgtgatctaacatatagtctatccttgagaatggttcatgtactgagaaaaaaatttattctggagctgttgggtaaaatgttctgtaaatatttattaggtccttttggtttatagtgcagattatgtttgatgcttctttgttgatttttggtctggaaggtctatccaattmtgcaagtggggtgttaaaatctccagctgttattgtatttgggtctatctcttttttaactctaataatatttgctttatatatctgggtgctcca

SEQ ID NO: 260425 - DNA, 591 bp, Homo sapiens
tctcacttcctcccagccctgggaaccacagtgcactaaggaatcctgaccatctctccatgtctgagtcacagtggtggtgggaacagcacaactttccacagcttgttcccttggcagtctccttactccctccctccagattagaagatgatggtaaagttttatagacattgccactagtttttttctctcggtctgattaggtgggtgacactgcttggaagttggaacacatcatagatttctgaagtcttttgctcttttttgctaactggtatttaagaaaaataagtcgaagttgtaattctttgtttttattttaaaagattttgtgatctgccttgacacactatcttaccctagaagtttttcatattctttataaatagctgttatattccttcaaagcacttgtcttaccrgctagtgactaagataatggtgttgaattcagtgataagtgtagatcattttaattgacagtaaatagatgcctctggatggtttaactattgttttctcattcaggggaaacttctttctgcaactttgcatagcaaaaccctttttttttacgatgcagtaaca

SEQ ID NO: 260426 - DNA, 564 bp, Homo sapiens
ggagttttgttgctccttacacttaaaaatggtggatcaactttgtgttcatttgattwtggagggcagagggtgtaatccgtttaatttagctcttttctggggcttagcaactcccagataattttgcctcatttgggaataggctgtatgagtttagttatactattccccttgggttgggtggagaagggagtaagagtatcactagtctactctgctcctttctttcctgactaacttaagttctgccttgaattcaacaagctgtttgctggggttaacgctttccagcacaagtcagggatgttttccgcttcagtccctcatccttcaattttgcagatcctaatgcattggttgtcaaaaccacttcactgcatagaaggtaacaccactagtaacagaaataacttcccttggccctctcatttgcaacagctcattcctaaggcccaatcccagttcctgatggtggatgttgttccagcctggaaagctgaatcacttcctctccagtaacgaataaatagactagatttcactgagtcatctgtctgccca

SEQ ID NO: 260427 - DNA, 564 bp, Homo sapiens
ggagttttgttgctccttacacttaaaaatggtggatcaactttgtgttcatttgattatggagggcagagggtgtaatccgtttaatttagctcttttctggggcttagcaactcccagataattttgcctcatttgggaataggctgtatgagtttagttatactrttccccttgggttgggtggagaagggagtaagagtatcactagtctactctgctcctttctttcctgactaacttaagttctgccttgaattcaacaagctgtttgctggggttaacgctttccagcacaagtcagggatgttttccgcttcagtccctcatccttcaattttgcagatcctaatgcattggttgtcaaaaccacttcactgcatagaaggtaacaccactagtaacagaaataacttcccttggccctctcatttgcaacagctcattcctaaggcccaatcccagttcctgatggtggatgttgttccagcctggaaagctgaatcacttcctctccagtaacgaataaatagactagatttcactgagtcatctgtctgccca

SEQ ID NO: 260428 - DNA, 564 bp, Homo sapiens
ggagttttgttgctccttacacttaaaaatggtggatcaactttgtgttcatttgattatggagggcagagggtgtaatccgtttaatttagctcttttctggggcttagcaactcccagataattttgcctcatttgggaataggctgtatgagtttagttatactattccccttgggttgggtggagaagggagtaagagtatcactagtctactctgctcctttctttcctgactaacttaagttctgccttgaattcaacaagctgtttgctggggttaacgctttccagcacaagtcagggatgttttccgcttcagtccctcatccttcaattttgcagatcctaatgcattggttgtcaaaaccacttcactgcatagaaggtaacaccactagtaacagaaataacttcccttggccctctcatttgcaacagctcattcctaaggcccaatcccagttcctgatggtggatgttgttccagcctggaaagctkaatcacttcctctccagtaacgaataaatagactagatttcactgagtcatctgtctgccca

SEQ ID NO: 260429 - DNA, 539 bp, Homo sapiens
ggagttttgttgctccttacacttaaaaatggtggatcaactttgtgttcatttgattatggagggcagagggtgtaatccgtttaatttagctcttttctggggcttagcaactcccagataattttgcctcatttgggaataggctgtatgagtttagttatactattccccttgggttgggtggagaagggagtaagagtatcactagtctactctgctcctttctttcctgactaacttaagttctgccttgaattcaacaagctgtttgctggggttaacgctttccagcacaagtcagggatgttttccgcttcagtccctcatccttcaattttgcagatcctaatgcattggttgtcaaaaccacttcactgcatagaaggtaacaccactagtaacagaaataacttcccttggccctctcatttgcaacagctcattcctaaggcccaatcccagttcctgatggtggatgttgttccagcctggaaagctgaatcacttcctctccrgtaacgaataaatagactaga

SEQ ID NO: 260430 - DNA, 577 bp, Homo sapiens
aaaccccatctctactgaaaatacaaaaattagtcaggcgtggtggcaggtgcttgtaatcccagctactcaggagactgaggcaggagaattgcttgaacctgggcagcaggggtcgcagtgagcctagatcyggccactgcactccagcctaggcgatacagtgagactctgtctcaaaaaaaaaaaaaaaaaaaagctcaacgaattaacttgtggaaaaaaagaaagacaattgctcttctctcttctcctttgccaatgaacctgctctcacaactgtttactccaacatctatactccttcacagttgccttcctttctgtcatgagcaagaattgttctggggaaatcacttctttagttagtttaacacacttctatttctcttcagatagagtgagttctgagtcattttcactctgaggtgaataattagaaatgcttttattagcaagtaacaggaacctgcatttaagcagtttccaaatctaattagaaatgttgctttcagctacctactcaaactacaggtttaaatcaagaaaattgtttttttctattatttgtagggga

SEQ ID NO: 260431 - DNA, 603 bp, Homo sapiens
aagactcaaagtattgcagtagctgatttctaacattttctagctgtgtgatttttttctgagctctaaaaactaaggtctctgcccattctaaaatgcttcccttcttttgttgtactttcttcacttcagcttttgaacaagcatcactaagcactattttgtcacaaactccatgacctttggaaatggaaatgatgctctcttagtaagccctgtctgtgtctagggagagaggaggatgtcagtgtcttttagctctgaacaagaagtccactatgtctggcatgataatttaaagggtcgccaaatactcttgttttgttttgctttatgtagtttatttgctcatactagatgacacatatgttaaatgaaacactgctttgatttagagggaggaggaaaaatggggtacataataagtgggactagtgtttatttcaggaaaaatgtgttgcttagctcctgtatgcatataatcatgtgcatcttttctgtgtttcagaacaaagatgttgttcagcaatataggaaacattaacaaarggaaacgaatgcagacatttacatacactgtgatttgtgagtttcagggtggga

SEQ ID NO: 260432 - DNA, 538 bp, Homo sapiens
actttacctacagggtataccaattcacagaaagcagacttctcttctgaaaccacacagtttggacaaaagtagcacagtatccttccagtgttgaaagaaaataactgtcaactgtaaatagtaaatgtggtaaaaccatctttcaagaatgaatggaaaacaaggctgggcacagtggctcaccctagcactttgggaagccgaggcaggaggattgcttcaggccaagagatctaaaccagcttgggaaacaaagtgggactctktctctaattaaaaaaaaaaaaaaaaaaaaaaaaagaacaatgaatagaaaataaagacattttcagataaagaaagcctggggagatatacctaatgctagatgacgagttagtgggtgcagcacaccagcatggcacatgtatacatatgtaactaacctgcacatgtgcacatgtaccctaaaacttaaagtataataataaaaaaaaaaaggtaagaagaaaaaaaaaaaaaaaagaaagcctaaaaggacgtaggtaaaaccaaa

SEQ ID NO: 260433 - DNA, 538 bp, Homo sapiens
actttacctacagggtataccaattcacagaaagcagacttctcttctgaaaccacacagtttggacaaaagtagcacagtatccttccagtgttgaaagaaaataactgtcaactgtaaatagtaaatgtggtaaaaccatctttcaagaatgaatggaaaacaaggctgggcacagtggctcaccctagcactttgggaagccgaggcaggaggattgcttcaggccaagagatctaaaccagcttgggaaacaaagtgggactctttctctaattaaaaaaaaaaaaaaaaaaaaaaaaagaacaatgaatagaaaataaagacattttcagataaagaaagcctkgggagatatacctaatgctagatgacgagttagtgggtgcagcacaccagcatggcacatgtatacatatgtaactaacctgcacatgtgcacatgtaccctaaaacttaaagtataataataaaaaaaaaaaggtaagaagaaaaaaaaaaaaaaaagaaagcctaaaaggacgtaggtaaaaccaaa

SEQ ID NO: 260434 - DNA, 534 bp, Homo sapiens
cgtggccagcttttttagatatccctcgcatcctctctgggctaacattgattaatgaagcagatgagagtaaaacagtttagtttattcccttccagaaggtttggatacattctctcccattacgctcagattattgatcattccatctgattaatagggtcttgttctaactgaagacattgagggatagagcaagttgtcacagatatagttttgtccatctctaacttcaatttgcattagcaaaatccaatattkctagaaaccatattattgctttgtctaacacaagaaaaattcaatgaattaaaaaaatttgaggaatatctatagacttcatattttattgagttcctaattttatactttagataaaaattgagattcacttattaatctttattcttgattaccaattgtcatctggctgtactgcataataggggactggctgttctccctctttattcattaagtccaagttgaaacatctgatcagtattatcaggaggccttataggcgtagtggct

SEQ ID NO: 260435 - DNA, 598 bp, Homo sapiens
aacacacatgagccaagctagaagggatataggggctacataccacctggggagctagaggctgaacagtcaatcaggaaactattctgaaggtccagacaggttcctgaattttcatctacaattcaggggtttgtctgtgttggtgtttaaagccacctgtagctctgaagttctacagcaagtaagcatctgctcacattaggctaggagaggattaggaaggaaatgaaagatatgtaagataggggtcctcaacaaacagtgactgtccaacaaattgagcttttggtagagattcagagagtttagctgtagggatgtattaaacttcatagatccttgataaaattcttacagtacttttagttgtttctcactgaaatgttagaaccatgtaccactccccagaacccaacttctgtttcttaaagtttctcctsctgtattccctcttatttagggctctccagtcacaaagtatatatgtgtatatatatttgaaacttacaatgtctaatacagaattgaacacacactacacatcatcatcatcatctttatagtagagataaaggtgttattaaccagccaaaga

SEQ ID NO: 260436 - DNA, 596 bp, Homo sapiens
cactgcttggcacctagtagatgctcaataaatatttttggatgagaattttatatctttttaagtgtttacatttttattgtgagcttgaatcacccttgaaattacagtgaaagactgtaaawactgaagagctcttgttatccctttgagaaatggctttagcggaagcacaaaaaggcctttgccctcagcttgaacagcagcctcatgggatgccctcagaggccttggttccgaattgttatgaggcagacagggctttgaatcagggcttatagttcctgatcccagacaaaatactgaggaacattactttgagaggtatttcagagttctataaatatatctgttgggacaaaatgaaaagacataagaaatttagcataatgattagaaaatctgaaagcaaactgagtttaagccttgtgtctttacctactagctgtgtaattaatcttgatcaattagtcttgctctgcctcagttacctcatctgtaaaatagggataataatagaacttacttcctaagatttctgtgaggatgggacgagtcaataccttaagtcctgtagaatgatgtctggcatatca

SEQ ID NO: 260437 - DNA, 348 bp, Homo sapiens
tccaagaatgtttcacccataaatcccagtgcttccagaaagtactgctggactggaatcccaatcatagcatctgagagaaaataatggttcttacaaactcttttgtttcgtggactttttttagttttagttttttttttttttttccaacttttaagttcaagggcacatgtgcaggatgtgcaggtttgttacacagataaacatgtgccatggtggcttgccgcatgtatcatcccattacccaggcattaagcccagcatccactagctattcctcctgatgctctccttccccccmccctccaacaggtcccagtttgtgttgttcccccctatatgtcc

SEQ ID NO: 260438 - DNA, 631 bp, Homo sapiens
tgcagtggtatcgtcattaagagtgtgggttctggagtcaggctgcctgattttttatcttggaaccaggattgactagacctccattttgtcacctatgacactggccttattatcttaatcatttttgttgtgttgttattattcccaaaatagttgaataagaggcatggtagggaaagtaacagcacccaaaggawgtctacatcctattcctggaatctatgaatatgttacttgacatgtcaaaaggagtctttgcagatgtgattgaagtcacagtccttgagatgggaagatgatcctggattatcggattgagcccagtgtaatcacctaagcccttgcaggcagaagaggcagaagagtcagtcagaagaggcaggaaagacacgaagcatgagagggactcggcctactattgctggctttggaaatgaaggggcaatgagccaagaatacgggaagccccagaaagtgaagaacaaccctgaccagaaaactagcaagaaaacaagaccaaagcctcatatacacatgcaactgaactctgccagcaacctgaatgatcctgaaagtagattccccctagaccttggggagactgaagacatggctaaggtaaaggtat

SEQ ID NO: 260439 - DNA, 561 bp, Homo sapiens
ttttgggggacctgttcccaacactagacctcttcctcacacaatatacaaaaattaagtcaagataaagactaaaatgcaaaccccaaaactataaaaaccctggaaaacaacctaggcaataccattagggacatagrcatgagcaaatatttcatgatgaagatgccaagagcaattgtaacaatcaaaaattgacaaatgggatctaattaaagagcttctgtacagcaaaagaaactattatcagagtgaacagagaacctacagaacgggagaaaaattttgcaaattatgcatctgacaaaggtctaatatccagcatctataagtagcttaaacaaatgcacaagaaaaaacaaccccattaaaaattaggcaaaagacataaacagccacttttcaaaaaatgacatacatgcaggtaacaatcacagaaaagaaagctcagcatcactgatcattagtgaaatgcaaatcaaaaccacaatgagataccaacagtcagaatggctactattaagtctaaaagtaacagatcctggtgaggctgtagaaaaa

SEQ ID NO: 260440 - DNA, 561 bp, Homo sapiens
ttttgggggacctgttcccaacactagacctcttcctcacacaatatacaaaaattaagtcaagataaagactaaaatgcaaaccccaaaactataaaaaccctggaaaacaacctaggcaataccattagggacataggcatgagcaaatatttcatgatgaagatgccaagagcaattgtaacaatcaaaaattgacaaatgggatctaattaaagagcttctgtacagcaaaagaaactattatcagagtgaacagagaacctacagaacgggagaaaaattttgmaaattatgcatctgacaaaggtctaatatccagcatctataagtagcttaaacaaatgcacaagaaaaaacaaccccattaaaaattaggcaaaagacataaacagccacttttcaaaaaatgacatacatgcaggtaacaatcacagaaaagaaagctcagcatcactgatcattagtgaaatgcaaatcaaaaccacaatgagataccaacagtcagaatggctactattaagtctaaaagtaacagatcctggtgaggctgtagaaaaa

SEQ ID NO: 260441 - DNA, 581 bp, Homo sapiens
taatgatttatctaattgatgaacatgagtaactctccatttgtggaagtcctttaaaaattactcttggctgggtgcggtggctcatgcctgtaaccccagcactttgggaggccaaggcgggcagatcatgaggtcaggagttcgagaccagcctggccaatatggtgaaaccctgtctctactaaaaatataaaaattagctgggcatggtggcacatgcctgtagtcgcagctactcgggaggctgaggcagaagaatcgcttgaacccaggaggcagatgctgcagtgagccaagatsacgccactgcactccagcctgggcaacagagtgaggctctgtctcaaaaaaaaaaaaaaatactctcaataatgtttttattttttgattagagatcttatatatgtttttatagattaatcttaggtatttgatatttttggtacaactgtaatttacatctgtttttaaatttcattttctaatgattgctggcataggaaagcaattcttttttttacagacaggatcttgctatgttgtccaggctggtctcaaattctgaggctcaagtgatc

SEQ ID NO: 260442 - DNA, 623 bp, Homo sapiens
gaaataaatactcagtttccatgcaatcttggacaagaagaatggtactaatacttcttagaatattttcttccttcttagcatcttcctattaatttyctaaagcacacttaccactccctgattatgaacttcttttctgtcactaaggtgaaaatagtagctcatcttacataactcctttttggagcatggagaatgtaaaagaatgaatgaataaaagaacaacattatctcagtgccatggcagaaacaagaatgttgcaccagacatcctccatcctctactttaacattaatttattcaaacatttatggagctaggcattcagtacaagtttcagagactgcaaagatgaatacagaaaaagagaaatacttgtttcaaacagttctgaatctaataggcagataaattcacaaaaaagaccattcagctatagtagtgtcatacatgttgtagtaaagattcattcaaaggtcacaaagacccaaagaatggaagacctaactgtaaataacttttcgaacaataattaacactcctatattgggtaatgctttacaaaatcattgatgtcaattatttgattttccaaagtcttgtgatgaagatatgcgtg

SEQ ID NO: 260443 - DNA, 563 bp, Homo sapiens
ttcagttaattatctattcatttctttgcccattatgtccctactgggtggcattttatttactaattttttaggctttcttcacatgttatgaaacattattgtataaattggttatgatatgtaaatatttattgataattttaattgttaatagtttatttaggagtttgctttggtgttcatacatgacaatggcctaaaattttaatttgttatattgtactagcatcataaaagtacctatygagtgctacagtggtcctttttatcataatttaggattttctctttctagatttacaaaattggaattaactatcacttgagagtttgcttgaacttgtctggaaaatcacctggcctatagttttccatggaaagctatttaaccactcactcactcactgatttaaaacaattatgagtttattgaagaggtcactttgctgagtcacttaaaatcttttattttctaagaacaattctattctgttttcagttctattggagtaaagttactcaggttatcttttattatagttttaaaaacctactacacc

SEQ ID NO: 260444 - DNA, 502 bp, Homo sapiens
ttctccacagtctacacttgagcatttgttaatgtccctccacttcctcttcttcttgtccccttacctacagatccctcttcatcttttcccctcacctccaggtaatcacttatgttcatatactttggaatttttgttttagagtgtggttattcttgtttacaataaactctttatactataatactatctttttctaaactaagtttaaccttttaaactcattgtatttttctcttctactaattgtactastgactagaccattactagagtgcaattaactgtgttgactaaatctttgtcatatatacaaagtcttagatcctagtccttgagaagattctgctagtaatttttcttttgcttctttgtatatttgaaagtctatttttcctcactactgtataattctttattggtatgatattttaggacaaaaaccattattcttcagaactagacatatactttcagtataacttatggggattctgtt

SEQ ID NO: 260445 - DNA, 525 bp, Homo sapiens
catacctccagcttctgggtctttcctctstccactctcagtgccttccctctgaagatctattagaaacatgtcagttgtctcagtccctcagtaggagctattccacctggctccttcttgtcagccatcttgccctcccccatcagttttctcttatgttatcttctaggagtttaatattctagcactttacatttagatctataatctattatgagttaatttgtgtaatagatatagggtctgcatctagatttattttttgaatggttgtcccattgttctgccaccatttgttgaaaagacaatattttctccagtgtattgtatttagctcttattctcatagattagtcgaccaaatttacagagagcctatttctgggctttctattattattccatgatctacttacttattgtttcaccaataccatgttgtcttgattattatagtttcatagtaagtcttgacattgaatagtgtcaatcctccacttttttaaactcagtattgtgttg

SEQ ID NO: 260446 - DNA, 525 bp, Homo sapiens
catacctccagcttctgggtctttcctctctccactctcagtgccttccctctgaagatctattagaaacatgtcagttgtctcagtccctcagtaggagctattccacctggctccttcttgtcagccatcttgccctcccccatcagttttctcttatgttatcttctaggagtttaatattctagcactttacatttagatctataatctattatgagttaatttgtgtaatagatatagggtctgcatctagatttattttttgaatggttgtcccattgttctgccaccatttgttgaaaagacaatattttctccagtgtattgtatttagctcttattctcatagattagtygaccaaatttacagagagcctatttctgggctttctattattattccatgatctacttacttattgtttcaccaataccatgttgtcttgattattatagtttcatagtaagtcttgacattgaatagtgtcaatcctccacttttttaaactcagtattgtgttg

SEQ ID NO: 260447 - DNA, 585 bp, Homo sapiens
attttagaattcttacagtctcagggaagagagaaaaacaaacttatagcaaacattaagtcaaggatgaatactatgacaactattaaaaaaagtaaaattatatacaaataataagctaatagaggatgaaagcatgtaacraaaaattaatccaggcaaagaaaagaggaaaaatgctgaacatcatcaaatatagagtgaggatgtagaattaaaaccacacatatcagtatttagggtaaatttcaagatgttatatttccaaatgctaacacaatcataatgtttaaaatattaaactcaactctgtgcagtttcaagagacatctcaaagatataaagatacagaacttatgaagatagaagggttaaaaaatatcatgaagaaaactaaacaaaaggaaacaaaaggaagcttgtatagttatagtaaacaggcatactgttagacaaaaagccttaatagaaataaagaagaccatgttatacaatacctaacaatctaaatatacatgcatctaatgcatgaacacccagattcagaaagcaagttcttagagaccttcaaagagatttagaccc

SEQ ID NO: 260448 - DNA, 567 bp, Homo sapiens
gccccaaaactggccataaacaaattctctgcagcactgtgacatgctcatgatggtcatgatgcccaggctggaaggttgtgggtttaccagaatgagggcaaggaacagctggcccgcccagggcagaaaaccacttaaaggtgttcttaaaccacgaacaatagcatgagtgatctgtgccttaagtacgtgctcctactgcagataactagccaaatccatccctttatttcatcccatccctttgtttcccatmaggaatacttttagttaatctataatctgtagaaacaatgcttatcaccagcttgctgctaataaatatgtgggtaaatctctgtttgaggctgtcagctctgaaggttgtgagatccctgatttcccacttcacacctctatatttctgtgtgtatgtctataattcctctagcaccactggattagggtctccctgaccgagctggtcttggcagcttataaagaaagagtgaagaattacaggccaatatctgggagacaaagaaaaaccagataactgagcttgcttttacccaggttatctac

SEQ ID NO: 260449 - DNA, 548 bp, Homo sapiens
atcaaccctgtttacgagcctaaagcccaggcatatcaattccaatcctaaytgggtaagatgatctgatgactgtgagaaataaaaatgaatcttctgcaaaggataagacagaaaacaaaattttatgctcacgtcatctctaagtctttcatatactgtaccctgaacccaatttaaaaaattaccagctactgaggagaacattttataaagccaagaaaaacaacatacgatagaaataaacccataagagaccttcataatagactcataagacatagattttaagttaactacataagttcaaaaaatagattgggattttctccaaaaataggaaaggagaactcattaaaatcctaaaaatgaaaaataaaataactgatattaaagagataaaattaaaagcagattagacagagcaaaagggcaatttaatgaatttcaagaaaggtcagagaaaatatcaataatgaaggatcaatatttaaaaaggccaaaagcacagaaaaagatataacagacaaaaggaacaggagggaaag

SEQ ID NO: 260450 - DNA, 548 bp, Homo sapiens
atcaaccctgtttacgagcctaaagcccaggcatatcaattccaatcctaattgggtaagatgatctgatgactgtgagaaataaaaatgaatcttctgcaaaggataagacagaaaacaaaattttatgctcacgtcatctctaagtctttcatatactgtaccctgaacccaatttaaaaaattaccagctactgaggagaacattttataaagccaagaaaaacaacatacgatagaaataaacccataagagaccttcataatagactcataagacatagattttaagttaactacataagttcaaaaaatagattgggattttctccaaaaataggaaaggagaactcattaaaatcctaaaaatgaaaaataaaataactgatattaaagagataaaattaaaagcagattagacagagcaaaagggcratttaatgaatttcaagaaaggtcagagaaaatatcaataatgaaggatcaatatttaaaaaggccaaaagcacagaaaaagatataacagacaaaaggaacaggagggaaag

SEQ ID NO: 260451 - DNA, 539 bp, Homo sapiens
atgtaattaaagtctaggaactaaactctttacagtttcttccaacaatgcgctgcctgtgtgtgtttgcaggtggtaccagtgatctggatttactggcaaccttgtggaagtgactgggggggtttggcaaatagaactgtgttggtgtgcttgggccaaataaaactctatttcaaataaagttatgttcattctttggcccatttcatttggaaaaaacggcagtttagtaaattgccctcatcatcctgcttgagaaacatacagataaaggtaagtagagacagggttatctgaaattccaggttcacttcagcmaactgaaaggttgtttgttttttaaatggactacatatctttgattatatgactctaatatagtatgtgcaagaatattttatattatgtcaatttccaaaatgaataaatattttaaaatgaaactgacactttaacttggcagaccaagttataataatttgcagactgtccaatgtcaatcttctcaaaaatccttaaataagaaacctacatac

SEQ ID NO: 260452 - DNA, 601 bp, Homo sapiens
atcttctcaaaaatccttaaataagaaacctacataccaaattacagggttggaataatacmaaatatatgtatgtaagcatattcacacatataccagggccattgttagtttgtgcatttactgtaaagaattaggagctggtcacgggtattccagtgattcatttgtatattagtctgctcaggctgctgtagcaaaataccacagatagggtggcttaaacaacagaaattgattttctcacatttctgcatcctagaagtccaagatcagggtgccatcagggttggttctccaaaggcctctctcctggctggtagatggccaccttcttgctgcacatggccttttctctgtgtgcacacctgctgggtgcctcttcctcttctaaggacactagtcttgttggattagtgccccacccatatgaccttacttaaccttaattatctcttaaaaggccctatctcaaatacagtcacactgggggttagagcttcaacatataaattttgggaggaaacaatgcagtccataacaatctgcaagggggttcctgtgcttcaaggggaggaagggaaatatagaatttaggctt

SEQ ID NO: 260453 - DNA, 575 bp, Homo sapiens
ccagggccattgttagtttgtgcatttactgtaaagaattaggagctggtcacgggtattccagtgattcatttgtatattagtctgctcaggctgctgtagcaaaataccacagatagggtggcttaaacaamagaaattgattttctcacatttctgcatcctagaagtccaagatcagggtgccatcagggttggttctccaaaggcctctctcctggctggtagatggccaccttcttgctgcacatggccttttctctgtgtgcacacctgctgggtgcctcttcctcttctaaggacactagtcttgttggattagtgccccacccatatgaccttacttaaccttaattatctcttaaaaggccctatctcaaatacagtcacactgggggttagagcttcaacatataaattttgggaggaaacaatgcagtccataacaatctgcaagggggttcctgtgcttcaaggggaggaagggaaatatagaatttaggcttagtttcagtttcctgatggttttaggaagaacattgttaagaaggtatgaacgtcttgctattatagac

SEQ ID NO: 260454 - DNA, 575 bp, Homo sapiens
ccagggccattgttagtttgtgcatttactgtaaagaattaggagctggtcacgggtattccagtgattcatttgtatattagtctgctcaggctgctgtagcaaaataccacagatagggtggcttaaacaacagaaattgattttctcacatttctgcatcctagaagtccaagatcagggtgccatcagggttggttctccaaaggcctctctcctggctggtagatggccaccttcttgctgcacatggccttttctctgtgtgcacacctgctgggtgcctcttcctcttctaaggacactagtcttgttggattagtgccccacccatatgaccttacttaaccttaattrtctcttaaaaggccctatctcaaatacagtcacactgggggttagagcttcaacatataaattttgggaggaaacaatgcagtccataacaatctgcaagggggttcctgtgcttcaaggggaggaagggaaatatagaatttaggcttagtttcagtttcctgatggttttaggaagaacattgttaagaaggtatgaacgtcttgctattatagac

SEQ ID NO: 260455 - DNA, 600 bp, Homo sapiens
gaatgaaagttattcaaggctttcaagcagagaccttgaatatgtctctatgttttggaaacatcattctctgggcaaagcagagaatggtttggaaatagagaatctagtccaagaggcaggaacaccactttggaaactattgcaatagtccaagggaaggataatgaaaatttgaacgaagggattttttttggtgggggtagggggagttgaattattgcttgtagatcagcacagagtggaaaaagggaagctgggggtaaacattgcccccctgtgagagagaggaatcatttcttaatgcatgtttggcctggactcaaatctttgaaacaatagcaacaacagtggctgccacttactgaagacttactaagggccagggactgttgaagatctttatacacattagcacatttgatactcataagtaaggacagggctgagatttcaagcatccccctttcctctgaaygcagtcgtattgtgaaggtttgtccaagtacgtgcagcttgtggagctctctggttgtttcccatgagtttctttttctcccctgtctagactgatgtttcttaataacaggagctgtgtcc

SEQ ID NO: 260456 - DNA, 635 bp, Homo sapiens
tttttattattatttataatagaaactccactgtctaaagggatttgaggtggcttgtaatgaaaggcagacatatcataaagctgtaaaaatattttaaaaggagaaaaaaagttgaargttaggaaaaaaatctgtatcaaacccctaagttaaaggcagccaaggggaacagtatgagtaactcaattctcactgcctgttgaaaggaagcgtagtaatgcttagctacaacattcttggagaaaagttagttggttagcttactattattctctactaattctggagggtctttttaaaaattttaatttattcagggatagggctctgggccagattgatgctctgattcttaatgacataatggatagccccagaagcaggtgccagaaggcattactatcatggcttcactattactctgagacactatttttattgtgcactattttaaccccatattaatgactgtagattttacctgggcacatggtttgtcacctaattatttagttgtctttttacagactgtcaaggtttttactttttaacacaaggacatgccaaggcaggactgcaagacagggagaccttgtcagaattcatttatttgagttcaacagcatgtattg

SEQ ID NO: 260457 - DNA, 636 bp, Homo sapiens
tgtgtgtatattgtgttgtctttattcattttcatatggttctgtttttggaatgttcttataacaagaacatggaagtttaatatatattccatctgactaaaactgaaccctctttaaagaaactaaaggttttcaaagctgttttacttccaatgagtagtttaaacttctagttcatgatggatttattcctatcaaaaagttgtactatttttgattacttgttaatgtatccagattggcatgttagacacaagtagagcacatcctgtatttttagatgcttgatgcttctgttcagcataagccctgaaaaataccaagttttgcaaatgcaaagtacttttcattggcatggaaattggagggaaaaaacacaatgaatattttggccaaaatgtgatggtctgttagtcagcatctggtaatgcggccatattttgcattcaggctccagtatgacaaagtgcagttgtacgttgacatctccccygggactgtggactggaaccacatctactttgaaaggtaatactgcaaggggggtgcttagccttcttttagggtactccactcaactacctacataatttggtttttaaaatgttttggtttatgctaaacaagcagtct

SEQ ID NO: 260458 - DNA, 568 bp, Homo sapiens
tgtcaccctagaaagttcccatatgcccctttccagtcaacccctccccttcaaagcagcgactcctctgcaatccatcaccatgggtgaatttcgctgattctagaatggaatggaatggaacactttgtgccttttggggcctagcttttttcactcagcatattatttttgagaggcaaccatgttgttgcatgagcccatagttggttcccttgtattatgtttcattgatgaatattccaaagtttacttatcccttccttgttgatggacatctggcttatttctaatttttggccagtctgaataaagctgctataaacattcttgtacaggattttgtgaattatgtttatatttctcttggattaatacttaggagaattgctrctaggataggtgtctgtttaactttcaagaaactgtgcaacagctttatactgtgaaatagtgattgtcctgactacaaacctccatggtgctgagaccaggttttgttcaacgtgattttcctggtgtccagcccagggcagggcacatgctagacattcagtgtttattgaag

SEQ ID NO: 260459 - DNA, 601 bp, Homo sapiens
ttaggagaattgctactaggataggtgtctgtttaactttcaagaaactgtgcaacagctttatactgtgaaatagtgattgtcctgactacaaacctccatggtgctgagaccaggttttgttcaacgtgattttcctggtgtccagcccagggcagggcacatgctagacattcagtgtttattgaagaatgaatgaataagaagttcaaatcagttttcattctgacatctctactactaactgagaaaaaatgaatgctctgtccatcaaggagatggaaattttattggctaaatgtgggctgattataggcaggcaaaaacaagagagacatagcttcctycttactgtgctcttggacttgcctctctcgtttcagggtggcagcatgtgcaggtaaaatcaggtgtgcaagttgacacaggccatagaagggtcctgatcaccagtatagctgagctcacctcctgcagttaaatctcccaacactcccattcaagaccctcccaaacctcctttttcatccccccctaccctttggttcacctgcacaaatacatatttcagccaaacttgacaactctccctactttgtga

SEQ ID NO: 260460 - DNA, 601 bp, Homo sapiens
ttaggagaattgctactaggataggtgtctgtttaactttcaagaaactgtgcaacagctttatactgtgaaatagtgattgtcctgactacaaacctccatggtgctgagaccaggttttgttcaacgtgattttcctggtgtccagcccagggcagggcacatgctagacattcagtgtttattgaagaatgaatgaataagaagttcaaatcagttttcattctgacatctctactactaactgagaaaaaatgaatgctctgtccatcaaggagatggaaattttattggctaaatgtgggctgattataggcaggcaaaaacaagagagacatagcttcctccttactgtgctcttggacttgcctctctcgtttcagggtggcagcatgtgcaggtaaaatcaggtgtgcaagttgacacaggccatagaagggtcctgatcaccagtatagctgagctcacctcctgcagttaaatctcccaacactcccattcaagaccctcccaaacctcctttttcatccccccctaccctttggttcacctgcacaaatacatrtttcagccaaacttgacaactctccctactttgtga

SEQ ID NO: 260461 - DNA, 606 bp, Homo sapiens
tttttgtttttaacgcttatatagctatttaaatatatatgtactttctgcaacttggtttttttcatattcatacatgcgacacaaattgctcattttaaactgctatatattatttcactttaatgaaaaaattttagtatatttattactaaggagcatttacgggatcttaccaattttttcctattagaagtgragagcagtaaacatctttttatgcacatctccttagtcacatgaatgagagtttatttcaagtataacacctagaagtggtaaggatgtcttcactgttgccagcgatgattgattttgctccaaagttgttgtacaatataactatcagcagcaagatatgagaactccagttcccccagatcttacccagctcatagcattgttaggcttctaaaatttgcccatatgctgggcatgaaatggtaacttgttctttcatacttttctgattaccaatgagatttaatatcatttcatttttattggctgtttaggttcctccttctgtgaatttcctgttcataaaagttttttctgactcacagcagattttggagtctcaaatgtgttcactcttaattatat

SEQ ID NO: 260462 - DNA, 606 bp, Homo sapiens
tttttgtttttaacgcttatatagctatttaaatatatatgtactttctgcaacttggtttttttcatattcatacatgcgacacaaattgctcattttaaactgctatatattatttcactttaatgaaaaaattttagtatatttattactaaggagcatttacgggatcttaccaattttttcctattagaagtgaagagcagtaaacatctttttatgcacatctccttagtcacatgaatgagagtttatttcaagtataacacctagaagtggtaaggatgtcttcactgttgccagcgatgattgattttgctccaaagttgttgtacaatataactatcagcagcaagatatgagaactccagttcccccagatcttacccagctcatagcattgttaggcttctaaaatttgcccatatgctgggcatgaaatggtaacttgttctttcatacttttctgattaccaatgagatttaatatcatttcatttttattggctgtttaggttcctccttctgtgaatttcctgttcataaaagttttttctgactcacagcagattttggagtytcaaatgtgttcactcttaattatat

SEQ ID NO: 260463 - DNA, 546 bp, Homo sapiens
ctactcttgaacttgtaaaacaatcattcccttagaaacctaaaatatcaacaatggcaaaaaggagtgaagcaaaacagtccctttggtccttaaatgtggtttatattatcctaatcggacrttttctaaacagatctatgtgaaataactcttagggtatttatcttaatttgctccttggagaaatatttaattatcattttttaggtacttcttaagttgattgctattaaactgctgaaaataaactctcctttttgatttttcctctgggatccatcaggagattgactttcaggcagcttaatgaaagacaagggtccatcagcattgtttaaggaactgtaggaactgtgctaattgccagaggctctgagcactggctgccagccttgtgtagcccactgggcacagccatcccacccttggctccaaccctgactgcaaagcaagaaagggctttagtgggctgggtaattctaacaactgccagtgacaagtctgctgatggactcatctgggcaacatcacattacgaattag

SEQ ID NO: 260464 - DNA, 546 bp, Homo sapiens
ctactcttgaacttgtaaaacaatcattcccttagaaacctaaaatatcaacaatggcaaaaaggagtgaagcaaaacagtccctttggtccttaaatgtggtttatattatcctaatcggacgttttctaaacagatctatgtgaaataactcttagggtatttatcttaatttgctccttggagaaatatttaatwatcattttttaggtacttcttaagttgattgctattaaactgctgaaaataaactctcctttttgatttttcctctgggatccatcaggagattgactttcaggcagcttaatgaaagacaagggtccatcagcattgtttaaggaactgtaggaactgtgctaattgccagaggctctgagcactggctgccagccttgtgtagcccactgggcacagccatcccacccttggctccaaccctgactgcaaagcaagaaagggctttagtgggctgggtaattctaacaactgccagtgacaagtctgctgatggactcatctgggcaacatcacattacgaattag

SEQ ID NO: 260465 - DNA, 579 bp, Homo sapiens
tgggacagcctggaggtaaggatggaggagagagagtacatggtgtgcaggagccttctttggggatgcaggctgcctcctgcagtacacttgggagtttttgcaggcagttcatgtagaaatgaacttcaagggaagcctttcaaggtaaaaagaaattcagtttgctgtctgttatggtttgggtctgtgttcctgcccaaatctcatgtcaaattgtaatccccaatattggaggtggrgcctggtgggaggtgattagatcacggaggcagaaatcccctttggtgctgttctcatgacagtgagtcagttatcatgagatctgattgtttaaaagtatgtagcacctcccccttctctctcttcctcctactctagccatgtaagacgtgcctgcttctccttcatcttctgccataattgtaagtttcctgaggcctccccagccatgcttcctgcagagcctgcggaaccatgagccaattaaacctcttttctttataagttacccagtgtcaggtatttctttatagcagtgcaagaacagatgaatacaccatctgggaagatagtaat

SEQ ID NO: 260466 - DNA, 579 bp, Homo sapiens
tgggacagcctggaggtaaggatggaggagagagagtacatggtgtgcaggagccttctttggggatgcaggctgcctcctgcagtacacttgggagtttttgcaggcagttcatgtagaaatgaacttcaagggaagcctttcaaggtaaaaagaaattcagtttgctgtctgttatggtttgggtctgtgttcctgcccaaatctcatgtcaaattgtaatccccaatattggaggtggagcctggtgggaggtgattagatcacggaggcagaaatcccctttggtgctgttctcatgacagtgagtcagttatcatgagatctgattgtttaaaagtatgtagcacctcccccttctctctcttcctcctactctagccatgtaagacgtgcctgcttctccttcatcttctgccataattgtaagtttcctgaggcctccccagccatgcttcctgcagagcctgyggaaccatgagccaattaaacctcttttctttataagttacccagtgtcaggtatttctttatagcagtgcaagaacagatgaatacaccatctgggaagatagtaat

SEQ ID NO: 260467 - DNA, 502 bp, Homo sapiens
aaatttatagggatgcatcccagagcaatttccagtgtttagccataaatattttcaagagagataaaagcagttactctaacactaactcccctgtacagactggcccctgggagcagagaagtgcagccagcaagggagtgtgggaagactaacccaacgggacagccacttatctttcctgtttgccccagggagggaggttggtggtgggggctggctgctgttggaagtgctgagcatccccacccctcccaatttgtatttaatctccctagccytgtacgtttttttcattgccagacccagatctatgacaacagtttccatttcttcccatctcccaagcagtgagcaacaaaggaaagacattctaagagcccatgaaacgttttttttttattgaaaccctgttctccagagagagattgaggaggcgatttaagcaaccttattacaaaataaaaatgtatcctcctactccatggcaggaaatgtgaga

SEQ ID NO: 260468 - DNA, 502 bp, Homo sapiens
aaatttatagggatgcatcccagagcaatttccagtgtttagccataaatattttcaagagagataaaagcagttactctaacactaactcccctgtacagactggcccctgggagcagagaagtgcagccagcaagggagtgtgggaagactaacccaacgggacagccacttatctttcctgtttgccccagggagggaggttggtggtgggggctggctgctgttggaagtgctgagcatccccacccctcccaatttgtatttaatctccctagccttgtaygtttttttcattgccagacccagatctatgacaacagtttccatttcttcccatctcccaagcagtgagcaacaaaggaaagacattctaagagcccatgaaacgttttttttttattgaaaccctgttctccagagagagattgaggaggcgatttaagcaaccttattacaaaataaaaatgtatcctcctactccatggcaggaaatgtgaga

SEQ ID NO: 260469 - DNA, 502 bp, Homo sapiens
aaatttatagggatgcatcccagagcaatttccagtgtttagccataaatattttcaagagagataaaagcagttactctaacactaactcccctgtacagactggcccctgggagcagagaagtgcagccagcaagggagtgtgggaagactaacccaacgggacagccacttatctttcctgtttgccccagggagggaggttggtggtgggggctggctgctgttggaagtgctgagcatccccacccctcccaatttgtatttaatctccctagccttgtacgtttttttcattgccagacccagatctaygacaacagtttccatttcttcccatctcccaagcagtgagcaacaaaggaaagacattctaagagcccatgaaacgttttttttttattgaaaccctgttctccagagagagattgaggaggcgatttaagcaaccttattacaaaataaaaatgtatcctcctactccatggcaggaaatgtgaga

SEQ ID NO: 260470 - DNA, 501 bp, Homo sapiens
agctgagccaagagtcagatccaaagtccttccagctctgaagcctgcattgtttccaacgcatgatgttgtctgaatggtgagcaatggaagacagaagatactaacatggtagaaattatcctgagtggggagakagaaggccctggggtgctgcgagtgtcctgggcaggcagcagggagcccctttagccctgactagcttggttgcatttctgatgggtttgacatcaacaggctctgctgagtcccaatttggctaggtaccaccacttgtaccacagggcagatcactccaatgcctgcagcattcatttctcaattttcaaataaaactagctttgtttgaaggacaaagtgagatgatttttgacagcactgggtagatgcaataacactttgcacttttcatttaaacagatactttaaatgtgaaggtagagaggagagaaaaaagattagctgtgggtggagagggggagatgctgttgatgagaagca

SEQ ID NO: 260471 - DNA, 501 bp, Homo sapiens
agctgagccaagagtcagatccaaagtccttccagctctgaagcctgcattgtttccaacgcatgatgttgtctgaatggtgagcaatggaagacagaagatactaacatggtagaaattatcctgagtggggagatagaaggccctggggtgctgcgagtgtcctgggcaggcagcagggagcccctttagccctgactagcttggttgcatttctgatgggtttgacatcaacaggctctgctgagtcccaatttggctaggtaccaccacttgtascacagggcagatcactccaatgcctgcagcattcatttctcaattttcaaataaaactagctttgtttgaaggacaaagtgagatgatttttgacagcactgggtagatgcaataacactttgcacttttcatttaaacagatactttaaatgtgaaggtagagaggagagaaaaaagattagctgtgggtggagagggggagatgctgttgatgagaagca

SEQ ID NO: 260472 - DNA, 556 bp, Homo sapiens
agctctgaagcctgcattgtttccaacgcatgatgttgtctgaatggtgagcaatggaagacagaagatactaacatggtagaaattatcctgagtggggagatagaaggccctggggtgctgcgagtgtcctgggcaggcagcagggagcccctttagccctgactagcttggttgcatttctgatgggtttgacatcaacaggctctgctgagtcccaatttggctaggtaccaccacttgtaccacagggcagatcactccaatgcctgcagcattcatttctyaattttcaaataaaactagctttgtttgaaggacaaagtgagatgatttttgacagcactgggtagatgcaataacactttgcacttttcatttaaacagatactttaaatgtgaaggtagagaggagagaaaaaagattagctgtgggtggagagggggagatgctgttgatgagaagcaagcactatccatgagatattattatgagcctttgcagaagaacacaatccaatcctggagccttagacgtcactccagaatgccattg

SEQ ID NO: 260473 - DNA, 501 bp, Homo sapiens
agctgagccaagagtcagatccaaagtccttccagctctgaagcctgcattgtttccaacgcatgatgttgtctgaatggtgagcaatggaagacagaagatactaacatggtagaaattatcctgagtggggagatagaaggccctggggtgctgcgagtgtcctgggcaggcagcagggagcccctttagccctgactagcttggttgcatttctgatgggtttgacatcaacaggctctgctgagtcccaatttggctaggtaccaccacttgtaccacagggcagatcactccaatgcctgcagcattcatttctcaattttcaaataaaactagctttgtttgaaggacaaagtgagatgatttttgacagcactgggtagatgcaataacactttgcacttttcatttaaacagatactttaaatgtgaaggtagaraggagagaaaaaagattagctgtgggtggagagggggagatgctgttgatgagaagca

SEQ ID NO: 260474 - DNA, 567 bp, Homo sapiens
tatgtatattgctttataaaagttatcacatgtatagcacacacatacagatgttagggaaaaacacacactaaatggtatttttgaatggcgagatgatagtgccttttcttttcctctttatacttgtgacagttaactttttccatagtaatgacgtgtaacaaaccactccaaaacccagtgccttaaaacaacagtcattttttttctcattcacgaccatatgtctatggggtcagctgttttaagttgagctcagctcagctaagattggcttccaactgtagtttgggtccaggtctgctctctgtatcccatcttccttrgaccagagggctaagcagggtatgttcttttggcaataacagaagtgcaaaggggcgagtgggaacctgtgttatctcttaaggtttgattagaggttattacgctgccctttctgttcccatgtcctaaatcagtgggggagaaaaacagactatttctagtggaagggtctgcaaagccacatggcaaagggcatggatataggaagtggtgaaatttggaaactatcatgtaatc

SEQ ID NO: 260475 - DNA, 567 bp, Homo sapiens
tatgtatattgctttataaaagttatcacatgtatagcacacacatacagatgttagggaaaaacacacactaaatggtatttttgaatggcgagatgatagtgccttttcttttcctctttatacttgtgacagttaactttttccatagtaatgacgtgtaacaaaccactccaaaacccagtgccttaaaacaacagtcattttttttctcattcacgaccatatgtctatggggtcagctgttttaagttgagctcagctcagctaagattggcttccaactgtagtttgggtccaggtctgctctctgtatcccatcttccttggaccagagggctaagcagggtatgttcttttggcaataacagaagtgcaaaggggcgagtgggaacctgtgttatctcttaaggtttgattagaggttattacgctgccctttctgttcccatgtcctaaatcagtgggggagaaaaayagactatttctagtggaagggtctgcaaagccacatggcaaagggcatggatataggaagtggtgaaatttggaaactatcatgtaatc

SEQ ID NO: 260476 - DNA, 573 bp, Homo sapiens
atgtcaatgaagtgaccttggaaagctatttaattatttatattttagttaaagctaaggcaaagttctataatgagaaaaatgcaaacatttgttcttattatttgaagaggaagcattttttttttaaacaaccaagtggtaattttactaagaagggccatctttctgggcagaaattatggaagtaggcataccacgcaggctggagagtggaacacatcagtattattgaaatgggagagctccctgaccccctcgcaagacgtgagacagggatgtggctygtttatttgagctgtgctcaaaccccttatgggagggggagcacacagatgggcaggtgcaggagctggggtgagtgttttggggctccagccctacggtagtgtctagggatgtgttacaattaatgctcttttagcagttgttgtccacagataggtaagtgttaaaccagctcagtggagagtcagggtgacagctatttacaccctgccctcttggtacccggctccttgtctggcatccaggaagtatcaggtcactcgaacttgaaggatggtgaatgca

SEQ ID NO: 260477 - DNA, 573 bp, Homo sapiens
atgtcaatgaagtgaccttggaaagctatttaattatttatattttagttaaagctaaggcaaagttctataatgagaaaaatgcaaacatttgttcttattatttgaagaggaagcattttttttttaaacaaccaagtggtaattttactaagaagggccatctttctgggcagaaattatggaagtaggcataccacgcaggctggagagtggaacacatcagtattattgaaatgggagagctccctgaccccctcgcaagacgtgagacagggatgtggctcgtttatttgagctgtgctcaaaccccttatgggagggggagcacacagatgggcaggtgcaggagctggggtgagygttttggggctccagccctacggtagtgtctagggatgtgttacaattaatgctcttttagcagttgttgtccacagataggtaagtgttaaaccagctcagtggagagtcagggtgacagctatttacaccctgccctcttggtacccggctccttgtctggcatccaggaagtatcaggtcactcgaacttgaaggatggtgaatgca

SEQ ID NO: 260478 - DNA, 573 bp, Homo sapiens
atgtcaatgaagtgaccttggaaagctatttaattatttatattttagttaaagctaaggcaaagttctataatgagaaaaatgcaaacatttgttcttattatttgaagaggaagcattttttttttaaacaaccaagtggtaattttactaagaagggccatctttctgggcagaaattatggaagtaggcataccacgcaggctggagagtggaacacatcagtattattgaaatgggagagctccctgaccccctcgcaagacgtgagacagggatgtggctcgtttatttgagctgtgctcaaaccccttatgggagggggagcacacagatgggcaggtgcaggagctggggtgagtgttttkgggctccagccctacggtagtgtctagggatgtgttacaattaatgctcttttagcagttgttgtccacagataggtaagtgttaaaccagctcagtggagagtcagggtgacagctatttacaccctgccctcttggtacccggctccttgtctggcatccaggaagtatcaggtcactcgaacttgaaggatggtgaatgca

SEQ ID NO: 260479 - DNA, 654 bp, Homo sapiens
agttatgtgcttcaataaggaacttttaaataaacatgaagtcctagcaatcttgaacttcagaattaatctcatctgaaccaataagggactcagtttgaaaaaagaaaatctagggcagaatgcctagctcagtagcagtatgaggagggaagagcttttggagaaattaaaaacctctcttagtagcatttttattttwaagcttaaacataagagaaccagagtttttcacatgtaatcactgaaaatttcaagtgatagtaaattttatagtaaaaagggctttaaaatgtatctagttcaaacttctcattcagcaagtagaagaagtaagatcacagagagtcagatagacttgtatatagttacatatccagccagccttcatctctctttacaagatttaaaaaacatttgttataactttataatctttctgactataaaagtgacaaatgttcgctggagcaaaatgaggaaaatagaacccaaaatagcaaaatggaaaaaaaagtactcataattctaccattcaaatcctcattccattaatattttggtatatttcctctcatgcttcttttctatacatttataatgaatttgtatttcacaataacggggccatatactataaaacttttaaaaact

SEQ ID NO: 260480 - DNA, 220 bp, Homo sapiens
cagccaaaaatgtcaccagatactgccmtgtttccccagggttgagtgggatgggatcactcctacccatctccccgctgagttcctgagtgaggactgcagaatgctgactggacatcaggaatgtgggttgcagtcttcatggctgtatttgttgttgttttcttctgggagtaggagcagagaagatgaagtgaacgatgggttaagtcagatttgt

SEQ ID NO: 260481 - DNA, 517 bp, Homo sapiens
gtaaatttgccttgctgagaaatcctttgtttgagtgctcctttttcttgtgactctgagctcttgtttccaacaaggcaaaaaaaaaaagtatcttcaggccatccagttacactttctggaacctctttgtcttaaactcttcaagcaccaggtatcaatttggcagctgtatgagatgctatgctagaagccaagggtacagaggtgagcaaagsagagtctccagttcaagaaggccttggcctgtgggtaggcaaaaaatacccactataatgtaaaatgctgaggactctcagagctgaagcaggaatgtcttgggcattattctttacttagtgcctagcaaaacttcagtaacatagcacatgctcaatatagatttgtaaaatgaataaacttatggaaatgtaggaggaaaagcagttagttttgactggtttgtgggtgggggagaaagcaattgaaactgtaccatttgttcatagggagactctgataagctgtgaaatgcctg

SEQ ID NO: 260482 - DNA, 631 bp, Homo sapiens
ctagggaaactcaaagggtgaacatggagagcccaccaatgagacagagtaggtgcatacaatcagaaaatatttggtataaagaactaacctgcctcttcttacatgtggcataaaattcataccaaggataaaagctaagtgcaaaaayaagtgtggtcagtatcttcctcatcttgtattttttaaatggatgtatatttatatagacatacacatactggctaagatgtattgactgtttacgaggtgctgagcagaatccactcactgccctaactctctagagagccccatgagggacaatgccattatcctcattttgcagatcaggaaactgcggcacaaggaaaccaagtcattcacttaaggctgtgaaaccaacgagtatcagaaagaggttttgaactcaggtcttctgactctagggtacccctcacctcctacagcccccactgtcagtgtcaccccgctgtgagtgcccctctgctgattaaactcccagaagtatagacagtaaaaggttcctagtataaccttggtggtgaaattacaggaagtattaatttttctctgtgttcttgtctacattttctattaaatacatatgcattatttccacaattagaga

SEQ ID NO: 260483 - DNA, 589 bp, Homo sapiens
ccattaaatatatgcaatgaagaaaatattatatttatgtctattgcccaggagaatgaaggtgacacttaacaaaaagaaaaactaaaagtcaggaaaaacttaaactaatcttctgctgggttctgtttacagtatgattgttttaccattttttccaaattatcagccttcctcattctttcaactaatctatgttctccctatatttcaaaaaggtaattcaaaaactatcatcatgttcctattcggccatcttggccgaatctctaatcataaaatctctaatcataaaatctaatcataatctctaatcataaaatcaaagtaaatattaatagagataaaaactgatagaattgactatttwaaaagaaaaacaggccaggtgaggcggctcacatctgtaatccctacactttcgggtcacttgaggtcaggagattgagatcagcctggccaacatggtgaaaccccatctctactaaaaatacaaaaattagctggccgtggtggcaggcacctgtaattccagctactcagggggctgaggcaggagaatcacttgaactggggaggtagaggttgc

SEQ ID NO: 260484 - DNA, 670 bp, Homo sapiens
  misc_feature (1)...(670): n = A,T,C or G
aattctttactcaacattgtttttaataattcaagtacaggatgttttattatgaacattttctaaaacaagtttaaaaataagttccccagtntccctntaaatgagnntatgagcatggttgttccaagaaggtatttttaaaaaatatttaatattcctgttctgccagacagtgaaagatttttcacattttccatgattatttcaactggaatgcatctccctcctgcccccagggctgacagagttggggaagaaaagccacaatttcatttatatcactcagcaggttaccacagatgtttgcaagttctttggaggaggggaaaataaagatrtcatgacagaagtttttctcccttttccaaagacagttaaaactttccccatcccatgcggtcttctgcaatgtgattttgcccccccaatccccacccacccatcagcaagtgacatctacttgatctcctagaatcttggtgggcctgtgactacaaggaccagaagaatatggtagaagtggtttcagttctggaatcaaccctcaaccagtcaggtggcttctgcttccttttttggaccactcaattttgcgatgctccctctgagaagccagccaacatgctgtgacatgcacaaccacacggagagaccctgtggaggcact

SEQ ID NO: 260485 - DNA, 428 bp, Homo sapiens
tggaaatgcctggatgcccaggcaaaagtttgctgcaggggtggagccctcatggagaccctctgctaggggagtgtggaaggaaaacgtgaggttggagcccccacacagagtccctactggggcactgcctaagtggagctgtgagaagagggccaccatcctcaagccccagaatggcagatccaccaacacttgcactgtacccctgaataagccacagatactcaatgctagcccatgaaaacagccaggagggaggtactctgcacagccacgggggcggagctgcccaggatatgagtcaaagaagatcaytttggagctttaaaatttgactgccctgctggatttcagacttgcatgggccctgtagcccctttgttttggccaatttcttccatttggaatggctgtatttacccaat

SEQ ID NO: 260486 - DNA, 428 bp, Homo sapiens
tggaaatgcctggatgcccaggcaaaagtttgctgcaggggtggagccctcatggagaccctctgctaggggagtgtggaaggaaaacgtgaggttggagcccccacacagagtccctactggggcactgcctaagtggagctgtgagaagagggccaccatcctcaagccccagaatggcagatccaccaacacttgcactgtacccctgaataagccacagatactcaatgctagcccatgaaaacagccaggagggaggtactctgcacagccacgggggcggagctgcccaggatatgagtcaaagaagatcactttggagctttaaaatttgactgccctgctggatttcagacttgcatrggccctgtagcccctttgttttggccaatttcttccatttggaatggctgtatttacccaat

SEQ ID NO: 260487 - DNA, 564 bp, Homo sapiens
tcataacagtattactaacaagcaagcattaagactggcccataatgtctttggatctaaaccaggggataaaatccmatgatgtaaactgctatgtatctgatacttaaaaaaaaaaaaaaaaaaaaaaaaaagccaaatgatcccctgagtcaacacccgtgaatgtaaagtgttctgcaaataaggaaggaacatgatcagcactgttaattaaggtatattatactcagatccttgcaatatgtaagctacactttgagaggagctaaagtgcttttaggggctacaaattaatgccatctccaaaagtgctgaaccttatccccggcctcacatttgtgctggggactctgaccttcatggtagcatggttattttgaagaccacctatcctatcacttacatttacatctgcaaacagggatgtctggcagcctgaaacttaatttcccactttggggttgaccagtcttgaattggctccaaagctctgtggtatcaatacagctggacactacaggccagttataatgccttcgccttccttgacggctttcttct

SEQ ID NO: 260488 - DNA, 616 bp, Homo sapiens
gaagcttatttggttggtgtactgtaagcaactccacaaagataattctgtaggattkgcaaaggaagatgcagggctggggagaccagctctttaatatgtggaaaagcacaggcatcacataaagaagtagcccctgcaaagggagcccggaaaaataaatctgataaggtttaaggatatgaaggggcccctacactgatctgagagtgctgtagattagcaacaataacaatattagtatattattttactcttttgtttctcctttgaaccttaggagtggagaattgaattaattatataattctgttcacagcacacaaccatcatcatccatttcaggctcctatcccttcagtccctccatcctgagccttgtttccactttcctacctcccatagccatcccctactctaaagtatttgggataggtatagatgtaggtatatatacattgcctgtacttggataagtatgtgtctgaaaaacgtatctttgtatatgtgttttacattacataaagggcatagatataattgtattactttttcccactcaacactattaaaaaaccaatccatgttactctattttttttagagttcattgctt

SEQ ID NO: 260489 - DNA, 616 bp, Homo sapiens
gaagcttatttggttggtgtactgtaagcaactccacaaagataattctgtaggattggcaaaggaagatgcagkgctggggagaccagctctttaatatgtggaaaagcacaggcatcacataaagaagtagcccctgcaaagggagcccggaaaaataaatctgataaggtttaaggatatgaaggggcccctacactgatctgagagtgctgtagattagcaacaataacaatattagtatattattttactcttttgtttctcctttgaaccttaggagtggagaattgaattaattatataattctgttcacagcacacaaccatcatcatccatttcaggctcctatcccttcagtccctccatcctgagccttgtttccactttcctacctcccatagccatcccctactctaaagtatttgggataggtatagatgtaggtatatatacattgcctgtacttggataagtatgtgtctgaaaaacgtatctttgtatatgtgttttacattacataaagggcatagatataattgtattactttttcccactcaacactattaaaaaaccaatccatgttactctattttttttagagttcattgctt

SEQ ID NO: 260490 - DNA, 429 bp, Homo sapiens
gtttcatttgccttctcgcccttccctgaggattgtggcctccaggtacagtgaaagtgatactgtatccctagcaccctggaaattccctgagttatygcggctttaaaagccagaccattgttgctctgtaagctttggggaagcccaaatctaggaattatttcatgaattaggactttaatcacttcctgagacttctctgtcttgcaggggaaagcttctatccaatttgtaaaggtattaacacagaccaacaagtattgaaatccctttgacttaggcatatgggtgaagtctaactgccagtcctgtccaggatagtgacatattctttgttcccccaaaggggccttacgatggaccaagggattattccattggcacaactcacaggctttgactacctgttggatggttcagaggaga

SEQ ID NO: 260491 - DNA, 499 bp, Homo sapiens
tcatctctcagatgctctggtctggagaaaacaaaaaatacaaaactgacaaacgaacaacttactaggaagtagatacttaggttgaagagaacgattgtaggtcacattctgcttgacttcatgtgctgttatactgtcctatgtgcacagcacagctcttgcaggaaacaggttgatggtgccaaaggttctcttcttggaagctaagtgtgggtccccaattcccaagtcctctgaagatgtgtactcttttacagtgcaggtgacttttttcttttctttttggtggagagagtgtccataacttctttkagattttctaagggtctgtagggcagataggtatccctaagaacctgaatgatccactgtatcagcttcttagcttcttgtctcattaaattaaaagaataaaaaacttttttttttacaattaatattactaagcttatattagatgctctgagaattggctttatttctgaactcacgtttg

SEQ ID NO: 260492 - DNA, 464 bp, Homo sapiens
tttctaggtatacaatcatatcagcaaacagtttgacttcctctttaccaatttggatgccctttatttctttctcttgtctgattgctctggctaggacttccagtactatgttgaatagaagtggtgagagtgggcatccttgtcttgttccagttctccgaggaaatattttgaacttttccaagttcagtattatgttggctgtgggtttgtcatagatrgtttttattacattgaggtatgtcctttgtatgccaattttgctgagggttttaaacataaaaagatgctggattttgtcaaatgctttttctgcatttattgagatgatgtgatttttgcttttaattctgtttaggtggtgtatcacatttattgacttgcatatgttaaaccatccctgcatccctggtatgaaggacacttgatcatctggattatctttttgatatgttgttaaa

SEQ ID NO: 260493 - DNA, 605 bp, Homo sapiens
tttttttttttttaccatttctatctcgctgcttgttattggtctgttcagggtttctaattcttcctaatttaagctaggagkgttgcatatttctagaaatgtatccatctcctgtagtttttcttgtttatgcatgtaaatgtgttcatagtagtcttgaatgatcttttgtatttctgtggtatagactgtaatatcccttattttgtttctaattgagcttatttggattttttcttttcttttcttggctaatcttgctgatagtctagattttttcttttcttttcttggctaatcttgctgatagtctatcaattttatttatcttttcaaagaaccaactgtttgtttcatttatgttttgtagttttttgtttcaatttcttttagttctgctctgatctgttatttcttttcttctgttaggtttgggtttggtttattcttgtttctctagttccttgagttgtgaccttagattttctatttctgttctttcagactttttgatgtaggcatttaaggctatgaactttcctcttggtaccatctttgctgtatctcagaggttttgataggttgtgccactattattgttc

SEQ ID NO: 260494 - DNA, 605 bp, Homo sapiens
tttttttttttttaccatttctatctcgctgcttgttattggtctgttcagggtttctaattcttcctaatttaagctaggagtgttgcatatttctagaaatgtatccatctcctgtagtttttcttgtttatgcatgtaaatgtgttcatagtagtcttgaatgatcttttgtatttctgtggtatagactgtaatatcccttattttgtttctaattgagcttatttggattttttcttttcttttcttggctaatcttgctgatagtctarattttttcttttcttttcttggctaatcttgctgatagtctatcaattttatttatcttttcaaagaaccaactgtttgtttcatttatgttttgtagttttttgtttcaatttcttttagttctgctctgatctgttatttcttttcttctgttaggtttgggtttggtttattcttgtttctctagttccttgagttgtgaccttagattttctatttctgttctttcagactttttgatgtaggcatttaaggctatgaactttcctcttggtaccatctttgctgtatctcagaggttttgataggttgtgccactattattgttc

SEQ ID NO: 260495 - DNA, 656 bp, Homo sapiens
tcctgtagttgttattgttttttatttatgctatctatttcattgaagatttctccccttatatcttgtatcattggtttgatttccttaagttggacacctttgtctgtcatctccttgattagcttaataatcgaccttctgaattctttttctggcaattcagcaatttcttcttggtttatatccattgctggtgagggttaggtgtgtctgagctcagactcttctctagtgggacttgctgtggctgctgtgggggatggggatgtggttcccaggtcaatggagttattctcctaggaggtttatggctgcctctgctatatcatgcagttgtcatggaagtgggagaaagccagcagttacaggcctcaccagctcccacaaaaccmaaaaggctggtctcactctcactgtgccctcaccaacagcactgagtttatttctaggcagtaggtgagcagggctgagaacttgcctcaagctaccagctggctgagaaagcaagcagggctttcgcacctccctacctgtcagagtctgcatactggattcacaccctcccccgagttctggccaggaaactttgtgtccagaacaaagttttggttggaattgttaaaaagttcagctgtggtcttttcccagttact

SEQ ID NO: 260496 - DNA, 656 bp, Homo sapiens
tcctgtagttgttattgttttttatttatgctatctatttcattgaagatttctccccttatatcttgtatcattggtttgatttccttaagttggacacctttgtctgtcatctccttgattagcttaataatcgaccttctgaattctttttctggcaattcagcaatttcttcttggtttatatccattgctggtgagggttaggtgtgtctgagctcagactcttctctagtgggacttgctgtggctgctgtgggggatggggatgtggttcccaggtcaatggagttattctcctaggaggtttatggctgcctctgctatatcatgcagttgtcatggaagtgggagaaagccagcagttacaggcctcaccagctcccacaaaacccaaaaggctggtctcactctcactgtgccctcaccaacagcacygagtttatttctaggcagtaggtgagcagggctgagaacttgcctcaagctaccagctggctgagaaagcaagcagggctttcgcacctccctacctgtcagagtctgcatactggattcacaccctcccccgagttctggccaggaaactttgtgtccagaacaaagttttggttggaattgttaaaaagttcagctgtggtcttttcccagttact

SEQ ID NO: 260497 - DNA, 656 bp, Homo sapiens
tcctgtagttgttattgttttttatttatgctatctatttcattgaagatttctccccttatatcttgtatcattggtttgatttccttaagttggacacctttgtctgtcatctccttgattagcttaataatcgaccttctgaattctttttctggcaattcagcaatttcttcttggtttatatccattgctggtgagggttaggtgtgtctgagctcagactcttctctagtgggacttgctgtggctgctgtgggggatggggatgtggttcccaggtcaatggagttattctcctaggaggtttatggctgcctctgctatatcatgcagttgtcatggaagtgggagaaagccagcagttacaggcctcaccagctcccacaaaacccaaaaggctggtctcactctcactgtgccctcaccaacagcactgagtttatttctaggcagtaggtgagcagggctgagaacttgcctcaagctaccagctggctgagaaagcaagcagggctttcgcacctccctacctgtcagagtctgcatactggattcacaccctcccccragttctggccaggaaactttgtgtccagaacaaagttttggttggaattgttaaaaagttcagctgtggtcttttcccagttact

SEQ ID NO: 260498 - DNA, 603 bp, Homo sapiens
gtcttctgggtcctgcaggagcaatctgcttccttcaaagggtctgtggattttcttggctttccttgtatatccctgtagtagttctttgggcagaaattcatgacacgagtctccacatgctgctgtgtccgtccaagtgggagctgcaatttagtcctgcctcctatctgccattttgtttctagatgcagcctttaaagtcatttcatgccttgctaccctccaaggtgtccctttgccacaggaaacatcaagtatttgttcactgcggtttgaataaatgctgtcctcctttttttgccttgtaattgtcattcctgtcactgtcatttgcttaaacaacatcctgtttgatgcttctatagggatgaggctaacactagtctttgcttgctgaatttctcccaaattagggatttattttaatttctccaaagagttttcttgtactccactgcagtagtgacgtagggctggcrtctgatatactcaacaaggaactgtctgctagggagaagccatttcccttcccacagaaactcccagtatctctctcctcttggcttggagatggagcacgtatgggaggcaaaaggggag

SEQ ID NO: 260499 - DNA, 603 bp, Homo sapiens
gtcttctgggtcctgcaggagcaatctgcttccttcaaagggtctgtggattttcttggctttccttgtatatccctgtagtagttctttgggcagaaattcatgacacgagtctccacatgctgctgtgtccgtccaagtgggagctgcaatttagtcctgcctcctatctgccattttgtttctagatgcagcctttaaagtcatttcatgccttgctaccctccaaggtgtccctttgccacaggaaacatcaagtatttgttcactgcggtttgaataaatgctgtcctcctttttttgccttgtaattgtcattcctgtcactgtcatttgcttaaacaacatcctgtttgatgcttctatagggatgaggctaacactagtctttgcttgctgaatttctcccaaattagggatttattttaatttctccaaagagttttcttgtactccactgcagtagtgacgtagggctggcgtctgatatactcaacaaggaactgtckgctagggagaagccatttcccttcccacagaaactcccagtatctctctcctcttggcttggagatggagcacgtatgggaggcaaaaggggag

SEQ ID NO: 260500 - DNA, 584 bp, Homo sapiens
agaatagcgatttgttgtttatgtaaataaaaaagtgtcagtcgaggaaagactgtactcagcatgctcttaaaacatctgctctcrtaaaacacttgaaaataatcacacactaacaggagaaaaacagctgtgcgtgaatcaatagactccaccatacgtgtgcctggaatatatgtacaataaaatcttcagaaataggcccctgggtatttggatcagtggacagactattgattatgtgtaattttactgtgagctgttatttagctgtatggaatatactgtgcctggagtccaagggaaagtatctactcatggacgtgttacttaaagcattttacactaactctttcaaagcaatatataagcaaaaattaccctcaagggaagtttttgaagcatgaagggatgatgtgtctgcaactaagtatagtcatggaggcaaggttgcaaccaagtgcttccctcctcccaacttgcgctaagttgtatcctacggcgagatcctgttctttatctgttttgtcaactctctccaatatgattagagttttttattcatagaggcagagcagttttga

SEQ ID NO: 260501 - DNA, 600 bp, Homo sapiens
tctgctctcataaaacacttgaaaataatcacacactaacaggagaaaaacagctgtgcgtgaatcaatagactccaccatacgtgtgcctggaatatatgtacaataaaatcttcagaaataggcccctgggtatttggatcagtggacagactattgattatgtgtaattttactgtgagctgttatttagctgtatggaatatactgtgcctggagtccaagggaaagtatctactcatggacgtgttacttaaagcattttacactaactctttcaaagcaatatataagcaaaaattaccctcaagggaagtttttgaagcatgaagggatgatgtgtctgcaactaagtatagtcatggaggcaaggttgcaaccaagtgcttccctcctcccaacttgcgctaagttgtatccyacggcgagatcctgttctttatctgttttgtcaactctctccaatatgattagagttttttattcatagaggcagagcagttttgaaagatccaaaggcatgacctgtaaggatcttaataccccttttttcatccacccatttctttctctaggcagtagaaaaatgtgatataagga

SEQ ID NO: 260502 - DNA, 600 bp, Homo sapiens
tctgctctcataaaacacttgaaaataatcacacactaacaggagaaaaacagctgtgcgtgaatcaatagactccaccatacgtgtgcctggaatatatgtacaataaaatcttcagaaataggcccctgggtatttggatcagtggacagactattgattatgtgtaattttactgtgagctgttatttagctgtatggaatatactgtgcctggagtccaagggaaagtatctactcatggacgtgttacttaaagcattttacactaactctttcaaagcaatatataagcaaaaattaccctcaagggaagtttttgaagcatgaagggatgatgtgtctgcaactaagtatagtcatggaggcaaggttgcaaccaagtgcttccctcctcccaacttgcgctaagttgtatcctacrgcgagatcctgttctttatctgttttgtcaactctctccaatatgattagagttttttattcatagaggcagagcagttttgaaagatccaaaggcatgacctgtaaggatcttaataccccttttttcatccacccatttctttctctaggcagtagaaaaatgtgatataagga

SEQ ID NO: 260503 - DNA, 592 bp, Homo sapiens
ttgagagctcagatgctggcttaatctacttttgctgcatctgctaccactattgacactaccactaactcctggtggagcgttgagtcttggtaggtatcatgttaaggcattggtgcatattatctcacttaggaattccaaagaatcttcaaaatgtgtaaaatgttaaaagtcctatacctcctaccttactgttgcaatcatccagtgccaagggtaacacacataactttccaactgtaaaatggcaataacaagaattagttcacggtggttgtttagggatcagtgaaataactccagtacagtgactagcaacatgataggcatctagcacactctaatgtcaactttttctccccctttctatataaactagttccttatctataaacattaataaaatgttcgaactaaaaggaattttaatrtaatatttaatgtaatctttgcccttatcctgtattatgtaactttggaattcaacatacaagttgtgtttgatttattgttatatccttgttacttacgctagtgcctaatgtaatactttgcatgtagtgggtactcaaaatatttattgaattat

SEQ ID NO: 260504 - DNA, 602 bp, Homo sapiens
cttttgtagtcatagtatagtgatcaaaactaaaaaattaacattagtacaatatattaaactatagaatttattcagattttaccagtttgttgtataatctttttctgagcaattaaaaatgaaaattaccttttgtatatttggttttttattaagaatttcaaataaatatagctgattgtacttaatagtttaaaactatgcataaactgttgggccattgtttgtaactcactatgctacttggagagtggcattcaaacattagtagtgggggtacgtcttgttttgctgkataatagagaaattgctgaaaatctataaataagctttgtatacattacaaagacattttactttttataggtgcaagatttacttataacttatggttataagttataaggtttaatataccattatactataataaataaggaagaagtcacttatttcccaaagtgaccccaaatgtgttcccttggcaatttggtgcttccctttcaaatctgcttaaattaacatcactttatttgagagtaatggaaagtaattttttacagttatgagattcagggggtgtaacatcgcaccaggaa

SEQ ID NO: 260505 - DNA, 557 bp, Homo sapiens
atattttgttcagcatatttaattgtaattagtgggatgagtagggtagaatgtgctacttcattatgtctagaagccttagctactttctagtggttatgttacatcaaactttttaagagtgaggatatgagcttctaacttccatcttcatattcataatggatttttaattaattgccataaataggaatgacctataatgacaaactcttagtaaaataagtaaaatgcaaatatgacattaacagttttgttaatttagggttgtaacttaaatataccttattctaagttatgctccttaggttcttaatgtaatttggacacagaaagatatagacaatagcaatttttcttcatttggaattataattccaatttttttttcaaggaattacctcttttctctttgaggaactatctttcaaaggaccttatgcccaccccttgaatagtggaagataagacccaagctaggccaattgtgtgttctctcycaggatttgaattatgagcagagtgacaaaaatgactgaataggtttggatttcatc

SEQ ID NO: 260506 - DNA, 513 bp, Homo sapiens
tttcttaaataataagacttgaaagtcaaaattactctttgatgcatgggctgcagaatgttagcagaatgttgtgggagctagcatgaaaacaacattaatctccttgtaaatctccatcaaagttcttgggtaaccaattgccttgtcaatgagcggtaatgttttgaaaggaatctctctttctgagccataggtctcaacagttggctaaaaatattcaggaaaccatgctgtaaacaaatgtgctgtcatctaagctttgttggtgaatttatagagcacaggcaaaayagatttagtataatttttaagtgccctaggattttcagaatggtaaatgagcactggcttcaacttaaagtcggcagcttcattaacccctaacaagagaatcagcctgtcctttgaagcgttgaagtcaggcattgagttatctctagctatgagagtcctagatgacatctccttccaatagaaggctgtttaatttacattgaaaatctgctgttt

SEQ ID NO: 260507 - DNA, 513 bp, Homo sapiens
tttcttaaataataagacttgaaagtcaaaattactctttgatgcatgggctgcagaatgttagcagaatgttgtgggagctagcatgaaaacaacattaatctccttgtaaatctccatcaaagttcttgggtaaccaattgccttgtcaatgagcggtaatgttttgaaaggaatctctctttctgagccataggtctcaacagttggctaaaaatattcaggaaaccatgctgtaaacaaatgtgctgtcatctaagctttgttggtgaatttatagagcacaggcaaaatagatttagtataatttttaagtgccctaggattttcagaatggtaaatgagcactggcttcaacttaaagtcggcagcttcattaacccctaacaagagaatcagcctgtcctttgaagcgttgaagtcaggcattgagttatctctagctatgagagtcctagatgacatctycttccaatagaaggctgtttaatttacattgaaaatctgctgttt

SEQ ID NO: 260508 - DNA, 590 bp, Homo sapiens
aattggcataattttggtaatgttttgtctcagagaatagagaagccctgaaaggggtgagagaagggggaatggcaggtcggtggaatagtcagaacacacacagcattttttgactaagtttgttgtctgatatggtttggctctgtgtccccacccaaatctcatctcgaattgtaatcccataatccctacatattgagggactgacctggtgggaggtgattggatcatggggccagtttcccccatgctgttcttgtgacagtgagtgagttctcacaagatctgatggtgccatgattgtaagtttcctgagacctccccagcaacgtggaactgtgagtcarttaaacctcttttctttataaattactcaatctctggcagttctttatagcagtgtgagagtgaactaatatgctgtcttatatgggtatggtttgtggcacccccaaataattataatggtaacatcaattattataacagacataataagtttaaaatattgcaagaataatcaaaatgttacacagagacacaaagtgcacaagctgttggaaaaatggtgcctgtagacttgtttg

SEQ ID NO: 260509 - DNA, 566 bp, Homo sapiens
gggaaaaaatcctgtgattctgttactcataatgtttaaaagtattttgtttctgaaatgtccagtctctgcatatgaaatttaaaaaaaaatggagtcatatatacacaattttgtaggctgctttgggaacgtttcttttccaagtgcctgcttggatttctacatgccttactgggctctttgaaaattggattcctcattccagagacagacacagatccacaaggaatgcagctgtgtcatggatatgccaacatgcattttcctagaaatgcgagacacttcttcaaaatgttaactttgcctactgatttgtgaaggtttagatattagtaattaakgactgttaaaaataaactttaatgcatattttaggagggatagttgaagaaggaaagcgcctagaaggcccattaagtagttaaggacagagttggctcaaagccagaattatgaaggtatgaggaaggcagttagctgggttggaaagatttcatctctccttctatgcaaagaacagaattgttacttagctgagtgatcatatgtaggaatcaccagag

SEQ ID NO: 260510 - DNA, 635 bp, Homo sapiens
agccatttacattcagacagcaagtgaagcaaagcaaataaactctactctggctgggaataattctgccctgatraggtcagtaatatcattttgtattcttcttgaactgtagctaaagaaataaaaaaaatgatcacactgacagcaaagagaaaattatttgcatagtgggtggataatatgctgtgaggtcagattcttaaatactgtggttggaatatattttttttaatttttataaggctgaatgattttattaccactaataacccttgtggctctggaagcttaaataatctgggtaatcaaaatttatgctttaggatggaagatgattatctgcagatgagaggaaggaaattccttttttcccaatcctctgtgctaactacactgtgggcgaataatcgcatggagcatttggctaaggattctgtgttggaggcaggcagtccctctgaaagatcacattttggtggctgtaggcaatgaactttcccagtttactcagttctgagtaatctaaaactctactcagagaaaaaggaccacatggagatactgcaaagagaggtagaataatgtgagatgtttgtcctcctctttgaggagttcattcctcagactgttga

SEQ ID NO: 260511 - DNA, 635 bp, Homo sapiens
agccatttacattcagacagcaagtgaagcaaagcaaataaactctactctggctgggaataattctgccctgatgaggtcagtaatatcattttgtattcttcttgaactgtagctaaagaaataaaaaaaatgatcacactgacagcaaagagaaaattatttgcatagtgggtggataatatgctgtgaggtcagattcttaaatactgtggttggaatatattttttttaatttttataaggctgaatgattttattaccactaataacccttgtggctctggaagcttaaataatctgggtaatcaaaatttatgctttaggatggaagatgattatctgcagatgagaggaaggaaattccttttttcccaatcctctgtgctaactacactgtgggcgaataatcgcatggarcatttggctaaggattctgtgttggaggcaggcagtccctctgaaagatcacattttggtggctgtaggcaatgaactttcccagtttactcagttctgagtaatctaaaactctactcagagaaaaaggaccacatggagatactgcaaagagaggtagaataatgtgagatgtttgtcctcctctttgaggagttcattcctcagactgttga

SEQ ID NO: 260512 - DNA, 422 bp, Homo sapiens
aatatgctgtgaggtcagattcttaaatactgtggttggaatatattttttttaatttttataaggctgaatgattttattaccactaataacccttgtggctctggaagcttaaataatctgggtaatcaaaatttatgctttaggatggaagatgattatctgcagatgagaggaaggaaattccttttttcccaatcctctgtgctaactacactgtgggcgaataatcgcatggagcatttggctaaggattctgtgttggaggcaggcagtccctctgaaagatcacattttggtggctgtaggcaatgaactttcccagtttactcagttctgagtaatctaaaactctactcagagaaaaaggaccrcatggagatactgcaaagagaggtagaataatgtgagatgtttgtcct

SEQ ID NO: 260513 - DNA, 536 bp, Homo sapiens
caattcagacatatggtgcttttgattgcataggtcttttcaatgcattcatacctgcctgcatgtcacacacgtgatccatgagcttagccagtgaatgaagaaagctatcttgaatgtyaggataaaagcactcaggatatttcctagaattttcttcttaaaatcaagtagcaggattaagacaatgtaccaagaaatttgaattgagcagatgttttcatccaaactaggaatctgataatgtgctatacaattgatgcagtatctattatacattgattgttgcaatgacagtagtggtatgaactctcatcatcatggagtgatgtaaactcctacaacttattaccaaaatgtttgaaaaatgtcagaaaccaataatccaacaggcattatgtagtatgggtgagtgcctaattttttttttttagatttttataaatatgtatcttgaatgatttatgttaaaagataagagacagtattttgctcactagtctgtttattgagggaggaaaagatagagagggtga

SEQ ID NO: 260514 - DNA, 536 bp, Homo sapiens
caattcagacatatggtgcttttgattgcataggtcttttcaatgcattcatacctgcctgcatgtcacacacgtgatccatgagcttagccagtgaatgaagaaagctatcttgaatgtcaggataaaagcactcaggatatttcctagaattttcttcttaaaatcaagtagcaggattaagacaatgtaccaagaaatttgaattgagcagatgttttcwtccaaactaggaatctgataatgtgctatacaattgatgcagtatctattatacattgattgttgcaatgacagtagtggtatgaactctcatcatcatggagtgatgtaaactcctacaacttattaccaaaatgtttgaaaaatgtcagaaaccaataatccaacaggcattatgtagtatgggtgagtgcctaattttttttttttagatttttataaatatgtatcttgaatgatttatgttaaaagataagagacagtattttgctcactagtctgtttattgagggaggaaaagatagagagggtga

SEQ ID NO: 260515 - DNA, 581 bp, Homo sapiens
tacccgtagggtgcagttatgggtgtaaaaattcatgtttcactttttagagctaccatttttattgacttttgggcagaattatttacagaaaagaaaaatgtaacttctgccaacaaacttgacttcttaggaatctacaaacaattcattagacttgaattcattatagttgaacttaaaacgtgtggcagctgtgaaggtacttttctgttcagaatgaaagaaattgaagaggtcaaacaacttgtctcagaaaacaatgatatgggttctccagtgaatttgtttccacctttatctgctggcaaagaacttggtgaatagtaatacaggtcttggtgaagagccatgcaggtgatgattgacatctttttgtcagcagtcggtgctgttcttcacacttttcctgacccagcactgtcagttttcaggttgtgcttccttwgtattttcactttacattgctggttgtttttataggaagtgtgtgtatgtgggtgtgtacaccggatttagggaagattcagttagggctatcctgggtcagaatagattccagccagttttctaaagcatag

SEQ ID NO: 260516 - DNA, 546 bp, Homo sapiens
atgagggcaaagagaatggccaccacagttagaaaactggtgaatctcctcattcttaaaaaaacatctaggatggaattagagaagttactaaggaggaaatccatgttgtatcttacctgatctgttgggttggataccttgactgccctgccatacacctgctgcctctttcagtgagatcccaagttaggggccatactgtcttatctaagagacctcttggcattcgtcccttagaatgtcaacgtgagccaggaaatgtgtcctgtggtgtggccccggacatctaaagaaccaagagtaatgtaatgatagctaattacacttaacacatttattgagtagttgctttgttagggacttttctaagtacttaaatgtatgaattcatttagtgctccaaaaaaaacttgtgagttaggtattcttcttctttaattgagaaaayggtgagcacaaaagtctacacagctggcagacaacagactgaagcagtctgttgctctagtgtctaaccctgacaccgttctaccttttgttctt

SEQ ID NO: 260517 - DNA, 598 bp, Homo sapiens
tcaaccagtcctttgttaatgaatacttaagcttttcctatagtgactaaaaaatgtgtgcaaattcttcgacatatttttttcaaaaggtggagcctaatttattttcccttgagtatgggcaagacttagtgatttgcttctagaatatggtagaaatgtcagtgtgtgacttctgaaaataagacagtgtattgtggcattgaccttggtacttctcttttttgagaacatctcaagtgtgtgatctctttggaattatcttaaactaaatagcgaggtagctgtctagcttacaatttttttccctttcaaataagttatcttaacactatttgttgtctagtcttttctaaaggaaacatatcttttatcagataataaatgaacagtcataccagggtctttttaaaattctgtttcatggctccatctttctcttgtggaaagtcatattttatttactgtagttttatatatttatatttggcaaggctaattccttgtcattatacatagtttacattatacatacattatgcattartcttttacctggccatttttaaatctttagtcttccaagtaaactttagga

SEQ ID NO: 260518 - DNA, 619 bp, Homo sapiens
ctgcctttaatagtcttctaatattaaacrtcttttattcttgataagaaacttatttggttatggcataatattcttttagtaaaactccttgggtctatatgctaatattttatttagcctctgtgcatataaagtcataaaacaattatagtttacttttatgctgtattaagttttatatcattcttatgttcatttgagaagttttcttttgacatggaaatgtataaatagattaaaattttaaaggtttgaaaaaatttaacatgaaaaactactgttggctatttcttttataacttcttccagttttccaatgtttaaatttctatttgtgtaataaaatatatgctttaatcaggattttgccattgcaaacttatgtgatgaaacatcatatttttaatatttactacataatagaattaagttgccagtaactgctgtatatcaaatctagggaactagaaaaaaataaggaatttggggatagtggcagcaagagagctttctgacaggtgctatttccattgattgaaaattagaaacgattaataaatggaaatgttttctgtgcttctgagaatgtagaacaatgtttatattgaataaaata

SEQ ID NO: 260519 - DNA, 586 bp, Homo sapiens
tacatgactcttttggtttcctcatgttctgaaacttttgtctcattcttcagctttttaaaactgtgttgtttgtttaaaaaaatcagttagttctagctcagtggacagaaccaccttggatgtaagtgcctaaacccctttcatcccagtcacatgggatggctcttctgttggttgcttattgtgggatctttgtgctgctggtgtgagcatgggctatgtactttacatgggatagacctgagttctgtgtcctgcaggagattctgcttcttccccagctacaaccgcaggcggataggcagaaytatttttggacagaagctcctatctggctcctagctttaattgcagaacctgattttgagtcatgtgacttgtatcagctttgtttgctagcaattccatcagaccattaaggccctggtctcaacctcccataggtagacccagattcctttgagccattagacttaagtattcattattactgagttcctttctatttctaatccatggagatttttttcttgtcttcaactacacacgtatgtttatacatctatacctatacatactttct

SEQ ID NO: 260520 - DNA, 367 bp, Homo sapiens
catcattctgacaagggctggagctgacagtgttttgagtttaaaatccttcttagagaaggataatgtacacaaatgccttgcttatattccaaaagagggtgggtagaactgggaccatagccacattcaacagaagccgtctatgtgcacattggttgatttctaattgtgaagctctttattagcttagtgataatacacacaagtatatctgtatrtaaggtaagatgtgtttagcactacctctataattgcacaggtggtcagtatcgcttaataatttggggacatctctggtttcatcattactagcttacagtattgctatcaattcctaaccataacttcagtgtccacagtagaa

SEQ ID NO: 260521 - DNA, 501 bp, Homo sapiens
aaaatttttaaatctatctgtaatctggaagcccccacttcaagttgtcccatccacccttccagatggaaccgatgtaaatctcacattcattgactgatgtattatgtctccctaaaatatatacgagaaagctataccctgaccaccttaggcacacgtcatcaggacctcctgaggctttgtcacgygcatttccttaacctggacaaactttctaaattgactgagacttgtctcagatacttctaggttcacaatatacatacacacacatatgttaaccagagagattttgagttttaaataaatgagttaagtcctcctccttcaattacattgaaataacagttcaaacttatttgtaaagagcagtttagatgaggtcaagatgttagtgccaatttctaagctagacccagaatttcattgggtgaaattttatattagaggaaatatattgagagagtttaaaccaaaagtattttgattttgctttgg

SEQ ID NO: 260522 - DNA, 509 bp, Homo sapiens
aggaccacatgaataaacaagctatttagataaactactctacattcctttgtatttgtaccctaagctctctggctcctgaaaagagaatctggctgccttcagccaaactatctgaagttatgcaaaactccctgggccttccaagagggtttctattcctataatttcttctgccactctgactgatcttccayaacacccagtctggacttcctacccttcctctcagtagctcactctgacatggctctgcccaggactgggtcatgttaggctgtgtgggtggagaaactcctgactgctagaccacacctcccacctctgagcttttggtagtgaggaatggactgagaatgttcatgagggaggatggggtctgtgaatagagtgacagagcaaactctggtttgctcagactctcctagttttagtactgaaagtcctgcatccaggagacccctcaccctgagcaaatcaggtctgtcagtcacctcatatgtaagcct

SEQ ID NO: 260523 - DNA, 629 bp, Homo sapiens
gcttgtaccctgtagggaagtaaaaagataatacctgtgaaatatatttgggctaaaatgtttatgcaatgaatttcaataagaaaaaattggagtttagactattctctatttagcagtttgcattcagcttaccttagcctctttagagacaatatactctcaattaaaaactacggtgtgtatgagtcatttgaagatgtcaacaagttcaaatttattagctataaatgcaaatttaataaatattacagataatttaatgaaaatccaaarcaactcaattaaaagaaaatacatttttagaaaaaaagtaacatggtattatggacagatgtggccagtaagttgaatacttttatttttaaaaaagttttaataacattattctgtaggaccattaacataataaaaccattttgttgcccaataaagacctattaaaattatataattatttttagtacccctttgactatcaacagtatcctagtcttgacattcattgcattgtcaacttagttatattttttccctaaaaagcttagtgttgagaatatgagtttctcatccagtagtatcttatctactctgcagtgattatgggtaatgagttacaatcatatacc

SEQ ID NO: 260524 - DNA, 554 bp, Homo sapiens
aggcagaatctatcctggatctaaatgctgttgtaggcatataatgggttagtataaaagcatgaaaacaatgttgacctattttaacaacccagaaagatttccaaaatatgttgttgaataagtttacaaaaacatgagcaataatattctaaatctgtatctrcacagaaaaagctgagaatatatgtagtatactaaaatgttaatagtaatatttatttgctaatagacttttgggtaatttttggagaaaagcaactcacatgtccagttaagaatatagggcagggcgtggtggctcacgcctgtattcccagcaccctgggaatctgaggccagtagatcacttgaggccaggaatttgagaccaccctggccaacatggcaaagtcccatctctactaaaaatacaaaaattagccaggtatggtggcacataactgtagtcccagctactcgggaggctgaggtgtgagaattgcttgagcctgggaggcagaggttgcagtgagctgagatcatgccactgcactgtagcctgggcaacagag

SEQ ID NO: 260525 - DNA, 551 bp, Homo sapiens
tatgctatggctgcctgctgtcgaagttctccaggtatgacattagagtacaactttcctactataaccagtagartcaattgctgcttgagggcaggcagagtgaatggtatcttctggagacagctttgaaagaaagatagcttttcccccgtgagctatgtgtgtcttcacatattcacctcagcatgtcatattcttagagtccaaacctgtaccgtacctgatgttaatactacgtgagtcacttcaaaaataagacatgtttgttgactcgtggctaacatgtagaaaatctataatttttttcctagaaagcaaggcctagattttagttcaggctatgaacagatttttatttctgtatgatatttgtggttttaagttaaattggaattttcccttatagtctgtggttaaattctaatccctaaactagttaacattggagatctggtaaaattctactaaattcttcaactttaaattatcctataatgagaaagtggctctaggcttgatatagatatattataggacatttatgagaa

SEQ ID NO: 260526 - DNA, 551 bp, Homo sapiens
tatgctatggctgcctgctgtcgaagttctccaggtatgacattagagtacaactttcctactataaccagtagaatcaattgctgcttgagggcaggcagagtgaatggtatcttctggagacagctttgaaagaaagatagcttttcccccgtgagctatgtgtgtcttcacatattcacctcagcatgtcatattcttagagtccaaacctgtaccgtacctgakgttaatactacgtgagtcacttcaaaaataagacatgtttgttgactcgtggctaacatgtagaaaatctataatttttttcctagaaagcaaggcctagattttagttcaggctatgaacagatttttatttctgtatgatatttgtggttttaagttaaattggaattttcccttatagtctgtggttaaattctaatccctaaactagttaacattggagatctggtaaaattctactaaattcttcaactttaaattatcctataatgagaaagtggctctaggcttgatatagatatattataggacatttatgagaa

SEQ ID NO: 260527 - DNA, 600 bp, Homo sapiens
gaaaatgggccaggtgtagtggcttatgcctgtaatcctagcactttgggaggccaaagtgggaggatcccttgagcccaggggtttgagtctagcctgggcaacatagggggagactctgtctctaaaaaataaaaaagccaggcatggtgacaccacacctgtagtcccagcttacttgggaggctgagatgggagaattacttgagccggggaggttgaggctgcagtgagctgtgattgcaccattgcactccagcctgagtgaccaagcaagactgtctcaaacaaacaaacaaacaaacaaaaattgcccaggtcaaagtgctgtatctgtggataagtgtgctttgtatgtattggtttttcctgttggtaaaaaacatggattctggagcctgactgcctgtcttccaaatgggctctgaagggaatgttgcattcgtttccaaacttcttgtttcagttgcctcatctgtacagtttggatactarcagtacccacttctgtctttgtgataatttgctgagaatgatggtttccagcttcatccacatccctacaaaggacatgaactcatccttttttatggctgcata

SEQ ID NO: 260528 - DNA, 600 bp, Homo sapiens
gaaaatgggccaggtgtagtggcttatgcctgtaatcctagcactttgggaggccaaagtgggaggatcccttgagcccaggggtttgagtctagcctgggcaacatagggggagactctgtctctaaaaaataaaaaagccaggcatggtgacaccacacctgtagtcccagcttacttgggaggctgagatgggagaattacttgagccggggaggttgaggctgcagtgagctgtgattgcaccattgcactccagcctgagtgaccaagcaagactgtctcaaacaaacaaacaaacaaacaaaaattgcccaggtcaaagtgctgtatctgtggataagtgtgctttgtatgtattggtttttcctgttggtaaaaaacatggattctggagcctgactgcctgtcttccaaatgggctctgaagggaatgttgcattcgtttccaaacttcttgtttcagttgcctcatctgtacagtttggatactagcagtacccacttctgtcyttgtgataatttgctgagaatgatggtttccagcttcatccacatccctacaaaggacatgaactcatccttttttatggctgcata

SEQ ID NO: 260529 - DNA, 475 bp, Homo sapiens
ttattgaggggctcttatgtgcaaggaatagtattgggttaggcactgggaaagatgacagtaacaccaaagatggaacctggtaagtttgagtagtaggagaaaggaagcagaaaggaaggcagaaaataaaaatttaaggggagggaggagtcaagagtgtaatctcaaagttagcaggagagggtttacaggaaagcatggttatctgtgttaaaagctatactaagatcccagaaaagaagaatggaatctctgctattggttttgacaagtaggaggcagatggtctcaataggcagagactctggagatcagggtagtgttgttataggcatttgaaccagagcaaccccatcttgaacaggggttgggtaacataatgctgagacctactgggttgcattcccagatggttaggcattgtaagccrcaggacgagataggaggttggcacaagatacaggttgtaaag

SEQ ID NO: 260530 - DNA, 533 bp, Homo sapiens
taggtggataccagagagtgagcaagacagaaaagagttttattgagcaacagaaaaactctcaacacaagaggggacccaaagtaggtggccctttgtgtgagagggggccagaaagcaggtagctgtgaggctgagtcagggttttttatgggctcagaatgggggagttcatgctaattggtctatgagtgggactggaaaaggcacaatttgattggctaaaaggactcgaagttcttactctggtcttggactccacctggaaatggcagcttggttttcacgcttcargctgtcgttggcttgaaggtcaggtttcaccggggacccatcactgtttgccttggaatttgtctgtctcccgctgctatcaaaaacaactttggtgcctgcagttagaggcctgatgatctcaatgttagtctgtggggagttgatacccacaattacagtctggaaatatacaaagtgtgagtctttaccactttggacctacccctacaatgtctttttcttttgttctgggtgaa

SEQ ID NO: 260531 - DNA, 522 bp, Homo sapiens
agcatggtggcgcacagtagctgtagtcccaggtacttgggaagtcccaactactcaggggactgaggcaggagaatcacttggacccagaaggcagaggttgtagtgagccgagattgtgccactgcattccagcctgggcaacagagcaagactcgccctcaacaataaaaaaatgaactactgattcatgtgacaacatggatgaacctcaaatatattatgttaaatgaaacaagaagaaagaaagacaatcagctgcgggaggcagtgttagggcattactttatttctgagcttctctccttgactaaccccaaggccaaaataagtaaagtgaattcattagtaarcatgtctaacacccaaccaataccatgtgttccacccattcagagctttgggatgtcaggaattaacccccagtgggcatcactcatcaagtattaattacaattgctgcttgctcagatttttctggagataggataggacagcccagatttcatccaaatcccagag

SEQ ID NO: 260532 - DNA, 433 bp, Homo sapiens
gttgggggtgtattttagtgaaatgaagctcatggcagaaaacagaagactgagaggattttatgagattgggatagttacttcataatatcacaacggatttgtttctttcatcgttgttcctgtgtgttctgcagaataaatatcgaggtttaatgtctttgcactctgagcacctctgaattttgaacttaattgcaaattgtttaagccagagcatgtgttgagctttattattgcttcctgtggcagccttgggatcacctttgaggaactctgtccttctaagatttaagctgactgcctggttctaagccttgtaatttggggaaaggatttygtctgtaactgcgtatttgtgtttttgacccagtggagtttgaatttgcctgtaaggaatcatattcatcctttggcacctgaaagacaggat

SEQ ID NO: 260533 - DNA, 495 bp, Homo sapiens
tgctacttatattttttctgctttctcagaaggaatctttttccatcttgctcttcatctacagcccttggctacattgttccaggaaccaaattctttagagactgcctctggcatagaatttaaagtgacaacatcccttcaaacagcagaaaattgaaaagaaaattaactgacttcattatggtcatggttgcaaaatgtttggctggctaggcttacaggtttagtttctgactctggagtggaatgtttycctgtgaggaactgttttatgcgttgcttaagtcttggcctcactggcatctgttgtaaccaacaggaagcattagctttgcctggaaaaggcttggggacatcttcatgcttttctgtgaggtttggtcctgtacttgggatttccagacttgggtcagtgaatcatggtgggggtgatggtggaaacttttgtgactaggagacagactgtgtgcatctgcttactccagcctccac

SEQ ID NO: 260534 - DNA, 327 bp, Homo sapiens
ttgcaattccatgtctaggtatatgctctggaaaaacatttgctcacgtactctgcagacatttataatgacttgcagagtctctcctgatgaggaagaaaaatacagaaagtaagccaaatgttattgatgggaggatgggtgactgccttgtgcattcacacggcagagtagtatgcaggagtggatrtggaggagccacaggtacactcaacagtgggaacagatcttagaggtaatattgaggaagaataaactattttcaggaacagttggactctgtggagagttttatatgctgtcctcttggaccttagatcaataact

SEQ ID NO: 260535 - DNA, 627 bp, Homo sapiens
tgggccaccctgtttctcttcacaggagatactgaaagcctatttgtcaggagcaataaagggacttatcaaggcctgctgtcaggccaagaggaggcccacctgctcaactcctaactcaaggattatgtttctgtttgttgcggtctttccaacaattttggaatcaacayttcacaccttatccttgataatctatttcagccataagtaggaagccatttagcatgaagaagttgttgatttgatacaaattcacatttcacacatgatatctaataaagcccctatcattaactcaatgccattgcattattcatacaagtcaggagttcaaggcagtgtgcctttacattgatctagctctctgggcccctaagacttaaagcagtacacccagaaaaaagttgttctctctacctcatctcctgctccctcgatccctcccaatcagccctgcctattcgagttcccttcctgacttcactattcttcttacatccacacctacaaacctgatgtttctcttactgattaagatctcccagaatgaatccacacacaacctacccaaaccgggtcatttttcctaaaaaaagactctggaatacctttttgccataagtc

SEQ ID NO: 260536 - DNA, 568 bp, Homo sapiens
cacacctacaaacctgatgtttctcttactgattaagatctcccagaatgaatccacacacaacctacccraaccgggtcatttttcctaaaaaaagactctggaatacctttttgccataagtcatgaactctttgatggcagggactggatttaatttatctagggcctggcactagtatatagtaagtgcttaatttgaaaaaattgttaacagtagcagtagtaataataatgatagatggcaaacatttcttgagcacttattttgcaccaagaactctgttgaccttcttatttgcatcgtctcattgagtcttcacaactgtagtgtaagagaagcataattatccccaccttacagataaataaacaggtttggataagtactttgctcaagatcacacttataagtgggagaaaagaggttgaaatccgggttcatctgaccccagagcccagactctttaacccaaccattattgcattttgataaatgaatttaattatatgtccagctacgttaacctttagatgctgttaacagggatcctgcaggcagaaagaa

SEQ ID NO: 260537 - DNA, 568 bp, Homo sapiens
cacacctacaaacctgatgtttctcttactgattaagatctcccagaatgaatccacacacaacctacccaaaccgggtcatttttcctaaaaaaagactctggaatacctttttgccataagtcatgaactctttgatggcagggactggatttaatttatctagggcctggcactagtatatagtaagtgcttaatttgaaaaaattrttaacagtagcagtagtaataataatgatagatggcaaacatttcttgagcacttattttgcaccaagaactctgttgaccttcttatttgcatcgtctcattgagtcttcacaactgtagtgtaagagaagcataattatccccaccttacagataaataaacaggtttggataagtactttgctcaagatcacacttataagtgggagaaaagaggttgaaatccgggttcatctgaccccagagcccagactctttaacccaaccattattgcattttgataaatgaatttaattatatgtccagctacgttaacctttagatgctgttaacagggatcctgcaggcagaaagaa

SEQ ID NO: 260538 - DNA, 482 bp, Homo sapiens
tcggtacctctataagggtaagatctaagacgtagaacacctttggtgtaatgttctggcagggcatcacttggcagtggaagtttgtgattaagcctgtctggaggggggtcacatgttgtctcagcctctagcaagctctcatcttttcttttactctttgaaacaagcccaaagcctcagtctcagcttttcattttctctcaaagtcctctactgcttaccctgcttctaagggcttttctgccccttctccaagatgtaaagggaagyattcaccccagctcttttgctttcttgtagcctcagaaaatgatcacatggtatttgttttccttttagaagtttactgcaaagcaccactaggatgggaggaaacacaattaacaagatgggtaaggctcaaagaccacagaatcctcactgtggtggtttgtagtttctaactcgtccgggaaggtgaccctgggcttctgccctcc

SEQ ID NO: 260539 - DNA, 616 bp, Homo sapiens
cgggtaagccaaggacttagagagtagtggcacagggaagctctaaatcaagcatagaggatgaaccaggagagagttcagctgccctctggatttctggtgcctgcagcctcagatgtgaatgtgctgggaagaggaggatgcccagggcaaccccaagcagagaagtctgaaggcttctcctcaaggccccaccccatcaatttaggctggcttcacaggaagagactgctcattacccagtcacccagcttgaagatgattctcctacacacatttgttgggcatgtccaacccctcggaagacaacttggtagcatctatcaaagtccaaaatatgcaaaccatatgacgcagccattccacttcaagtggaatatcttacaggtagactggcatatgtgcacaaaaatatctctgcaacaacttccattgcagcatgtttgcaatcacaaaagactggaaactgcctaagtattgattgactgaaatgagatcaatatatttaggttttctcatamaatgaaatgctctgtaaccgttaaaaagaatgaatccagtttatactaatgacaaggaaagagctgtaatatctaacgttaaggaaaaaaagcca

SEQ ID NO: 260540 - DNA, 561 bp, Homo sapiens
aatgcataaataatgaatggattaatatcttttacataatcatgtgccacataacaacgtttacatcaataagagacagcatgtaaaacaatggctcattaagattataatagggttgaaaaattgctatcaccattatagattgatcactctatgaagtttgcacagtaagataatcacctagccacacacttctcagaacatatcctcattgctaagtgacacaaggctrtatttcatttaatgattgcgtaaatagttgttgagaaaaatctgcactctaagtaccaggataaaagagattaataataaattaatgattaaatgcaccatgatcaatcttatcattgaggtctatatgctacatttggattacatcgtaaaggcagaggttaatcatcgcaacttacacaacaggatacagagtggatcagcagataattacataatagaatacagtttgaaacctgcaagatgcattagaattaattagaatcaaaccatatgtgtgactttggtttaaatgtgcaaaacctattaatatagatatagccaggacat

SEQ ID NO: 260541 - DNA, 524 bp, Homo sapiens
aaaaaaaaccctctatttatgaattctggaacaaaaaacaacatagtggaaaaactggtgaaatccaaataaactctggattttagtaaatagtaatgtacagtatatgaattggtacactgatgattttgacaaatatgctagtgtaagatgttagcattagggtaaattgggtatggcaatatataggaactctttgtattastttgcactttttctgcaaatctaaataatttcaaataaaaatttattaaaaaaagaaaaaaactctgtgagtgcggtggttcacacccaaaatcccagcactttgggaggccgaggcgggcagatcacttgaggccagaagtttgagaccagcctggccaacatggcaaaaccctgtctctattaaaaagaaaattccaaaattaaccaggcagtggtggcgcacacctgtagtcctagctacttaggaggctggggcacaagaatcgcttgaacctgggaggcggaggttgcagtgagctgagattgtgccactgcac

SEQ ID NO: 260542 - DNA, 556 bp, Homo sapiens
atattattgctatatagaaatactactgactattggacattgactttgtattctgaaactttattgcagtcatttgccaagtctaggagtctttcagagtctttagggttttctttgtataagaccatgccatctcttaatgtaacttctatcccaacttttgtggtaatttttttcttgcatttttcataattttattttctaatttgtttatccagaaataccatttagttctgtttggtattagacttgaaaacagtgcaaattttctttcttaataaataatgaaaataaatttcgtttttgaaattcatccatgtttttgcttagttcattcatttttactgatgtattgagtagtcttaagttaccaatttcatttttaatagttaygctttttccaaaaattttataataattagtagttttatcatgactattcctatatacatattcatataaatgcataaccaagagtgcaattgctcatttggagggcatgccatctttagcactatgactattaaataaattgtttgcattgattaagagagtg

SEQ ID NO: 260543 - DNA, 533 bp, Homo sapiens
cccaacagctgtttgctgagatggaggagaagaggaagtgcaggtttggggcagtgggcagtgaagatcagtctgatttgagaggcctattagacatgcaaatgctgatgtcaagttggttgtgctgagtctgagaggagaggcaggggttagagacagacctgttgcaacatggcatggcagtggcacaggactaggtgacacctaaagccacaggactagatgaaatggatggagagaggagacaagtgaagaggtctcagaggagtaagccctcaggcaatgcagaacttggatgtggaggaaccagtaggggagcctgcgaaggtacagccagggagctgtgcagtgtttygggaggcaggagaaaggacgtgttcatgggaaagactgttgagagttggcttggacctcagtgagagccagtttggtggagtggtggagatgaggcctgattcgggagggtggagaagagatgtcagatctacacagttctcaaggggtttttgccaaaacaggaagcatggaaatag

SEQ ID NO: 260544 - DNA, 587 bp, Homo sapiens
acccctgcccctcacctgccagctgtctgctctgctctcacaagggactctggtctcatgtcacagagctacagtcaccagggataggctgccaggagggaataggacatttctgctgggttcacagatctggcttcacaaaggaggtggaattcaggctgaaccttgaggcatgaaagaatttttgctagtagagaaggggctgtcattgtctgatcccatccttggaaagcactgtgctgaacttgcaacagctatgcttctatttcatgttcatgaaggcctgtgttgctgtctgcctrttataggtgagagaacagagcaagcaacttgcccaatgttccacagatagatctgaacccaggatggaagcaccctcatgttctctcccctctggcagcaggggggaagcatgagcttcccaaggaggcttgggaagacctggtgtgttggctgaacagctgggagggagagggtgggagagaggataacgggacttgagactgggattggtggtggtggagggggctagggtgatatgtgcccagaacatcaaagacctcatttagtggtgtgttggtaagcat

SEQ ID NO: 260545 - DNA, 587 bp, Homo sapiens
aataaatcctggcttccgaagaagctgcagaaaattgattttttgcagcttcagtggtcatcttgaaggatttgggggatggaaayggggcccatttctcatctctgttctgtgctgctgggtcaggtgttcctcaggcccgggtcagtatccctcgctcctccttgtctccccaccactctgtgtagagaggaaggggccgagggctggtcttcctcagcttacccctagtgtccagctgctttctgcctgttgcctgccctttgggcccgctgccatggatgggagaggtgcgcatgttcgtgcagccaagctgggattatggcatttgcacagggatgtagctgtgggtctgtgtgtctgggttgttgggggacaggctggggtgggtgccctttagagcttggcctctgcatgactgcctagtccctcagtgaatgctgcaattaattggctactagggagacattagccagctaggtaggtctgctgtaaccatccccctgtgtctgagcaggcttgctaggggccagggccgtgtctgggaacaagggctggccctctggcatgtttcccctacatgtgtg

SEQ ID NO: 260546 - DNA, 587 bp, Homo sapiens
aataaatcctggcttccgaagaagctgcagaaaattgattttttgcagcttcagtggtcatcttgaaggatttgggggatggaaatggggcccatttctcatctctgttctgtgctgctgggtcaggtgttcctcaggcccgggtcagtayccctcgctcctccttgtctccccaccactctgtgtagagaggaaggggccgagggctggtcttcctcagcttacccctagtgtccagctgctttctgcctgttgcctgccctttgggcccgctgccatggatgggagaggtgcgcatgttcgtgcagccaagctgggattatggcatttgcacagggatgtagctgtgggtctgtgtgtctgggttgttgggggacaggctggggtgggtgccctttagagcttggcctctgcatgactgcctagtccctcagtgaatgctgcaattaattggctactagggagacattagccagctaggtaggtctgctgtaaccatccccctgtgtctgagcaggcttgctaggggccagggccgtgtctgggaacaagggctggccctctggcatgtttcccctacatgtgtg

SEQ ID NO: 260547 - DNA, 587 bp, Homo sapiens
aataaatcctggcttccgaagaagctgcagaaaattgattttttgcagcttcagtggtcatcttgaaggatttgggggatggaaatggggcccatttctcatctctgttctgtgctgctgggtcaggtgttcctcaggcccgggtcagtatccctcgctcctccttgtctccccaccactctgtgtagagaggaaggggccgagggctggtcttcctcagcttacccctagtgtccagctgctttctgcctgttgcctgccctttgggcccgctgccatggatgggagaggtgcgcatgttcgtgcagccaagctgggattatggcatttgcacagggatgtagctgtgggtctgtgtgtctgggttgttgggggacaggctggggtgggtgccctttagagcttggcctctgcatgactgcctagtccctcagtgaatgctgcaattaattggctactmgggagacattagccagctaggtaggtctgctgtaaccatccccctgtgtctgagcaggcttgctaggggccagggccgtgtctgggaacaagggctggccctctggcatgtttcccctacatgtgtg

SEQ ID NO: 260548 - DNA, 588 bp, Homo sapiens
gatcaacacatgtgagatgacagtgcagartaaagaaagtgtgagtgtgagttagggtattagtcaacagcagcactgggtgcttagagtgacaggaggtctgggaccaagacatatggaatggttgtaaggtctgaacaaatttagcctagttgtgtttttatttcagttgctgttgattaacactctaactcacactcacaccttctttatgctgcactctaatctcacatgtgctgatccttctaattgggcaaagttcactttaaagtgcaaggacatcgaatgccatatacccttgtacgacttacccatagaagcaagaaaggccttacctcctgtgttcttagaagcatacttctattaatgcacccttaatttgcagcagcctggtggtataagagacagccttggataggtatgcctgcattgtaagcctctcatacaagaggagacttcttgagcacttggagacatagggccctcttttccctgaggattgttgaaggaatcttatttaagaacatgagggcaagtgccttgtgcgtgtcccattaatgaatgctgcccgctctcaggttacatagc

SEQ ID NO: 260549 - DNA, 558 bp, Homo sapiens
tgagatgacagtgcagaataaagaaagtgtgagtgtgagttagggtattagtcaacagcagcactgggtgcttagagtgacaggaggtctgggaccaagacatatggaatggttgtaaggtctgaacaaatttagcctagttgtgtttttatttcagttgctgttgattaacactctaactcacactcacaccttctttatgctgcactctaatctcacatgtgctgatccttctaattgggcaaagttcactttaaagtgcaaggacatcgaatgccatatacccttgtaygacttacccatagaagcaagaaaggccttacctcctgtgttcttagaagcatacttctattaatgcacccttaatttgcagcagcctggtggtataagagacagccttggataggtatgcctgcattgtaagcctctcatacaagaggagacttcttgagcacttggagacatagggccctcttttccctgaggattgttgaaggaatcttatttaagaacatgagggcaagtgccttgtgcgtgtcccattaatgaatgctgccc

SEQ ID NO: 260550 - DNA, 494 bp, Homo sapiens
cattcaaaaataaaagtgaattgaagatattttcaagcagaaaaaaccagaaagaagccatctccaggagatgctaaaaggagttctgtaggctgaaagaaaatggaagtaatagaatatttttttgaaagcaaactgtgakgaattaaagataaagattacagtcactagagaaatcactaaaaataattcagaggcatgactaaaatgtcaatagaggagctaaaatgaaatactaaaaatacgtttcatcctaaaaataataggaacataaaaacaaagagcatagaagataaaaaccaaaccaaaatttggtttaaaatcaaaatagatgaataattgcattaaatataaagggactgaccttcccaattaaaaggcagaaattgtcagactggataaaaatgcaagactcaactatagaaatacactttaaatataaagacacaaacaggttgaaagtaaagtatttgaaaaagataacctgcaaatac

SEQ ID NO: 260551 - DNA, 592 bp, Homo sapiens
tacagtgtcaacagtaaatggtgattacctctatgcctttcttcatgcaaaaacttaaataaaaatataggtgcatacttagagattttacctttttcttcttttaaaaaaataaaaatttgctcctgttaaacattacattctttcattgtttttaatgaatgccacatcatggtattacattagctagtaaacttgctgaaaaaacatctctcctatcagtaaggggcatgggcaaattcaaaccttcagatacatatgaataacttttgaaaaatatgaagggatataaaagaacaataagaaaaagagataaactcgctaataaagcagaagatgttaaaggagmatgtgttatatgaggaattaaaaatgaaaaaaatccatcatttttctatgttagtaaatgtaaatattctttttttccaatagctgcatatttatattcgatagcacagacatacttttttcaacattttaactggtagacattcatttttaatttttggccctaacaagcaaagctgcaataagcattcttatagatatggcctaaaggacatattccttaaagtgagactgcaggtatttt

SEQ ID NO: 260552 - DNA, 576 bp, Homo sapiens
tattctacttatgcatagtgtcagaatttcttattatatgcctgaattacttttataattataaaggaagaagtcaaaccatgtgaactacacattagtagttaagaaataaaatgctgttccaagttttgtgggtgtgcttggactgataatgtttttcctctaagatcctactaagaactatttaagaaatggctttcaggcatagtcacctatttagaaggttcaagcataaaatggggtcttgcggtgcttggaccagtgtgaaacagaaggggttgggtctgaacttgccagtgtccagggaatcctgttcttcccaggccttgaagaataggcagtgggttgtatgttctcaagtccccctgttgaattaggatacacagctgctggggtgagggctgagatcygtctgcgtcctcagaaccaaccccacccctgtgctggtaagcaggtgttctccaggggagagaccctggggtcagtctgactaaaatgaatcttccaaatgggtgtgcaaatctgcatttcctgtgagggccatccagacagttttcaagtgtacggaatttgagg

SEQ ID NO: 260553 - DNA, 582 bp, Homo sapiens
cagtgtactgtaactcagcagtgtgactcacttccaagcccaagtaccgcattctgttgccttcttgatgggtgaagcagccatctgagcctagagttccttttaggaccctcaagctttccttgcagcatatctggacttctcccatcattgtcaggagatggagaggatagcttcatttggccagtgaagaaactaaaaggctgagtggcttgtagggctcacattgtgcatgaattggcacttgtctatagaaaatggtgccaggacaatgggtgtattttggttgaagtagttggagcccttggatgctagtggttcattacaggggccatttctgagttcccttggtcttgggaaactggttttcctgtgcctggaacccaagaagacatctgtggttccctgggctaggagctcccttggtggaggctgcctcatggatgggccacccatggtgttkggtggcagggtctcatgggtcaatgcacacagcccaggacagagtgaacagtgggatgtgcagggctcgactggccaagctgaactgttttcttgggttgtgttatatttatttccact

SEQ ID NO: 260554 - DNA, 613 bp, Homo sapiens
gaatgaggagatgaagcccagttatgagccatgtataatttcccaggattttgtccatgatgctccaggattctctgtgccctggcaatgggctgggaagccagagggtgtcttgactcctttctccaaaaactgttctccgtcctggcctgtcctctaaggtcatctctgtcgccatgcaaagggagacgagatcagggccccatcacagccatgatccctctgtccatcctagactcactttcagttgaggatcctgggctcatggctcccacgtggatgtcccgggtgccccataagtggctgtggctgatcaggggtcaaagatcactcatgggtcaccccatctgagtccattgckgaggacaggttgaaatagagagtgtgtggctatgtgtgttggtggaaggagttgggttccctactctatttactggtgccagccacatttctggaccttgtgatcacattttcttttctggacccaagaggcttagggaagaaaggaggagacccttggtttccaaggccctgagtttgatgactcttggctagattctgaagacttctaagtttttcctgaaaacctcccttgtgtcttatcccccatatc

SEQ ID NO: 260555 - DNA, 545 bp, Homo sapiens
tgtgtgtcacaatggtcatatcttggttttctggagaatgggcagtcctggctctggagagcccaccagcttccttttactgttctgcatggaaatctttgcataatgttttgttgtgttccatattctgcatttcagaaggcaagaaagattgtaatgtgcttttgtggcacgtccaggtccccatgcctgttctgggctgtggtccasggctaccctctgagggtgaggtgtacagtttgtcctgcactaaatggtcccgggggctattcttctgttgtccttgggtctgctttttatagtttcctctgtcctccctgttggcaggctgtccctcccaacttgagctctctcatcctttcttcatgtccagatacttccagcatgcacagggaaacagtcaaacattgactggtgtcttcaaagagaaagctagttagcaaattgaaaaacatcttcatcatttttgccttcgtgttccacgcctagtttatgagcagtcttagactgtggacagaggcacatccgtgtacagtgctgaggga

SEQ ID NO: 260556 - DNA, 606 bp, Homo sapiens
aatggtagctctgttttaagttctttgagaaatcaccaaactactttccacagtggctgaagtaattgacattctgrtcaacagtgtgtaagtgttcccctttctctgcagcagtgccaacatctgttgttttttgactttttagtaatagccattctcactggtgtgagatggtacctcattgtggttttgatttgcatttctctgataatgatgtggagcattttttcatgtttgttggtcacctgtatgtcttcttttgagaaatacctgttcacatcttttgcccattttaaaaaatgagattgtctgttttttgcttgttcaatgtttcagttccttgtagatcttagttccttgtagatctgttgtcagatacatagtttttgaatattttctcccattttgtaggttgtctgtttactctgttgatcgtttcttttgctatgaagaaactctttagtataattaggttccactagtttaatttttgttttcattgcaattacttttgggaacttagccaaaaattatttgccaaggccaatgggtagggccttgccaaaaacctagggtattttgtaggttttcttctaggatttttat

SEQ ID NO: 260557 - DNA, 606 bp, Homo sapiens
aatggtagctctgttttaagttctttgagaaatcaccaaactactttccacagtggctgaagtaattgacattctgatcaacagtgtgtaagtgttcccctttctctgcagcagtgccaacatctgttgttttttgactttttagtaatagccattctcactggtgtgagatggtacctcattgtggttttgatttgcatttctctgataatgatgtggagcattttttcatgtttgttggtcacctgtatgtcttcttttgagaaatacctgttcacrtcttttgcccattttaaaaaatgagattgtctgttttttgcttgttcaatgtttcagttccttgtagatcttagttccttgtagatctgttgtcagatacatagtttttgaatattttctcccattttgtaggttgtctgtttactctgttgatcgtttcttttgctatgaagaaactctttagtataattaggttccactagtttaatttttgttttcattgcaattacttttgggaacttagccaaaaattatttgccaaggccaatgggtagggccttgccaaaaacctagggtattttgtaggttttcttctaggatttttat

SEQ ID NO: 260558 - DNA, 606 bp, Homo sapiens
aatggtagctctgttttaagttctttgagaaatcaccaaactactttccacagtggctgaagtaattgacattctgatcaacagtgtgtaagtgttcccctttctctgcagcagtgccaacatctgttgttttttgactttttagtaatagccattctcactggtgtgagatggtacctcattgtggttttgatttgcatttctctgataatgatgtggagcattttttcatgtttgttggtcacctgtatgtcttcttttgagaaatacctgttcacatcttttgcccattttaaaaaatgagattgtctgttttttgcttgttcaatgtttcagttccttgtagatcttagttccttgtagatctgttgtcagatacatagtttttgaatattttctcccattttgtaggttgtctgtttactctgttgatcgtttcttttgctatgaagaaactctttagtwtaattaggttccactagtttaatttttgttttcattgcaattacttttgggaacttagccaaaaattatttgccaaggccaatgggtagggccttgccaaaaacctagggtattttgtaggttttcttctaggatttttat

SEQ ID NO: 260559 - DNA, 507 bp, Homo sapiens
tctgttttttaaaaaaatagccatcctaaatgggtataaagtaggatctcaatgtggttttgatttgcatcttcacacattttytcatgtatgaatttttcattaaaaattattttaaaagaaaagaaacaattttttcttcattaaccaactagtgatacctccttaactgctaagctctttgagaacagaggtaatagctgtcctgctcactgctttatccccgacccctaacataagcctagcatctagcaggtactcaccaaatacagtattcactggatgcataaaatactacattagcctctcaatttacatgagactaatgtatggtttggggggagtgagtctatgaaaaagtgtcaccttaaaaaaaatacaccaatttctgaaaaacatacaatcactttggaagtcttgggtaaacggcacacttcaagacaaatccaggatggccaaggaaacataagtgacattacttatagttttaaggagggcaacttcaca

SEQ ID NO: 260560 - DNA, 507 bp, Homo sapiens
tctgttttttaaaaaaatagccatcctaaatgggtataaagtaggatctcaatgtggttttgatttgcatcttcacacattttttcatgtatgaatttttcattaaaaattattttaaaagaaaagaaacaattttttcttcattaaccaactagtgatacctccttaactgctaagctctttgagaacagaggtaatagctgtcctgctcactgctttatccccgacccctaacataagcctagcatctagcaggtactcaccaaatacagtattcactggatgcataaaatactacattagcctctcaatttacatgagactaatgtatggtttggggggagtgagtctatgaaaaagtgtcaccttaaaaaaaatacacmaatttctgaaaaacatacaatcactttggaagtcttgggtaaacggcacacttcaagacaaatccaggatggccaaggaaacataagtgacattacttatagttttaaggagggcaacttcaca

SEQ ID NO: 260561 - DNA, 542 bp, Homo sapiens
gtggccaatgtcaggactctaagggacatcaagagtttaaggagtgagtagaggagtaggcgtcagmtaaggagactaaaaaaaagtggtgagagaagtacagcatcacagaaacctacagaagacagtgtttcagcaagcaggtagtcagacacaccaaatggttgtgtattttgtttcgttttgttttattgagacagggtctcaccctattgccccgactggagtgtaggggcagtatcatagctcactgcagcctccaattcctgggctcaagggatcctcctgcctcagctgcctgagtagctaggaccacaggcatgcgctaccacacctggctaatttgtttttatttttgtagagacagggtcttgctatattgcccaggctagtctcaaactcctggcctcaagctattctcccaactcggcctcccaaagtgctgggattacaggtgtgagagatcacaaccctaaatgtttaatagctttagatgaagacaacttaatgaatcctttcacaagggtgacttcacccattgg

SEQ ID NO: 260562 - DNA, 503 bp, Homo sapiens
ggatgtttgataagtataagagaagtgcatataaaagtagcagcaggcttgagatgaaggagatgctgaattcaggttggacctgttggatttacagtgttaataggaaatgtagatggatgtggccagctcagtagttggagaaaaggcaagaatggagatatttggcaatcatgcaaacagaaaggagtattgaaggcctaatagtgactgagatcatgaaggaaaagagtagagagagaaaaaaggtggaagggaaaaaatacttctttcctcctagttcctcctcattcctatagcctcttctctcactacctgtttaactttgtccttcccacttgcttcctttcctcccaagtgttgtccattttccctcattctsgtccagcttccttcttcagtggtcagatgccatgcttatctcagtcttttgtggtctttcacatacgtacatgggcgtagtctctcactgtttccctcacttgtgaccactcaagcaagca

SEQ ID NO: 260563 - DNA, 539 bp, Homo sapiens
cagtgtgagtgtgtgcgcatgtgatgagagtggatgtgggtgtgtgtgatgagagtgggtgtgggtataaatgaaacaaaattggccaactgttgaagctgaatgatgggtatgtggggggttattatactattctttctatttttctaaatatgtttgaaggattccatccataaaaggctctttggagaccggctccagcctttctctccactctcatctttcagtccacatcctgaggaccctctggcacagtgacattgccttggtggctgggacttcacatctcttggccttgacacacagctctgtctgcctggggtcattttcctsgtctttccttacagttcgtgactcctgcttctgagatcccacagcccagttgccttgatacttatcataacatattgcaactgtttgtttccttttctggcctgtgacctcctcaagctacttctctgcctccccagtgcacagccagtgcctggtatataataggtccccagtacaagtttacagaaagtatgatagcagtcatg

SEQ ID NO: 260564 - DNA, 625 bp, Homo sapiens
ataatttattgcaaacattctgcgtatcaggccctgtggcaggtgctgtacatacatggtctccttccagcctgtcygtgtgagggggtattgttcccatttcgcagacgaggaaactgagcttctaggaaactgggagacttccaccacggtcacacactggaaggtagagaagccagattccccccagtccatgtgacatacaagcaccatttcttccaccctgggaccccttttctgctggaggccagagacccaattgcagcctgcagcaccccagaaacatggcaggtgggtggtgcgcctttgtcccacagtcactcagcaaatattctgaggacactggaacgggaggcacagagggagactttactttctggcctgcgtcttctgcctccctttctcatctaaagcaatttgggtccccattgcttcagagaggaggaggtggaaggtttaggagagagctgggaggggtagaataggcagggagaggtggggagggggccaaggccccagacgaggtgggaggcagggaggcagcttcattagcctgtccccaggggacttggcagccagttattaaatactccctatgttgaagagcttggtgggaggggaaaaa

SEQ ID NO: 260565 - DNA, 580 bp, Homo sapiens
ttaggcaagttgtttacccttgtgtgactcgatgtcctcattcttaaagtggagacgatgagagtccaaagacttatttcaagggatttctgtgagagttaaacaagttaaaatatgtgcagcactcagacattcctggcactcagaaagtgccgtatgagtacgagtattctaaataaaaacggagcaaaatggagatgggcgagccgggagcacatgccaagaagtgtccactagagcccggctcggggcctcgaatcccagaccagagatgcccaccttgctctgtaagcaatgggagccattgaagacttttaagcaggggggttcagagtagagaggaagataaaatccaaaggcccagagagggaagggaactaacccacagtcacacagccagttactggcaggagtctctgtcctccagctcctccactgagttaacatctgtaggagaacaaaggcagtatatattttgtcccatcaytgcatcctcagagtctagaataatgcctagggtattctcagaaaatatttgtggggtacattgctgaattggtagccagttgggccaggaaac

SEQ ID NO: 260566 - DNA, 604 bp, Homo sapiens
aagctttccaaattaccaaagaggcagacaaagaacaaaatgcaaatttgagtccacttaattcagtgcatttaagatggtatttgttttttttgagttttaggaacagtggataggataagtacttgaatttagaatattcctcttcacttcactatgtattttattcttctttaccactttactttgataaaagctattcttatcaaagtcttctctcttcatcttatcatttcttatcattcatccagttccctccttattgatcatcagaccatgaaagagacaatggatagctctaccagagtcaatatataatgcagacattgcatctactcaatctaccaggtctgtcgatctgccatggggaaaactggattggcctataattttgttcacaagagcaagctgataattacaacaaaacctgtgatccccaaatgtctgaatgatgactttggaactttctaaagtactttctaaagtatctaaaataagttgacggaactataactttaaaagtcatmctaatttgtatgtttgacgtgaaataccacatttatcccttcctaattctagttgttcttaccactgctgtattccc

SEQ ID NO: 260567 - DNA, 610 bp, Homo sapiens
acaaggacagattcaataacttctgagaaatcttttctacttctagaatatcaaaataaattcctttctcagaaactatgatttcaatgtgaaaacctattaatagcttccaaaaatttatttcatcatatactttcctacagtggataggatatgagccacttaatttacaattgaactacctatccctttacattccgtagattcttacagggcacctatacctatcatcaagtctatgacacctactaggtccatgaagcyaaataatgcttttagttctttcaggtttcttaaaccctaacagtggctgattgcctgatctaagaaaggggaaatgatcaatgcaataatagacacctcttgaataacaccaccacatggggacttgatagcttagtgaagagacttgtagaattttgtactgagaaatcttcaccgtttcgatgtaagttatctaaactagaacttaccatagcattctgtaatttatgtaagtttataattgccttgtaataatttaaatgttaggcaataacaaaaccttaaatcatcctcttataacatgaaagtaactaagatcaacagtgcttactaaagttactgggta

SEQ ID NO: 260568 - DNA, 655 bp, Homo sapiens
tgcaactgcacaacaacttgggtgacagagtgagaccttgtctctggggaaaaaaaagaaaaggcaatattttggagaacatgataactcactgaaatctaaaaaaaagtaacatgacatataatcagctcatgctaattatcacgggaaaatatttttgatgtgttttatatgacttgatgtcgagggataggtctttattctgattgaatggtattttcacatatttaatactacagaattaaacaggaatattttatgtgcttgaatttaaaatctgctcttggagttagtgyaacactggatatctcagatgtttctcagctgacacatgattagtatttctatccagtacactacatactttgtgaggatattgactcttaagactttgttctggctcttctagtctaaactatacctaaatcaatccaaaagaggcaacggaaaggtagtacctggtgatgaactgtcaaattatatcatagattttaaatggtatccacttaacaggtttaaaagatggtgccacagtctccggttaaatattaagatgtaagacatgcatttcctctgctcattctcacaatctgactaaggcacataaaaaagtcaaaaacctcaagaacagataatagaaaaagagacaacaatt

SEQ ID NO: 260569 - DNA, 590 bp, Homo sapiens
catttttcttatatttagctttttaaattatttacctctattactttgaaaaatattttcaattacataaaaaagatttcaataaagaaaagttatctaatgacataaaatctttctcaaatcagagatgagatctaatggtgttatctgcaaaataaattaatattaatgatgttttgaaggatacattgcaaaagacaaaacaagtaggcaccagactaagctgatattcatttcctgtgtaggcttcataaaattgtagtagacttcagttactagatacacaactgtagcagccactgtgaaatccaccagccactggtattytggaaagtaatgcaatgctggaaagaaaaaaaaaaaaaaaaaaaaaaaaggtcaaaaaaaacagtttcacttacattttcataaataacttatgaggatttatttataattaaaatacgctagactttatttgttcatttgcaatgtaagatttacaaatatatgaatctaaaaatgcaagaaatagactgaggatgttagcatcccaaactaaattttaatacctcacaaattaaaataaacgttaaaagattaccaaaagt

SEQ ID NO: 260570 - DNA, 555 bp, Homo sapiens
gcaagtgaactgcatactacttataacctataggatatattctaaaagacgaagtatggcttgaaaaacaaaatagaaaaggaaaataatttaaataaattactccgtaaactgccaacaaaagtcacagtgattgtagaaaagttgtatttgtctccccaaccaaatttaaaactctattcaagtatgacagttccaggacaagatgtggaactgatgakcagccataaatcacataaatactagactgtgaatcagactttcaggataagaggtctggatctgtttcatttatcagtgtgtgaaactgagtaaatcatttaaaacttgttttgtcatttgtaaaaatggagataatatcacctatggcagaaagtaactaggtactcaccaatcttgttttttataccataagtattatttcccagcctcccctgcactttggccagaactagtcacaaggccccagcctatgtaatgtgggcaaaaatgatgtatctacttctaagtttgacacttaagaatctcctgaaagatccacagctcactctctct

SEQ ID NO: 260571 - DNA, 572 bp, Homo sapiens
taatcttattcgattgagataaatgacaacatgacctcaaaatttcaggacttaacattaaaaaaggtagataatcttaaaaacaaaacaaaacaaaattgagaggaaatgaaactacctatagcagaaaagtaaccactactagactttctcgatatccttagaacctgatatggcattacaggcagcattaattaacacaaaagttaatccatttacaaaagcaagtcaagatcacaaagaaaaccaatttcgtgtttctttttaaaggctgagcttactctcaaattatctatgtatattacgacacattctgatcagaaaaagattttaaatataaatcttccaatattaataaagataatcagctttttgatctctcaggctttagttttcactagtgagtataaattttatagaaatagatggaaaacagaatatgtaacaagatgaaaatgcatgtacamtaaaatgggacaagattgtcaaggtctttacagacaaaggagataaggaagtgacattacatcataaacatagtttagaaacacgcaattctcaagagaaagtaa

SEQ ID NO: 260572 - DNA, 627 bp, Homo sapiens
cagatatacctttaaagatgtaaatttatgttaaggcaaaaacaaacaagcaaaaatcagtgagctggattgactagaattaggaaataccaactagctttctgtaataatccagacaagaaattatgaaactttaaattacagtggtatcttcagtacccagaagagaaatacattttagagacattgttgaagaactcagagactgatcaaacataaaagcaaagaagaaattaaacagaatgacccaaagaaaggcaaacatcatagtacattctcagwgttaatgtttgactaaaataatgttcaatacaaaaatgtaacctcactctatctctttactatgccatttccctcttcttaaatgaggctgaaaataatttcccaaaacatcatctgaatactatgctaaataaatatattattatattcttctatataagtcaacagatctatcctacaatgtatctgctcttaggtgactaaatatgtgctactgaaaaaaaaaagtaacttttataccaatacaggaatctaatctacataagtttttggagagataatttttaaattatgtggaaaatatttcaccagttgctccttttcatgtaaatttaaaaacgaatc

SEQ ID NO: 260573 - DNA, 496 bp, Homo sapiens
agaaattatatctataaatagaaaaagcatatgaaaattcaactaacaagaacatgctgtctatctaatatacatccagtatcttcctggctatcatcargcacttggcacaaagatgtttgtgttcactgttatatcccaaacacttagagcaatgtcatttagaatagttgatggctcatagtagcacacttgattacttgttgaatgaatgaacagggctactataaaagaatttgtcttaacagagcttaaaacccaagattaacatattacgtaacaataaatatacatattaaaataatatttgagcacaaaattgcacggtactatgaatatgggttgtagaatttttttaaattggataaagtttcatagagtagatgaaacctaaagacagaaactaaaatcacagaaaagtaaagagaagggaatttcaggctaaatgacaagtgtgaacacagaaggtatttgcaacagcaaaacgcctacctca

SEQ ID NO: 260574 - DNA, 610 bp, Homo sapiens
tataacttctagtaataaggtttcaaattgacagcatttggatggatggatgttattgacagagttttctttatgttactctaaaggctctcaggagttaacatgataggccacagtctagaagacaaatgagagtcatttatgcatttttgtgagatgtgcatcaatgagaaaaaagaaatagaaaattttgcatttgaagattctgaataagcatcacatatctgttattgttgccattagactactttccttttatttagcattttcaaagccaaacactatacyacagggtttcttttgttgactttacatcttctctttttataaatgagtggggtctgccaccttaattatatagaatgatatttcttctcctttttcatttaaattctgtttaagccaggcataaggtactacttccatctaaacaaattaggttaatggagttttgataactcagccacttttattcagaataggcctaaattatacatatgtgctgccaactcagaaaggagctttatttggaaattacggctttggatagataagattttttccaactctatataatacttacttttgacttgcaatcacttgttatagg

SEQ ID NO: 260575 - DNA, 610 bp, Homo sapiens
tataacttctagtaataaggtttcaaattgacagcatttggatggatggatgttattgacagagttttctttatgttactctaaaggctctcaggagttaacatgataggccacagtctagaagacaaatgagagtcatttatgcatttttgtgagatgtgcatcaatgagaaaaaagaaatagaaaattttgcatttgaagattctgaataagcatcacatatctgttattgttgccattagactactttccttttatttagcattttcaaagccaaacactataccacagggtttcttttgttgactttacatcttctctttttataaatgagtggggtctgccaccttaattatatagaatgatatttcttctccyttttcatttaaattctgtttaagccaggcataaggtactacttccatctaaacaaattaggttaatggagttttgataactcagccacttttattcagaataggcctaaattatacatatgtgctgccaactcagaaaggagctttatttggaaattacggctttggatagataagattttttccaactctatataatacttacttttgacttgcaatcacttgttatagg

SEQ ID NO: 260576 - DNA, 607 bp, Homo sapiens
ctattggagtcatatatttacattgtttcaaataactggctgctccaaatatcactctagcatttagattgttccccataaatgagtcactgaagrctaaaatgtctaatagtaaacttctctaagaaagtatattcaaatctctattattttctcatgcaatatatgcaatatggtatattagcccattctggcattactataaagaaatacctgaaactgggtaatttgtttaaaaaaggggtttaattggctcacagtttttcaggcagtacaggaagcatggctggagaggcctcaggaaactttcaatcatggcaaaagaagcaggcacatcttacatggccagagcaggaggaagacagagaagggggaggtgccacatacttttaaacaacaagatctcctgagaactcaccactgtcatgagaacaacaagggaaaaacacactcccatgatcccatcacctcccaccaggcccttcctccaacactggggattacaattcagtatgagatttgggcagggacacaaatccaaaccatatcatatggaatcacaacgttgtcatggagtatttgctttcacccattacatatttatcta

SEQ ID NO: 260577 - DNA, 607 bp, Homo sapiens
ctattggagtcatatatttacattgtttcaaataactggctgctccaaatatcactctagcatttagattgttccccataaatgagtcactgaaggctaaaatgtctaatagtaaacttctctaagaaagtatattcaaatctctattattttctcatgcaatatatgcaatatggtatattagcccattctggcattactataaagaaatacctgaaactgggtaatttgtttaaaaaaggggtttaattggctcacagtttttcaggcagtacaggaagcatggctggagaggcctcaggaaactttcaatcatggcaaaagaagcaggcacatcttacatggccagagcaggaggaagacagagaagggggaggtgccacatacttttaaacaacmagatctcctgagaactcaccactgtcatgagaacaacaagggaaaaacacactcccatgatcccatcacctcccaccaggcccttcctccaacactggggattacaattcagtatgagatttgggcagggacacaaatccaaaccatatcatatggaatcacaacgttgtcatggagtatttgctttcacccattacatatttatcta

SEQ ID NO: 260578 - DNA, 566 bp, Homo sapiens
ggtgtccctctgggaggaagcttccagaggaaggaacaggcggcaatctttgctattctgcagcctccgctggtgatacccaggaaaacagggtctggagtggacctccagcaaacttcatcagatctgtagcagaggggcatractgttagaaggaaaactaacaaacagaaaggaatagcaacaacatcaacaaaaaggatgtccacacaaaaaccccatccaaaggtcaccagcatcaaagaccaaaggtagataaatccaggaagatgaggaaaaatcagcaaaaaaaaaaggctgaaaattccaaaaaccagaatgcctcttctccttcaaggatcacagctcttcaccagcagggaacaaactagatggagaatgagtttgacaattgacagaagtaggcttcagaaggtgggtaataacaaacttctccaagctaaaggagcatgttctaacccaatgcaaggaagctaagaaccttgaaaaaaggttagaggaattgctaactagaataaccaatttagagaagaatataaatgacctgatggagctgaaaaacacag

SEQ ID NO: 260579 - DNA, 548 bp, Homo sapiens
aggaaatgccctctccctcccttactctcacctttctcccaattatctttgggtttcctttacttgtcttctctttagtccctctccacgtagcacatgcctctcttcccatgacaaaacatgagtctccagcctggtctaattcattttgcaaactctgccacctcagacttcattgagaattcagagaggtctgtctctactaggcttcctctgaatcagtggtcttggaaagggyagataattataggtcaactagaacatcttcactagtaatgctgcaactcacttccctcctaaatacttgatgatttacacctcttatcacagagagggttcattttctttcaaagaccccagggactggtctcctgagcaaggcactgcctaatcttcatgaggactgtgtatatcaactataaacatgactttgatacttattctttgtgaaatgatacctctaatcttagaatatttaaaacccatagctttcttggcctggttgttattacaaagggtagctacattaactgaaaatactcctgcct

SEQ ID NO: 260580 - DNA, 548 bp, Homo sapiens
aggaaatgccctctccctcccttactctcacctttctcccaattatctttgggtttcctttacttgtcttctctttagtccctctccacgtagcacatgcctctcttcccatgacaaaacatgagtctccagcctggtctaattcattttgcaaactctgccacctcagacttcattgagaattcagagaggtctgtctctactaggcttcctctgaatcagtggtcttggaaagggcagataattataggtcaactagaacatcttcactagtaatgctgcaactcacttccctcctaaatacttgatgatttacacctcttatcacagagagggttcattttctttcaaagaccccagggactggtctcctgagcaaggcactgcctaatcttcatgaggactgtgtatatcaactataaacatgactttgatacttattctttgtgaaatratacctctaatcttagaatatttaaaacccatagctttcttggcctggttgttattacaaagggtagctacattaactgaaaatactcctgcct

SEQ ID NO: 260581 - DNA, 632 bp, Homo sapiens
atttgctatgcagctgcaagcacaagcacagttatcataaatgcccattaatgcatactccatgtgctggacacttggcrgggctgctaatcacagtgtcctgcagcccatcccgcccaccccactcccctcttcagtaggagtgtcatactggcattcttgttttgccagaatatgtttgacccactccaacatggggtggagagtgaaagaaaaaaatgataaaggataggggagtgaatgaaagaaaatgaggaccattgttttttaacatacttaataataacatccaatttgaaatcacctaagggacttttttggttctgttttttggttgttttctgaactgaaccacaattatatttgcaaggaagaataaattgcatccttaaatattgtattactttaagaaattttaagtatgttatccactaatgctttctaatgcattttaaaggtattatagtgactcttaactgagtaaaattatatgacatataggttgctatcattgtctttatgaagagatctacaagatgttttctaaaaatgtttctaacctaatattatcttcatttatcaagtaactaaaatttaaaacacaacaagatggcatctgtagacaaaattgt

SEQ ID NO: 260582 - DNA, 565 bp, Homo sapiens
tttactttaatgtattctgcagttatataaaaataacaaggcaataataatatcaaaattaaaatttccccggaatattttacataattagaaccaataatactctgtgttttcactgtctacaaagacttcctaacctgatccatcactcctaatagtctaagagtccattaatatacagtaaggatgaaaaagaattgtgtatctttatgcatatatctttacttttatgtaaaggaggtcatctctttcactggatacccagtgaaattcatgattcaaaaaagaaccattgatctacacttgaagccttcataagtgagaacacaaccaccaccacagcaatcattgcatttacattttggatataagtaataatttttctagacatcctgraatgtaaaatgttggaaagatcagtaagctaaaaatgaagagatttttaactctgggtcttcctctaaatgtctagtgactttaaatgagatgccgtattctgctggggcctaatttatccatacaattaagaaattgaatcagatgagctccccaagtccatctagtc

SEQ ID NO: 260583 - DNA, 632 bp, Homo sapiens
atttgctatgcagctgcaagcacaagcacagttatcataaatgcccattaatgcatactccatgtgctggacacttggcagggctgctaatcacagtgtcctgcagcccatcccgcccaccccactcccctcttcagtaggagtgtcatactggcattcttgttttgccagaatatgtttgacccactccaacatggggtggagagtgaaagaaaaaaatgataaaggataggggagtgaatgaaagaaaatgaggaccattgttttttaacatacttaataataacatccaatttgaaatcacctaagggacttttttggttctgttttttggttgttttctgaactgaaccacaattayatttgcaaggaagaataaattgcatccttaaatattgtattactttaagaaattttaagtatgttatccactaatgctttctaatgcattttaaaggtattatagtgactcttaactgagtaaaattatatgacatataggttgctatcattgtctttatgaagagatctacaagatgttttctaaaaatgtttctaacctaatattatcttcatttatcaagtaactaaaatttaaaacacaacaagatggcatctgtagacaaaattgt

SEQ ID NO: 260584 - DNA, 511 bp, Homo sapiens
ttgccttgggtctatataagaaaacaggtgtcttctcaagtccccttctactcactatccccttccctcccagaaaaagaagcttctttgyattttgacttccagagactttaaaccaatggaagtctaccatattcgtagctgaaaccaacccaacattgtaccaccaaattcttgtaaatattcaacaaatatatgaatggcgtgtgaggcctttctatttctctccctccccaaacatgttagtctgagtatttatttttgatcaccagatggacatttacatgtagattcaaaatatctatactttattcataactcctggctgctctaatctctctcccctggaaaggcctcaatgatttttatggctgtggagttgggggaaatctcagaaggtttcccagcaacctccatctctccccacccaaattccccctggcctagttaaatccattttgttttaagggcctccttccaggaaagctttccttgttagcttttggagttc

SEQ ID NO: 260585 - DNA, 593 bp, Homo sapiens
atctaaaacaagttcatattaattgcgcatgtttggttgaaagtatttttagaaaacatactttatatcacctatatacaccaacagtctttatgaaaataagaagaaaaaaatcaacaatggatrattataaagtcatgagataattaagaaaagttaaggaaatttaacacactgtgttcaaacacaaagagattaaaaattataggataagtaatactgcatggcaggaagatgactactaataaaaatgacataaggaataagctttatattaaaataactaaaaaaaaacccagcaaagattgttaacaaaaatgaactctaaaaggaaaagagactacagacatgacactttactgctaaaaataaaacataataattaaccactgctactaatgacagcttccttttattaaacttttgaagaaattaatgaatctttaaacggctgaaaattactaaaaccatcaatctagacagtaccagacaacagactaagaatattacaaacttgggaattaagagctttaatagtaaaacaaagtttgggccttaacctgactaagggccaaatttatcaattgaattaa

SEQ ID NO: 260586 - DNA, 368 bp, Homo sapiens
ggaagggcagcacagcgccatcactgtggtcaatggctgccagtcctgcaggtgactaaagtaagatgttttgagaacttaggtagagagactttaggcagaggcagctcaggaaataatgtccccagctccagcctgagtttgtaaacagctgatagagttacaaaggagccaagagttggagataaacataaagctttatcactggtaaggctatcgaagtatgtgtggtamgactgcagctgccgagtgggactgctagctcttcactcctgaattaggcagattcctttaccagttatacgcagcactaggtaaccgtggggtcattgtgcaggcagaaacctcccaccataaggaacacagag

SEQ ID NO: 260587 - DNA, 479 bp, Homo sapiens
tacaaagtgctaggagggaggagggcagcagggggccgctgttaggtccctcaaataggctactttcagagaagatcttaaaatctcatctgtgatctttaccttcaatttggtaacaagactgaaaaaaaatcacacaagtctctcatcaaagcattcagaaagaataaaatattttaaatttctctcttgcaatatagaattatgcaatatatttgaggaggagaaaaataaatttcacaatgaaaccagataacyagatataagttgaaacactattgtgaatggatcttcatgacatacaagaaatatattatgtacaattttaggctggtcttcatagaatttaatgcgcttggaattaaatgataatcaattatggcaggactgccgattagcaacttttttaaaaaaaagctctaatgcattgtttaagtgtacctattcttttaccctcttacaggatttaaatcaattca

SEQ ID NO: 260588 - DNA, 254 bp, Homo sapiens
cactactgctttgccattttacaatatggatctgcattgttttagcttctgaratcagtcctcttgacacactctttcactgaatcgatgccatatgttttgggtttttatttcagtaggacttcaccaactttgcacagtatttattattattctaatcacatgatcctctgctgtggtaacagataaatcctcaagttgcactgatttaataacatgagacttgatgtcctgcttacacaacattcactggg

SEQ ID NO: 260589 - DNA, 623 bp, Homo sapiens
  misc_feature (1)...(623): n = A,T,C or G
tttttttttttaaaacattgtttcacatcaaaggtctaccgctccctttatgccaactattatcatcattttragtttttttattcagcaaattccattgagtggtgagcaagccttgagaagtacttctagggcaattaggcgacaggtcaaggtgacttccccagcactgtgcaaatatttgcatctcaagatgcttgggagatccaaggagcttgactttgtagtggagaaagtctaaaattggaagtacttggaaacgtgcgtgtaaattgaattcttttcctgaattaaacttagatatatttccaatttacattataatttcatcacactttatgtttaacctcccattgtgtttcccacccacccacacttatcaccctggctttgtcattttatgtaagcaagcctccaagtgttagaagannnnnnnnnnnnnnnnnnnnnnnaatggtgaagagaaaatatttttttaactccaatttttaaatttggaccttggacctagggttatctccagatttttgtgaatgatgacagtcattttagacatcaatgtgttggtcctggacttgatatttgcccttctctctcattttcagttcatgctgacacctaaa

SEQ ID NO: 260590 - DNA, 623 bp, Homo sapiens
  misc_feature (1)...(623): n = A,T,C or G
tttttttttttaaaacattgtttcacatcaaaggtctaccgctccctttatgccaactattatcatcattttaagtttttttattcagcaaattccattgagtggtgagcaagccttgagaagtacttctagggcaattaggcgacaggtcaaggtgacttccccagcactgtgcaaatatttgcatctcaagatgcttgggagatccaaggagcttgactttgtagtggagaaagtctaaaattggaagtacttggaaacgtgcgtgtaaattgaattcttttcctgaattaaacttagatatatttccaatttacattataatttcatcacactttatktttaacctcccattgtgtttcccacccacccacacttatcaccctggctttgtcattttatgtaagcaagcctccaagtgttagaagannnnnnnnnnnnnnnnnnnnnnnaatggtgaagagaaaatatttttttaactccaatttttaaatttggaccttggacctagggttatctccagatttttgtgaatgatgacagtcattttagacatcaatgtgttggtcctggacttgatatttgcccttctctctcattttcagttcatgctgacacctaaa

SEQ ID NO: 260591 - DNA, 593 bp, Homo sapiens
agagagagagagaagagagcatgagaaagaacaccttgaaatatactttgaggaccactgtaatggtgagaggttgacacgcccctgtctaacactgcaggaattagcagatccttcctaccatccaagggagggcataagcaaaacagtgattgtccaaggactttgagaaagtcatctgggaacccacactgctttgtcctgctctctgtcagtgtacagacactgttaagacaaaagcctgcagccatcgcaggcatgcacagcatwtgcttctatgtgggtgtttatttttcaccagatagagtgcttggaactgcctggcatcgttcctcttgagagagagctaggaaacaacagcaaagtgggttttcttttcttttttcttagctgccggaaaaacgggataagacagaggctgcagggacacagactgaatgcttataagaaagccttacctttccctgaaccttcccattgaccctgagttccagcttcaaaggctgggcatgtggaactgggctcatttacctttttactggagagcgaggtggggagctcatgccactgggtgttccagagatacctgcaga

SEQ ID NO: 260592 - DNA, 593 bp, Homo sapiens
agagagagagagaagagagcatgagaaagaacaccttgaaatatactttgaggaccactgtaatggtgagaggttgacacgcccctgtctaacactgcaggaattagcagatccttcctaccatccaagggagggcataagcaaaacagtgattgtccaaggactttgagaaagtcatctgggaacccacactgctttgtcctgctctctgtcagtgtacagacactgttaagacaaaagcctgcagccatcgcaggcatgcacagcatatgcttctatgtgggtgtttatttttcaccagatagagtgcttggaactgcctggcatcgttcctcttgagagagagctaggaaacaacagcaaagtgggttttcttttcttttttcttagctgcyggaaaaacgggataagacagaggctgcagggacacagactgaatgcttataagaaagccttacctttccctgaaccttcccattgaccctgagttccagcttcaaaggctgggcatgtggaactgggctcatttacctttttactggagagcgaggtggggagctcatgccactgggtgttccagagatacctgcaga

SEQ ID NO: 260593 - DNA, 574 bp, Homo sapiens
aagaggtttaattgactcagttcagcatggctggtgaagcctcaggaaacttacaatcaggtagaaggggaagcaaamacgtccttcacatgatggcaggaagaagtgctgagcagaagtgggaaaagccctttataaaaccaccagatcgcatgagaacctgctgactatcagaaaacagcagcatggggtaaccacccccatgattcaattactttctaccaggtccctcccaaatgggagaattcagccaaaatgaagaggctacaggccccatccaagtccagaatccagcggggcagtcaaatcttagagctccaaaatgatatcctttgactgcatgtctcacatccaggtcacagtgatgcaagaggtgggctcccacagccttgggcagctccatccctgtggctgagcagtgtacagacctcctctcagctgctttcacagttggcattgagtgtctgttgcctttccaggcacatggtgcaagccgtgggtggatctaacattccaaggtctggagaatggtggccctcttctacagctccacacagcacgtgacttgtggggg

SEQ ID NO: 260594 - DNA, 531 bp, Homo sapiens
ggattccctgtgcctgtcgaatccagccagctgttcagaggatccaactcaaaaagtctcacttctcaccccacacgctcattacctctcagatacttggtgtctgcttaaaacgaaagctctggaattagcatcattgagaggtaactgttgatttagtttattaacatatacttccactgaaatggctaatagatatggtctagaaaccaaggagaactcaaaatggaaagctgtctattctttggaagttcaaggctrtgcttttaattgatgcatttaactgtaagaaaaatgaactatatgttcatttgtttcttttaattggagagatgtttgatggaattgtttgtgactaacagtgtgttattcaatgatatgaccccctgattattaggtattaatttccagacctgtgatgtaatgctaccatatgcccacaagatgtctgtctttccctgtgtgttttccacataaatagaatttccgacggtattaggacttaaccgaaccttcttgctgaggggaaag

SEQ ID NO: 260595 - DNA, 531 bp, Homo sapiens
ggattccctgtgcctgtcgaatccagccagctgttcagaggatccaactcaaaaagtctcacttctcaccccacacgctcattacctctcagatacttggtgtctgcttaaaacgaaagctctggaattagcatcattgagaggtaactgttgatttagtttattaacatatacttccactgaaatggctaatagatatggtctagaaaccaaggagaactcaaaatggaaagctgtctattctttggaagttcaaggctgtgcttttaattgatgcatttaacygtaagaaaaatgaactatatgttcatttgtttcttttaattggagagatgtttgatggaattgtttgtgactaacagtgtgttattcaatgatatgaccccctgattattaggtattaatttccagacctgtgatgtaatgctaccatatgcccacaagatgtctgtctttccctgtgtgttttccacataaatagaatttccgacggtattaggacttaaccgaaccttcttgctgaggggaaag

SEQ ID NO: 260596 - DNA, 531 bp, Homo sapiens
ggattccctgtgcctgtcgaatccagccagctgttcagaggatccaactcaaaaagtctcacttctcaccccacacgctcattacctctcagatacttggtgtctgcttaaaacgaaagctctggaattagcatcattgagaggtaactgttgatttagtttattaacatatacttccactgaaatggctaatagatatggtctagaaaccaaggagaactcaaaatggaaagctgtctattctttggaagttcaaggctgtgcttttaattgatgcatttaactgtaagaaaaatgaactatatgttcatttrtttcttttaattggagagatgtttgatggaattgtttgtgactaacagtgtgttattcaatgatatgaccccctgattattaggtattaatttccagacctgtgatgtaatgctaccatatgcccacaagatgtctgtctttccctgtgtgttttccacataaatagaatttccgacggtattaggacttaaccgaaccttcttgctgaggggaaag

SEQ ID NO: 260597 - DNA, 596 bp, Homo sapiens
aaggtaatacattgttttcctggttaaatttgcaaaaaccaggacaatccaaggcttttcactggacacacgtggggaaaatccagagtgccaggctgaggtcrgtgcgatgcagaggtagtgggagttatcacaaacctctgctttctcctgagcaacccagaagtgcagaaggagtttttgcaagacatacacagattcttacctacatgtacttgagctgtttctctaactgccctgataacttgcctcataggtgaacttttacaaagtaaaaaggcaggcttaaggaaacaaaaagataaaactgcttgtccagaatgagatcaaatctgaaactggattctattcaattgccattactaattcaaagaaccaccagaatctaaaactgaaatatctccacgcctctgtttctctcccttgctctcccataccaaagtttggggtcttaaaaaggaagccaaattcaacagggacagatattttagaagaaaaactcattttatttaaaacttcattttattaaactcaaggtatttgtctctagttgatctgatgactcaaagttttcatgttggcctcctctgagggct

SEQ ID NO: 260598 - DNA, 596 bp, Homo sapiens
aaggtaatacattgttttcctggttaaatttgcaaaaaccaggacaatccaaggcttttcactggacacacgtggggaaaatccagagtgccaggctgaggtcggtgcgatgcagaggtagtgggagttatcacaaacctctgctttctcctgagcaacccagaagtgcagaaggagtttttgcaagacatacacagattcttacctacatgtacttgagctgtttctctaactgccctgataacttgcctcataggtgaacttttacaaagtaaaaaggcaggcttaaggaaacaaaaagataaaactgcttgtccagaatgagatcaaatctgaaactggattctattcaattgccattactaattcaaagaaccaycagaatctaaaactgaaatatctccacgcctctgtttctctcccttgctctcccataccaaagtttggggtcttaaaaaggaagccaaattcaacagggacagatattttagaagaaaaactcattttatttaaaacttcattttattaaactcaaggtatttgtctctagttgatctgatgactcaaagttttcatgttggcctcctctgagggct

SEQ ID NO: 260599 - DNA, 398 bp, Homo sapiens
cattttaaaatcttaggaacatttcaacagtgtaactaaggatgtttttccttttgggttgatagcggtaatttagagccaaatttgtgtttttttttttttttgttttgtttttgttttttttttcgagatggaatctcactgtcactggagtgcaatggcacgatctcggctcactgcaacctccgcctctcaggttcaagtgattctcctgcctcagcctcctgagtagctaggattacaggtgcccaccaacacacctggctaaattttgtatttttagtagagacagggtttcaccatgttggtcaggctggtcttgaactcctgacctcaggtaatccgcctcakcctcccaaagtgctgggattataggcatgagtcaccgcacccggcct

SEQ ID NO: 260600 - DNA, 530 bp, Homo sapiens
ttttcttcctaaatagatatgattataactttattttaccaagttcatagcctaatgattgctggctttgctaatattctaattcctttgttttgaaatacatcttttgacagttaatttttttctctgcttctaagaagtaagaaacttctgtatttaggttcatttagaaaatatgaattttaactgcccatcatctcaccagcccaaaagaaccatacttagcatckgggtgtaaaataggaagatcatgaaatcgatgatcaaagtcatgagtcaaatgttataatcatatctatttaggaattataatatcagcaaaagcagcaataattaggctacaaacttggtttaaaaaaagttcgtcgtatttaggaagaaaaacctttgcctatgagtttctcttcagtgccatagtaatagttacaaagtcatcatgaaatcatgatcgcctattttatctcttgctttacacccaaatgccaggcatggttttaaataatgaaaacatgtcttttttttttcttaaa

SEQ ID NO: 260601 - DNA, 533 bp, Homo sapiens
cctttctcagaacagaatgtcacttcctggagaccgtttgctggagccccactcttcagcctttaatgtatagaatcactttggacttagttaaggagataccagaaattccaggctgtatgcataaatggatacagaaagcatcagagaggtttgagtggttgtggcaaaaagattcatcataatttatacgctrtgcgttcgaagatgtctcatgtgaagtcaacagctgaaattgaatgaataattcagcatgtgaatcaatcgcatcatctcacttgccacgttattgctatttttacgcaattgcaaagtaaaaaaataaattgatgtcataaacaactgtcatttgacatgataaagaccctagcattttagggatcttctatttttaggtaatattctggtgcttttcatacaattaagaatatgcccttattaaaatgagaagcatttctacatgttacttcaatgtcaaagtttaaagaaaagcaatgtggaagaagcaccagatttctttctcaaagaccaat

SEQ ID NO: 260602 - DNA, 549 bp, Homo sapiens
ggtagagacaaccttctgccagagctgagaagctgacactgttagtaatattgactgagcaaattggatttgtgggactgatagagtcaacactgaatagtcaaaggaatatcatggctacctgatcmtgtattgtagaagtttggtattgcttttatctggaccaacctgaatgacttttgtagcctggtgttagacagatgaatagatggatccaaatacctagggatccagcagtacagattaggcactacacaccatcagcatcactcagtccaactgctataggaatgttgtgctctcaactaagaatgcaagacctttataagaataggtggagccattgcaagtctccttatttgaatcttctccatttagtcacttgggtattttgctcagtttctcaatgcaagattcaaaaaaaaattgtttaatgtgatcagttttaacaaaatgacagatacccactgcattacagtggctaacccattgtaggtgctctataaatatctgttgaaaatgtgatttggggttgtatatgtaggtgaa

SEQ ID NO: 260603 - DNA, 549 bp, Homo sapiens
ggtagagacaaccttctgccagagctgagaagctgacactgttagtaatattgactgagcaaattggatttgtgggactgatagagtcaacactgaatagtcaaaggaatatcatggctacctgatcatgtattgtagaagtttggtattgcttttatctggaccaacctgaatgacttttgtagcctggtgttagacagatgaatagatggatccaaatacctagggatccagcagtacagattaggcactacacaccatcagcatcactcagtccaactgctataggaatgttgtgctctcaactaagaatgcaagacctttataagaataggtggagccattgcaagtctccttatttgaatcttctccatttagtcacttgggtattttgctcagtttctcaatgcaagattcaaaaaaaaattgtttaatgtgatcagttttaacaaaatgayagatacccactgcattacagtggctaacccattgtaggtgctctataaatatctgttgaaaatgtgatttggggttgtatatgtaggtgaa

SEQ ID NO: 260604 - DNA, 495 bp, Homo sapiens
tctacgggtaggagaaaaccacagaactagtgagatgaaccgtctatttctgtttattggtgctgccatgctgtctggtatctccatttctaaagctttctgcatctttatagatttcctaagaaatggatccttgaagatattcaagtcctaagctgtgctttttttttttttttttkggaataaatactttttccccttttaatcttgccatctaattgtttctaagttataatagtaaaaagttttagattctaagaaatttgatacttcaatcctagttcttaatagagggaaagttcatttaacaatggctcctttgtggaaatataatcatatttagacaacttgatgcagctgtggtgaagtcattcatttgtgttttcattcagtaaacttttattgagtatctatttagtttcacatcttctgttagaatctaaatatagagtggggaacaaaacactacaaatagtactgcacatagtaattatt

SEQ ID NO: 260605 - DNA, 566 bp, Homo sapiens
ggtagctgttattaaagactttaagtggttctcaatctgtgattatctcagagtttacttccattggtttacaagtgtatttccagtgcctcgtactatgcctgtctagaagatgctcaaaaagtgcttgctgaatgaacaaagcccccgattcttattaataaataacaaacagctactgctgctaacactcacaaagcacttactctaccacacagttttaagcactcaacatatttttagacatctaatcttaaaaacactacaagacaggtagtattattatcgctgtattacaaatgaagaaactgagtcaaasaggtgttcagcattgctgaaggttatgcaactagaaagtggcaaaggcaggacttttacactggcagactggcttcagagtccaggctcttgtgcgtataacatgatcttcagtatttaggcacaaaggtaatggaaatgtgcactgtgccccatttattcattcaacaaatatttattaatcatcctcagtatgttagttaccggagataccacgtacataatgtgcaaagatgtgcataatcccg

SEQ ID NO: 260606 - DNA, 588 bp, Homo sapiens
agagggctagaatttctgttccactaaaagttcctttataaattcttgtgttttgttgtgtttctaggtatatgtttaaatggtttcaaattgattgcttttaatagttcttttgttgttgctgacagttgtggagagagtaagatggagatacacaagccttttcttattaacagatttcctgttatacatgtattaagattgtcggcttctactccggtwtcctttccttctagcttgcttcaccagagggagaaagactagctcaattatattatcctgttagattgcttaaatcatgtttagataaaaaaaaattactttctgctttcttactatagttcatgatttccattttgtaaggcatcttttctaaattttgtgctttattatttttgcggtgttgagcgagcgaaaacaactctagttcataattcactttaaagaacataccctttctttctattttcttgttaaaaccaattgtgtgcatttgtaggaaattgaaaccacatttttcacttaactttccaaattaaaatttatggggaaaaagaagcataaaacagttacatctggtcatctata

SEQ ID NO: 260607 - DNA, 523 bp, Homo sapiens
ccattcaatatgtctttttaaatttaattcctcttcacaatcccatgaagcaatatagtaattagttgagtttacaaattatgaagctaagacttaggagattaagtaatctgcatggygtacagttagtaaatggaagggttgggattcaaactcttgtttattgaacttaacagcctgaatccaacaggacactcactagcaaaggaaggtgacagcaaacaaacatttcaaacttttgccttcttccccagggatctggcacttcaggcagtatagtaaggtttaaagagtcactggcatgaatttaaatataaaaaagagattatattaccacttctcttcttaaagcccagaaatccaaagattctgcctacggaaataacatgttctgagaccctgaaaaattggtgtcacataagagacagtatactagaaaatgatatcttatggcactcttagaaaaatgccaaaaggcctaaactaccgtgtccttcctagggcagcttccttcacagcagga

SEQ ID NO: 260608 - DNA, 523 bp, Homo sapiens
ccattcaatatgtctttttaaatttaattcctcttcacaatcccatgaagcaatatagtaattagttgagtttacaaattatgaagctaagacttaggagattaagtaatctgcatggcgtacagttagtaaatggaagggttgggattcaaactcttgtttattgaacttaacagcctgaatccaacaggacactcactagcaaaggaaggtgacagcaaacaaacatttcaaacttttgccttcttccccagggatctggcacttcaggcagtatagtaaggtttaaagagtcactggcatgaatttaaatataaaaaagagattatattaccacttctcttcttaaagcccagaaatccaaakattctgcctacggaaataacatgttctgagaccctgaaaaattggtgtcacataagagacagtatactagaaaatgatatcttatggcactcttagaaaaatgccaaaaggcctaaactaccgtgtccttcctagggcagcttccttcacagcagga

SEQ ID NO: 260609 - DNA, 594 bp, Homo sapiens
tgggaccaattaaatcatgtggactttacttgtaagcaattttgccaattggctgaacccttttttttttttttttttttttttttgagacggagtctggctctgtcacccaggctggagtgcagtggcgcaatctcggctcactgcaagcttcgcctcccggtgaacccttatttttattgttaatagaactaattactttgaactctgatcccctgtacttcaaagacccattctcctatcatatcacctcttctcattktcccattttgtttcagtaactaacattctttacttcatcacacgtgaacatgcattaaggacaccagaatgaaatacttttctattccttagagttaaactccacttttccattccttaggtggcccaaaggaatgggtaaccaagccagatacatttaaaagttattatttctggaattcttctactcagtttgtttatactttttttttttcagtttggtcttgacacacagacaagtgtgtacccaactgtctactttttatatttgggtgaatacctggaagtggtatgtggcagaaggctaggataagtagtagaagggaacacaag

SEQ ID NO: 260610 - DNA, 594 bp, Homo sapiens
tgggaccaattaaatcatgtggactttacttgtaagcaattttgccaattggctgaacccttttttttttttttttttttttttttgagacggagtctggctctgtcacccaggctggagtgcagtggcgcaatctcggctcactgcaagcttcgcctcccggtgaacccttatttttattgttaatagaactaattactttgaactctgatcccctgtacttcaaagacccattctcctatcatatcacctcttctcattttcccattttgtttcagtaactaacattctttacttcatcacacrtgaacatgcattaaggacaccagaatgaaatacttttctattccttagagttaaactccacttttccattccttaggtggcccaaaggaatgggtaaccaagccagatacatttaaaagttattatttctggaattcttctactcagtttgtttatactttttttttttcagtttggtcttgacacacagacaagtgtgtacccaactgtctactttttatatttgggtgaatacctggaagtggtatgtggcagaaggctaggataagtagtagaagggaacacaag

SEQ ID NO: 260611 - DNA, 578 bp, Homo sapiens
atgtactcacctaaagtagcttgggkgacggggcaggggacggatccatgtagcaagacataatgggcactttttcatttgtttgtttgttttttagatggagtctcactctgttgcccaagttggagtgcagtggtggatctccgctcactgtaacctctgcctcctgggcttaaggaattctccgggctcaagcaattctccagcctcagcctccagagtagtttgggattacagacatgtgccaccatgcccagctaattttttgtttgtttgtttgtttgtttgtatttttagtagagatggggttttgccatgttggccaggctggtctcgaactcctgacctcgaatgataatgatccgcccgccttggcctcccaaagtgctaggattacaggtgtgagccactgcgccaggcctgggcactttctttagtagtttgaggagcaacatttttgacagtgtccttctgctcaagattcagatcccagataaaattaaaccatctagagagatggcttgattggccaaacctggatctcatgaccacttcttgaagtgggtaagtctcataaa

SEQ ID NO: 260612 - DNA, 578 bp, Homo sapiens
atgtactcacctaaagtagcttgggtgacggggcaggggacggatccrtgtagcaagacataatgggcactttttcatttgtttgtttgttttttagatggagtctcactctgttgcccaagttggagtgcagtggtggatctccgctcactgtaacctctgcctcctgggcttaaggaattctccgggctcaagcaattctccagcctcagcctccagagtagtttgggattacagacatgtgccaccatgcccagctaattttttgtttgtttgtttgtttgtttgtatttttagtagagatggggttttgccatgttggccaggctggtctcgaactcctgacctcgaatgataatgatccgcccgccttggcctcccaaagtgctaggattacaggtgtgagccactgcgccaggcctgggcactttctttagtagtttgaggagcaacatttttgacagtgtccttctgctcaagattcagatcccagataaaattaaaccatctagagagatggcttgattggccaaacctggatctcatgaccacttcttgaagtgggtaagtctcataaa

SEQ ID NO: 260613 - DNA, 524 bp, Homo sapiens
ccaaaaacaaagggaaagaaaaaggtaaaatggatcagtttttattcgggagaaccatattctactttctatggaaaatattttcaggaaatacctgttgactgagtattttaaacaaatcatattacttttgcctccaaaaaagaaagggctgctcgctctttcaagtgttgaataaaattagctgggaatcagacagaggcttttcactctttggattttaaaaagggaaagacattgttttacatggtatgatatgcattcttcactaattattaacatctttgcatacacattattattttgcaaatataacttttggccttctttcagttgactctaaatataagcttacaaaggggaatgagcatgtattcgtattttccttttctgtaatccttcagtggaatgtttttagaagccaaaactgayagttgagagtgaatttaagatgaattatatcctaaaaacttatcatctcttcatggtcataaactcagatattctttaagtaatcaaagtgg

SEQ ID NO: 260614 - DNA, 527 bp, Homo sapiens
aataaaatcagccttaaaggtaaaataatgcagactaaattattttctgcaaattccttaaataactcataaaagatattcaaagattatatatataatatagtttaatattakaacaaactagtagttggaattagaattaatattaggaatgaatacagctttgcatagcataaaattacaatgctgtggcataataagaaatgcatatttggtctctgcacctacttcctgacacagagttctcaaaacccttgtaatttcttgagtgacaggggtgataggagcttttaaaattatatttggtccttttccctgtttctgaaacaagagcttctaagacttttggaatccccgggagtgatgaatgtctttttgtatgctaatgaatgactggtggctaggaccgcccagacagctttaagattcgggctggttgccagaatgaccaaggcctgatcagagggctggaaatttcagctctactcgctgacctctgaggagggaagaggggctggggattgaga

SEQ ID NO: 260615 - DNA, 527 bp, Homo sapiens
aataaaatcagccttaaaggtaaaataatgcagactaaattattttctgcaaattccttaaataactcataaaagatattcaaagattatatatataatatagtttaatattataacaaactagtagttggaattagaattaatattaggaatgaatacagctttgcatagcataaaattacaatgctgtggcataataagaaatgcatatttggtctctgcacctacttcctgacacagagytctcaaaacccttgtaatttcttgagtgacaggggtgataggagcttttaaaattatatttggtccttttccctgtttctgaaacaagagcttctaagacttttggaatccccgggagtgatgaatgtctttttgtatgctaatgaatgactggtggctaggaccgcccagacagctttaagattcgggctggttgccagaatgaccaaggcctgatcagagggctggaaatttcagctctactcgctgacctctgaggagggaagaggggctggggattgaga

SEQ ID NO: 260616 - DNA, 527 bp, Homo sapiens
aataaaatcagccttaaaggtaaaataatgcagactaaattattttctgcaaattccttaaataactcataaaagatattcaaagattatatatataatatagtttaatattataacaaactagtagttggaattagaattaatattaggaatgaatacagctttgcatagcataaaattacaatgctgtggcataataagaaatgcatatttggtctctgcacctacttcctgacacagagttctcaaaacccttgtaatttcttgagtgacaggggtgataggagcttttaaaattatatttggtccttttccctgtttctgaaacaagagcttctaagacttttggaatccccgggagtgatgaatgtctttttgtatgctaatgaatgactggtggctaggaccscccagacagctttaagattcgggctggttgccagaatgaccaaggcctgatcagagggctggaaatttcagctctactcgctgacctctgaggagggaagaggggctggggattgaga

SEQ ID NO: 260617 - DNA, 607 bp, Homo sapiens
agacaagagatgtaagggagaggagcactacacaacataaagggagagaagaagatggagtcccaagtaaagttctctcaattccccacctatccataaggctgaacttatgcctcacattgagcagtgagattctgttcatgggacagtcacctctgtttcaataaggactccttacagattgcgttgcactgcctttgttggagctttaagaattttgggagagattgtagttgttgaccttggaatttggatttttaagtactgaagctatatccattcgctcattatataaagattcagtatgcatgatcactaggaaatgtggatgtacgtgtgtttggactggaagcaagtgatgggggaaaaaggctttgaagacatatgaaattaagytagattaacttttcgagagtataactatgttatggtttttgttcattttacgcctaaataatatttgaatttataatatgtgattctctcctctcacagaagttacagtcagtatttttctttctagagaagcagaaagccacatacagaagcgccaatgcaaagaaagagcacctatttttgctttgggctttgggctctgggagatgta

SEQ ID NO: 260618 - DNA, 542 bp, Homo sapiens
attgttataaatacaacatatttattagtaaatatttagaatatttaggaaggaatcttcctaatgaaagtagattagggctgaaatgcttcggtctaggagggagggtaaaatccaagaagaaaagacagaatcggtgacttaagaaggaattttcataagttattaaagggttatagaagataatatatacataactttasagaaaaaaataaagcagccagtgtttagaacagctacaggtgggattatagaagaaataaaaagaaaaaaaggaaaacacaaacagacaaaattgtgttttgtggatcacctaaactttttggagacattcccataattatttattgatcggttgatatcataagagctactcttctatttaagacaatggacctttcttcaccattaaatgactccccagatgaggattgttagattattagtttaaagaaataatcagccaattaaaagaaccataaataagctattagcaatatagaccatagttggattgtaaagatttgctctggaaatacttt

SEQ ID NO: 260619 - DNA, 409 bp, Homo sapiens
ttcagtcactactctttcttcccaacttaagtgttataagctgattttcatctacttgttcacatcatcatgttccttgttttctagtttttcaaataccaggatcttatagtaccataattatatggaaaaaatacacagaatgggctgaactacctgaagacattatgaaatcaatatttgaaaattcatacatttagggtttgtcctgtaaatatcatgaagtaatgacaattttttaggtcacaaatcttgatcctttttagttgactgcaaaattccagttataaaattgacaataaaataaatttgsttacatgaaagatcattacatttttagggaatgataatgaagcctgtttcatataggcaaggaatgggtaatgttaatttaaataattttagctaa

SEQ ID NO: 260620 - DNA, 600 bp, Homo sapiens
caattgatacaagttacacacatgtggaaaaaattacaaattactattcctttgtctttatttcctgacaaacaataaacattttcttaggcattaagaaggataaagtaaagaacccaaatgcattctcctctatttattcagckcagaaaaggcttaggttaaaaagtcctagagataatttttatgaggtggaaatttcttgattgacaatgagagattgatcatggaaacttcctcttacctttcttttatctttgcgagctctttgctgctgttttcagatgtgttaggaatagagataaacttctggcaggcctattttgtgaggtagatattctagctcagaataaagtgaaggtttatgtcaccagatttcttggtcaatactaggaagacgtttagcttcttgggtgggtgcaagagtaactgactgttcttttgttttccagaaaccagtcacatccaccatattaaacaagaatttgttatttatttgtggattttttaagtcttttggtcagccctgcaaataataaagacttctaaaattaaaggaataccaaaataactatggcatttccttagttaagcataatg

SEQ ID NO: 260621 - DNA, 568 bp, Homo sapiens
ccttaactacatttcatactctttaatggtaaagacatttttwaaaaatttcatttgttttgtaataatattaagtgtgacagcttatgtctaataggccttaatctatttttatgaatttgaaaatagatttttaacattggaatttagaaataagcataaacccttaaccccttataaaattgttttgggtagcaaaatgtcatttagcattctagtagagtcagagggagaaaaactaattctcttttattaaagttggggattggtgagtgtgtgaagagaaaaggcagaacagatactctaaagcttgggagatccagaatcattattcgatgtgctagcagaaagaaatcccctgaatcaattaactactcaaatgtaaactgcccatctctagaatcagccatataaaaatcaaaagctcttctctgcttcgtaacacccactatattgaagctggttattttataatagtgatgttgttctggtcatagacacgtagtatctggattttccctataagtgacactttgtatgctcacatattggatgcatcagctaaacc

SEQ ID NO: 260622 - DNA, 484 bp, Homo sapiens
aaaacagggtttgaagaaggcagtgggttgtatctcagcagggaagaatatatctaatgggaatttcaatgtttgatatattttcccttacagtaatccagttttcccttttcccatattgctcttcaaaaactaaggctagactcagagttttattattccaggaaaataatgtgtagctattccctggatcaaaaatgccattcctcagatttgagtctaaaatcagatttttaaaacattttgtgaaacaacagcattaaaattcagaccctgttgaaacaaaaactttwagaaaaaagaaattcccaacttttctttgtatatcaagatcaaaacatgggagtgtgaacctaagtattataagccacagtaaagaaaggaatgaagacatggtgtaagaaaagacttcatctaacagaaataaaaaaagattttttctaattgctgtggagcagagccaagagagggtgaaggtttggca

SEQ ID NO: 260623 - DNA, 617 bp, Homo sapiens
gatgttggggccaccccttctctggggtttgatgctcctgggacttatataaactaatgctgctatgctgggagtgaggatgaggagaaaaggaagatgttcaccctggtctgttcaggttctaggctgcattcttgttttacacgtcatttctgtcatgtacatacagtccatttgcaggactttcttggattgatggtgaagtcataaagaaaaaaaaggagtatatcagttaacaaagtattatccccaccacaccaagctaatcaaatatgcttgataactgaaagcatctatgtgtaggaggaaagtaagagtctaactctcgtaaagttaaaagctacttgtcttcagatttttctccctcctatatgaagcctagcatggagtatatgcacaatgcacacatgtttcttggcagagtagaatctagaaagagtaagctactaaacgttactcactatgaccaggagagggcacctagcacaaatgaataaaataattcagtcaacaccaggttttatttwaagattcctttggactctaccattgcattttacaaatcaatttattttatgtgtccactgtaaacgttttgatctaaggataagttcgat

SEQ ID NO: 260624 - DNA, 553 bp, Homo sapiens
acccactttaacttccttttgaggttcccaacacccagtttccgttttcaaaatgatcttcaatagaagtgagtggaactgatattctagtagttgcaaaaaatatatagaaatagatttgcatatatttgaaattcatataataagaactaaaattggagagggattactttatatgtaaaaatactttttggattgtaaagtgctatacaaatttaaggtgttatgaataataatagcaatgttgatggtgatcatgaaatcagtagcctttactaaagggtatttcagccatgaagagttgttcagttaatttaatattcatcaaagaakaacttccaaatcattgaactgtccagattataatagcagctattttaggaatatgttttacataagttcatttacatattagagtcttcttaaaagttcactttcaatgccaatccatgtaagatgcaagttagtaacttggaatccctattttcaggtggaataattagaagataattttataattgactaagtctgatatttttatagattgtttaca

SEQ ID NO: 260625 - DNA, 496 bp, Homo sapiens
agtgaggcataggtttctcagtaaaaaaaaaaaaaaaagaaaaaaaaacctctagcatgcttaataaagtaaccaatattatctcaawgaacacaaaatataagaacattcttctttcagtggggcacttggcaacttgtacgggaaatcaggcagctgggtcacagcatagtaaattatttaaaattcaaacgtattcacttcacatcataccctgaaacaaattccagatgtgttaaaaagtaaattttactgaaaattaagtcaaagtaaaaagaaaattatattgaatatttatcaaacctctaacaaagaaataattttcaatgctttgaatacgtaaagaatgcacaaaggaaaatatcagtaaatggtaccataacatttaaaatgtgaatataaaaaaatttaaaagttaaactgagaaattttccaacaaatgtagtattggtttaattacttgattttatttttatgcatgtgaaagatgcatgtg

SEQ ID NO: 260626 - DNA, 344 bp, Homo sapiens
gcatgactattccttaccagcccaagctattattgagttctctggtcatctttgcaggtggtaaggacaagtacatcacaagcagcaacagtgcgaactttccccacacyaccctgtccatgtgcttctgtgcttatctggagggatcacctctagagttgaccaagctgcaccagtaggcaatgcaacaggcttattttcccatgactcatggcaacactggatacagtgcaggtttgaatgcatctgctccaactacttctcatgaactcaccattccaattgatttgattggctgaataatttcagacatcaaggcaccaaaatcaaggagatccctcaga

SEQ ID NO: 260627 - DNA, 579 bp, Homo sapiens
ttcctacatcactcctactttgtagaacatttggtcaggatggggggtgtgagggcatcacatatcaatcagctatgaaagaatgcactggtccacgtggacatggcacaggaatagactaatgagagccaagcascgtgcctctcctcttcaattagctttctgtcgattttcacaggagtccactggatgaggaacctctgtgggtattttgccaccactagcagacctttatcttcttttaatctattgaaataaagactcagaaacagagtgcaaatgccaaaaggtgaaaagaaatgagactgaggtatatgggggaaatgatgcacatattggcagccaaactggatattttggtattaactgaatatctgggagtcaggggaaactatctgcaaagttgatatttctttcttttttttaggaggtgatttagattatttagttcataattggatgaggaggttcaactgtgaattttatgataccaagaaacactatttagaatattttaaatgttaaggagaaagtacaaaatttccctctaccttcaccctctagcatactgacagaaat

SEQ ID NO: 260628 - DNA, 627 bp, Homo sapiens
agtgactctattataatgtgatagaattggatggtcccactggatttacataactctgcatctgcttcaaaaatgatagaattccagggtaaagaaatcataattctgtacaacatctattcataatacaataaaaaatatattttgtgaagttcccgtgccacacaaaaataagaatgcagtcaataaggacagcatagtgtcctctaatgtaattttttaattaagtcataatctagatgaaggaaagtgcaatatgaaaaatattcataaaatagatagattaatattaatgatttcctatgaacatccttttgaaggaactaaccctatcattcaattctaagtcttaataaagcagaaggagttgggaagtcatatgacttgattctacaagaaccarttagtaaatctgagtaagactggcatagatatgataatcaaatccagatctattaatgatactgccatgaaaagcatataaatataaaaataaaaggacaagaatagagccctgagggaccacacattttacagtaactgtttctgatgaactgctacccaatatagtatgctgtgtctgctgacaaagataattacatttcaaaccaatttaatgctgtctta

SEQ ID NO: 260629 - DNA, 627 bp, Homo sapiens
agtgactctattataatgtgatagaattggatggtcccactggatttacataactctgcatctgcttcaaaaatgatagaattccagggtaaagaaatcataattctgtacaacatctattcataatacaataaaaaatatattttgtgaagttcccgtgccacacaaaaataagaatgcagtcaataaggacagcatagtgtcctctaatgtaattttttaattaagtcataatctagatgaaggaaagtgcaatatgaaaaatattcataaaatagatagattaatattaatgatttcctatgaacatccttttgaaggaactaaccctatcattcaattctaagtcttaataaagcagaaggagttgggaagtcatatgacttgattctacaagaaccaattagtaaatctgagtaagactggcatagatatgataatcaaatccagatctattaatgatactgccatgaaaagcatataaatataaaaataaaaggacaagaatagagccctgagggaccacacrttttacagtaactgtttctgatgaactgctacccaatatagtatgctgtgtctgctgacaaagataattacatttcaaaccaatttaatgctgtctta

SEQ ID NO: 260630 - DNA, 528 bp, Homo sapiens
caactcacatttctggaagatctaacaatatatcactgtctactgtgtcaaaggtgagtgatagatctractttgagagtaggcaactgttttttttccagcaactctcatatattactgaacataaacaggtaacttagtgggaatcccaaaatccatgttggaattttatcaaatattaatcatagataattgtgtcttcaggcaaaatagcaaacatatttccattatttctttttttttctaaaagaaataagagctagaaaacctgtgtcaaaatctagcaggtacctaattaataatcttaaacatttgttgaataaatttttattcatacatgcatacaatttcaacagtcaatgaactagagaagtaaaagacatatagaatgttagtaagttataatattctccttcgtaaaattacattctgccctcatttttcaagtatgaatagggtcaaataattcatcaaagctgataaaaagcaagataatataactgaataacaaagtttctccaaaaatac

SEQ ID NO: 260631 - DNA, 528 bp, Homo sapiens
caactcacatttctggaagatctaacaatatatcactgtctactgtgtcaaaggtgagtgatagatctaactttgagagtaggcaactgttttttttccagcaactctcatatattactgaacataaacaggtaacttagtgggaatcccaaaatccatgttggaattttatcaaatattaatcatagataattgtgtcttcaggcaaaatagcaaacatatttccattatttctttttttttctaaaagaaataagagctagaaaacctgtgtcaaaatctagcaggtacctaattaakaatcttaaacatttgttgaataaatttttattcatacatgcatacaatttcaacagtcaatgaactagagaagtaaaagacatatagaatgttagtaagttataatattctccttcgtaaaattacattctgccctcatttttcaagtatgaatagggtcaaataattcatcaaagctgataaaaagcaagataatataactgaataacaaagtttctccaaaaatac

SEQ ID NO: 260632 - DNA, 528 bp, Homo sapiens
caactcacatttctggaagatctaacaatatatcactgtctactgtgtcaaaggtgagtgatagatctaactttgagagtaggcaactgttttttttccagcaactctcatatattactgaacataaacaggtaacttagtgggaatcccaaaatccatgttggaattttatcaaatattaatcatagataattgtgtcttcaggcaaaatagcaaacatatttccattatttctttttttttctaaaagaaataagagctagaaaacctgtgtcaaaatctagcaggtacctaattaataatcttaaacatttgttgaataaatttttattcatacatgyatacaatttcaacagtcaatgaactagagaagtaaaagacatatagaatgttagtaagttataatattctccttcgtaaaattacattctgccctcatttttcaagtatgaatagggtcaaataattcatcaaagctgataaaaagcaagataatataactgaataacaaagtttctccaaaaatac

SEQ ID NO: 260633 - DNA, 556 bp, Homo sapiens
gtagaacatcaaagatgaaaagaagatattagatgtaaccagagataaaagaaagatccaataaaaagaaaagcaataaaactgacagatgacttcacagcagcaacaatgaaagaccaaacatagagtgttttcagtctgctcttaatctctgcatcagctggaactctctacattgcaagtgggagattcaaatggtacaactacttttgagaactgtttggcaatttcttaaaaagttaaatgtatatcatatgacccaggaactccacccctatatatttatccagaagaaataaaaatatacatacacaaaaagactttcactcaaatgtttataagagttatacataaaatctcatacttcccggtggctacagacagtggcaatctgcatagcttcctaccttccaatattaccccaaacaataggaacaagaacaaaaatgtaaactcyacataaatctatgccttcaacattaatcaaaaatagacaatactgaagcatcaaaacaagtgtatgtagaaagagaaaagttaccaaatttttataggc

SEQ ID NO: 260634 - DNA, 598 bp, Homo sapiens
aaattaagttttaatggacaagatataagcagattattaaggttaaaatttctcacagtgagaaataaaagcaaactatcaaatgcttttattcagttgctatgttcatgacgtacattatcaaaattaatccttttaaaaatcctgtttctcagcaaaaggatttcagstcaggcaactggacttcgaatcacaggcatttcatcctgccctgcttgtcttggctatgggaggtttataaggacggctctgctggattctctccaggaagctctgtacctggattagatgccgtgataattcccagacatggttgcttgtcaaatggattattaaggctatgaactcataccttataaaaatggaaaacaaatttctttaacatgtattctggataatgtctatatccttcattctggataaatgtctatatccttcatgtttcacactggttaaacatcatgccaaccatcttaggttacaaagtaggtaatttctgtgttcaggtacacaatattatttctgatgtgttaatagtaatggctctcatttctgagtgaatttttaaaatacatagatagtttatttgtaattaagg

SEQ ID NO: 260635 - DNA, 522 bp, Homo sapiens
agaaaatttaccaggcatcattacaaaaatttttttttactgctgttttatgcttccaagagatagagaaataaataaataaaaagggggatttatagtataaaacagaaagaaaaggaaaaaaagagaaaacagaaacagaaaagaagagagtagaagtagaaatctgaaagaagagakgaacccagacgtaggaatatgtaaaataaagatagaagcagaaccaggattacaaatgaaatttgaaataactggaaaaacagaaagaagcagaagaggaagaagtgtctaagaaaactagtggtgaaataaaggagggaagattcatggaaaggaaaacagatctgagtaagaaggcaagagaaattttaaaagctatcattgcactgttgttttaggctgttataataaaaatataatcccttttaataatttttctagaaaatgcttgttgataacagttaaaatcaagaaagccaagaaaatatattcacgtatttgtctgccatacagatacaaaca

SEQ ID NO: 260636 - DNA, 522 bp, Homo sapiens
agaaaatttaccaggcatcattacaaaaatttttttttactgctgttttatgcttccaagagatagagaaataaataaataaaaagggggatttatagtataaaacagaaagaaaaggaaaaaaagagaaaacagaaacagaaaagaagagagtagaagtagaaatctgaaagaagagaggaacccagacgtaggaatatgtaaaataaagatagaagcagaaccaggattacaaatgaaatttgaaataactggaaaaacagaaagaagcagaagaggaagaagtgtctaagaaaactagtggtgaaataaaggagggaagattcatggaaaggaaaacagatctgagtaagaaggcaagagaaattttaaaagctatcattgcactgttgttttaggctgttataataaaaatataatcccttttaataatttttctagaaaatgcttgttgataacagttaaaatcaagaaagccmagaaaatatattcacgtatttgtctgccatacagatacaaaca

SEQ ID NO: 260637 - DNA, 674 bp, Homo sapiens
aaaatatattatcaaatttgtaattcttatttcaaaaatgtgaaaaatttctttatgataaagatctcttgacaatggggtaaatcataactcttgaattaaacagttatgccatttctcattttagggaccagccacaaatggctgccaattatatacattttagaaaacttagttatcttctgctgaagagagctaacagataacccttgctcccactagaatctccctagccttcttgatactctagatgtttctaaaacataattgctccatatttgtaagtgtccttctgtcaatatgacctatatagtttttttaatggtttctgtctctttgtttagaatatccagatgttggaggtttaatctgattgttttaagaccttatgatagacgaataaaaatgatacacacaaaaaaccctatcaataggtatagataaaccagacatgtcaaatgttatagtgttcaaacaagaaagtgtgggtgaaactgttacttttttccaagttcctgcaggtttcccaatcacaatcagtagcaatagcaacaataatattaatactmattttaaaagaaactgttaaattattgctttttttagaaactcaatcaacaatcaatttgtcttgaagaatagatcatatggaagcaacagggtttaatgcaagc

SEQ ID NO: 260638 - DNA, 674 bp, Homo sapiens
aaaatatattatcaaatttgtaattcttatttcaaaaatgtgaaaaatttctttatgataaagatctcttgacaatggggtaaatcataactcttgaattaaacagttatgccatttctcattttagggaccagccacaaatggctgccaattatatacattttagaaaacttagttatcttctgctgaagagagctaacagataacccttgctcccactagaatctccctagccttcttgatactctagatgtttctaaaacataattgctccatatttgtaagtgtccttctgtcaatatgacctatatagtttttttaatggtttctgtctctttgtttagaatatccagatgttggaggtttaatctgattgttttaagaccttatgatagacgaataaaaatgatacacacaaaaaaccctatcaataggtatagataaaccagacatgtcaaatgttatagtgttcaaacaagaaagtgtgggtgaaactgttacttttttccaagttcctgcaggtttcccaatcacaatcagtagcaatagcaacaataatattaatactaattttaaaagamactgttaaattattgctttttttagaaactcaatcaacaatcaatttgtcttgaagaatagatcatatggaagcaacagggtttaatgcaagc

SEQ ID NO: 260639 - DNA, 520 bp, Homo sapiens
actgttttttataatggttgtacctctttaaatccctataaaaatgtacaagggttctcttttctccacatcctcaccaacacttttgtcttttttgatagtagagccatccttgcaggtgtgaggtgatatgtcatygtgttttgatttgcattttcctgacgttgagcacattttcatttccatgctgaccatttgtatgccttcttttgagacatacaaatacaccacatcatacacaaaaataaactcaaaatgaagttttgacctgaaactgtaaaactactgaagaaagtatagaaaaaagccttcttgacattgctgatggcaatgattttttggatatgacaccaacagaacaggaaacaaaagcaaaaataaacaaatgggaaatatctattcagatcttttgctcattttcaaattgggttatttgttttcttgctactgagttgtatgagttccctatgcgttttgcatattaactccttatcagatatatgatttgcaaatattttct

SEQ ID NO: 260640 - DNA, 557 bp, Homo sapiens
tagaaaggaatgcctgagactaggtcatttataaagaaaagaggttcatttggctcacagttctgtgggctgtacaagaagcatagtgtcaatttctgcttctggcaggaccttaggaagcttacaattacgcagaataggaaggaggagttggcatatcacatggcaagagcgggagcaagagaaagggggaggtgcctggctctttttaacaatcagccattgtgtgaactaatagagcaagaactcactgattacctcggggagggmagcacgccattcatgaggtatccttccccacgacacaaatgcatcccactaggcccacctccaacattgggggtcacatttcaacatgagaattgaagggaacaaatatccaaattatatgaacaggtttcagggattagtaagaggacaccttggggggaggggcttattttgtcttccacagtgaaacagagagtaaaagtgaaaaaagggacacagaaatttgtaaaattcacattaacattattcaccaaaagcacctgcaccactacctactatttgagcac

SEQ ID NO: 260641 - DNA, 546 bp, Homo sapiens
tctgcccagttcaagcgtccctgccactttgtttatcctgtgagcatagaaccacctactgaagcctcagcaatggtggacgcccctccccccaccaagctccagtgtcccaggtccatctcggattgctgcactagcagtcagcaaggctccgtgggcatgggacccgccgagccagggacagaagggaatctcctggtctgccggttgtgaagaccgtgggaaaarctcagtatttgggcagcagtgtaccactcctccaggtatagtcactcacagctttccttggcaaggaaagggaagtcccctgactccttgcacttcctgggtgaggtgagaccccaccctgcttggactcgccctccatgggctgcacccattgtctaaccagtcccagtgagatgaaccaggttcctcatttggaaatggagaaatcacccatcttctgcttcgatcttgctgggagctgcagaccggagctgttcctattcggccatcttggaagtgacctcagtcattatttctttaaataaacttttcgttctt

SEQ ID NO: 260642 - DNA, 419 bp, Homo sapiens
cactaattctttcttgtgcccaaacaaatctgtagttgaagctccatattgcatttttcaygtcaatcattgtattcttcagatccagaatttgtttagttcttttttatgatttttatctttttgtcaaactgctagttttgttcatatacgttctcctgatttcaatgagttttctatcaacttcttttgcagctctctgaacttccttaaaacaatttttttgatttgtattgtcagacaattaatagaccatttattggaattggttcctgggaattaattttgttcttttgaaggtttcacgtttccctgactttttgtgttccatatagccttgcattggtgtttgctcatttgaagaagcagttacttcttccaggctttatagactggctttgggatgaaagaccttcacc

SEQ ID NO: 260643 - DNA, 563 bp, Homo sapiens
tgttttttagtatattcataaagctgtacaaccaacttcaccatctaatttgaaaatattttcattactccaaaagaaaccctatacctattaaacagtcacttcccccaacccctggcaaccactaatcttctttctgtctctatagatttgcctattctagacattccatataaatggaatcatatgatatgtgtcctttgtgtctggcttctttcactcagcataatgttcaaatttcatccaagttgtagaatgaatcagtacttcattcctttttacggttgaataatattctattgtatggatccgctacatttttccactcatcagctgatgaacatttgggttagctgcatgattttaaacacacactgctcatgctttacaagtatcacacctaatrtttatttcaactttacaagcatcatattttatgttattgcagacaagtgaatttagctttctggaaaatatgcacacatactgtgctatggcttactttagaataatcattaatcattctatctgtgtttgttgccatctttttctcaaaggaggag

SEQ ID NO: 260644 - DNA, 572 bp, Homo sapiens
agtatcacacctaatatttatttcaactttacaagcatcatattttatgttattgcagacaagtgaatttagctttctggaaaatatgcacacatactgtgctatggcttactttagaataatcattaatcattctatctgtgtttgttgccatctttttctcaaaggaggagggaaaaatakttgcatgtatggagagtgttagagggacctgtgaaactataaaggagaactcaccaagggtctagggaaatagaacaccccaaaatgtttcaggatcctatgcagggactagagttcccatgtgagcacacgacactggagctagcggagtccagggtaagaatgaatgcagtgtccccccacaggctgtaattcagatgacaaaaaaggaagctctaatgtgctttgggaggaaaaaggagggaagggagagcaaggactgccatgctgaggagacagcttcaataaagcacagaaggcagccaggagaacacagagggcaagcattttagggagaaggatgagcacgtacagcagctcagaggtgtgagagagctgatccctgcctc

SEQ ID NO: 260645 - DNA, 572 bp, Homo sapiens
agtatcacacctaatatttatttcaactttacaagcatcatattttatgttattgcagacaagtgaatttagctttctggaaaatatgcacacatactgtgctatggcttactttagaataatcattaatcattctatctgtgtttgttgccatctttttctcaaaggaggagggaaaaatatttgcatgtatggagagtgttagagggacctgtgaaactataaaggagaactcaccaagggtctagggaaatagaacaccccaaaatgtttcaggatcctatgcagggactagagttcccatgtgagcacacracactggagctagcggagtccagggtaagaatgaatgcagtgtccccccacaggctgtaattcagatgacaaaaaaggaagctctaatgtgctttgggaggaaaaaggagggaagggagagcaaggactgccatgctgaggagacagcttcaataaagcacagaaggcagccaggagaacacagagggcaagcattttagggagaaggatgagcacgtacagcagctcagaggtgtgagagagctgatccctgcctc

SEQ ID NO: 260646 - DNA, 528 bp, Homo sapiens
aattatccttatacccgtggagtatgacaacacagaacagagtcacctatccctcgtgatgaaggtgtgaaagaaaacaaggtgtgctgagagacgaatggggaggagattagtgaaaattctctggggaagtgacatttaacccaagatctgaaggagtagaaagagcyggctagggaatctgtcttcactttatcagcacctattttttttttttttgccttaacaataaaactgattttctacttgttaagcccattgcttgtaaaaatgtggctcatgtttcataggcttccctggtgaaacctgactctgaatttataagacgattcagttagagatggctggggctgacagaggaaagcaagctctaaagtcaataccccttgccctgcctcagcaccaagaccgccaggtatgaaagctcaggacaagtgacttggcctaagactcaacaacatcatctgtaaaatggggatgataaccttagcatcatcactttgaggaggatgtccggatgaattaaat

SEQ ID NO: 260647 - DNA, 594 bp, Homo sapiens
tttctatatgcaaattctagtctaataataaatcatttcatttttacttaaaatatgactattgttattatcataattattttgttattatggctactcttactatcgtacgygggagtaagaagtttcacttcctgaacacacttctttatttctaaaatttcttctagctctaggttagtcaagctcctcatgtcctttatttgtcttcacaactatgaagtaagctccacgaggcagggccttggtcttcattttctattgtgatattcctagcacctagagttgtgtgtgttaaagacactgaacccatgtctagtaaagatgttgaatgaatgaagatttaaacttgtatcttacctgggccacctgtgccaaattttaaaggctatacccatggcagttgttctgacagttcttggtaagggattgtggcccagcacaaatttacagatgtcccctgtctgactgccagctgccatgagagtcagctccagagctggtagggcaaggacaagggaaaacagaaagagttgatcccagtaaagaaagtgaagctctaattatcttgaaataagttgtcaaacagacgaa

SEQ ID NO: 260648 - DNA, 594 bp, Homo sapiens
tttctatatgcaaattctagtctaataataaatcatttcatttttacttaaaatatgactattgttattatcataattattttgttattatggctactcttactatcgtacgcgggagtaagaagtttcacttcctgaacacacttctttatttctaaaatttcttctagctctaggttagtcaagctcctcatgtcctttatttgtcttcacaactatgaagtaagctccacgaggcagggccttggtcttcattttctattgtgatattcctagcacctagagttgtgtgtgttaaagacrctgaacccatgtctagtaaagatgttgaatgaatgaagatttaaacttgtatcttacctgggccacctgtgccaaattttaaaggctatacccatggcagttgttctgacagttcttggtaagggattgtggcccagcacaaatttacagatgtcccctgtctgactgccagctgccatgagagtcagctccagagctggtagggcaaggacaagggaaaacagaaagagttgatcccagtaaagaaagtgaagctctaattatcttgaaataagttgtcaaacagacgaa

SEQ ID NO: 260649 - DNA, 575 bp, Homo sapiens
ctgggtatgtggttacccctctgggagcctcagttttacctctgtgaaatgggcacagtgatgcctactgcccagagctgcgttagaattgagtcaaatgaagtagttgatgccaaggagcctggcacatggaaggccctcagtcagtgccagtccccaagtccaccgcagcctcagtagatttcttcaggcgtggagctcacttgagcactgtttctttctcatcctttcccctcctcagtgctcagcaggggaaccacatcttcagacggcctttaaaagtcaacacattcagtgggtggcagtgggtgagttctgggctsagactcaggaatttgagatgcatccagctccagctttgcaaaatatctccataaccttaggcaagcggtttcctctcctgtcctcacttcccctgtcaggggagcaagggcagcaggggcgccatggctggggccacagtggggaacgggagccgagacttgctgaatgttcccagaggctgagtgctctgtgtgcacccggcctgtggcaggttgtcgccaaaaaggccccatccctgcttcaacatcacg

SEQ ID NO: 260650 - DNA, 575 bp, Homo sapiens
ctgggtatgtggttacccctctgggagcctcagttttacctctgtgaaatgggcacagtgatgcctactgcccagagctgcgttagaattgagtcaaatgaagtagttgatgccaaggagcctggcacatggaaggccctcagtcagtgccagtccccaagtccaccgcagcctcagtagatttcttcaggcgtggagctcacttgagcactgtttctttctcatcctttcccctcctcagtgctcagcaggggaaccacatcttcagacggcctttaaaagtcaacacattcagtgggtggcagtgggtgagttctgggctcagactcaggaatttgagatgcatccagctccagctttgcaaaatatctccataaccttaggcaagcggtttcctctcctgtcctcacttcccctgtcaggggagcaagggcagcaggrgcgccatggctggggccacagtggggaacgggagccgagacttgctgaatgttcccagaggctgagtgctctgtgtgcacccggcctgtggcaggttgtcgccaaaaaggccccatccctgcttcaacatcacg

SEQ ID NO: 260651 - DNA, 617 bp, Homo sapiens
catcgagtcagttaatcatctcaaatccatgtgaagttgatactgctgtgtgtcccgttttacagatgaggaaactgaggctagtggggtattaacttctcacactgcttgtaagtatcagagccagttggcctgaatggtaacgtgctgagtgtcttattgttatcttatccccgctcttcaaatccatgctttttgggtgtaaggatgctaaggtttgattcctccctctcccccatctccaccccccagggaggggtcccagggccctgagggctgagacactgcctgctcactgctgagactggaagctcttcccaactgttcctggctgggcagacgccttgcctggggcaacactgctctccagtggcaaggatgcagcatagcgtgactcaggctgcaaagaccacagtatccttgggaaaggatgttattccccgccaggggccagagacccctggaaaattagagctgaaaggtctcctgtgtgctctaaaattatctgtgcccatgcatttcccrgtacaaagagtaagcaggtgataaaggtttaacaacgggctcttgaggggagcatttgccaacttcctcggtgcaaatgctaccaacgtggc

SEQ ID NO: 260652 - DNA, 613 bp, Homo sapiens
gtgcctgacacagagccagtgctaaatagctgctgattgttattgtttgatcatcgtcattgtccttgtcatgggtgttattgttacgagttctgcttctgccagctgtgtgacctcgaatacattatcaccccttggaaacagctggcatcacacscattatgctccagggtctctaaaagtaacagtatcctcgcagatttggtcaattgattttcatcaagggtgccaagaccacacaatgggggaaaagacagtctcttcaacaaatgatgttttaaaacttggatatccacatgcaaaagaatgaagttgtatacctcatactatatacaaaatttacttcaaaaatggatcaaagacataaaagtaagagctaaagctcttaagaaagaagatgggagaatatcttcatgatactggatttagtaatgatttcttagctatgacatgaaaagcacaggtaataaaagaaaaaatagataaaccgggcttcatcagaattaaaaccctttgtgtatcagaagacactagcaagagatgggaaagacaattcacagaaagggagaaaatatttgcaaattatatctgtaatttataattgcttgatata

SEQ ID NO: 260653 - DNA, 536 bp, Homo sapiens
gtgatccagtcaggatgctggagttgcaagggacagagctacacaatgaactaggttaggtgtggttgagaatttattgggaggtccctgtacccgcagaaaagcagatgtacaattaagccccaaggaaaataaaaaccaaagagggcaatatccccagaattctctctcggcctctgttagggcagatggcatyatcactcaccgtgatggactttcacgacccagcgagagttcagcatttcctacagcttctggctcacgtttttacaaaagtgacactaccgatcttccctcagcatttgtggaaagcctcccaggagggattctgattggtcaggctgtgcttaaaccagaagagaggagagggctgagcagatgaagtcatagctgtccacttccttgcatcgggcacggtttaggaatgcagaatacaaatattgctttcagcaagcatcatcctttccagtttgattaaattatttggtggaaatattcagagacaaagatgttaaagcttttacaccatttggcgc

SEQ ID NO: 260654 - DNA, 576 bp, Homo sapiens
ggctccctctgaggaagatgatttctgtctctggttgtatccaggcagatttaacctgtgaggaatgggggaaaagggattcttgcattggtagaaacctcaaatagaaaatcctgaaagttcctttcaattctgaaagcttaagaatttatgaatatggtyatttatgtctgataatagcatgggaccagatgtaattttgtcatttgacaagacctcagaagaagcacaaaaacttgccctgcctctgggggatcattgttcacataaatgattactgtctcagtgaagaactaactaatcaagtttcttgctttacagaagcacaaatatactagcatttagtttaaagagaaaatgttttttcctcatttcaagaaaatcagcatataatgctaggggcctaaagcttgaagaaatactacataatataatcattgatggatacgtatttttaaaataaagatatgcatgcaagaaatgtggaaggttttagtgaggaatgacatcagtcctgtgtaggttagttatttgtcaagatgaaaattggctttatatgaaagtttgtattgaaga

SEQ ID NO: 260655 - DNA, 458 bp, Homo sapiens
cattatactctagatttttctagtattattaaatttgaaaatgatttattccaaattttaacttakcttttaattttactagtgtcaaaatgttgtactactttggacaactgatttttccaatagagagtcaatagcatctttgcagggtggtttaaaagccaataatttaatccatattctactaaaacttttaatataagcattttacccagatgtattttttccttgttttagaaaatctgattttaattgctaaaactcgtttttaaatattaattcaatgaaagaaatgctatggttttctactttttcatttcttaaactcaagggaaaacatgggtgaaaaacaaaaaattgttctgcatagagtcttctttaatgtctcactttggtgatgtatgaaataaaaaccaaattgttttaaccagctaaaaatcttaggtttgaattatcca

SEQ ID NO: 260656 - DNA, 558 bp, Homo sapiens
gcaaatataggcaatttaatcaaacmcatcaaagaatcttagtcatttatctgtgtattatgtgtacttattacagtgtagtcaagtggactgcatttgacttttagaactaactgaaatgatctgtcatacagtcactaccagtagatgatcacctgaaactgaagtgttcatggttatttattggaaagcatttttaaggagacatttctttccaatgttgcaactgtattaacactgtttggttgtaacagggactcatgtcagattagcttaattaaagcataagaatttattataagtataccacacagagcaccagggtaggagatggaacaactgggcctcatgagggactgcatctaggaatctggatgggatctctctctctctctctctctttctctctctctctctctctctgtctctctctctctctcccctctctgcttctaggtgtacctctgcttcagtattctctctgcttcttcatccttcattccatctactttctcacagcatccacatttacatgttctctcttttctttagccaagt

SEQ ID NO: 260657 - DNA, 613 bp, Homo sapiens
tttttcctattccagaataatagaaatgtgtgtgttcttgatataaaagggagsctttttagaagcaggtaattaacatacatcatcataacttactacattgaacttactgcaatatgagtgtcctttcccaccatgtgtaggagtgggctttttaggccacaatatctatgtattatgtccttatgcaccttcagcaataggcacctaatgcatataccaggcatattcagatgatttttatgctcacaattatcctatgagatgggaataataatcctcacttttatgactaagattctttagctcaatgatttcctcaaatttacacagcgaataaaatggaagagccaggattctaaaccagggttctctgattgtagaacccatgatctttttatggtcatattcactgcagagaattcagcttccttgacagaaattctaggcttagaaaggatcaaaaaaatatgactcattggggtgactctgatttgacagtaccctgataattctccaggagcacaggtggaaactcccaaaatggggatggttttttagattcacacaaattcagcaatgaaaaatgggtcaaaggtcatctagcccaacc

SEQ ID NO: 260658 - DNA, 613 bp, Homo sapiens
tttttcctattccagaataatagaaatgtgtgtgttcttgatataaaagggagcctttttagaagcaggtaattaacatacatcatcataacttactacattgaacttactgcaatatgagtgtcctttcccaccatgtgtaggagtgggctttttaggccacaatatctatgtattatgtccttatgcacctkcagcaataggcacctaatgcatataccaggcatattcagatgatttttatgctcacaattatcctatgagatgggaataataatcctcacttttatgactaagattctttagctcaatgatttcctcaaatttacacagcgaataaaatggaagagccaggattctaaaccagggttctctgattgtagaacccatgatctttttatggtcatattcactgcagagaattcagcttccttgacagaaattctaggcttagaaaggatcaaaaaaatatgactcattggggtgactctgatttgacagtaccctgataattctccaggagcacaggtggaaactcccaaaatggggatggttttttagattcacacaaattcagcaatgaaaaatgggtcaaaggtcatctagcccaacc

SEQ ID NO: 260659 - DNA, 567 bp, Homo sapiens
caaggaaaaccttaacaatgtaatctagaaaagtttttttgtttgtttttgtttttgttttgacattgcctttagattgaataaaccacactgtagcccagaagcaagaacataaagatatttctcctgaggactggarataccctcatgatatcctagctcaggatgtgtccacatgaagctaatgaattagctatattatttggttacctttcttcactatttgttatttaaacatactggaaaagcaacctgggcaattgtgtcttagctgtatatctttttagtatatataaagagcatgtagatatttcaatccatgttccaaacagactcatcctcaagtgtaatgttgtcctttaaaatgaggcaaaagggtagcccaatatcaaattgaagtgctgatatggtttgcccctgtgttcccacccaaatcttaccttgaattgtaataatccccacatggcatgggagggcctcgtgggaagtaactgaatcatgagggcggtttttcccatgctgttctagtgataatgaataagtctcacgagaggtgatgttttaata

SEQ ID NO: 260660 - DNA, 604 bp, Homo sapiens
aagtcttaaaattcaaatatatatttatatcaataaaaattatacataatggatggaatgcttgtagctgtactctttatttccccccttcaatcattatatgagtatttatcactcatacaaaagtatacatctgtaacttytttagtttcgtttcttgagagataccagttcctctcttctttcttatgaacctagaagtgcagatgtagtataatattctcatccatgtaatattattacagggttttttttctgttgtttctggtggcttaatggcaaaagtgaaatttttaagatgatttaaaaatttcttcttcaagtagtaatttaggcaacacttctgaagtgtaatttgacttgaggaatttggtacatatttgtatagtgggcagaggcttattaaaattatatttacatacgatatgaaatgatatgatacttagaaatattttaatttcaggactatactttgtcatgatttctggaaattttcatttttggaaaagggaattttgctgacttatgcacaccacagtaattattgcttttaatgtaaaatatggcttaaacctgatctttctagtaactataccaggacacc

SEQ ID NO: 260661 - DNA, 247 bp, Homo sapiens
ctgttaatctgtaacttttctccagccttgtgctcacagaaacatgtgttgtatggaattaaggtttaagggatctagggctgtgcaggatgtgccttgttaacaatatgtttacaggcagtatgcttggtaaaagtcatckccattctccattctcgattaaccaggggcacgatgcactgcggaaagccgcagggacctctgcccaggaaaaccgggtattgtccaaagttcctccccactgaga

SEQ ID NO: 260662 - DNA, 544 bp, Homo sapiens
tacagggttaagacactgagcatgtcactcactttcaaaactggaaaaatcaattcctggctggaactactggtgctttcacaagcttggagagaagtgccagggtttcgttacccctggctccaagagggcataaagcttttactgaaaaagttacagcatataaaaaacaaataaatatagaatatacaacgccaagagggaatgctaatgtaaaccatggactttaggtggtagtgatgtgtcaaggtaggttcatcgattctaacaaatgtaccagtctggtgggaggagctgataatgggggaggccgtgcaagtggggaggggaggtatatgggaactctctgtatcttcctcttaattgtgctgtgaacctaaaactgctctaaaaaaaaaaaaaaacctaagmctattttttaaaaatataaataaataaatgaacaaaacagtgcctgcccccccaaacgactcagtaaatggatgttggctgaataatgtatggtgaagtcacaggggcaacactcctcacgcacagtggctgg

SEQ ID NO: 260663 - DNA, 544 bp, Homo sapiens
tacagggttaagacactgagcatgtcactcactttcaaaactggaaaaatcaattcctggctggaactactggtgctttcacaagcttggagagaagtgccagggtttcgttacccctggctccaagagggcataaagcttttactgaaaaagttacagcatataaaaaacaaataaatatagaatatacaacgccaagagggaatgctaatgtaaaccatggactttaggtggtagtgatgtgtcaaggtaggttcatcgattctaacaaatgtaccagtctggtgggaggagctgataatgggggaggccgtgcaagtggggaggggaggtatatgggaactctctgtatcttcctcttaattgtgctgtgaacctaaaactgctctaaaaaaaaaaaaaaacctaagcctattttttaaaaatataaataaataaatgaacaaaacagtgcctgccccccmaaacgactcagtaaatggatgttggctgaataatgtatggtgaagtcacaggggcaacactcctcacgcacagtggctgg

SEQ ID NO: 260664 - DNA, 544 bp, Homo sapiens
tacagggttaagacactgagcatgtcactcactttcaaaactggaaaaatcaattcctggctggaactactggtgctttcacaagcttggagagaagtgccagggtttcgttacccctggctccaagagggcataaagcttttactgaaaaagttacagcatataaaaaacaaataaatatagaatatacaacgccaagagggaatgctaatgtaaaccatggactttaggtggtagtgatgtgtcaaggtaggttcatcgattctaacaaatgtaccagtctggtgggaggagctgataatgggggaggccgtgcaagtggggaggggaggtatatgggaactctctgtatcttcctcttaattgtgctgtgaacctaaaactgctctaaaaaaaaaaaaaaacctaagcctattttttaaaaatataaataaataaatgaacaaaacagtgcctgcccccccaaacgactcagtaaatggatgttgrctgaataatgtatggtgaagtcacaggggcaacactcctcacgcacagtggctgg

SEQ ID NO: 260665 - DNA, 544 bp, Homo sapiens
tacagggttaagacactgagcatgtcactcactttcaaaactggaaaaatcaattcctggctggaactactggtgctttcacaagcttggagagaagtgccagggtttcgttacccctggctccaagagggcataaagcttttactgaaaaagttacagcatataaaaaacaaataaatatagaatatacaacgccaagagggaatgctaatgtaaaccatggactttaggtggtagtgatgtgtcaaggtaggttcatcgattctaacaaatgtaccagtctggtgggaggagctgataatgggggaggccgtgcaagtggggaggggaggtatatgggaactctctgtatcttcctcttaattgtgctgtgaacctaaaactgctctaaaaaaaaaaaaaaacctaagcctattttttaaaaatataaataaataaatgaacaaaacagtgcctgcccccccaaacgactcagtaaatggatgttggctgaataatgtatggtgaagycacaggggcaacactcctcacgcacagtggctgg

SEQ ID NO: 260666 - DNA, 542 bp, Homo sapiens
gtctgactcctcccaccatctgtgtaggtcacagaacctcacgccaactggctctcttcagactgtggtcaactggaaaatcgagtcagatttcagaagggtgggaaaatgaacctagaaagtctaatgtggagaaagccttaaaatatatccttcatgttccacaatagtgattattatctttggcgatactgcaacataaataggtattcttggctagttcatctctggcggcaccatcttggcatttacactctacagaaaaggtacctgaggagaaagatggtccaagttacttgccacaratcacacagattaacagcagcacagtctgggtgtatatgtgtaatatatatctttttattatttttatatacaagtaatggttgtttcttgtagaaaagttaaaacaatgaagatgagcaggaagaaaaaaataccatccaaacacccagcaaataaccatactaatgtagacatattttcttctaatcttctaggtatgtatgtatacatatatgtacatatatatacacatgcac

SEQ ID NO: 260667 - DNA, 543 bp, Homo sapiens
tcattattttgcaggaatgccatttgtctcactagccttcagtagtaaaaaatgaacacacacaaataacaataacaattcatacatatgatgaatttagccctttctaaacactgactcagctaaagactttacattcattatctcagctaatcttcatatcagccttcagcactgagatacaactattaaacctattaaacagaaaaaaaattgaaatatagactacttaattaagtggcccaaataaagtagctaggaagtggcagggctagaatttgaactataagttacaacacaggtctgtcactggtttggtagttgtgaccagagatacactagacatatccatatttttaggaataaaggtcttccagcataactattcatcasctatagtttttgacttaagtttttaaccaaaactatgaaatggggaaaattattaatatgccatttagagttttcagaaatatattaccttacaggcaatttcataatatttcctaggtttcccttttgcctttccaggaaaaagtttca

SEQ ID NO: 260668 - DNA, 565 bp, Homo sapiens
catacatatgcaatcactgacttctgaggatctgatgcctctaaatgccataaaccctctttccagggctacagttcagtgcaccactataatgaacacagtacattaaacatgaatatcatctactttattttacaagtccctctgagttagtccattatatcatgccattttcaaaatcacaagaaatttttaattttctgcggagaatgcagaccacagacaatctgtgagttcaccttgtgacaaaaaragcactttcttcaaataagagagtcaggtcctgatgttttatatttcattggtgttttaatgtattatttggcccagagatttattggatcccatggatcaaaagtattcattaatcatcaaagttaaaagatttttaaccttgtctacagaaaaaaagcatttttacaacagcatataattgtacgtttcttcagttaacttcactgacctttttactggtgaaggtgcaataattttaattgttccttcattttctccattttccatgtttgcagttatcctactgatgctgtttgattctagcagagga

SEQ ID NO: 260669 - DNA, 599 bp, Homo sapiens
tttggctgtgtccccaactcaaatctcatcttgaattgtaatccccataatccccacgtcgtcgtgggagggagccagtgggaggtaacttaatcatgggggtggttcccccatgctattctcgtgatagtgagtgaactctcacaagagctgatggttttataagcgtctggcatttcccctgctggcactcattctctctcctgccgccctgtgaagacatgccttctgccatgattccaagtttcctgaggcctccccagccaagtggaactgtgagtcttttaaacctcttttctttataaatttcccagtctcaggtatttcttcatagcaatgtgagaacaaactaataaaaaagtttttattatcaccttatcatacttctctatgacaaaatataaaaataaagtgtttacttcccatgaccataaagctctaaatgtwaaaaatttcttctgaactaagttattataattagtagcagtatattagtacaccatactaatgctgataaattattaaatataaaaagtaaattttttattggaaagcaattttttttgagacagagtctcattctgttgcctacgctggag

SEQ ID NO: 260670 - DNA, 515 bp, Homo sapiens
tggtatcaagtgaatttttacaaaatacttattcttccagttaaaacaaaaaggtccttcagcacaactgtgctgtagttaaaccatggcctataatcccagcactttgggaggctgaggcaggcggatcacttgaggtcaggagttcgagaccagcctccaacatggcaaagccctgtctctactaaaaatacaaaaagaattagccgggtgttgtggtgcacgcctgtaatcccagctgctcggkagcctgagacaggagaatcgcttaacccagtaagtggaggctgcggtgagctgacacggtgccgctgcactccagcctgggcgacagagtgataacatctcaaaaaaaaaaaaaaaaagaagcaaaagataatgtattttctcatgctgaagaaatacttgcaggtctgagatttgaattaagatacctatttcacagtttcaaaagtaccagtggcgcacacaaccttcccacccctacccttgacccttcatcaggatcaagtctc

SEQ ID NO: 260671 - DNA, 491 bp, Homo sapiens
ggtttgagcagcacaagggttgactgtgggagacacagatctactccccaaattccccttcacgaaagttctttttgttctcctgaagagagtgtgagcagcagacagtcttcagctgcagttcctttgtaattatccccagctgaagagagttgtcttgccggcgtatagtttttcccaggatcttccacacttagtcatggattgaggttggatatatcggccttgccatcttaaagcatactccagtggtmaatacttatttcagagttccttaccgggctgacagaggctttgttaggcctgtactggagttcagcttctctgcccaactctagttctttacccttccttccctggcattgatctcttatgcaatcttgcaccctaaatgccatctcagtgtctggcccatctatcaatgtactatgcaagagcagttccacattagacgtgatgagtgcagccaggaagataatgagacttcagag

SEQ ID NO: 260672 - DNA, 512 bp, Homo sapiens
tgaatactggccaataattgctggctgaaatacaatatcgtacacaaaatcttaaaaccttataccacaaaataatgaaatgccttctgttagtttttatttagaatcatattcataatgttaagttttattgaacataataaacaagggatamacaatatatgagatattctctagagggtgctataatgatcaagagaaagagacatcttaaaaaattacttaaaatgattaaatcttacatgttaatttaaaattcacctagggaaatagctagttctcataatgagaataaacaaaataaataccatacgaaaaaaaattgggtgatagtggttcaagacagtgatttaaaatgcaacctaacatttctttgtccatagttgatggtaaagtatcaagtcataaactctgctcatcataattttctatatatggtactagtgagctatttacttcagccaaagatcaggaaacattccacagcaatgagatctcttaatctgtaaaac

SEQ ID NO: 260673 - DNA, 528 bp, Homo sapiens
atactaaaagaaggatcaatggaataaaaaattgttaagaaaaaacgtattaaaatgtaaaacttcatctctgcaaaagacactggcatagaataaaaagacaagctgcagactggaagaaaatatttgcacaacacatatctgacaaaggaattatatccaaaatatagaatgtggtcttaaaattcaacaaaagaaaacaaacaacttcattaaaattgatctgatcaactccataccaggatatacagatgtaaataaagatakgaaaagattctcaacattgtcattagagaaatgctaattataacaacgagataccactacatacctgttagaaaaggtcaactaaattttttttaaaactgataataccagtcactggtgagaatttagaccaacagaaacgcttaatttttaatttttgtgggtacctaatacatatatatatttacagtatacatgagatattttgatacaggcatacaatgtgtaataatcatatcagggtaaatggagtactcatca

SEQ ID NO: 260674 - DNA, 528 bp, Homo sapiens
atactaaaagaaggatcaatggaataaaaaattgttaagaaaaaacgtattaaaatgtaaaacttcatctctgcaaaagacactggcatagaataaaaagacaagctgcagactggaagaaaatatttgcacaacacatatctgacaaaggaattatatccaaaatatagaatgtggtcttaaaattcaacaaaagaaaacaaacaacttcattaaaattgatctgatcaactccataccaggatatacagatgtaaataaagatatgaaaagattctcaacattgtcattagagaaatgctaattataacaacgagataccactacatacctgttagaaaaggtcaactaaattttttttaaaactgataataccagtcactggtgagaatttagaccaacagaaacgcttaatttttaatttttgtgggtacmtaatacatatatatatttacagtatacatgagatattttgatacaggcatacaatgtgtaataatcatatcagggtaaatggagtactcatca

SEQ ID NO: 260675 - DNA, 546 bp, Homo sapiens
gaattgaaggaacagaacagaatgtaatgtttacattctgacaatgtagaaatgatagaactaatggaaatttggggaggaagaaggatgaaggttgaaggtatagtaaatttgctgattacctcatacgtaatctctagagtcaaaggatatcatttcatgctggcagatcattaatagatgtttgagcatatttaacgatacaaaggtaaatatgaagaaagatagtactattgactaaagtcagttgggggagagagaggcggaagtatattacttttatgcttggttatactagagaacaaatagaaactgactaaagaaacattagatcagtggttctcagagtattgatatctgggagtcccagcaacagtctgaggaggttcatgagttcaraatattttgataataacactaagatggtatttactcttctaactgggtagatatttgcactggtactgccaaataatgtcttacattttcgcagaaataaaagcagtgacatctaactgaatagtactcattacattcttcactgtc

SEQ ID NO: 260676 - DNA, 644 bp, Homo sapiens
ttatgttaatatgtaatgagtttattatctttattccgaaataaattaatacatattttttaagtatctcagttctaatttttaatatagaagatattggtagatacagactaaataaacaaaagcctttggggttctcaataatttttaaggttataaacaagttgttctgaagccaaaactttgagaaccacaacattaaactaagtgttccacaaagattgacaattaaaaatccactcttggaatataatcttttaaaatacagtattargtagactcatcttaatgtgataaaatatatcttaaatatatctaaaagcccaaattacatgcttgctggttatagaattctgagagaaacaaaatatcacccctttggccttcatggtttctgataagaagtctcccctcaatgggataatgtaactgtggtcttttcaagattttttcccgtttttagtttttacaagcttgataatcatgtgtcttggtgtggttttttgggatttaccctaattggaatacacacagcttcctgattctgtaggtttatggctttggacaaatttgagaaattgtcagccattatttcttaaattaattatttagcaatgccttctttatccttcactccagggctc

SEQ ID NO: 260677 - DNA, 614 bp, Homo sapiens
agttttttaaaaatattttaaaagatatttaaccttattcacaacacagaaatacagatttaaacaacactgaaaaaacatgtttccctcttcccattcagattggtaaaaatccaaaagttcatgacatattcaactggaagaattttgggatagattttaatctatggctgatgagagtataaattggtacagcatctttggtgagcattttggtaatatttaycaaagtgacacctaggaattatcttgagatataattaatatgtgtgaagtgatgcatgtatgaggttatttattgcaactcttcttaacagcagaaggttgaatacaatctgttgttgaataaaacgtgtataatatgttattacttgtagttttaaaagacgaaatgaaatttcctgttttattggtttgcatttatataaaaattctttataagtgaaaaaagaaacaagtgatagtgattacccgagtaatgaaggaggcaagatatatactgagaaagtagagagctagtggggaagcaatgtttcattaaataactttatatttttgatatttgaattatgtgcaataaggagggaggaagggagaaaagataaaaaaggaga

SEQ ID NO: 260678 - DNA, 535 bp, Homo sapiens
gttttttaaaaatattttaaaagatatttaaccttattcacaacacagaaatacagatttaaacaacactgaaaaaacatgtttccctcttcccattcagattggtaaaaatccaaaagttcatgacatattcaactggaagaattttgggatagattttaatctatggctgatgagagtataaattggtacagcatctttggtgagcattttggtaatatttatcaaagtgacacctaggaattatcttgagatataattaatatgtgtgaagtgatgcatgtatgaggttatttattgcaactcttcttaacagcagaaggttgaatacaatctgttgttgaataaaacgtgtataatatgttattacttgtagttttaaaagacgaaatgaaatttcctgttttattggtttgyatttatataaaaattctttataagtgaaaaaagaaacaagtgatagtgattacccgagtaatgaaggaggcaagatatatactgagaaagtagagagctagtggggaagcaatgtttc

SEQ ID NO: 260679 - DNA, 618 bp, Homo sapiens
aaaacgtgtataatatgttattacttgtagttttaaaagacgaaatgaaatttcctgttttattggtttgcatttatataaaaattctttataagtgaaaaaagaaacaagtgatagtgattacccgagtaatgaaggaggcaagatatatactgagaaagtagagagctagtggggaagcaatgtttcattaaataactttatatttttgatatttgaattatgtgcaataaggagggaggaagggagaaaagataaaaaaggagaggaagatttaggtgagttaagggaaaaaataagaggacaaaaataaaaggccagcatgaagaaatggctgctcgaatctaattagtgttgatttaggcatttaaagggggaacgagttgatgaycttaaaaaggggaatgcagtacaaagtttcctcaaagaaaaataaatttgtttttaatgcgttatacactgagcaatacaaattatgtgagttttatattcagttttgttcttctatcaggtgataagcacaggagtgagtttctgttcgtagacaggtttttttaaagcatgtgtgtaaaaggttggtgacttcataaaaattgagaatggatttaagattctagt

SEQ ID NO: 260680 - DNA, 586 bp, Homo sapiens
tcttcacaggataacaatatggtcctgatgctgtgttgacttaaaaacctggaggctcctaatgtctgcaagcattccctttaatagaaatattaaatctacatgctgccctaaagaacattgtaagccctattgaaaaagagttatggtacagccatatgttaagctcttcagatctagtgagctcctgccttacacatggaatcttcctaacactaacaacacttcctggcattccaacctgagaatctgatgggcctcacgaagctccgccaaggtgtactggcttcgtacttgctctcagtggctcrtgcattctagctgaatagctatatcctttgtcaaataaatcagaaacgttatccaacctgtgaatagggtggaggagaaaggagagagaggagtcagagaggagagggaggagtcagagagaagaaagagagtgtacagagagagaggagagagagagagagaagacagaaaagagagagaaaggacagagggagcttaaagagagaggtgggggggactactggatattgtgatattgtggtgtactagactactttggttgtactttagacac

SEQ ID NO: 260681 - DNA, 549 bp, Homo sapiens
aacctaaaagggatcttaaattccaggtgtaaagatgtgtatttaytttaacatagcaaatctacacttgctgagacttagtataactatcaccaatataaaacaaatgccaagattgtatttcaaatccttgataaaatatgtgcacaggaaaaactgttaggtctaattataagctaatttcagttatcttacctgcaccaccattttagaaagatctgaagcatttccactgataaaataactgaaagagaagacagtatcatttctcaatatgaaaacctgtaaacattagaacattagatacaactttaaacaaacagctgtccgatttttttacaatgccccattgatactagaaagcgtaaaataaaattcaaaaagtatacaagatactgattttaggaaaaaattgcataggtagtgaattaaaaacataatgatgataataatgtggctgttgctgctgcttctgataaacaaatatttattcacagcttactatgtcccagaatgatgctaagaatattacttgcagtcctatatctt

SEQ ID NO: 260682 - DNA, 513 bp, Homo sapiens
aacctaaaagggatcttaaattccaggtgtaaagatgtgtatttactttaacatagcaaatctacacttgctgagacttagtataactatcaccaatataaaacaaatgccaagattgtatttcaaatccttgataaaatatgtgcacaggaaaaactgttaggtctaattataagctaattkcagttatcttacctgcaccaccattttagaaagatctgaagcatttccactgataaaataactgaaagagaagacagtatcatttctcaatatgaaaacctgtaaacattagaacattagatacaactttaaacaaacagctgtccgatttttttacaatgccccattgatactagaaagcgtaaaataaaattcaaaaagtatacaagatactgattttaggaaaaaattgcataggtagtgaattaaaaacataatgatgataataatgtggctgttgctgctgcttctgataaacaaatatttattcacagcttactatgtcccaga

SEQ ID NO: 260683 - DNA, 645 bp, Homo sapiens
ctgttaggtctaattataagctaatttcagttatcttacctgcaccaccattttagaaagatctgaagcatttccactgataaaataactgaaagagaagacagtatcatttctcaatatgaaaacctgtaaacattagaacattagatacaactttaaacaaacagctgtccgatttttttacaatgccccattgatactagaaagcgtaaaataaaattcaaaaagtatacaagatactgattttaggaaaaaattgcataggtagtgaattaaaaacataatgatgataataatgtggctgttgctgctgcttctgataaacaaatatttattcacagcttactatgtcccagaatgatgctaagaatattacttgcagtcctatatctttatatctatatcatctatatctttatgtctacatctatgtttatatagatgatatagacatatatctttatgcctacatctatatgtctatatagacatcatatagatatatagctttatgtctacatctatgtttatatagacctacatctatgtagatatttatatagatctacatctatgtttatatagatctaygtttatatagatctacatctatataacattactcttgctgatcacaccacatct

SEQ ID NO: 260684 - DNA, 581 bp, Homo sapiens
ggctgttgctgctgcttctgataaacaaatatttattcacagcttactatgtcccagaatgatgctaagaatattacttgcagtcctatatctttatatctatatcatctatatctttatgtctacatctatgtttatatagatgatatagacatatatctttatgcctacatctatatgtctatatagacatcatatagatatatagctttatgtctacatctatgtttatatagacctacatctatgtagatatttatatagatctacatctatgtttatatagatctacgtttatatagatctacatctatataacattactcttgctgatcacaccacatctagagctctggttttcattctagaagtgatatttaaagagaaaatataaatcattagaacaaatccagaaaagartaacagcacagtgtaggagcttgaagtcacgctatagaaggaatgataggagaaaccagaaatagttgtccagaagaagaagaaaggaaaaaatgactattatgtacctaccatgtatgaggctctgtattaaataattttattaagttagccaagaaaaa

SEQ ID NO: 260685 - DNA, 529 bp, Homo sapiens
gatatgaaaaaaaaaaaaacaacagtagaatgtgatatcctagaagtcaagtgaggaaagtaatttaaaaagaaaatgtaataaatcaaccgctgatggttaagaaagaaaataactgaaaatagatttactcacatggaagtcactggtgactttggcaaaatgcatctgtggagtggtgggtcaaagtgttgagtagggtaggttcaagagagaatgagtattgttttaagccagtacatttcaagataatttctcatacattaaaagccagtacatttcaggataatttctcatacattaaaagttaactgatacaaagagtgtggtatcaagaaagtttttttgaaagtgagaaacttcaatatattttatgctgataacaatattcataaataaaaaagaaaaaytgctggagtgaagtctttgagcaagaaagatgaaatccagtacacaggtgaaaatgttgacctttgatagatatgtggataattctttggcagtaacaggaaaaaaggaataatgggaa

SEQ ID NO: 260686 - DNA, 529 bp, Homo sapiens
gatatgaaaaaaaaaaaaacaacagtagaatgtgatatcctagaagtcaagtgaggaaagtaatttaaaaagaaaatgtaataaatcaaccgctgatggttaagaaagaaaataactgaaaatagatttactcacatggaagtcactggtgactttggcaaaatgcatctgtggagtggtgggtcaaagtgttgagtagggtaggttcaagagagaatgagtattgttttaagccagtacatttcaagataatttctcatacattaaaagccagtacatttcaggataatttctcatacattaaaagttaactgatacaaagagtgtggtatcaagaaagtttttttgaaagtgagaaacttcaatatattttatgctgataacaatattcataaataaaaaagaaaaattgctggagtgaagtctttgagcaagraagatgaaatccagtacacaggtgaaaatgttgacctttgatagatatgtggataattctttggcagtaacaggaaaaaaggaataatgggaa

SEQ ID NO: 260687 - DNA, 494 bp, Homo sapiens
gatgtccactttcaccactgcttttcaagatagttctggaagtcccagatgtaataatacaagaaatgtgataagacaagaaaataaaaggcatacagattgtgaaactaaaccaaactatcwtggtttgcagatgacatgatggtctatgtagaaaatctaaaagcactgacaaaaacactcatggaatttgtattagtccattttcatgctgctgataaagacatacccataactgggcaatttacaacagaaagaggtttaattggacttacagttccaaatggctggggaagcctaacaatcatgttggaaggcaaggagggtcaagtcacgtcttaaatggatggcagcaggcaaagagagcttgtgcagggaaactcccccttgtaaaaccatcagatcttgtgagacttattcactatcacgagaacagcacgggaaagacctgtcccatgattcaattacctcccgccaggcccctcccacaacac

SEQ ID NO: 260688 - DNA, 549 bp, Homo sapiens
ttattcagtcctaaaaagtaagaaagaatcaggccatttaaagacatgcaagaaccttaattgcatactactacgtgaaagaacccaatctgaataggctaaatagtgtataattccaactacatgactttctgaaagaagcagaaatacggagatagtataaaggttagtggctgtcaggatttagggggaggaagagataactaggcagaaaacaggatttttagggcagtgaaattactctgcatgwcactcttatggtagatacacgtcactatacatttgtccaaacccacataataaacagcatcaagagcgaaccctaatgtaagctctgggctttgggtgctaaagatatgtcagtgtaggttcattaaatgtaacaaatggcccactctggtgggggatgttgataatgggggagactacacttatctggggggaggaggatatggaaaatctctgcaccttcctctcaattttgctgtgaatttaaaactgctctaaaaaaattaagatctttaaaaaaagaaaaaagcaaatcagtag

SEQ ID NO: 260689 - DNA, 559 bp, Homo sapiens
atcccacttcatttttctctgccttcattgctacttctttaggctcttccttttaaaatgccccttccttggtcactactacacttttttaaactaaataaaaactaggcaatatcttcccaaggggagatttatggtcagaaagtttccagagttctatgattataagactctcccatctttttctcaaggttccactgttagtggtgtctatayaacacagtgtttagaaaattcaggcaaagtaaaggaacgtgtcttgattggcttcagaaaaactttccttgaattcatttttccttttacttgctgtggtctggaagaaattactgtagtttccttgtacgtgtcagattggaagtgttgctttctctaacattaaatttaaaatctttgtatctgttaagaaaacataaatgaggggtctgttggctaaggaagctgttacagctccaaaactaaccaaaaatattgagcaagccgccttaggaaatgcctgcagttgcgtatcttgatgatgtcatcaccacataaagtctaggccaaagcttcaaaggtt

SEQ ID NO: 260690 - DNA, 634 bp, Homo sapiens
ctcttccttttaaaatgccccttccttggtcactactacacttttttaaactaaataaaaactaggcaatatcttcccaaggggagatttatggtcagaaagtttccagagttctatgattataagactctcccatctttttctcaaggttccactgttagtggtgtctatataacacagtgtttagaaaattcaggcaaagtaaaggaacgtgtcttgattggcttcagaaaaactttccttgaattcatttttccttttacttgctgtggtctggaagaaattactgtagtttccttgtacgtgtcagattggaagtgttgctttctctaacattaaatttaaaatctttgtatctgttaagaaaacataaatgaggggtctgttggctaaggaagctgttacagctccaaaactaaccaaaaatattgagcaagccgccttaggaaatgcctgcagttgsgtatcttgatgatgtcatcaccacataaagtctaggccaaagcttcaaaggttagataaaactgatcagaatttggaaggacagactcctaataaccaaagcccaaaaagattgattcaccaacaaaaagaacaattaattaattttgtgtaggaataatgagagaaaggg

SEQ ID NO: 260691 - DNA, 637 bp, Homo sapiens
gataccagataccacttacaaccactataatggctagaataaaaaatttagataataaatgttaggayatgaaggaattgaaaaccttcacactgctagtgggaatgcaaaatagtgtaaaatgttttggaaaatagcctgaaaattccttgaatgattaaactagagttagcaaatgactcagcaattctactcctaggtatattcccaagagaaatgaaaacatatgtacatacacacacacacacacacacacacacacacacacacacacacacacttgcacatgtttatagcagcattgtttatatgagccaaaaaattgaagcaacccaaatgtccatcaacagatgtatagaaaaaaatgaaatattattaaaccctaaaaagaaatgaagtgttgatacacactgcaacacagatgaaccttgaaaatattatgctaagtgaaagaaatcagtcataaaagaccacatattacatgattccattcatatgaaatgtccagaatgggcaaatctacagagacaaaaagtacattagtgtttgcttgtggttggagcaaacgaggagacaggcagatgatatataaagggtacagggtttctttatgaggggtgataaaaatgtactgtga

SEQ ID NO: 260692 - DNA, 637 bp, Homo sapiens
gataccagataccacttacaaccactataatggctagaataaaaaatttagataataaatgttaggacatgaaggaattgaaaaccttcacactgctagtgggaatgcaaaatagtgtaaaatgttttggaaaatagcctgaaaattccytgaatgattaaactagagttagcaaatgactcagcaattctactcctaggtatattcccaagagaaatgaaaacatatgtacatacacacacacacacacacacacacacacacacacacacacacacacttgcacatgtttatagcagcattgtttatatgagccaaaaaattgaagcaacccaaatgtccatcaacagatgtatagaaaaaaatgaaatattattaaaccctaaaaagaaatgaagtgttgatacacactgcaacacagatgaaccttgaaaatattatgctaagtgaaagaaatcagtcataaaagaccacatattacatgattccattcatatgaaatgtccagaatgggcaaatctacagagacaaaaagtacattagtgtttgcttgtggttggagcaaacgaggagacaggcagatgatatataaagggtacagggtttctttatgaggggtgataaaaatgtactgtga

SEQ ID NO: 260693 - DNA, 606 bp, Homo sapiens
tatgcataccatgttatttaactcaacacaactctttactttcattaatcatttgttatctattagtcactgttattcatgaaatagactgaattaaataccactgttgcctacggctaaaccttgaactatttttattttaagctctttctttaagatggaaggatgaaaagaaacttctcaaatgcctcatccacaaaatctcgtctcatgcaatgatatggattgttagtgacacaaatgggtgtacaaaaattctttcgattgcagaaaacctaccccaaactgacttcaaccaacatgactccaaagatataaaagcaaagcttgatttaggacttgtaaaatatcactaagatctagctatgggctccatgtgctttgtagtgcctctatattcaggttgcaataggaaggtcccagcaactgagtactgycacatcatggcagtacccagtccatgaaaatatagtctgctttctggctaatttaaaacaaactccagaatttctgttctggagaacagaacactaatgttctgatgataaaaagtatggaggttactggcaaaagcaacaagtatctattacatcaaaatgctgcaaa

SEQ ID NO: 260694 - DNA, 606 bp, Homo sapiens
tatgcataccatgttatttaactcaacacaactctttactttcattaatcatttgttatctattagtcactgttattcatgaaatagactgaattaaataccactgttgcctacggctaaaccttgaactatttttattttaagctctttctttaagatggaaggatgaaaagaaacttctcaaatgcctcatccacaaaatctcgtctcatgcaatgatatggattgttagtgacacaaatgggtgtacaaaaattctttcgattgcagaaaacctaccccaaactgacttcaaccaacatgactccaaagatataaaagcaaagcttgatttaggacttgtaaaatatcactaagatctagctatgggctccatgtgctttgtagtgcctctatattcaggttgcaataggaaggtcccagcaactgagtactgccacatcatggcagyacccagtccatgaaaatatagtctgctttctggctaatttaaaacaaactccagaatttctgttctggagaacagaacactaatgttctgatgataaaaagtatggaggttactggcaaaagcaacaagtatctattacatcaaaatgctgcaaa

SEQ ID NO: 260695 - DNA, 531 bp, Homo sapiens
gactttggcagtttcttctgaaactaaacatagtcttaccataggatccagcaatcacactcctaagtatttagccaaatgagttgaaaacttgtacccaaacaaaaacctgcacacagatatgtatagcatttattgattgagatggagtctggctctgttgctcaggctggagtgcagtggccgatctcatctcactgcaacctccgcctcccgggttcaagtgattcccctgcctcagcctcccgagtagctgggactacaggcgcctgccaccacgccyggctaatttttgtatttttagtggagacgggttttcaccattttggccagggtggtctcgatctctcgacctcgtgatccgtccgcctcggcctcccaagtgctgagattacaggcatgagccaccatgcctggcccttcataccattttattcataattgctaaaacttgaaagcaaccaagatgtctttcaataagtgaatggataaacaaattgtgatacatccacgcaaggtaatattattcag

SEQ ID NO: 260696 - DNA, 588 bp, Homo sapiens
taactactaatgaaagtttgtgaagatgttaaaatcaacaaattcatcacccttatcttaagaatatttttccctttgctaatgttgacatctttacttaattcttgtatttctctctttccttttattgccaaaaattttaaataaatgagctatattcagttcttcagtagcaatactttattattgcacatgtattttaatggccycttatttgtcaaattcaaaggttttcatctattctcatttttcttcacactttttgacttctcattcatattcaccataaatttttcttgaaagcttctttatccccagatttcaaaatacaggattcttctcaattctgcctctctatgttggtaataactcctgaattgatataacaccctccttgcactctctgatcgctgtgttgtgagtatgcaagtatgaataagacaggtttctggggacctcccagtctagtgaaatgcaagagcatctggcctatctgctgtaagaggcataagcaaagcactaagggggtactgatgctggcctaataaatatgcggggggaggcggcaatgggaacagtgaacagcaa

SEQ ID NO: 260697 - DNA, 626 bp, Homo sapiens
ttttaatggccccttatttgtcaaattcaaaggttttcatctattctcatttttcttcacactttttgacttctcattcatattcaccataaatttttcttgaaagcttctttatccccagatttcaaaatacaggattcttctcaattctgcctctctatgttggtaataactcctgaattgatataacaccctccttgcactctctgatcgctgtgttgtgagtatgcaagtatgaataagacaggtttctggggacctcccagtctagtgaaatgcaagagcatctggcctatctgctgtaagaggcataagcaaagcactaagggggtactgatgctggcctaataaatatgyggggggaggcggcaatgggaacagtgaacagcaaatggaaaagtgtggtaataacaacctgtgatatgtcagaaactgggtgaaaaatttatcaaggctagagcttaaaggtagataaaaagttgaagatcaggagagctgaaaagaagactgaggactgagttgtaaaggattttattcattatgcaaatatatttgccctttaatgaacacagtcagtgctcaataagtattgggtaaaagaatcaataaatcatttgactaactag

SEQ ID NO: 260698 - DNA, 589 bp, Homo sapiens
accataattctattcccagaaatttgtcctggacatatactactacacaggtaaaattgcatatgcacatgattagtcagcgtgacattatttataataggaaaataaagaaaacaccctaaatttccatcaataaatcaaagaaattatggtatgttcataaaatggaatattttgcaattgccaaaaataaaaaagaacaaggaaatactttatgcatggattaatatggattaatatggaaataattttaaggtacaaaagagcatatcatataagctagaagaatgggacagaaaattcattccagtgctattgggtaaaaactagcagtgaaagagggcatccttgtcatgctccagatcttagaggaaaggcctttagtttctcccccttcagtttgatactaaatgtgggtctgttctgtatggcttttattatgtttaggtatgtttcttctatacccactttttgatagttttgtaatgaaggaatgttgaattttattaaatagtttttcagcatcaatttaaatgatcatacggtttttgtcctgcattctgttwatatgatgtatcacactgattga

SEQ ID NO: 260699 - DNA, 480 bp, Homo sapiens
tgctctttttgggttccatttgtttaaaatatctttttccattcctttattttcagtttatgtgtatctttagagatgaagtgtgtttcttgcaggcaaaagatcatgggattttgtttttatatccattcagccaatctgtatcttttgattagayagtttagcccattgttgattataatttaatattattattgataaagaagtacatactgttgccattttgctattcattttctggttgttttgtagtcttatcttctttctttccttccttcctgtcttccttttagtgaaggtgattttctctggtggtatgttttaatttcttactttttatgttttagtatctgttgcttgctttttgattagcagtgatcatgagacttgggaatactatattatcacccattatttctaaactgacagcagcttaacactgtttacataaaaaacaaacaagcaaaaagacaataaact

SEQ ID NO: 260700 - DNA, 607 bp, Homo sapiens
tacttactattgattaggctattttacatctcacaaagggtagatgtcagcatgtctaatattgatagcaatgctaataatttttctcctgcagacatgcaattggtgtctgaaacccaccattacgcctcctttttcttctctttcttcttctgtcatataagacattatttagtcttgtgtatgatttacaaccactcttttattcagtcactataaatagttttgtttcttctatactttgttggaaacagcttcaccctcctggttcactaaagtgttaaatagattttgggcatgtgtgcttatttttacattaaagtcaccttttaacctttgaaaaccatactttgacatcacggtaggattcaaacaacagtgggactcagagagtctgtagacacataattctctgtttatgtagttcactaaaaaaatgagatgtttttctcccaaaaatttttccaacattgctgttcttttgatrctctaaagagcactaaaataatttgtattactacccattttacaaaattaatttcatgtagaatccagatattactattataatccctgttataaacaactaatgctgatttatgcactg

SEQ ID NO: 260701 - DNA, 563 bp, Homo sapiens
ttcagctcttatacaacagcaacaataaacaatggcatcctttcagtctctacctacaatgctgtgttttgattaaaaggttactttaaattgcattttttaaattaattaatttattttttgtaggtaagaagaaatgtcagaagcagttgagggaccagaaactgggtcctttacagttgaggagacattctgctgcatagagttttaaatgtttcctccagttgtctgccttattatccaggatttttatctcaggagtctccctttgattttataaactgacacagtttcctgttttgttatgaatgcacactgctctagtccttcaataaacccatcgcacattttcaccatgttgtctataggcactctttctgcagtattaacaatgtcatcttcattgtcactagtgtcataatcaccttgattcaggaccatttcagctacctcaccagtcaatgaaggaacaaccggagctttattattgatgttaaaaactttgttatccscttcttccagcttactaacactttgaaggtaagttttttgcatatgtaagt

SEQ ID NO: 260702 - DNA, 553 bp, Homo sapiens
tatctgtgggcccttttgatgttttcaacaatatctttacaccacagaacaaagaatatgcaaacaaaatgaacaaaaatccacagagaaatgctcataggtctttgccccatgtgggtcatcatggtgatataatttcagtattttcccctccaactctcaagttgaaatgtgattcccaatattggaggtgggggtctggtaggaagtgattgaatcacggggacaaatcccttatgaayggtttagcattatctgcttggtgatgagagttcttgctcagttagttcacataagacctggtcgtttaaaagtctgggacctcccacttctctctctctctcttgctctctctctcaccatgtgatgtgtctgttcccacttcatctgttaccatgagtaaaagcttcctaacgcctcatcagaagctgagcagatgctggtgccactcttgtacagcctgcagaatatgagccaattaaacctcttctttataaattacccagtctcaggtatttctttacagtgattcaggaacagagtaacacagtgg

SEQ ID NO: 260703 - DNA, 635 bp, Homo sapiens
tccactatcagtatcccacagtgtactggtacctgtttttacaattgatgaacctacactgacatgtcattattattcaaagtccatagttttcattagggctcattcttgatgtatagttcatgggctttgacaaatgtataataacatgcatttacctttatagtatcacacagaatagttttaatgacttaaaaattgtctatgctttgcctacttatttattcctccccaacaacctctggcaaccactgatcttttcattgactctataggtttsccttttccagaatgtcatatagttagaattataaagtatgtagcctttttcagactggcttccttcacttagtaacatgcatttaagattgctttcatgtcttttcatgttttgatagctcatttattttcagtgctaaatagttttccaatttctggatgtgccaccgttcatttacctgttaatttactaactggcattttggttattttcaagttttggcaataacgaataaagctgctataaatattcatgtacaagtttttgtgtgggtatgaattttcaacttatttgattaaataacaatgggtccaattgctggattgtatggtaagttttgtaagaaagagctgaa

SEQ ID NO: 260704 - DNA, 635 bp, Homo sapiens
tccactatcagtatcccacagtgtactggtacctgtttttacaattgatgaacctacactgacatgtcattattattcaaagtccatagttttcattagggctcattcttgatgtatagttcatgggctttgacaaatgtataataacatgcatttacctttatagtatcacacagaatagttttaatgacttaaaaattgtctatgctttgcctacttatttattcctccccaacaacctctggcaaccactgatcttttcattgactctataggtttgccttttccagaatgtcatatagttagaaytataaagtatgtagcctttttcagactggcttccttcacttagtaacatgcatttaagattgctttcatgtcttttcatgttttgatagctcatttattttcagtgctaaatagttttccaatttctggatgtgccaccgttcatttacctgttaatttactaactggcattttggttattttcaagttttggcaataacgaataaagctgctataaatattcatgtacaagtttttgtgtgggtatgaattttcaacttatttgattaaataacaatgggtccaattgctggattgtatggtaagttttgtaagaaagagctgaa

SEQ ID NO: 260705 - DNA, 581 bp, Homo sapiens
agacaaagttttctaaaaagtggtcctcttgaaacgttttcccactaaaacagaagggctgtggttttacacccaccagggaggaaagagcagctagggacactctgctggttcctgaaagaaagtctgcggatctcagggtttcctttgtctcattgtgatcacacacacattgctaatggcctgaggcactcatacatttcagggagctctccagccttctcttgaactaattccttccagagcctctgttcaagtgtgactcatcactctgcaaagccactgcctcccagcacgcctcctgccaaatgtggagggcatgtctttcccactggattcctgccatttctttcgtacatttgacgtaatcccctttcccattgtttttgtgcatttgattgtgcaaaattgcaggcaaaaaaggaaagcagaaactgaaagcctgcaaaatgactgttctgagatgcctttagtaatctggggtattctttggccatgaagatctccactagtttgaatagrgaggtttagttgagttctgtttatttttgtgtttgtttgcttttggtggggacagtggg

SEQ ID NO: 260706 - DNA, 611 bp, Homo sapiens
gaatgctaaaaacataatttagtatttttaaaatactttatacatttgaatttatattttaaaaaaactcagtcttgtttagaaagttgaagaagtcttggcttaatgactatttttttaagtcagttaatagggaagcaactggaacacactacaaacatctggtggtaatcaaataaatgtacctttttaaaatacttgtacccatagctctgagggattttgttgttcatcagcggaaacccttttttaacaactacatttgattccccacaatcattcatgctcgcaaacatccaaaccaaatgtgaataaatattttcatcctgtattagcaatattataaaggcctcggcgtgataatgaagtgagaaacatttactggcataccagrgtggtgtaaaaatagtagtaacctttgacaacaaaaagcttagtcaattcccagtgacagttgctttctgcatcaaagataaaatcaacattaccttagaaatcataagatgctacaacctaaaatggtatttaccttgaaacgtataaaacagaaagcacttttagtgagaagaatttaatcatttttgcatgcatcatggcataatatttgaaac

SEQ ID NO: 260707 - DNA, 612 bp, Homo sapiens
gaaaatgctgaagccataaacttaaacagtattattttctagggtccctgtaacaaattaccacaaactcagaggcttaaaacaatagggatttattctcccaccaaaagtataaaataaacattcatcaatccatattgatattaacaaatgagtgaataaatgggggcgaatagacaaatctgytcagaattctgaagagtgaatgtagatactgacccctcaaggagatggagcataaccaactccccagtccttaagtgtgggctgctcagagtggtttttttccaaagagtagagtataaaaaagagaaaaaaagagtaaatctgcagaggagaaaccaaacaaacactacctctgccaggtgataaggggagtatcaacagtgatagctcatgctgttagtatgttccctggatatagtgcggtgagaatcacattttacctctgtggttcctccaggaacacatcactccagtctaatcatgagaaaaataccaaaaaattccaattgaggaacattttacaaactacgtgaccagtactcctcaaaactgtcaaggacattaaaaataaagaaagtctgagaaactttaatagccaaacagacc

SEQ ID NO: 260708 - DNA, 568 bp, Homo sapiens
gtagggtggcttagttgtcttgggcaaaagctatataatggtaccacaaaaacagttacatggtggagttccaattacacagaaagaaatccattcagtaaatttccaaagttgcagactgtttgggcccacccagaattccactgggactggaacggcccccaccaggttatactggatatgtggacacagagcttatgctaagctgcctgatcagtggacaggtagctgcgtaattggcrccattaaaccatctttcttcttactgcctataaaaacaggtaaacttctggcttcccagtctatgcttcctgcgaaaagcgaagcatagccttaggtgattggaaagatgatgaatggccccctgaaaaaatcatataatactatggacctgccacttgggcacaagatggctcatggggatatcgaacctccatctacatgctcagctgaatcatatggttccaagctgttttaaaaactattactaataaaaccggtcaagccttaactgttctcttgccaggcaagagactctgatgagaaatgctatctgtcaaaatagact

SEQ ID NO: 260709 - DNA, 568 bp, Homo sapiens
gtagggtggcttagttgtcttgggcaaaagctatataatggtaccacaaaaacagttacatggtggagttccaattacacagaaagaaatccattcagtaaatttccaaagttgcagactgtttgggcccacccagaattccactgggactggaacggcccccaccaggttatactggatatgtggacacagagcttatgctaagctgcctgatcagtggacaggtagctgcgtaattggcgccattaaaccatctttcttcttactgcctataaaaacaggtaaacttctggcttcccagtctatgcttcctgcgaaaarcgaagcatagccttaggtgattggaaagatgatgaatggccccctgaaaaaatcatataatactatggacctgccacttgggcacaagatggctcatggggatatcgaacctccatctacatgctcagctgaatcatatggttccaagctgttttaaaaactattactaataaaaccggtcaagccttaactgttctcttgccaggcaagagactctgatgagaaatgctatctgtcaaaatagact

SEQ ID NO: 260710 - DNA, 568 bp, Homo sapiens
gtagggtggcttagttgtcttgggcaaaagctatataatggtaccacaaaaacagttacatggtggagttccaattacacagaaagaaatccattcagtaaatttccaaagttgcagactgtttgggcccacccagaattccactgggactggaacggcccccaccaggttatactggatatgtggacacagagcttatgctaagctgcctgatcagtggacaggtagctgcgtaattggcgccattaaaccatctttcttcttactgcctataaaaacaggtaaacttctggcttcccagtctatgcttcctgcgaaaagcgaagcatagccttaggtgattggaaagatgatgaatggccccctgaaaaaatcatataatactatggacctgccacttgggcacaagatggctcatggggatatcgaacctccatctacatgctcagctgaatcatatggttccaagctgttttaaaaactattactaataaaaccggtcaagccttractgttctcttgccaggcaagagactctgatgagaaatgctatctgtcaaaatagact

SEQ ID NO: 260711 - DNA, 576 bp, Homo sapiens
gaaattgtgcattcagggagctcggattttgagacagtagcttgccgatgctcccagctgaatgaagcccttccttctacaactcagtgtctgagaggttttgtctgtggctygtcctgctacagtaccatcatttgggtactttttaggtaaagatggtttgtgagtggctttatgttgcatgctgactacaatgagatttttaaatttttttagggcagtgggaacataaaaatgaattttaactatgattactaagggatttaagtaggagcatgagtgacactgtcatacatatggctggcagcaggcaaacacttcttaggtatgaatcagaaaaaagagagggaagaaagccagtgagggcagggtgagccatctgatatatcagtgcacagaaacgtcctgaggtctttacatcaggaagtcaagctagaaatagggagacctgggtattagtcagggttttctagagggacagaactaataggatagatgtatatatgaaggggagtttattaggagaattgacttacacgatcacaaggtgaaaccccacaataggtcatctgtaag
